United States Patent Application Publication US 2024/0327476 A1 - sequence listing, part 105

SEQ ID NO: 201389 - DNA, 1146 bp, synthetic construct
  misc_feature 1..1146: note = Description of Artificial Sequence: Synthetic coding sequence
  source 1..1146: mol_type = other DNA
atggccagcccccccgcctgccccagcgaggaggacgagagcctgaagggttgtgagctgtatgtccagttgcacggcatccagcaggtcctgaaggactgtatagtgcacttatgcatatcaaaacctgaaagaccgatgaaatttttacgcgagcacttcgaaaaactcgagaaggaagaaaatagacagatcctggcacggcagaaaagtaattcacagtccgatagtcatgatgaggaggtatccccaacacccccgaaccctgtggtgaaggcacgacggaggagaggcggcgtttctgctgaagtctataccgaggaagatgccgtcagctatgtccgcaaagtcattcccaaggactacaaaacaatgactgccttagcaaaggcaatttccaaaaacgttctgtttgcacaccttgacgacaacgaacgttccgatatatttgacgctatgttccccgtgacacacattgccggggagaccgtcattcagcagggcaatgaaggcgacaatttttacgtggtggatcagggggaggtggacgtgtatgtgaatggtgagtgggtaactaacatttctgagggtggtagcttcggagagctcgcactgatttatggtacacctcgagcggctacagttaaggccaagacagatctcaagctctggggaattgatagggattcctataggaggatcctgatgggtagtacattgcggaagcgtaagatgtacgaggaattcctctccaaagtcagcatccttgaaagcctcgagaaatgggagcggctaacagtggctgatgctctggagccagtgcagtttgaggatggagagaaaattgtcgtgcaaggcgaacccggcgacgacttctacattattaccgaaggaacagcatccgtgctgcagcggcggtcaccaaacgaagaatatgtcgaggtggggcgtctgggcccaagcgattatttcggggagatcgcactgctactgaaccgccctagagcagccacagtggtggcccggggcccattaaagtgcgtgaaactggatcgccctcggttcgagcgtgtgctcggcccttgcagcgaaatcttaaagagaaatatccagaggtataattcgtttatcagtcttacggtatag

SEQ ID NO: 201390 - DNA, 1146 bp, synthetic construct
  misc_feature 1..1146: note = Description of Artificial Sequence: Synthetic coding sequence
  source 1..1146: mol_type = other DNA
atggccagcccccccgcctgccccagcgaggaggacgagagcctgaaggggtgcgagctgtacgtgcagctccatgggatccagcaggtgctgaaagattgcatcgtgcacctgtgcattagcaaacccgagcgtcccatgaagtttctgagggaacatttcgagaagctggagaaagaggaaaataggcagatcctcgctagacagaagtccaactctcagtccgacagccacgatgaggaggtgtcccctaccccaccgaatcccgttgtgaaggctcgccggcgaaggggcggagtgtccgctgaggtctacactgaggaagatgcagtcagctatgtgcgtaaagttattccaaaggactataagaccatgaccgccctcgctaaggccattagcaagaatgtgctttttgcgcacttggatgataacgaaaggagcgacatctttgacgctatgtttcctgtcactcatattgcaggagagacagtaattcaacaaggtaacgagggcgataacttctatgtagtagaccagggtgaggtagacgtctatgtgaacggggaatgggtgactaacattagcgagggtgggagcttcggtgagctggccttgatttatggcaccccccgggctgctaccgtgaaggcaaaaactgatctcaaactgtggggcattgacagggatagctatcgtcgaatcttaatgggatctactctgcggaagcgaaaaatgtacgaggagtttctgtccaaggtgtcaatcctggaaagcctggagaagtgggaaaggttgaccgttgccgacgcactggaacccgtgcagttcgaggacggcgagaagattgttgttcagggcgaaccgggtgacgatttttatataattactgaagggacagcctcggtcctgcagcgccgaagccccaacgaggagtacgtggaggtcggcaggctgggaccgtcggactacttcggagaaattgccttacttctcaaccgacctcgagcggccacggtggtagcccgggggccgctaaagtgcgtgaagcttgatcgtccccgttttgagcgagtgctgggaccctgcagtgagatccttaagcggaacattcagcgatacaacagttttatcagtctgactgtatag

SEQ ID NO: 201391 - DNA, 1215 bp, synthetic construct
  misc_feature 1..1215: note = Description of Artificial Sequence: Synthetic coding sequence
  source 1..1215: mol_type = other DNA
atgagccacatccagatcccccccggcctgaccgagctgctgcaggggtatacagtggaagtcctaagacagcagccacctgacctcgttgaatttgcggtagaatactttactagactgcgggaagctcgggctcctgcctctgtgctccccgccgccactcctcggcagtctttaggacaccctccccccgagcctggacccgatcgagtggccgatgcaaagggcgactctgaaagcgaagaggacgaggatttggaggtgcccgtgcccagcagatttaaccgcagagtcagtgtgtgcgccgagacctataaccctgatgaggaagaagaggacactgaccctcgggttatccaccccaagactgacgaacagaggtgccgtcttcaagaggcctgcaaagacattctgttgttcaagaacctggatcaagaacagttgtcccaggttttggacgccatgttcgaacgtattgttaaggcagatgagcacgtcatagaccagggcgatgacggggacaatttttacgtaatcgaaagaggcacttacgacattctggtcaccaaagataatcagacccgtagcgtcggacagtacgataaccgaggtagcttcggagaactggcattaatgtacaacacacctagagccgcaaccatcgtcgctacttctgaaggcagtctctggggcctggatagggtcaccttccgtcgcataatcgttaaaaataatgcgaagaagcgaaaaatgtttgaatcctttattgagtctgtgcccctcctgaagagtttggaagtgtctgagcgtatgaagatcgtagatgtcatcggcgaaaagatttacaaggacggggagcgcataatcacgcaaggggaaaaggccgatagcttttacatcattgagtctggagaggttagtatcctgattagatctcggactaagtcaaacaaggatggagggaaccaggaagtcgagattgcgcgttgccacaagggccagtacttcggcgagttggccctggtgaccaacaagcccagagcagcgtccgcatacgccgtcggcgacgtgaagtgcttggtgatggacgtccaggcgtttgaaaggctgttgggcccctgtatggacatcatgaaacggaacataagtcattacgaagaacagctcgtgaaaatgttcggctcctccgtggacctaggcaacctggggcagtag

SEQ ID NO: 201392 - DNA, 1149 bp, synthetic construct
  misc_feature 1..1149: note = Description of Artificial Sequence: Synthetic coding sequence
  source 1..1149: mol_type = other DNA
atgagccacatccagatcccccccggcctgaccgagctgctgcagggttacacagtcgaagtgctgagacagcagccacctgaccttgtggagttcgccgtggagtatttcactagactacgcgaggcccgggcccccgccagcgtgttgcccgctgccactccaaggcagtctctgggccaccccccgcccgagccggggcccgaccgcgtagctgatgctaagggcgacagcgaaagtgaggaagatgaagacctggaggttccagtcccctctcggtttaaccgccgtgtatccgtctgcgctgagacatacaatccggatgaggaggaagaggacaccgacccaagggttattcaccctaaaaccgacgaacagcgctgcaggctccaggaggcctgcaaagacatcctcctctttaagaacctcgatcaggagcagttgagccaagtgctggatgcaatgtttgaaaggatcgttaaggccgacgagcatgtgatcgatcagggagacgatggtgataacttttacgtcatcgaaagggggacttacgatatactggttaccaaagacaatcaaacacgttcagtaggccagtatgacaatcgcggatctttcggcgagctggccttaatgtacaatactccccgcgcagcgacgattgtggcaacgtccgagggatcactctggggcctggaccgcgttacctttagaagaatcatagtaaagaacaatgccaagaagcggaagatgtttgaaagctttatcgaatccgttcctttgttgaagtcgcttgaggtttccgagaggatgaaaatagtagatgtgatcggggagaagatttacaaggatggtgagagaatcatcactcagacaaaatccaataaggatggcgggaaccaggaggtggagatagcaaggtgtcataaaggccagtatttcggggaactagccctcgtcactaacaagccccgggctgccagtgcttatgccgttggggatgtgaagtgcttggttatggatgtgcaggcatttgaacggctcctgggcccttgtatggatattatgaaacgtaatatcagccattatgaagaacagttagttaaaatgtttggttcctcggtggatctgggcaacttggggcagtag

SEQ ID NO: 201393 - DNA, 1215 bp, synthetic construct
  misc_feature 1..1215: note = Description of Artificial Sequence: Synthetic coding sequence
  source 1..1215: mol_type = other DNA
atgagccacatccagatcccccccggcctgaccgagctgctgcaggggtacaccgtagaagtgctccgtcaacagccgcccgacctggtggaattcgccgttgagtactttaccaggctgagagaagctcgcgccccagccagtgtcctgcctgcggcaacccctcgacagtccctcgggcaccctccgcctgagccgggaccagacagagttgcagatgcgaaaggtgatagcgagagcgaagaggacgaggatctggaagtgcccgtacccagccgttttaataggcgagtctcagtgtgcgcagaaacatacaatccagatgaggaggaggaagacacggatcctagagtgatccatcctaagactgatgaacaacgctgcagattgcaggaagcatgcaaggatatcctgctcttcaagaatttggaccaggaacaattgagtcaagtgttggatgcaatgttcgagagaatcgtgaaggccgacgagcatgtgattgaccagggagatgatggggacaacttttacgtcattgagagaggtacctatgacatactggtcactaaagataatcagacgcgcagcgtcgggcaatatgataatcgcgggagcttcggcgaattagccctaatgtacaatacacctagggctgctactattgttgccacatcagagggctcgctctggggcctagatcgtgtaacatttcgccgcatcatcgtgaagaataacgctaaaaagcgaaaaatgttcgagtccttcattgaatctgtgcccctcctgaagagtttagaagtgtctgaaaggatgaaaatcgtggacgttattggagaaaaaatttacaaggatggcgagcgcataataacccagggggagaaagccgacagcttctatatcatagaatcgggtgaggtgtccatactgatcagatcccggaccaaatccaacaaggatgggggtaaccaggaagtcgagatcgctagatgtcacaaaggtcagtattttggggaacttgcgctcgtgactaataaaccgcgggccgccagcgcttatgccgtgggggacgttaaatgtctcgtaatggacgtgcaggccttcgaacggctgctgggaccttgcatggatataatgaaaaggaatatctcccactacgaggagcagttagttaagatgtttgggtcttccgtagatctggggaaccttggacagtag

SEQ ID NO: 201394 - DNA, 1257 bp, synthetic construct
  misc_feature 1..1257: note = Description of Artificial Sequence: Synthetic coding sequence
  source 1..1257: mol_type = other DNA
atgagcatcgagatccccgccggcctgaccgagctgctgcagggcttcacggttgaagtcttgaggcaccagccggcggatctactagagttcgcccttcagcacttcacccgcctgcagcaggagaatgagagaaaggggactgctcggtttgggcacgaggggcggacatggggtgatcttggagcagctgccgggggagggacacctagcaagggagtaaactttgcggaggagccaatgcagtcagactcggaagacggggaagaagaagaagccgcaccagcggatgctggcgcatttaacgcccctgtgataaataggtttacgcgacgtgcaagcgtctgtgcagaggcttataaccccgatgaggaagaagacgacgcagagtcaaggattattcacccaaaaaccgatgaccaaaggaaccgcctccaggaggcttgtaaagatatccttctgttcaaaaacctggatccggaacaaatgtcgcaggtgctggacgccatgttcgagaagttagtaaaagatggggaacatgtaatcgatcagggcgatgacggagataatttctacgtgatagaccgcgggacctttgacatctacgtaaagtgcgacggagttggccgttgtgtgggcaattacgataaccgggggtcctttggcgaactcgcactgatgtacaacactccaagagccgccaccatcacagccaccagtcctggggctctctgggggttggacagagtcactttcaggcggattattgttaaaaacaacgctaagaagagaaagatgtatgaaagctttatcgagtcactaccctttctgaaatccctggagttctcggagaggttaaaagttgtggacgtcatcgggactaaggtttataatgacggggagcagattatcgctcagggcgattcagccgattctttttttatcgtggagtctggggaggtgaagatcactatgaagcgtaagggcaagtcggaggtggaagaaaatggagctgtcgaaatagcgcgctgtagccgcggccagtattttggggaactggccctggttacaaataaaccccgtgccgctagcgcacacgctataggcacagtgaagtgtttggccatggatgtacaggcttttgagcgtttgctgggcccatgcatggagatcatgaagcgtaatattgccacctatgaggagcagttagtggctctgtttggcactaatatggacattgtggagcctacagcgtag

SEQ ID NO: 201395 - DNA, 1218 bp, synthetic construct
  misc_feature 1..1218: note = Description of Artificial Sequence: Synthetic coding sequence
  source 1..1218: mol_type = other DNA
atgagcatcgagatccccgccggcctgaccgagctgctgcagggcttcacagttgaggtgctcaggcaccagccggcagaccttttggaatttgctctccagcatttcactagactccagcaggaaaacgaacgcaagggaactgcgcggtttgggcatgagggccgtacatggggagacctcggcgccgccgctgggggcgggacgcctagcaaaggggttaactttgcagaagaggcagcacctgcggatgccggggcgttcaacgccccagtgatcaacaggtttacccggcgtgcttccgtttgtgcggaggcatacaatccggacgaggaggaggatgacgccgagtcaagaattatccaccccaaaactgacgaccaacggaaccgacttcaagaggcctgcaaagacattctcttgttcaagaacctcgatccagagcaaatgtctcaggtgctggacgctatgtttgagaaactggtcaaggacggcgagcatgtgattgaccaaggcgacgatggggataacttttacgtgatcgatcgcggaacgttcgacatttatgtgaagtgcgacggagtaggacgctgcgtaggaaattatgataatagggggagttttggcgagttggccttaatgtacaacaccccacgagcagcaaccatcacggcgacaagccccggggcactttggggactggatagggtcaccttcagaaggataatcgtaaaaaacaatgctaagaaacgtaaaatgtatgaatcctttatcgaaagcctcccctttcttaagagccttgaattcagtgaacgcctgaaagtcgtggacgtcatcggaaccaaggtctataacgatggagagcaaattatcgcccagggtgacagtgcagactctttctttattgttgagagtggggaagtcaaaattactatgaagcgcaagggaaagagcgaagtcgaagaaaatggagcagttgaaattgcgcgctgctcccgagggcagtatttcggcgagctcgccttggttaccaataagcctagagccgcctctgctcatgctataggcactgttaagtgccttgccatggacgtacaggcgtttgaaaggctccttgggccctgcatggagataatgaaaagaaatatcgccacgtatgaagagcagcttgtcgcgttattcgggactaacatggacatagtggaaccgaccgcctag

SEQ ID NO: 201396 - DNA, 1257 bp, synthetic construct
  misc_feature 1..1257: note = Description of Artificial Sequence: Synthetic coding sequence
  source 1..1257: mol_type = other DNA
atgagcatcgagatccccgccggcctgaccgagctgctgcagggcttcaccgtggaggtcctgcgccatcagccagcagacctcctcgagtttgccctgcagcatttcacgcgactgcagcaggagaatgagaggaagggtacagcaagattcgggcacgagggccgcacatggggggacttgggcgctgctgccggcggcggtacaccatctaagggagtaaattttgctgaggaaccaatgcagtcagactccgaagatggtgaagaagaagaagcggcccctgccgatgctggtgccttcaacgcacctgtcatcaacaggttcacgagaagggcaagcgtgtgcgcagaagcatacaaccctgacgaggaggaggacgacgctgaatcgaggatcattcaccctaaaaccgacgatcagcggaaccgactccaggaggcctgtaaggacatactgctgttcaagaatctggaccccgagcaaatgtctcaagtgctagacgcaatgttcgagaagttagttaaggacggagaacatgtgatagatcagggcgacgatggggacaacttctatgtcatagatcgaggaaccttcgacatttatgttaagtgcgatggagtgggaagatgcgtggggaattacgacaaccgaggcagttttggcgaacttgccctgatgtacaatactccaagagctgcgacgataaccgccacttcccctggtgccctgtggggcctggatcgcgtgacgttccgcagaattatagtgaagaacaatgccaagaagcggaagatgtatgagagctttatagagagcttaccctttttgaagtctctagaattttccgaacgcctcaaagtggtggatgtgattggcactaaagtgtacaatgatggcgagcagataatagcacagggggattccgccgatagcttctttattgtggagagcggtgaggtaaaaataactatgaaacggaaaggaaaatctgaggtcgaggagaacggggctgttgaaatcgcccggtgtagccgtggccaatactttggagagctggccctagttaccaacaaaccaagggctgcatctgcccacgccattggtacagtaaaatgccttgccatggacgtgcaggcttttgagcgtcttctgggcccttgcatggaaatcatgaagaggaatattgcaacttacgaagagcagctggtggcactgtttggaactaacatggacattgtggaaccgactgcatag

SEQ ID NO: 201397 - DNA, 1170 bp, synthetic construct
  misc_feature 1..1170: note = Description of Artificial Sequence: Synthetic coding sequence
  source 1..1170: mol_type = other DNA
atggagaagcagaacatgttcctgcacggcagctacatcctgcgggaagatgttcggaccgcaaatgtcatagcagcagaagctgtcacatgtctcgttatagaccgggactcttttaagcacctgattggcggcctcgacgatgtctctaataaagcttatgaggatgcagaggcaaaagccaagtacgaggccgaggctgcttttttcgccaatctgaaattaagcgacttcaatattattgatacgttaggagtaggggggttcgggagggtggagctagtccagctgaagagcgaagagtctaagactttcgccatgaagatacttaaaaagagacatatcgtagacaccaggcagcaggaacacatcagaagcgaaaagcagattatgcaaggggcacattccgatttcatcgtcaggctgtaccgaaccttcaaagactccaaatacttatacatgcttatggaagcttgcctggggggcgaactgtggaccattctccgggatcgtgggtcttttgaagattcaaccacccgcttctataccgcatgtgtagtcgaagcctttgcgtatttacacagcaaaggaatcatctaccgggatctgaagccagagaacctgatcctggaccaccgtggatacgcaaagctggttgatttcggattcgccaagaagataggattcgggaagaaaacttggaccttctgcggcacccccgaatacgtcgcccccgagataatcctgaacaagggccacgacatttcagctgactactggagccttggaatcttgatgtacgagttacttaccggatcacctcccttttcagggcccgatcctatgaaaacgtacaatatcatcctacgcgggattgacatgatcgagttccctaagaaaattgccaaaaacgccgccaatttaatcaagaagctgtgccgtgacaacccaagtgagcggttaggaaatctcaagaacggagtaaaggatatccagaagcataagtggttcgagggattcaattgggaagggctcaggaaaggcactttaaccccccccattattcctagtgtggcaagccctaccgataccagcaattttgatagttttcccgaggataacgacgaaccaccccctgatgacaatagcggatgggacattgacttttag

SEQ ID NO: 201398 - DNA, 852 bp, synthetic construct
  misc_feature 1..852: note = Description of Artificial Sequence: Synthetic coding sequence
  source 1..852: mol_type = other DNA
atgaagatcctgaagaagcggcacatcgtggacacccggcagcaggagcatattaggagcgaaaaacaaatcatgcagggagcgcattctgatttcatcgttcgattgtatagaacattcaaggactccaagtacctgtatatgttgatggaagcttgcctgggaggagagttgtggacaatcctgcgggatcgagggagctttgaagattctaccacacgcttttacaccgcctgtgttgtggaggctttcgcctatttgcatagcaaaggtatcatttacagagacttaaagcctgaaaacctcatacttgaccatagaggttacgctaaattggtggattttggttttgcaaagaaaataggatttggcaaaaaaacttggaccttctgtggtaccccggagtacgtggccccagagataattttgaataaaggccatgacatttcagcagactattggtctttgggaatcttgatgtatgagttactcactgggtctccaccgttttccggtccagatccaatgaagacctacaacatcattctaagaggaatcgatatgatcgaattccccaaaaagatcgctaagaatgctgctaatctcatcaaaaaattatgcagagataacccaagcgagcggcttggaaacctgaaaaacggcgttaaagacattcagaaacacaagtggttcgaaggatttaactgggaggggttgcgcaaaggcaccctgaccccacccattattccgtctgtggcctcgccgaccgataccagtaacttcgatagcttccccgaggacaatgatgagcccccgcctgatgataacagtggctgggacatcgatttctag

SEQ ID NO: 201399 - DNA, 546 bp, synthetic construct
  misc_feature 1..546: note = Description of Artificial Sequence: Synthetic coding sequence
  source 1..546: mol_type = other DNA
agctgcatcatcaaggagggcgacgtgggcagcctggtgtacgtgatggaagacggtaaggtcgaagttacaaaggaaggggtcaaactgtgcactatgggaccaggcaaggtgtttggggagctggcgattctgtacaactgcactagaacggcgaccgtgaaaacacttgtgaacgtgaaactatgggctatcgatcggcagtgcttccaaacgattatgatgaggacagggcttatcaagcacactgagtatatggagttcctcaagtctgtgccaacatttcagagtctgcccgaagagattctttccaagctggctgatgtgttagaggagactcactatgaaaacggagaatatatcatccgtcagggagctagaggtgatacgtttttcatcatatctaagggaactgttaacgtcacaagggaagacagcccgagtgaggatcctgtctttttgcggactctggggaaaggcgattggttcggcgagaaggcactgcaggggtggacctggaatctattcgaatacgtggtggagtag

SEQ ID NO: 201400 - DNA, 2061 bp, synthetic construct
  misc_feature 1..2061: note = Description of Artificial Sequence: Synthetic coding sequence
  source 1..2061: mol_type = other DNA
atgggcaccctgcgggacctgcagtacgccctgcaggagaagatcgaggagttgaggcagcgagatgccctgattgacgagctggagctggaacttgatcaaaaagatgaactgatacagaagctccaaaatgagctagataaataccggtccgtgattagacccgcaacccagcaggcccagaagcagagcgcaagcaccctgcagggagagcctagaactaagagacaggcgatttccgctgaaccaacggcatttgacattcaagatctctctcatgtgacactgccattctaccccaagagtccacagtctaaggacctcatcaaagaagcgattctcgacaacgattttatgaaaaacttagagctttcgcagattcaagaaatcgttgattgcatgtaccccgtcgaatacggcaaagactcctgcataatcaaagagggtgacgtcggttctctagtgtacgttatggaggacgggaaagtagaggtcacaaaggaaggagtaaaactatgcaccatggggccgggtaaagtatttggcgagctggcgatactgtataactgcaccagaaccgccaccgttaagaccctggtcaatgtcaaactgtgggccatagataggcaatgttttcaaacaattatgatgcggactggcctaattaaacacacagagtacatggagtttcttaagtcagtccccacatttcagagcctccctgaggaaatcctaagcaaattagccgacgtcctggaggagacccattatgaaaacggtgagtacataatacgccagggagctagaggagatacattttttataatttccaagggaaccgtgaacgtcactcgtgaggacagcccctccgaagatccggtgttcttgcgcacactgggcaaaggcgattggtttggggagaaagcactgcagggggaggatgtacgcaccgccaatgtaatcgcagcggaggcggtaacttgcctggttatcgatcgcgactcattcaagcacttgatcggcggattagacgacgtgtcaaacaaggcttacgaggacgccgaagctaaagctaaatatgaggcggaggcggcctttttcgccaacctgaaactgtccgacttcaatataatagacacactgggcgtcgggggtttcggccgggtcgaactggtccagcttaaatctgaggagtcaaaaacattcgccatgaaaattttgaaaaagcggcacatcgttgatactcgtcaacaggagcatatccggtcggagaagcagatcatgcagggggcacattccgatttcatcgtgaggttgtatcggacgttcaaagatagcaagtacctgtatatgctgatggaggcctgcctgggaggagaactgtggacgatactgagggatcgcgggtctttcgaggatagtacaacccggttttacaccgcctgcgttgttgaagcttttgcctacctacacagcaaggggatcatttacagagacctgaaacctgaaaatctaatcctggatcatcggggctatgcgaagctcgtggatttcgggtttgctaaaaaaatcggctttggcaaaaagacttggaccttctgtggtactccagagtatgttgcccccgaaataatactcaacaagggccacgatatttctgctgactattggtcattgggcattttaatgtatgagctactaacaggatctccccctttctccggtccagacccgatgaaaacatataatatcattctgagaggaattgatatgatcgaatttccaaaaaaaatagcgaagaatgccgctaacttgattaaaaaactgtgccgagataatcctagtgagagactgggaaacttgaagaacggcgtgaaggacatccagaagcacaaatggtttgagggcttcaattgggaaggcctcagaaaaggcacactgacaccacctattataccatctgtggcaagccccaccgatacgagcaatttcgattctttccccgaggacaacgacgagcccccccccgatgataacagcggctgggacatagatttttag

SEQ ID NO: 201401 - DNA, 1980 bp, synthetic construct
  misc_feature 1..1980: note = Description of Artificial Sequence: Synthetic coding sequence
  source 1..1980: mol_type = other DNA
atgctgaaggaggagcggatcaaggagctggagaagcggctgagcgaaaaggaagaggaaatacaggagctgaagcgaaaactgcacaaatgccagagcgtcctcccagtaccctcaactcacatagggccccggaccacaagggcccagggaatctctgccgaaccccagacatacagaagtttccacgacctgcggcaggctttccggaagttcaccaaaagcgaaagaagcaaagatctgatcaaggaggccatcctggacaacgatttcatgaaaaacctggagctgtctcaaattcaagaaattgttgactgcatgtatcctgttgagtacggtaaggattcttgtatcataaaagagggcgatgttggttcgcttgtgtacgtaatggaagacggcaaagtggaagtaaccaaggagggtgtgaaactctgcacaatgggccctggtaaggtgtttggagaacttgctattctgtacaattgcactcgcaccgccacagtaaaaactttggtgaatgtgaaactgtgggccatcgatcgtcagtgttttcaaacaatcatgatgcgcaccgggctgatcaaacacacagaatacatggagttcttgaagagtgtacctaccttccagagcctaccagaagagatcctaagtaagcttgcagatgtgctggaggagactcattatgagaacggcgagtacattatccgccagggtgcaagaggtgacacctttttcattatttccaagggcactgtaaatgtgacccgggaggattctccaagcgaggatcccgtcttcttgaggacgcttggcaagggagactggtttggcgaaaaagccctgcagggggaagatgtcaggactgcgaacgtgatcgccgcagaagctgtgacttgcctggtgattgatcgggatagcttcaagcatttgattggggggctcgatgacgtgagtaataaagcatacgaggatgcagaagctaaggcaaaatacgaagctgaagccgcattttttgctaacctgaaactgtccgattttaatatcatcgataccctaggtgtaggcggattcggacgtgtggagctggtgcagctgaaatctgaagaatcgaagacatttgctatgaaaatactcaaaaaaagacatattgtagacacccggcagcaggaacacatcagatctgagaagcagattatgcagggagcgcatagcgatttcatcgtgaggctgtacaggacgtttaaagactccaaatatctttacatgctcatggaagcatgtctcgggggtgaactgtggacaatcctaagagacagaggctctttcgaggattcgactacccgcttctatacagcgtgcgttgtcgaggctttcgcttatctgcatagcaagggcatcatttatcgagatttgaagcccgagaatttgatcctggatcaccgagggtacgctaaactggtggactttggatttgctaagaaaattggctttggcaagaaaacatggactttctgtgggaccccagaatacgtagccccggagatcatcctgaacaaggggcacgacatatcagccgactattggagcctgggcattctgatgtacgaactgctgacaggctcaccaccgttttctgggcctgaccctatgaagacatacaacatcatcctgaggggtattgacatgatcgagttcccaaagaaaatagccaagaacgccgctaatttgattaagaaactgtgtcgggacaatccctccgaaagactcgggaatctgaagaatggtgtgaaggatatccagaaacacaaatggtttgagggtttcaattgggaaggtctcaggaagggaacattaacaccacccattatcccctccgtggcgagtcctacggacacttccaattttgacagttttccagaggataatgacgagccaccccctgacgacaactctggctgggacatcgacttttag

SEQ ID NO: 201402 - DNA, 2016 bp, synthetic construct
  misc_feature 1..2016: note = Description of Artificial Sequence: Synthetic coding sequence
  source 1..2016: mol_type = other DNA
atgagcgagctggaggaggacttcgccaagatcctgatgctgaaggaggaaagaattaaggagctggaaaaacgactaagcgagaaagaggaagaaatccaagagctcaaaagaaaactccacaaatgccagagcgtcctgccagttccctctacgcatatcggaccgagaacgaccagagctcaggggatttctgccgagccacagacatacaggagctttcatgacctgcgacaggcttttcggaagtttactaaaagcgaaaggtcgaaggacctaatcaaggaggctatactggacaacgactttatgaagaaccttgaattaagtcagatccaggaaattgtcgattgcatgtatcccgtggagtacgggaaagactcctgcattattaaggagggagacgtcgggagcctcgtttacgtgatggaggatgggaaagttgaagtcactaaggagggcgtcaaactatgtaccatgggccctggaaaggtattcggggagctggccatattgtataactgcacgagaacagcgacagtaaagacgctggtcaacgtcaaactgtgggccatcgatcggcagtgttttcaaactatcatgatgcgcactggcctcatcaaacacactgaatatatggagtttctgaagagtgtgccgacgtttcagagcctgcctgaagaaatcctctccaagctcgctgacgtactcgaggagacacactacgagaacggtgagtatattattcgacagggagctcggggggacactttcttcatcattagcaaaggaaccgtgaatgtcactagagaggactcccccagtgaggatcctgtgttcctccgaaccctgggcaaaggagattggtttggagagaaagcgctgcaaggcgaagatgtcagaaccgccaatgtgatcgctgcggaggccgttacttgtctggtgatagaccgcgactcattcaaacacctgatcggcggcctggatgacgtgtccaataaggcctatgaggacgcagaagccaaagcaaaatatgaagctgaagctgctttcttcgcaaatctaaaactaagtgattttaacattatcgatacgttgggcgtcgggggctttgggagagtggagctggtgcaacttaagtctgaagagagtaagacctttgcaatgaagatcctcaaaaaacgacacatagtggataccagacagcaggagcacatcaggagcgaaaagcaaataatgcagggagcccacagcgatttcatcgtgcgtctgtaccggactttcaaagatagtaaatacttgtatatgctcatggaagcgtgtctcggcggcgagctgtggaccatcctgcgggaccgcggcagtttcgaggactccacaacccgattttacacagcctgcgtggtggaggcttttgcctacttacacagtaagggcatcatatatagagatctgaagccagaaaacctaattttagaccaccgcggctacgccaaactggtcgactttggtttcgccaaaaaaattggctttggaaaaaagacttggaccttctgcgggacgccagaatacgtggcgcccgagatcatcctgaacaagggtcatgacatttcagccgattactggtcattaggtatactgatgtatgagctgctgactggatctcctccattctccggccccgaccctatgaaaacatacaatattatactgcgaggcattgatatgatagaattcccgaaaaagatcgcaaaaaacgccgctaacctgattaagaagctgtgccgtgataatccatctgaaagactgggaaacttgaaaaatggcgtcaaagatattcagaaacataaatggttcgagggcttcaactgggagggtctgcgtaaaggaacattgacgccccccatcatcccctctgtggcttcaccaaccgacactagcaactttgactctttcccggaggataatgacgaacctccccccgatgataacagcggatgggatatcgatttttag

SEQ ID NO: 201403 - DNA, 2289 bp, synthetic construct
  misc_feature 1..2289: note = Description of Artificial Sequence: Synthetic coding sequence
  source 1..2289: mol_type = other DNA
atgggcaacggcagcgtgaagcccaagcacagcaagcaccccgacggtcactcaggtaatctcacaacagacgccttgcgtaacaaggtgacagaactggagagagagctgcgacgcaaggatgctgaaattcaggagagagaataccatctcaaggaacttcgagagcaactctcaaagcaaaccgtggccatcgccgaactcacagaggaactgcagaataagtgtatccagttgaacaagttgcaggatgtggtccacatgcagggcggatctcctcttcaggcctcccctgacaaggtccccctcgaagtgcatcgcaagaccagtggactggtttcgctccattctagacgcggcgcgaaagctggcgtgtccgccgagcctacaacgcgaacatacgatttgaacaagcctcccgagttttcttttgagaaggccagggtgagaaaggattcttctgaaaagaagttaattactgacgctctcaacaagaatcagttcctcaaaagactcgacccacagcagatcaaagatatggtggaatgtatgtatggccgaaattaccagcaggggagctacatcattaagcagggagagcccggcaaccatatttttgtgctcgccgaaggacgccttgaagtgtttcagggcgaaaaactactaagtagcatcccgatgtggacgacttttggtgagcttgcaattttatataactgcacccgcaccgcttcggtaaaagctatcacaaatgtaaagacctgggccttggacagggaggtttttcaaaacatcatgcgacgcactgctcaggccagagatgagcagtatcgtaacttcctgaggtccgtgagtctcctcaagaacctgccagaggacaagctgaccaaaattattgactgcctggaagtcgaatactacgacaagggtgactacattatcagagaaggagaggagggctcaacctttttcatcctggctaagggaaaggtgaaagtgacccagagtaccgagggacacgatcagcctcagctgataaagactctgcagaaaggcgagtactttggagaaaaggcgctcatcagtgatgatgttcgatccgcaaacattattgcagaggagaacgatgtggcatgcctcgtaatagacagggagacctttaatcagacagtcggcactttcgaggaattgcaaaaatacctcgagggctacgtagcgaatctgaatcgggacgatgaaaaaaggcatgccaagagaagtatgtctaattggaagttaagtaaggctttgagcctcgaaatgattcagctgaaagagaaagtggccaggttcagttcttccagcccgtttcagaacttggagattatcgccactctgggtgtgggggggttcggccgggtggaactggttaaagtgaagaatgaaaacgtggccttcgccatgaaatgtatccgaaagaaacatattgtggatacaaaacaacaggaacacgtttatagcgaaaaaaggatcctggaggaactctgcagtccgttcatcgtgaaactgtatcgcacatttaaagataataagtacgtctatatgctgttggaagcgtgcctgggaggtgagctgtggagtatcctccgcgatagaggctcctttgatgagcccacttcaaaattttgtgtggcttgcgtgacagaagctttcgactatctgcaccgccttgggataatttatcgtgaccttaaacctgagaacctgattctagatgctgaaggctaccttaagctggtggatttcggattcgcgaagaagattggctccgggcaaaagacctggaccttttgtggtacacctgagtacgtggcccccgaggtgatactcaataagggccatgattttagcgtcgacttctggtcacttggcatcttagtttacgagctgctgactggcaaccctccttttagtggcgttgaccagatgatgacttataacctgatcctgaaaggaatcgaaaaaatggactttcctagaaaaattacacggcgtcccgaggatcttatccgacgactctgtagacagaatcccactgagcgtcttggcaacctgaagaacggcattaatgatatcaaaaaacacagatggctcaacgggttcaactgggaaggattgaaggctcggtcactgcccagccccctgcagcgagagctgaaggggcccatcgatcactcctattttgataaatatcctcctgaaaagggcatgccccccgacgaactttccggatgggacaaagatttctag

SEQ ID NO: 201404 - DNA, 2289 bp, synthetic construct
  misc_feature 1..2289: note = Description of Artificial Sequence: Synthetic coding sequence
  source 1..2289: mol_type = other DNA
atgggcaacggcagcgtgaagcccaagcacagcaagcaccccgacggccactcaggaaatttaaccactgatgccctgaggaataaggttactgagctggagagagaattgaggcgtaaggacgcagaaatccaggagagggagtaccacctgaaggagttacgggagcagttgtccaagcaaacagtagccatcgccgagctaaccgaagagctccagaacaagtgcatacagttgaacaaattgcaggatgtggtgcatatgcaaggggggtcgcctctgcaggcatcccccgataaggtgcctctggaggtgcatcgcaagactagcggattggtgtcccttcactccagacgaggcgccaaagctggcgtgagcgccgagcctactaccagaacctacgatttgaacaaaccccccgaattttctttcgaaaaagcacgcgtaagaaaagattcaagtgagaagaagttgattacagatgccctgaataagaatcaatttcttaagcggttggacccgcagcagattaaagacatggttgagtgtatgtatggaagaaactaccaacagggctcctacattatcaagcaaggcgaacccgggaatcacatcttcgtcctggcggaagggcgacttgaagtgtttcagggcgagaaattattaagcagcatccccatgtggaccactttcggggaattagcaatactttataactgtactcggaccgcttccgtgaaggctattacaaatgtgaagacgtgggccttggatcgagaagtgtttcaaaacattatgagaagaaccgcccaagcccgcgacgagcagtatcgcaacttccttcggtccgtgtcgttactgaaaaacctgccggaggacaagttgacaaagatcattgactgtcttgaagtggagtactacgacaagggggattatattataagagagggcgaggaaggctccacattctttatcctggcaaaggggaaggtaaaagttactcaatcaacagagggccacgaccagccccagctgatcaaaacccttcagaagggcgaatactttggcgagaaagccctgattagcgatgacgttcgcagcgccaatatcattgctgaggagaacgatgttgcatgtttagtgatagacagagagactttcaaccagactgtagggacatttgaggagttacagaaatacctcgaaggatatgtggccaacctcaatcgggatgacgaaaaacgtcatgccaagaggagcatgagcaactggaaacttagtaaggccctgagcttggaaatgatacagttaaaggaaaaggtagcccggttttccagctcttccccttttcagaaccttgaaattatcgccaccttgggagtgggtggattcggcagagtggaacttgttaaggtcaagaatgagaacgtggcgtttgctatgaaatgtattaggaagaaacatatcgtggacactaagcagcaggaacacgtgtattctgagaagaggatcctggaagagctctgctctcccttcattgtgaaattgtacagaacatttaaagataacaagtacgtatacatgctgctagaggcatgcctggggggggagctctggtcaattcttagggatcgtggctcttttgatgaacctacttctaaattttgcgtggcttgcgtgacagaggcatttgattatttgcaccgcctggggatcatttaccgggatcttaagcccgagaaccttatcttggacgctgagggttacctgaagctcgtagacttcggctttgcgaagaagatcggatccggccagaagacatggaccttctgcggtactccggagtatgttgcccccgaagttattctcaataagggacacgacttctccgtggacttttggtctctgggtatactcgtgtatgagctcctgacaggaaaccctccatttagtggcgtggaccaaatgatgacgtataacctgatcctgaagggcatcgagaagatggatttcccgcgtaagattacgcggcggccagaggacttgatccgcagactctgccggcagaaccctacggagcgcctgggaaacctaaagaatggaattaacgacatcaagaaacaccggtggctgaacggattcaattgggaaggcctaaaggctcgatctctcccatcccctcttcagcgcgagctgaaaggcccgatcgatcactcctatttcgacaagtaccccccggagaaaggaatgcccccagatgagttgtcaggatgggacaaagacttctag

SEQ ID NO: 201405 - DNA, 2202 bp, synthetic construct
  misc_feature 1..2202: note = Description of Artificial Sequence: Synthetic coding sequence
  source 1..2202: mol_type = other DNA
atgggcaacggcagcgtgaagcccaagcacagcaagcaccccgacgggcatagtgggaacctcactactgacgcactcaggaacaaggtcaccgagctggagagggagttgcgccggaaagatgccgaaattcaggaaagggaatatcatttgaaggagcttcgggagcagctctcaaaacagactgtcgcaatcgcggaactcaccgaagagcttcagaacaaatgcattcaattaaataaacttcaagatgtggtgcatatgcagggcggaagtccgctccaggcttcaccggacaaggtgcctctggaagtgcatcgaaaaacctctggattggtcagcttgcactcgaggcggggcgccaaggccggcgtgagcgcggagccaaccacccgcacatatgacttgaataaaccccccgaatttagcttcgagaaagccagggtgagaaaggactccagcgagaagaaactgataaccgacgcactgaataagaatcagtttctgaagaggctggacccccaacagatcaaagatatggtggaatgcatgtacgggcgcaactaccagcagggctcctacataatcaagcaaggcgaacccggaaatcatatttttgtactagccgaaggccgcctggaagttttccagggcgagaaactgttatcaagcattcccatgtggaccacctttggtgagctcgctatcctgtataactgtaccaggacagcatccgtgaaagcgatcaccaatgtgaagacttgggccttggaccgggaggtgttccaaaacatcatgcgcaggacggcccaggctcgcgacgagcagtaccgaaatttccttcgtagtgtctctttacttaaaaacttgccggaggataaacttacaaagatcatcgattgtctggaggtcgaatattatgacaagggcgattacatcatcagggaaggagaagagggcagcacattctttattttggcaaaggggaaagtgaaggtgactcaatctaccgagggacacgaccagccccagctgataaagactctccaaaagggagagtattttggcgaaaaggccctcatcagtgacgacgttcggagtgccaatattatcgccgaagaaaacgatgtcgcctgtctggtgatcgatcgggagacctttaatcaaactgttggaacttttgaagagctgcagaaatacctcgagggctacgttgcaaatctcaatagagacgacgaaaaacgtcacgccaaacgttccatgtctaattggaagttatccaaggccctgtcccttgagatgatccagctcaaagaaaaagtgaaagtgaagaacgaaaacgttgcatttgcaatgaaatgcatccgaaagaagcatatcgtcgacaccaagcagcaggaacatgtttactcagagaagaggatcctcgaggagctatgttcaccttttattgttaaactctatcgtacgtttaaagacaacaaatatgtctacatgcttctggaggcctgcttgggaggtgagttgtggtctatcttgagagacaggggtagtttcgatgagccgacatccaaattctgcgtggcctgtgtgaccgaggccttcgactatctgcatagactcggtatcatatacagggacctcaaacctgagaatctgatcctggacgctgaaggatacttgaaactagtggattttggattcgccaaaaagattggtagcgggcagaaaacatggaccttctgtggaacccccgaatatgtagcgcctgaagtgatcctcaacaaaggccatgacttcagcgtcgacttttggtctttggggatactggtgtatgaattactaacaggcaacccacctttctccggagtcgatcagatgatgacctacaacctcattctgaaaggcattgagaagatggatttccctcgcaaaatcaccagaaggccggaagacctaatccgccggctctgtcgccaaaacccgaccgaacggctcggtaacctgaaaaatggaatcaatgacatcaaaaagcataggtggttgaacggctttaactgggaaggtttaaaagcgagatcactcccaagccccctgcagagggaattgaagggccctatcgaccattcctacttcgataaatacccccctgaaaagggcatgcccccagacgaattgagcgggtgggataaagacttctag

SEQ ID NO: 201406 - DNA, 1029 bp, synthetic construct
  misc_feature 1..1029: note = Description of Artificial Sequence: Synthetic coding sequence
  source 1..1029: mol_type = other DNA
atgagcaactggaagctgagcaaggccctgagcctggagatgatccaactgaaagaaaaggtagcccggttctcttcgagcagtccttttcagaacctggagatcattgccaccctgggcgtggggggatttggccgtgtggaactcgtgaaggtgaaaaacgaaaacgtggccttcgcaatgaagtgcatacgcaagaagcacatcgttgatacgaaacaacaggaacacgtgtacagtgaaaagaggattctcgaagagctttgttcaccattcatcgtgaagctgtaccgcacatttaaggacaataaatacgtctacatgctcttagaggcatgcctaggtggggaactgtggtcaatccttagggaccgtggaagtttcgatgaacccaccagcaaattttgtgtggcatgcgtgacggaagcatttgattacctccatagactcggcatcatctacagggatttaaagccagaaaatctgatcttagatgcggaaggatatctcaaacttgttgactttggcttcgccaaaaaaatcgggtctgggcagaagacttggacgttttgcggaaccccagagtacgttgcgccagaggtgatattaaacaaaggacatgatttttcggtggatttttggagcctgggcatcttagtatatgagctcctcactggtaaccccccatttagtggagtcgaccagatgatgacctacaatcttatccttaagggaatcgaaaaaatggattttcctcgcaagattacccggaggccggaggatctgatcaggcgcctgtgcaggcagaatcccacggagagactgggcaatctgaagaacggaatcaacgatatcaaaaagcacaggtggctgaacggcttcaactgggaggggctgaaggcgaggtccctacccagtccccttcagcgcgagctgaagggaccaatcgaccatagctactttgacaagtatccacctgaaaaggggatgcctcctgatgaactatccgggtgggataaggatttttag

SEQ ID NO: 201407 - DNA, 942 bp, synthetic construct
  misc_feature 1..942: note = Description of Artificial Sequence: Synthetic coding sequence
  source 1..942: mol_type = other DNA
atgagccagagccggcaccgggccgaggccccccccctggagcgggaggactccggcacattttctttgggaaagatgataaccgctaagcctgggaagactccgattcaagtgctccacgagtatggcatgaagactaagaatattccagtgtacgagtgtgagaggtctgatgtgcagattcacgttcctacttttacatttcgagtgacggtgggggacatcacttgtaccggagagggcacctcaaagaagcttgcaaaacaccgagccgcagaagcagctatcaatattctcaaagcaaatgctagcatttgttttgccgtccctgaccctctaatgcctgatccttctaagcagccaaagaatcagctgaacccaattgggagtctgcaggaattggcgatacaccatggctggcggcttcctgaatatactctgtcccaggaagggggaccggcacataagagggagtacaccactatttgcagactagaatcctttatggaaacaggaaagggtgcatctaaaaagcaggcaaaaagaaatgcagccgaaaaattcttggccaagttttccaatatcagcccggagaaccacatctctctcactaatgtcgttggccattcactgggctgtacatggcacagcctgagaaattcgcccggggagaagattaacctgcttaagcggagtctgctgtcgatccccaatacggactacattcagctcctatccgagattgccaaggaacagggcttcaatatcacatatctcgacatcgacgagttaagcgctaatggacagtatcaatgccttgccgaattatctaccagtccaatcacagtctgccacggcagtgggatttcatgcggaaatgcacagtctgatgccgcccacaatgctctccagtatttgaagataattgccgagagaaagtag

SEQ ID NO: 201408 - DNA, 909 bp, synthetic construct
  misc_feature 1..909: note = Description of Artificial Sequence: Synthetic coding sequence
  source 1..909: mol_type = other DNA
atgcagagcacccccttctgcggcttctgcagcctgggcaagatgatcactgccaagccaggtaagacacctatccaggtgctccatgaatatggcatgaagacaaagaacatccctgtatatgagtgcgagcggagtgatgttcagattcatgtgcctacattcactttcagggtgactgttggcgatataacatgcaccggagaaggcacatcaaagaaacttgcaaaacacagagcagccgaggccgcgatcaacatcctgaaggctaacgcctccatatgtttcgcagtgccggacccgttaatgccagacccttcaaagcagcccaagaatcaacttaatcccattgggtcgcttcaggaactggccattcaccacggctggcgcttaccagaatacaccctcagccaggaaggaggaccagctcataaacgcgagtatactactatatgtcggctggaatcttttatggagacaggcaagggagcatctaagaagcaagctaagaggaatgccgccgaaaagtttctggcaaagttttctaacatcagtccggagaaccacattagcctgaccaatgttgtgggtcacagcttgggctgtacgtggcactccctgcgaaatagccccggggagaagatcaacctgttaaagcgctcactgctcagtattccaaacactgactatatacagctcctgagtgagattgctaaggaacaaggctttaacataacgtatctggatatcgatgagctgagcgcaaacggtcaatatcagtgcttagccgaacttagcacctctccaatcactgtgtgtcacggctcaggaatttcttgcggaaacgctcagtccgatgccgctcataacgccctgcaatatttaaagattatcgctgaacgcaagtag

SEQ ID NO: 201409 - DNA, 603 bp, synthetic construct
  misc_feature 1..603: note = Description of Artificial Sequence: Synthetic coding sequence
  source 1..603: mol_type = other DNA
atgcccgaccccagcaagcagcccaagaaccagctgaaccccatcggatccctgcaggaactcgccatccaccatggctggcgcctgcctgagtacacactgtcgcaggaaggcggacccgcgcataagcgtgagtatacaacgatctgtaggctcgaatctttcatggagaccggcaagggagcctccaagaagcaggctaagcgaaacgcggctgaaaaatttttggctaagttcagcaatatctctcccgagaaccacatctcgctaactaacgtcgttggccactccctcgggtgcacctggcactccctccgcaatagtcctggcgagaagataaacctcttgaaacgatctctgttgagtattccaaatactgactatattcagttgctctccgagatcgctaaagagcagggcttcaatataacctacctagatatcgatgagttgtcagctaacgggcagtaccagtgcctcgctgaactctccacatcacctatcactgtgtgtcatggaagtggaatctcttgcggaaacgctcagtcggatgcagcccataatgccctgcagtatctcaaaatcattgcagaaagaaagtag

SEQ ID NO: 201410 - DNA, 867 bp, synthetic construct
  misc_feature 1..867: note = Description of Artificial Sequence: Synthetic coding sequence
  source 1..867: mol_type = other DNA
atgatcaccgccaagcccggcaagacccccatccaggtgctgcacgagtatggcatgaaaaccaagaatattcctgtatatgaatgcgaaagatcagatgtgcagatccacgtcccgacattcactttccgggtgactgtaggagacatcacctgtactggcgagggaacctctaaaaaactggctaaacatagggccgctgaagccgcgataaacattctgaaggccaatgcctccatctgctttgcagtacccgaccccctcatgcctgatccttccaaacagccaaagaatcagttgaatccaataggctcgcttcaagagttggccattcaccatggatggagactgcctgagtatacactctctcaagagggcggaccggcccacaaacgagagtacactacaatatgtaggttggagtcgttcatggagaccggcaagggcgcctctaaaaagcaggctaagcggaatgccgctgagaagttcctggcaaaattcagtaatattagtccagagaatcacataagtctcaccaatgtggtgggccactccctcgggtgtacctggcatagccttaggaactcacctggtgagaaaattaacctcctaaagcggagtttgcttagtatccctaacactgattacattcagttattgagcgaaatcgcaaaggaacaggggtttaacatcacatatctagatattgatgagctttccgccaatggccagtatcagtgcttagccgaattgtccaccagccccattacagtgtgtcatggatccggcattagctgtgggaatgcccagagcgatgccgcacacaatgctttgcagtacttaaaaattattgccgagcgtaaatag

SEQ ID NO: 201411 - DNA, 1077 bp, synthetic construct
  misc_feature 1..1077: note = Description of Artificial Sequence: Synthetic coding sequence
  source 1..1077: mol_type = other DNA
atggaggcccccggcctggcccaggccgccgccgccgagagcgacagccgaaaggtcgctgaggagacccccgacggagcacccgctctctgcccgagccccgaagccttgtcacccgaacccccagtatacagtttgcaggacttcgacacactggccacagtgggcaccggaacatttggacgagtgcatctggttaaagagaagactgcgaagcacttctttgcgctcaaagtgatgtctatccctgatgtcatcaggctgaagcaagagcagcacgttcataatgagaaatcagtgctgaaggaagtatcccatccattcctgatccggctgttttggacatggcatgatgagaggtttttgtacatgctcatggaatatgtcccaggaggggaactgttctcctacttacggaatcggggcaggttctcgagcacaacagggttattctattcggctgaaattatttgcgctatcgagtacttgcactctaaggaaattgtgtacagggacctgaagcccgaaaacattctgttagacagagacgggcacatcaaattaaccgacttcgggtttgccaagaaacttgtcgatcgcacgtggacactgtgcggcactccagagtacctagccccagaggtgatacagtcaaagggtcacggccgggcagtagactggtgggcactgggcatcctgatcttcgaaatgctgtccggtttccccccatttttcgacgacaacccatttggaatatatcagaaaatcctggcgggcaaaatcgactttccacgacacttagattttcatgtcaaggacctgatcaaaaagcttctggtggtggataggacccggcgacttggaaacatgaaaaacggcgcaaacgacgttaaacatcacagatggttccggtcagtggattgggaggctgttccacagcgcaaattaaagcctccaattgtacccaagattgccggcgatggagacacttccaacttcgaaacctacccggagaacgattgggacacagcggctcccgtcccacaaaaggacctagaaatctttaagaacttttag

SEQ ID NO: 201412 - DNA, 1983 bp, synthetic construct
  misc_feature 1..1983: note = Description of Artificial Sequence: Synthetic coding sequence
  source 1..1983: mol_type = other DNA
atggacgactggaagcccagccccctgatcaagcccttcggcgccaggaaaaaaaggagttggtatctgacatggaagtacaagctgaccaatcagagggccctgcggcggttttgtcagacaggcgctgtacttttcctcttggtgacagttattgtgaacattaagttgatcttagacactcgtagggccatctccgaggcaaatgaagacccggagccagaacaggattacgatgaagctttggggcgattggaaccccccaggcggcgcgggagtggacctcggagggtgctggacgtggaggtctattctagtcgttcaaaagtgtatgttgccgtggacggcacaactgtgctggaagatgaggcaagagagcagggacgtgggatccacgtgatcgtgctcaatcaggccaccgggcacgtcatggctaaacgtgtctttgatacctattccccgcacgaggatgaggctatggtcttgttcttgaatatggtggcaccagggagagtgttaatctgtacggtgaaagatgaaggatccttccacctcaaggataccgccaaggcgcttctgcgatctctggggagtcaagcggggcccgcgcttggatggcgggacacctgggcattcgtgggtagaaagggaggtccagtgtttggtgagaaacactccaaatcccctgcactgagctcctggggcgaccctgtgctcttgaaaacagacgtccccctgtcgtcagccgaggaggccgagtgccactgggctgacaccgaactcaatagaaggaggaggcgattctgctctaaggtggaaggatacggaagcgtgtgttcttgcaaggacccaacacctatcgaattctcccccgaccccctcccagataacaaggtacttaacgttccggtggctgtaatcgctggaaaccgcccgaactatttgtacaggatgctgaggtcattactgagcgctcaaggagtctcaccacagatgatcactgtgtttattgatggatactacgaagagcctatggatgtggtggcactgttcggactccgtggcattcagcacacccctatatccatcaagaacgctcgagtgtcccagcactacaaagcaagtctcacagccactttcaacctgttccctgaggccaagtttgcagtggtgctggaggaagacctggacatcgcagtggacttctttagcttcctgtcacagtctatccatctgctggaagaggatgactctttatattgtattagcgcatggaatgatcaggggtatgagcacacggctgaggaccccgcactgttgtaccgcgttgagaccatgcctggactggggtgggtcctacggcggtctctttataaagaagaattagagcctaagtggcccaccccagagaagctctgggattgggatatgtggatgcggatgcccgaacaaaggaggggccgcgaatgcattatccctgatgtttctcgcagttaccacttcggcatcgtgggactaaacatgaacggttatttccatgaggcttattttaaaaaacacaaattcaacacggtgcctggggttcaactgaggaacgtcgacagcctgaaaaaggaggcgtatgaggtcgaagtccacaggcttctctccgaggccgaggttctcgatcactccaagaacccatgtgaggattcatttttgcccgataccgaaggacatacttacgtggcctttattcgcatggagaaggatgacgacttcactacctggacccagctggcgaaatgcttacatatttgggacctcgatgttagaggcaaccaccgagggctctggaggctgtttcgtaaaaaaaaccattttctgatggtgggagtcccagcctcgccatacagcgtgaagaaacctccttccgtgacacctatcttcttggaaccccccccaaaggaggagggagcgccaggtgccccagaacagacgtag

SEQ ID NO: 201413 - DNA, 2247 bp, synthetic construct
  misc_feature 1..2247: note = Description of Artificial Sequence: Synthetic coding sequence
  source 1..2247: mol_type = other DNA
atggacgactggaagcccagccccctgatcaagcccttcggcgcccgcaaaaagcgatcctggtacctgacttggaagtacaaactgaccaatcagcgagctttacgacggttctgccaaacaggtgccgtactttttctactcgttacagttattgtaaatatcaagttaattcttgatacgagacgtgctataagcgaagcaaacgaggatccagagcctgagcaagactatgacgaagccctggggagactggagcctccccgccgtagggggtccggtccacgtagagtattggatgtcgaggtttactcctctagatctaaggtctacgttgccgtcgatgggactaccgtgctggaggacgaggcccgggaacagggtcgtggaattcatgtaatcgtactcaaccaagctactggccacgtgatggcaaagagggtgttcgatacttacagcccacacgaggacgaagcaatggtattgtttctaaatatggtagcgcctggccgagtccttatctgcaccgtcaaagacgaaggcagcttccacctcaaagatacagcaaaagcactactgcgcagcctcggctcacaggcagggcccgctctcgggtggcgcgatacctgggcctttgtcggcagaaagggcgggcctgtgtttggagagaagcatagcaagtcccccgcattatccagctggggcgacccagtcctactgaaaaccgacgtgccattatccagtgcggaggaagctgagtgtcactgggctgacaccgaactcaataggcgcaggcggcgattctgttcaaaagtggaagggtatggatccgtatgttcttgcaaggatcctacacccatagagttcagccccgatcctctgccggataataaggtcctgaacgtgcccgtggcagttatagctggtaaccgccctaactacctatacagaatgctgaggtccctactcagcgcacagggagtgagcccgcaaatgataacagttttcatcgacggttattacgaggagccgatggatgtcgtcgctttatttggactgcggggaattcagcacacgcctattagcatcaaaaacgcacgcgtgtcacagcattataaggccagtctgacagccacctttaacttattcccagaggccaagttcgcggtggtactggaggaagatctggacatagcagtcgacttcttctcttttttatcccagtcaatccatttactggaggaagatgattccctctactgtatctcagcctggaatgaccaaggctacgagcataccgcagaagaccctgcgcttctctatcgagttgaaacaatgcctggccttggctgggtgctccggcggagtctttataaagaagaacttgaacctaagtggcctacccccgaaaagctatgggattgggatatgtggatgaggatgccagagcagcggcgagggagggagtgcattattccagacgtgagccggagttatcattttggcatcgtcgggcttaatatgaacggatattttcatgaggcctacttcaagaagcataagttcaacacagtgcccggggtccagctccgcaatgtagattccctcaagaaggaagcgtacgaggttgaggtgcatcgcttattgagcgaagcagaggtgctcgatcattccaagaatccttgcgaagactcattcctgccagacacagagggccacacctacgttgccttcatccggatggagaaagacgacgattttaccacctggacccagcttgccaagtgcttgcacatttgggacttggatgtgagaggaaaccatcggggactctggagactgtttcgcaagaagaatcacttcctgatgtcagaagaggcgacactctctcatcccaactttcctggagcgacccccaaaggcggagggagtccgagaagtcctcggaccgatatgcgacccccccctgggccatgtggcgccgggcccggcagtgagtctaatttgtttattgattgcccggagggcctggagaatcggcctaatctcgagggactggacttttttctgggttggaatgccgccttacgcgtggggcttgccctcactcaggagactgcggtgcctaatccctggaccggcccggcaggggcccatatgctgacccagacgcattcagagaccctgcgccactggactcgccctcctctgagcctacttttcgtccagatctcgaaagctggatag

SEQ ID NO: 201414 - DNA, 2247 bp, synthetic construct
  misc_feature 1..2247: note = Description of Artificial Sequence: Synthetic coding sequence
  source 1..2247: mol_type = other DNA
atggacgactggaagcccagccccctgatcaagcccttcggcgcccgcaaaaagcggtcgtggtacctcacttggaagtacaagcttacaaatcagcgggccctacggcggttctgtcagactggggcagtcttgttcctattggtcacagttatcgttaatattaagctgatcctggacactcgccgtgcaattagcgaggctaacgaagacccggaacccgagcaggattatgatgaagctctgggaaggctggagcccccacgtcggcggggaagcggtccgagacgggtcctggatgtggaggtgtactcaagtaggtcgaaggtttacgtggccgtggatggaacgaccgtgttggaggatgaggcgcgcgagcaagggcgggggattcatgttatagtgttaaaccaggcaactggacacgtcatggctaagagagtgttcgacacatactccccgcatgaggatgaagcaatggtgctctttctgaatatggtcgcacctggccgagtgctgatctgcactgtgaaggatgagggctccttccacctcaaggataccgctaaagctcttctaaggtccctgggatcacaggctggccccgctcttggctggcgcgacacatgggccttcgttggcagaaagggggggcctgttttcggtgagaagcatagcaagagccccgcactgtcctcttggggtgatcccgtcctgttaaagaccgacgtgcccttgtcctccgctgaggaggccgagtgccactgggccgacaccgaactcaaccgtcgtcgacggagattctgcagtaaggtggaagggtacggatccgtttgtagttgtaaggatcccacaccgatcgaattttccccggacccactccctgataataaggtgctaaacgtccctgtggcagttatcgcaggaaacagaccaaattatttgtaccgtatgcttcgttctcttctgtccgcacagggtgtttcaccccaaatgataacagtgtttattgacggctattatgaagagcccatggatgtagtcgccctgttcggcctgagaggcatccaacatactcccatctcaatcaaaaatgctagggttagtcagcactataaggcctctttgaccgccaccttcaatctttttcccgaagcaaagttcgccgtggtgctggaagaagatctggacattgctgtggatttcttttcttttcttagtcaatctatccatctgttggaggaggatgattctctgtactgtatctctgcatggaatgatcagggctatgaacataccgccgaggatccagcgctgctctacagggtggagacaatgcccggactggggtgggtgctacggcggagtctgtataaggaggagttggagcctaagtggcccacacccgaaaagttgtgggactgggatatgtggatgcggatgcccgagcagaggagaggcagggagtgcattatcccagacgtgtctaggagctaccattttgggatcgtgggtctgaacatgaatggttactttcacgaagcctactttaaaaaacataaattcaacactgtgcctggcgtgcaattgcgcaacgtggactcactcaagaaggaggcttacgaggtggaagtgcaccggttgctgtctgaggcggaggtcttggaccatagcaaaaacccttgtgaagattcttttcttcctgacacagagggtcacacttacgttgctttcattcggatggaaaaggacgacgatttcacaacatggactcaattagcaaagtgcctgcatatttgggatcttgacgtacgcggcaatcacaggggtctgtggagattgttcagaaaaaaaaaccatttcctgatgagtgaggaagcaaccttgtcacatcctaactttccaggggccacccctaagggtgggggcagtccccggtccccacggactgatatgcgaccgccacctggaccatgtggcgccgggcccggcagcgaaagcaaccttttcatagactgccctgaagggcttgaaaacagaccaaatttggaagggctcgatttcttcctgggctggaatgccgctctgagagtgggactcgcactgacgcaggagactgcagttcccaatccctggaccggtccagccggcgctcatatgctgacgcagacacacagcgagacccttcgacactggaccagaccaccactgtctctgttgtttgtgcagatcagcaaggccggctag

SEQ ID NO: 201415 - DNA, 603 bp, synthetic construct
  misc_feature 1..603: note = Description of Artificial Sequence: Synthetic coding sequence
  source 1..603: mol_type = other DNA
atggacgactggaagcccagccccctgatcaagcccttcggcgcccgtaagaagagatcctggtatctcacctggaagtataaactgactaaccagcgagctttaagaagattttgccagaccggagctgtgctgttcctgcttgtgaccgtgatcgtcaacatcaaactgattctggatactagacgcgccatctctgaggccaacgaggacccagaacctgagcaggactacgatgaggcccttggtcggttggagccccccagacggaggggaagtggcccgcggcgagttctggacgtggaagtttattccagccggagcaaggtttatgtggctgtcgacggcactacagttctcgaggacgaagcgcgggagcagggcagagggattcatgtgattgtcttgaatcaagcaacaggccatgtcatggccaaaagagtgttcgatacctattcaccacacgaggacgaggctatggtgctgttcctgaacatggtggccccgggaagagtgctgatctgtaccgtaaaagtgctgtcctcgggacgcaatatccttaaccaccttccatcgctgcccggtgggacacagtcttgttag

SEQ ID NO: 201416 - DNA, 1917 bp, synthetic construct
  misc_feature 1..1917: note = Description of Artificial Sequence: Synthetic coding sequence
  source 1..1917: mol_type = other DNA
atggagggcaccaaggagatcaaggtgagcaaccggcggatccaggaacattggacaggagccgtgttgttcctcctggtcacagtgatcgtaaacataaagttgattctggacacacggcgggccatcagcgaggcaaacgaagatccagagcccgaacaggactacgacgaggctctgggacgcctcgagccgccacggcggaggggcagcgggccccggagggtcctggatgtggaggtgtacagcagcaggtccaaggtctatgtcgccgtggacggaaccaccgtgttggaagacgaggcccgagagcaggggagggggatccatgttatcgtccttaaccaagctactggccatgtgatggccaaaagagtgttcgacacttacagtccccacgaggatgaggctatggtgctgttcctcaatatggtcgcacccggccgggtactgatatgtaccgttaaagacgagggaagcttccatcttaaagatacagcaaaagcacttctgagatcactcggctcccaggctggacctgctcttggatggcgcgacacttgggcatttgttgggcgaaagggcggtccagtttttggcgagaagcactctaagagccctgccctctcttcctggggcgaccccgttctgctcaaaacagacgttccactgtcatctgctgaagaggctgaatgtcactgggcagacactgagctgaatcgccgccggcggcgcttctgcagtaaggtggaaggctatggcagtgtttgctcttgcaaagacccaactcccatcgagttctcccctgaccctctcccagacaacaaggtgctcaacgtgcccgtggcggtaatcgctggcaaccgccccaactacttgtacaggatgctcaggtccctcctgagtgcccagggcgtgtctccccagatgatcaccgtgtttattgatggatactacgaggagcctatggatgttgtcgccttgtttggcctacgcggcatccagcatacgccgatctccattaaaaacgcccgggtgtcgcagcactacaaagcgtccctgactgccactttcaacctgttccccgaagcaaaatttgcagtagtacttgaggaggacctcgacatagcagttgatttcttctcctttttgtctcagtccatccacctcctggaagaagacgactctctctattgcatatccgcatggaacgaccagggctatgagcacaccgctgaggacccagccctgctgtatagggtagagacgatgcctggcctgggctgggtgctgcgcaggtctttgtacaaagaagagctggaacctaagtggcctactcccgaaaagctgtgggactgggatatgtggatgcgcatgcctgagcagagaagaggcagagaatgtatcatccccgatgtctccaggtcttaccatttcggcatcgtcggtctcaatatgaacggctacttccacgaagcctactttaagaagcacaaatttaacacagtgccaggggttcagttgcgcaacgtggattccctgaagaaagaagcgtatgaagtggaggtacatagactcctcagcgaagctgaggtcttagatcacagtaaaaatccttgcgaggatagcttccttccagataccgaggggcatacttacgtcgcattcatcaggatggaaaaagatgatgactttactacctggacgcaacttgccaagtgcctacacatctgggatctcgatgtcagaggcaatcatagaggactgtggaggctgttcagaaaaaagaaccattttctgatggtgggcgtccccgcctccccatacagcgtcaagaaaccacctagtgttactccaattttccttgaaccccctccaaaggaggaaggagcccccggcgccccagagcagacctag

SEQ ID NO: 201417 - DNA, 861 bp, synthetic construct
  misc_feature 1..861: note = Description of Artificial Sequence: Synthetic coding sequence
  source 1..861: mol_type = other DNA
atgagcgacagcgagaagctgaacctggacagcatcatcggccggctgcttgagggggacattcacggccaatactacgacctgctgcgcctgttcgagtatgggggcttccctcctgagagcaattatctgttcttgggagactacgttgaccgcggcaagcagagtcttgaaactatctgcctcctgctggcttataaaataaaataccccgaaaacttctttctgctgcgaggaaatcacgagtgcgccagtatcaataggatctacggtttttacgacgaatgtaagcgtcggtacaatattaagctgtggaaaacttttaccgactgttttaactgtctgcccatcgctgccattgtggacgagaagatattctgttgccatggcgggctcagcccagacctgcagagcatggagcagatcagacggatcatgaggccaaccgacgtacccgatcagggcctgctgtgcgacctgctgtggtccgatccggacaaagacgtgcaagggtggggagagaatgatagaggtgtgtcctttactttcggggcagaagtagtggccaagtttctacacaagcacgacctggacctgatctgccgcgcccaccaggttgtggaagacggatatgaattcttcgctaagaggcagctggtaacactcttctcagcaccgaattattgcggggagtttgacaatgccggcgcaatgatgtcagttgacgagacattgatgtgtagctttcagatcctgaagccggccgacaagaataagggtaagtacgggcagttctccggtctaaacccagggggaagaccaattactccaccccgaaacagcgcaaaggctaaaaagtag

SEQ ID NO: 201418 - DNA, 1548 bp, synthetic construct
  misc_feature 1..1548: note = Description of Artificial Sequence: Synthetic coding sequence
  source 1..1548: mol_type = other DNA
atggccgagctggagcacctgggcggcaagcgggccgagagcgccaggatgcgcagggctgagcagctcaggaggtggaggggctccctgaccgagcaggaaccagcagagagaagaggggcgggccgacaacctctgacacgccggggatccccccgtgtgaggttcgaggacggtgccgtgtttctggccgcatgctctagcggagacacagacgaagtaagaaaactgctggcgaggggagcagatatcaacaccgtgaatgttgacggcctgaccgcccttcatcaggcatgcatcgacgagaatctggacatggttaagtttcttgtcgaaaaccgggccaatgtgaaccagcaggataatgagggctggacgccactgcacgccgcggctagctgcggatatttgaatatcgccgaatatttcattaaccacggtgctagtgttggtattgtgaactcagagggcgaggtgccaagtgaccttgcagaggagccagctatgaaagacctccttctagagcaggtgaagaagcagggcgtcgacctcgagcagagccggaaggaggaggagcagcaaatgcttcaggacgcccgccagtggctgaatagcggcaagatcgaagacgtccggcaggcacgctccggagccacagccttacacgttgcggcagccaagggctactccgaggtgctcagactcctgattcaagctggttatgaattgaacgtgcaggactacgatggttggacgccactccacgccgcagcacattggggagtgaaggaggcttgctccatacttgccgaggccctttgtgacatggatattaggaacaagctcggccagaccccctttgatgtggcggacgaggggctcgtggagcatctcgaacttctgcagaaaaagcaaaatgtgctcaggagcgagaaggagactaggaacaagctcatagaatcagacttgaacagtaagatccaaagtggttttttcaagaataaggagaagatgctttatgaagaggagaccccaaaatcccaggaaatggaagaggaaaataaagagagctcctcatcctccagcgaggaggaagagggcgaggacgaggcctccgagtcggaaaccgaaaaggaggctgataagaagccagaggcatttgttaaccacagtaattctgaatccaagtcctctattaccgaacagatcccggcaccagcccagaacactttctcagccagttccgctcgccgtttctcatcgggattattcaataaaccggaggaacccaaagacgagagcccatcaagttggcggctgggcctgcgcaaaaccggttctcacaacatgctctccgaggttgccaacagtcgtgagcctatccgggaccgcggctcgtctatatatcgcagcagctcctctccccgtatttctgccctactggacaacaaagataaagtgcaatttggaagggtatggggtaatagtaaggccgtgttcttctttcacgagaattcaatattaggaaccaacgagaatattttttag

SEQ ID NO: 201419 - DNA, 4125 bp, synthetic construct
  misc_feature 1..4125: note = Description of Artificial Sequence: Synthetic coding sequence
  source 1..4125: mol_type = other DNA
atgctgaagaccgagagcagcggcgagcggaccaccctgcggagcgcctcgccgcataggaatgcctacagaaccgagttccaggcattaaaatcaacattcgacaagcccaagagcgacggagaacagaaaaccaaagaaggggagggctctcaacagagccgcggtagaaagtacgggagtaacgttaacaggatcaagaatctattcatgcagatggggatggagccaaacgagaatgcagccgtgattgccaaaacaaggggaaagggcgggcacagctcgccacaacgccgaatgaagcccaaggagttcttggagaaaaccgacgggtctgtggtgaagttagaatccagcgtttccgagcgcatcagccggttcgatacaatgtatgacggaccttcctacagtaaatttaccgaaactcgtaaaatgtttgagagaagtgtgcatgagtcgggacagaataatagatattcccccaagaaagagaaggctgggggaagcgaaccccaggacgagtggggtggctccaagagcaaccgagggtcaaccgacagcctagattccctgagtagtaggaccgaagctgtttcccccaccgtatcacagctgtccgctgtcttcgagaacacggattcccctagtgccatcatctcggagaaagcagaaaacaatgaatattccgtcaccggacattatcctttgaacttgcccagtgtgaccgtgactaacttggatactttcggacacctgaaagacagcaacagttggcctccaagcaacaagagaggcgtggataccgaggacgcccataagagtaatgccaccccggtgcccgaagtcgcaagcaaaagcacatccctcgccagcatacccggggaggaaattcagcagagtaaagagccagaggatagcacgtcaaatcaacagacccccgactcgatcgacaaagatgggcctgaagaaccatgtgccgagtcgaaagccatgcccaaaagtgagatcccttccccacagagtcagctcctggaggacgcggaagctaacttggtgggacgcgaagcagccaaacagcaacgcaaagagctggctgggggcgatttcactagtcctgacgcttccgcgtcatcatgtggcaaggaggtccccgaagactcaaacaactttgacggctcacacgtgtatatgcacagcgactataatgtgtaccgtgtcagatcccgctataacagtgactggggggagactgggacagaacaggacgaggaagaggactctgatgagaactcatattatcagcccgacatggagtatagcgagatcgtaggcttacctgaggaagaagaaattcctgccaatcggaagattaaattcagttccgcacctatcaaggtttttaatacctatagcaacgaggattacgaccgaagaaatgacgaggtcgatccagtggctgcaagcgcggagtacgagttggagaaacgagtcgaaaaactcgagctcttccctgtcgaactcgaaaaagacgaagatggcttaggaatctccattataggcatgggtgtcggagccgacgctggactcgagaagctgggtatctttgtcaagactgttaccgaagggggtgcagcacagagggacggcaggatccaggtgaatgatcagattgtggaggttgatggaataagtctggtgggggtgacacagaacttcgctgccacagtgctccggaacacaaaagggaatgtgcgctttgtcataggcagggaaaagcccggtcaagtgtcagaggtagctcaactaatctctcagacgctggagcaggaacgtagacagagagaactgcttgagcagcactatgcccaatacgacgctgatgacgacgaaaataccgtggctgagctgcaggggatgtccggcaattgcaataacaataataactacttcctgaagactggcgagtatgccacagatgaggaggaagatgaggttggacccgtcctgcccggcagcgacatggccattgaggtatttgagctgcccgagaatgaggatatgttcagcccatcggagctggatacaagcaaactatctcataagtttaaggagctccagattaaacacgccgtcaccgaggccgagatacaaaaactgaagactaaattgcaggcagccgagaacgagaaagtgcgatgggaactggaaaaaactcagctccaacaaaacattgaagagaacaaagagcggatgcttaagctggagtcctattggatcgaggcccaaactctgtgtcatacagttaacgaacatctaaaggaaacccagtctcagtaccaagcgctagagaaaaaatataacaaggcaaaaaaactgattaaagatttccaacagaaagagctcgatttcataaagcgtcaggaggctgagaggaaaaagatagaagatctcgaaaaagcccatctcgtggaggtccagggccttcaggttcgcatccgtgacctcgaagccgaagtctttcgactactgaagcaaaatggcacgcaggtaaataacaacaacaacattttcgaaaggcgcacatcactgggggaagtctcaaaaggtgatactatggagaatctcgacggaaagcagacctcttgccaagatggcctgtcccaggatctgaacgaggcggttcccgagactgaacgactggattcgaaggccctgaagactagggcacagctgagtgtgaaaaatcggcgccagcgtcctagccgcacaagactgtatgactctgtcagctcaacagatggggaggatagcctagaaaggaaaccgagcaatagcttttataatcatatgcacatcacaaaattactgccccccaaggggcttaggacctcctccccggaaagcgactccggagttccaccactcacccccgtggactccaatgtgccattttcatccgatcatattgctgaatttcaggaggagccattggacccagaaatgggaccactgagctctatgtggggcgatacatctctcttctcaaccagtaaaagtgatcatgatgtggaggaatcgccctgtcaccaccagaccactaacaagaaaatccttcgagaaaaagacgacgcaaaagatccaaaaagtttgagagctagctcctctcttgccgtccagggaggtaaaataaaaagaaagtttgtggatctgggcgctcctttgcgcagaaactcctctaaggggaaaaaatggaaagaaaaagaaaaagaagcctcacggttctctgccggatctagaatctttcggggcaggttggaaaactggacccccaaaccgtgctccacggcccagacttcaacaaggagtccatgtatgcctttttcctggtttaatgactcccgcaagggctcttatagttttaggaacctcccagctcccaccagcagtctgcagccaagtcctgaaactctgatctctgataagaaggggagtaaggtagagaacacctggatcacgaaagccaacaagaggaacccgaaccccagttcatcttccatattcggccgacacagtcaactcatgagcgtcgtgtggattcaggagacaaacaatttcactttcaacgacgatttctccccaagttccacgagcagcgcggacctctccggcctcggagccgagcctaagacaccagggctcagccagtcactcgcactttcttccgacgaaatcctcgacgatggtcaaagcccgaagcacagtcagtgccagaatagagccgtacaagagtggtcagtgcagcaggttagccactggctaatgtcactcaatctggaacagtatgtttccgagttttcggcccagaacatcaccggagagcagcttctccagttggatggaaacaagttaaaagcactgggaatgactgcctcccaggacagagcggtcgtaaaaaagaaactgaaggaaatgaagatgtccctagagaaagctcgcaaagcccaagagaaaatggagaagcagcgggagaagcttaggcggaaggaacaggagcagatgcagcggaagtctaaaaaaactgaaaagatgactagtactacagccgaaggagccggggaacaatag

SEQ ID NO: 201420 - DNA, 1026 bp, synthetic construct
  misc_feature 1..1026: note = Description of Artificial Sequence: Synthetic coding sequence
  source 1..1026: mol_type = other DNA
atgagcgacagcgagaagctgaacctggacagcatcatcggccggctactagagggcagtcgtgtcctgactccacactgcgcacccgtgcagggatcccgtccaggcaaaaacgtccagttaaccgaaaatgaaatccgcggcctatgcctcaaatctagggaaatatttttgagccagcccatacttctcgagctggaggccccattgaagatctgcggcgacattcatggtcaatattatgacttactcagactgttcgaatatggaggtttcccgcctgagtccaattatcttttcctgggagattacgttgatcgagggaaacagagccttgaaactatctgcctgttgctcgcgtataaaataaagtacccagagaactttttcctgctgcgtggtaaccatgagtgtgcaagtatcaatagaatctatggattttacgacgaatgtaagagaagatacaacataaagctgtggaaaacattcaccgattgtttcaattgtctgccgattgcggccattgttgacgaaaagatcttttgctgtcacggaggtctgagcccagatctccaatctatggaacagatacggagaatcatgaggcctactgacgtcccagaccaaggactgttgtgcgacctcctctggtcagatccagataaagatgtccaggggtggggggagaatgatagaggagttagttttaccttcggtgccgaagtggtcgcaaagttcctccacaagcatgacctggacctcatctgccgggcacaccaggtggtcgaggacggatatgagttttttgctaagcgccaacttgtgaccctgttcagcgcgccaaactattgcggcgagttcgataacgccggggcgatgatgtccgtggatgaaaccttgatgtgttcgttccagatactcaagccagcagacaaaaataaaggtaaatatggccagtttagcggtctcaaccccgggggcagaccgattacaccccctcggaactcagctaaagcaaaaaagtag

SEQ ID NO: 201421 - DNA, 993 bp, synthetic construct
  misc_feature 1..993: note = Description of Artificial Sequence: Synthetic coding sequence
  source 1..993: mol_type = other DNA
atgagcgacagcgagaagctgaacctggacagcatcatcggccggttgttggaggtccaggggagtaggcccgggaaaaatgttcaactcaccgaaaatgagatcaggggcttgtgcttgaagtcccgcgaaattttcttgtctcaaccaatactgctggagcttgaagcccctctgaagatttgcggagacatccacggccagtactacgatttgctccggctgttcgaatacggtggcttcccgcctgagagcaattatttgtttctgggcgactacgttgacagaggaaagcagagcctcgagacgatttgcctgcttctggcatacaaaatcaagtatccagagaacttctttcttcttcgtgggaatcatgaatgcgcctccatcaacagaatatatggcttctacgacgaatgcaaaaggaggtataatattaagctctggaaaacattcactgactgctttaattgcctgcctatagcggcaatcgtagacgagaaaatcttttgctgccacggcggactgtcaccagacttgcagtctatggaacagattaggcgaataatgcgacctactgacgtcccagatcaaggcttactgtgcgacctattatggagcgacccagacaaggatgtccagggatggggcgaaaatgatcggggggtgtccttcactttcggggcagaagtagtcgctaaatttctccataaacacgatttagacctcatttgtcgtgcccaccaggtcgtcgaagacggatacgagttcttcgcgaagagacaactggttacattgttcagcgctcctaactattgcggcgagttcgataacgctggggccatgatgtcggttgatgagacattaatgtgcagctttcagattctaaagcccgccgacaaaaacaagggtaaatatgggcagttctccggcctgaaccccggcggaagacctataacaccaccacggaatagcgctaaagccaaaaagtag

SEQ ID NO: 201422 - DNA, 1245 bp, synthetic construct
  misc_feature 1..1245: note = Description of Artificial Sequence: Synthetic coding sequence
  source 1..1245: mol_type = other DNA
atgcggcagcgggccgaccggcggagcatggtgagcaccagcggcgcagccaccgccagcagcgctgcgggtccaagcagaggagcagcgcacagcccttcctctgcacctcacgcctctcggcatcgcccgccgttctcatctagggccacagggctgctgcagcagcgccagcattgcgtgcaccattgtacccagctatgccctcgcgtgcaaaccccatgtttgccaccacctcctgccccagccaccgaactgcactcttatctgcagcaggggggtgaaagaggcctcctggacacaacacccggcaccgccggctgggggacgtcagctaccggcgctgtccaaggcagccggcctggcaagaatgtgcaattgacggagaacgagatacgagggctgtgcttgaaatcccgggagattttcctgtcacagccaatactgcttgagctagaagcaccgctgaagatctgcggagacatacatggccagtactacgaccttctgcgtcttttcgagtatggaggttttcccccagagtccaactatctattccttggtgactatgtggacagaggcaagcaatcactcgagacaatttgcctgctgctcgcatataaaatcaagtacccagaaaacttttttttgctcagagggaaccacgagtgcgccagtattaaccgtatctatgggttctacgacgaatgtaaacgccgctataatatcaaactgtggaagactttcacagattgctttaactgcctgcccatagcggcgatcgtagacgagaaaatcttctgctgccatggtggcctgtcgcccgacctgcagtcaatggaacagatcaggcgtataatgcgcccaacagatgtgcccgaccagggacttctctgcgacctgctgtggtccgatccagataaagacgtgcagggatggggggaaaatgaccggggggtctcctttactttcggggcggaagttgtggccaaatttttgcataaacatgatctggatctgatttgtagggcccatcaagtggtagaggacggttacgagtttttcgcaaagagacaactagtgaccctgttctccgctcctaactactgtggcgaattcgacaacgcaggcgcaatgatgtccgtggacgagacgctgatgtgctccttccaaatactcaaaccggctgacaagaacaaggggaagtacggccagttctccggcctgaatcccggagggagatag

SEQ ID NO: 201423 - DNA, 984 bp, synthetic construct
  misc_feature 1..984: note = Description of Artificial Sequence: Synthetic coding sequence
  source 1..984: mol_type = other DNA
atggccgacggcgagctgaacgtggacagcctgatcacccggctgttagaagtccgaggatgcagaccagggaaaatcgtacagatgaccgaggctgaagtgaggggcctctgcattaagtcccgggagattttcctctcccagccaatcctactggagcttgaagcgccactaaaaatctgcggagatatccatgggcaatacaccgacctactgagattgtttgaatatggtggattccccccggaggcaaattacctgtttctcggggactacgtggaccgggggaagcagtctctggaaactatctgcctgttgcttgcatataagatcaagtatccagaaaatttttttctcctgagaggcaatcacgagtgcgcctcgattaacagaatatacggcttctacgacgaatgcaagcgaaggttcaacatcaaactctggaagacgttcacggactgcttcaactgcctccccatcgccgctatcgtcgacgagaaaattttttgttgccacggaggtctttcgcctgatctgcagagtatggagcagatcaggcggattatgaggcccactgacgtgcctgacacgggactgctctgtgacctcctgtggagtgatcccgataaagacgtgcaaggctggggcgagaatgaccggggagtctctttcacttttggggccgacgtcgtaagcaagtttttaaatcggcacgatctggacctaatctgccgtgctcaccaggttgtggaggatggctatgagtttttcgccaagagacaacttgtaacactcttctctgcgcctaattattgcggggaatttgacaacgctggaggaatgatgagtgtcgatgaaacactcatgtgcagctttcagatcctaaagcctagcgaaaagaaagctaaataccagtatggtggtctgaactcgggtcggcccgtgactcccccgcgcacggctaatcccccaaagaaacggtag

SEQ ID NO: 201424 - DNA, 984 bp, synthetic construct
  misc_feature 1..984: note = Description of Artificial Sequence: Synthetic coding sequence
  source 1..984: mol_type = other DNA
atggccgacggcgagctgaacgtggacagcctgatcacccggctgcttgaagtgcgcggatgtagacctgggaaaatcgtgcagatgactgaagccgaggttcgcggcctttgcatcaagtcacgagagatcttcctttcgcagccgatcctgctggaactggaagctcccttaaagatttgtggcgacattcatggacagtatacagatcttcttcgtctgtttgagtacggcggctttccacccgaagcaaattacctattccttggagactatgttgataggggaaaacagagcttggagactatctgtcttctgctggcctacaagatcaagtaccctgaaaactttttcttgctaagaggcaaccacgagtgtgcctcaatcaaccgcatttatgggttttatgacgagtgcaagcggcgctttaacatcaagttatggaaaacctttactgactgtttcaactgtctgcccatagcagcaatcgtcgatgagaaaatcttttgttgtcatggtggtttatcaccggacttgcagagtatggagcagattagacggatcatgaggcccaccgacgtccccgatacgggcctcctctgtgatctgttgtggagcgatccagacaaggacgtgcaaggctggggcgagaacgatcgaggggtttccttcacgttcggtgcggatgtggtttccaagtttctcaataggcatgacctagacctcatttgtcgggcgcatcaagtcgtggaggatggctacgagttcttcgccaaaaggcaattagttaccctcttttctgcacccaattattgcggagaattcgacaatgctgggggcatgatgtctgttgatgaaacactcatgtgttccttccagatcctcaagccatccgagaagaaagcgaaataccagtacggtggcttgaatagcggacgcccagtgactcctccacggaccgccaatcccccaaaaaagcgctag

SEQ ID NO: 201425 - DNA, 984 bp, synthetic construct
  misc_feature 1..984: note = Description of Artificial Sequence: Synthetic coding sequence
  source 1..984: mol_type = other DNA
atggccgacggcgagctgaacgtggacagcctgatcacccggctgctggaggtgaggggatgtcgaccgggaaaaatcgtccaaatgactgaggcggaggtgagaggactttgtattaaatcaagggagattttcctttctcaaccaattcttctggaactcgaggccccgctcaaaatttgcggggacattcacggccagtacactgacctgctgcggctgtttgaatatggcggatttccgcccgaagccaattatctgttcctgggcgattatgtggaccggggcaagcagagcctggagaccatctgcctgctccttgcctataagattaagtatcccgaaaatttttttctgctgagaggtaatcatgaatgcgcctctattaacaggatttatggtttctacgacgagtgcaaacgccggtttaatatcaagttgtggaagacttttactgactgctttaactgtcttcctatcgctgctattgtagacgaaaaaatcttttgttgtcatggcgggttaagccccgatctgcaaagtatggagcaaattcgcagaattatgagaccaacagacgttccagatacaggcctgctgtgcgacttattgtggagtgacccagataaagacgtccaaggctggggagaaaatgatagaggagtctcctttacttttggagccgatgtggtgtccaaatttctaaacagacatgacttggaccttatttgcagagctcaccaggttgtggaagatgggtacgagttcttcgccaagaggcagctggtgacgctgttttccgcacccaactactgcggcgagttcgacaatgctgggggtatgatgagtgtggacgagacactgatgtgtagcttccaaatcttgaagccttctgaaaagaaggctaaataccaatatggaggactgaacagcgggcgtcctgtcacacctccgcgaaccgcgaatcccccaaagaaaagatag

SEQ ID NO: 201426 - DNA, 378 bp, synthetic construct
  misc_feature 1..378: note = Description of Artificial Sequence: Synthetic coding sequence
  source 1..378: mol_type = other DNA
atggccgacggcgagctgaacgtggacagcctgatcacccggctgttggaggtgcgaggctgtagacccggcaaaatcgtacaaatgacagaggccgaggttaggggcctgtgtattaagagccgcgaaatcttcctgtcccagcccatcctcctagagcttgaggcccccctcaaaatttgtggagatattcacggccagtatactgacctgcttcgcctgtttgagtacggaggattccccccagaggccaattacctctttctgggggactacgtagatcgcggcaagcagtccctggaaacgatctgcctgctcctggcatataagataaaatacccagaaaactttttcctgctccgaggaaaccacgaatag

SEQ ID NO: 201427 - DNA, 417 bp, synthetic construct
  misc_feature 1..417: note = Description of Artificial Sequence: Synthetic coding sequence
  source 1..417: mol_type = other DNA
atggccgacggcgagctgaacgtggacagcctgatcacccggctgctggaagtgagaggttgtaggcctggaaagatcgtgcagatgaccgaagcagaggtgcgcggactctgcattaagtcccgagaaatctttctgagtcaaccaatcttgctcgagcttgaggccccactgaaaatttgcggtgacatccatggtcagtacactgacctactgcggctcttcgagtatggaggcttccctccagaggccaattacctattcctgggcgattacgttgatcgcggcaaacaatcactggaaacaatctgtttgctgcttgcgtataagatcaagtaccccgagaatttctttctgctccgtggtaatcatgagtgcgccagcataaacagaatctatggattctacgacgaatag

SEQ ID NO: 201428 - DNA, 510 bp, synthetic construct
  misc_feature 1..510: note = Description of Artificial Sequence: Synthetic coding sequence
  source 1..510: mol_type = other DNA
atgaccgaggccgaggtgcggggcctgtgcatcaagagccgggagatctttcttagccaacctatcttgctggagctggaggcccctctcaagatctgcggagacattcacgggcagtataccgatctgctgcggctgtttgagtacggtggctttccaccagaggccaattacctgtttctgggcgactacgtggatagaggcaaacagagcctggaaacgatctgcctgttgctggcatacaagattaaatatcctgagaactttttcttgctgcgtggaaatcacgaatgtgcatctatcaacaggatttatggcttttacgacgaatgtaaaaggcggttcaacatcaagttgtggaaaaccttcaccgactgcttcaactgcctgcccattgctgctattgtggatgaaaaaatcttctgttgtcacggtggcctctccccagatctccaatccatggaacagatcaggagaatcatgcggcctactgatgtacccgacacctag

SEQ ID NO: 201429 - DNA, 972 bp, synthetic construct
  misc_feature 1..972: note = Description of Artificial Sequence: Synthetic coding sequence
  source 1..972: mol_type = other DNA
atggccgacctggacaagctgaacatcgacagcatcatccagcggctgctcgaggttcgaggatctaagccaggcaagaatgtgcagttgcaggaaaatgaaatacggggcctttgtctgaaatcccgggagatatttctgtcccagccgatccttctggagctggaggcgcctttaaagatctgcggggatatccacggccagtactacgatctcctccgcctgtttgagtacggggggtttcctcctgagtcaaactacctgttcttaggtgactatgtggataggggaaaacaaagcctcgaaacgatttgtcttctcttggcctacaagattaaatatcctgagaacttctttttgctgagggggaatcacgagtgtgcaagcatcaacagaatctatggtttctatgacgagtgcaaacgaaggtacaatattaagctgtggaaaacattcactgattgctttaattgtctgccaattgccgctattgtggatgaaaagatattttgctgccatggcgggctgagccccgatctccagtcaatggaacagattagacgcatcatgaggcccacggacgtccccgatcagggcttgctctgcgacctattatggtccgatccagataaagacgtgctgggatggggggaaaatgataggggcgtgtcttttacgtttggcgctgaggttgtggcgaaattccttcataaacacgatctggatcttatttgtcgggcccatcaggtggtggaagatggttatgagttttttgccaaacggcagctggttacgttgttttccgcacctaattactgtggtgaattcgataatgcaggcgccatgatgtctgtcgatgagacacttatgtgcagtttccagattcttaagcccgccgagaagaaaaaaccaaatgccacccggcctgtcactcccccacggggaatgatcacaaagcaggctaaaaagtag

SEQ ID NO: 201430 - DNA, 1014 bp, synthetic construct
  misc_feature 1..1014: note = Description of Artificial Sequence: Synthetic coding sequence
  source 1..1014: mol_type = other DNA
atggccgacctggacaagctgaacatcgacagcatcatccagcggctgctggaggtcagaggcagcaagccagggaaaaacgtacaactacaagagaatgagattaggggactctgtttaaagagtagagagattttcctgagccagcccatcctgctggagcttgaagccccactgaaaatttgtggcgacatccacgggcagtactacgatctactcaggttgtttgaatatggtggcttcccccccgaatctaactatctctttctgggtgactatgttgacaggggcaaacagagcctcgagactatatgtctcctcctagcctataaaattaagtatcccgagaactttttccttcttagaggcaaccacgaatgtgccagtattaaccgcatatacggattttacgacgagtgtaagcgacggtacaatattaagctgtggaaaactttcaccgattgtttcaattgcttgcctatagcagccattgtggacgaaaaaattttctgctgtcatggagggctgagtcccgatctgcagtccatggaacagattagacgaattatgagaccaaccgatgttccagatcagggcctcctttgcgaccttctttggtctgacccagataaggacgtgctcgggtggggggaaaacgatcgtggcgttagcttcacctttggggccgaggttgtagcgaagttcctgcacaagcatgatttagacctgatctgtagagcacaccaagtggtcgaggatggctacgaattctttgccaaaagacagctggtgactctgttttccgcgccaaattactgtggtgaattcgacaatgctggcgcaatgatgtctgtcgatgagacgttaatgtgtagttttcagattctcaagccggccgaaaaaaaaaagccaaacgccactcggcctgtgacccccccccgcgttgctagtggcctgaatccctccatccagaaggcttcaaactatcggaacaatactgtgttatacgaatag

SEQ ID NO: 201431 - DNA, 999 bp, synthetic construct
  misc_feature 1..999: note = Description of Artificial Sequence: Synthetic coding sequence
  source 1..999: mol_type = other DNA
atgttcctgcccctgtacctgaacctggtgctgtacttcgtgttctggctgcactggactaactgcgacttttcgctggccgtgagaggcagcaagcctggaaaaaatgtacagttgcaggaaaatgagattaggggtctttgcctaaaaagccgggagatcttcctgtctcaacctattctgctggagctggaggcccccctcaaaatctgtggtgacatacatgggcagtattacgatctattgaggctcttcgagtatgggggattcccaccagagagcaactacttgtttcttggcgactacgtcgatcgcggcaaacaaagcttggagactatctgtctccttctcgcatacaagatcaagtatccggaaaacttctttctgcttaggggcaatcacgagtgcgcctccattaaccgcatatacgggttctacgatgaatgcaaacgccgctacaacataaagctgtggaagacttttactgattgtttcaactgtctgccaattgctgccattgtggatgagaagatattctgctgtcacggcggcctgagtcctgatcttcagtcgatggagcagatccggagaattatgagaccaaccgatgtgcctgatcagggacttttgtgcgatttgctgtggtctgatcctgacaaagatgtgctcggctggggcgaaaacgaccgtggtgtatccttcacctttggtgcagaagtggtggcaaaatttctgcataaacatgatctagatctgatctgtcgggcccaccaggtagtggaagacggatacgagtttttcgctaaacgccagctggtgactctgttctccgctccaaattactgcggcgagtttgataacgcaggagcaatgatgtctgtagacgagaccctgatgtgcagctttcagatacttaagcccgctgaaaagaaaaaacccaatgccacccgaccagtgaccccgcctcgtggtatgatcactaaacaggcaaaaaagtag

SEQ ID NO: 201432 - DNA, 426 bp, synthetic construct
  misc_feature 1..426: note = Description of Artificial Sequence: Synthetic coding sequence
  source 1..426: mol_type = other DNA
atggagcagatccggcggatcatgcggcccaccgacgtgcccgaccagggactcctgtgcgatctgctatggagtgacccagacaaagacgtgctagggtggggagaaaacgacagaggcgtctcatttacttttggagcagaagtcgtggcaaagttcctgcataaacatgacctcgacctaatctgtcgggcgcatcaagtggtcgaggatggatacgaattctttgctaagcggcagttagtgacgctttttagcgccccaaactattgtggcgagtttgacaatgccggagctatgatgtccgtcgatgaaaccttgatgtgtagttttcaaattttgaaaccagctgagaagaagaagcctaacgcaactcgccccgtcactcctccccggggaatgatcacaaaacaggccaaaaaatag

SEQ ID NO: 201433 - DNA, 225 bp, synthetic construct
  misc_feature 1..225: note = Description of Artificial Sequence: Synthetic coding sequence
  source 1..225: mol_type = other DNA
atgggccggcggagcagcaagtgctgctgcatctacgagaagccccgggcctttggagagagtagtaccgagtccgacgaggaggaggaggaaggctgtgggcatacgcattgcgtgcgcgggcataggaaaggaagaaggcgtgccacgctgggtcctaccccaactacccccccgcagccaccagacccaagtcagcccccgccgggccccatgcaacactag

SEQ ID NO: 201434 - DNA, 225 bp, synthetic construct
  misc_feature 1..225: note = Description of Artificial Sequence: Synthetic coding sequence
  source 1..225: mol_type = other DNA
atgggccggcggagcagcaagtgctgctgcatctacgagaagcccagagcctttggcgagagcagcactgaatccgatgaagaagaggaggaggggtgcggacatacacactgcgtacgcggacatagaaagggtcggagacgcgctaccctgggccccacaccaactaccccaccacagccccctgatccctcccagcctccacccggccctatgcagcattag

SEQ ID NO: 201435 - DNA, 225 bp, synthetic construct
  misc_feature 1..225: note = Description of Artificial Sequence: Synthetic coding sequence
  source 1..225: mol_type = other DNA
atgggccggcggagcagcaagtgctgctgcatctacgagaagccccgcgccttcggggagtctagcaccgagagcgatgaggaagaagaggagggctgcggacatactcactgtgtcaggggacatcggaagggcagacgccgagccacgctcgggccaacacctacaactcctccccaacctccagatccatctcagccaccacctggtcctatgcaacattag

SEQ ID NO: 201436 - DNA, 225 bp, synthetic construct
  misc_feature 1..225: note = Description of Artificial Sequence: Synthetic coding sequence
  source 1..225: mol_type = other DNA
atgggccggcggagcagcaagtgctgctgcatctacgagaagcccagagcgttcggagagtcaagcacggagtctgacgaagaggaggaagaaggctgtggacatactcattgcgtacggggccaccgcaaagggcgccgtagggccacgctgggacctacccccacaacacccccacagcctccagaccccagccagccgccaccaggccccatgcaacattag

SEQ ID NO: 201437 - DNA, 381 bp, synthetic construct
  misc_feature 1..381: note = Description of Artificial Sequence: Synthetic coding sequence
  source 1..381: mol_type = other DNA
atggccgaggccggcgccggcctgagcgagaccgtgaccgagaccaccgttactgtaacaacggagcccgagaatcgcagtctcacaattaaactgcgcaaacgaaagccagagaaaaaagtagagtggactagcgatacggtggacaatgaacatatgggcagaagaagcagtaagtgctgttgtatttatgagaagccgagagcttttggcgagtcttccaccgaatcagatgaagaggaagaagaagggtgcggacacactcactgcgtgcggggacacagaaagggccggaggcgtgcaactctaggaccaacacccacaacacccccccagcctcctgacccttctcaaccccctccaggccctatgcaacactag

SEQ ID NO: 201438 - DNA, 225 bp, synthetic construct
  misc_feature 1..225: note = Description of Artificial Sequence: Synthetic coding sequence
  source 1..225: mol_type = other DNA
atgggccggcggagcagcaagtgctgctgcatctacgagaagccccgcgcgtttggcgaaagctccaccgaatccgatgaggaggaagaggaagggtgcggccacactcactgtgtgagggggcatcgtaagggaaggaggagagctaccctgggtcctacccctacgacacctccgcagccaccagacccctcacagccaccgccaggccctatgcagcactag

SEQ ID NO: 201439 - DNA, 381 bp, synthetic construct
  misc_feature 1..381: note = Description of Artificial Sequence: Synthetic coding sequence
  source 1..381: mol_type = other DNA
atggccgaggccggcgccggcctgagcgagaccgtgaccgagaccactgtgacagtgactacagaacctgaaaaccgtagcctgaccattaagctccggaaaagaaagccagagaagaaggtcgaatggacctcggatacggtcgataacgaacacatggggaggaggtcttctaaatgctgctgtatttatgagaagccacgcgctttcggtgaatcctccaccgaaagcgatgaggaggaggaagagggctgcggccatactcactgcgtgcgaggacaccggaaaggacggaggcgggcaacactgggccccactcccacaactcccccccaaccgcctgatccttctcagcctccacctgggccaatgcaacactag

SEQ ID NO: 201440 - DNA, 225 bp, synthetic construct
  misc_feature 1..225: note = Description of Artificial Sequence: Synthetic coding sequence
  source 1..225: mol_type = other DNA
atgggccggcggagcagcaagtgctgctgcatctacgagaagcccagggctttcggagaatcatccactgagtcggacgaggaggaagaagaaggttgcggtcacacccactgtgtcagagggcacaggaaaggccgtcgccgcgctacccttggacccacgcccacgacaccaccccagcctcctgacccatcccagccaccccctggccctatgcagcactag

SEQ ID NO: 201441 - DNA, 225 bp, synthetic construct
  misc_feature 1..225: note = Description of Artificial Sequence: Synthetic coding sequence
  source 1..225: mol_type = other DNA
atgggccggcggagcagcaagtgctgctgcatctacgagaagccccgggcgtttggagagtcttcgacagagagcgacgaagaggaagaggaggggtgtggtcatacacactgcgttcgcgggcatcgcaagggtaggagaagagcgaccctcggacctacgccaactacccctccgcaaccccccgaccccagtcagcccccaccggggcccatgcaacattag

SEQ ID NO: 201442 - DNA, 225 bp, synthetic construct
  misc_feature 1..225: note = Description of Artificial Sequence: Synthetic coding sequence
  source 1..225: mol_type = other DNA
atgggccggcggagcagcaagtgctgctgcatctacgagaagcccagagcgtttggagaaagttctaccgagtccgatgaggaggaggaagaggggtgcgggcatactcactgtgtgcgcggccatcgaaaggggcggcgacgggcaacgcttggcccaactccgaccactccaccacagccccctgatccctcccagcccccccccggccctatgcaacactag

SEQ ID NO: 201443 - DNA, 225 bp, synthetic construct
  misc_feature 1..225: note = Description of Artificial Sequence: Synthetic coding sequence
  source 1..225: mol_type = other DNA
atgggccggcggagcagcaagtgctgctgcatctacgagaagccccgcgcatttggtgagtcgagcactgagtccgatgaagaggaggaagaggggtgcgggcatactcattgcgttaggggccatcggaagggcaggcgaagggccacactggggccaacaccgaccacaccaccacagccgcccgatccctcacagcctccacccggccctatgcagcattag

SEQ ID NO: 201444 - DNA, 225 bp, synthetic construct
  misc_feature 1..225: note = Description of Artificial Sequence: Synthetic coding sequence
  source 1..225: mol_type = other DNA
atgggccggcggagcagcaagtgctgctgcatctacgagaagcccagggcttttggcgagagttctactgagagcgatgaggaagaggaggagggatgtgggcacacccactgcgtccgagggcacagaaaagggaggcggcgggccactttgggacccacacctactaccccaccacagccaccagaccccagtcaacccccccctgggccaatgcagcactag

SEQ ID NO: 201445 - DNA, 225 bp, synthetic construct
  misc_feature 1..225: note = Description of Artificial Sequence: Synthetic coding sequence
  source 1..225: mol_type = other DNA
atgggccggcggagcagcaagtgctgctgcatctacgagaagccccgggcctttggtgagtcctctacagaaagcgatgaagaggaggaggagggatgtggccacactcactgcgtacgggggcatcgtaagggccgacgtcgggccactttgggcccaacaccgacaacaccacctcagcctcctgacccctcgcagcctccccccgggccaatgcagcactag

SEQ ID NO: 201446 - DNA, 225 bp, synthetic construct
  misc_feature 1..225: note = Description of Artificial Sequence: Synthetic coding sequence
  source 1..225: mol_type = other DNA
atgggccggcggagcagcaagtgctgctgcatctacgagaagccccgcgccttcggggaatcatccaccgaaagcgatgaggaagaggaggagggttgtgggcacacccattgcgtccggggtcaccggaagggaagacggagggcaactctgggccctactccgacaactccacctcagccgcccgatccttcccagcctccgccaggccctatgcagcactag

SEQ ID NO: 201447 - DNA, 225 bp, synthetic construct
  misc_feature 1..225: note = Description of Artificial Sequence: Synthetic coding sequence
  source 1..225: mol_type = other DNA
atgggccggcggagcagcaagtgctgctgcatctacgagaagcccagagcctttggggagagcagcacggaatcagatgaagaagaggaggagggttgcgggcatacacattgcgtgagaggtcaccggaaggggaggcgaagagccacacttggaccgactccaaccacaccccctcagccccccgatccctctcaaccaccacccggccctatgcagcactag

SEQ ID NO: 201448 - DNA, 225 bp, synthetic construct
  misc_feature 1..225: note = Description of Artificial Sequence: Synthetic coding sequence
  source 1..225: mol_type = other DNA
atgggccggcggagcagcaagtgctgctgcatctacgagaagcccagagccttcggtgagtcaagcaccgaatctgatgaggaagaggaagagggatgcgggcacacacattgcgtgcgggggcacagaaaaggaagacggagagctacactgggacctacaccgaccactccaccacagccccccgaccctagtcagcccccgcctgggcccatgcagcattag

SEQ ID NO: 201449 - DNA, 225 bp, synthetic construct
  misc_feature 1..225: note = Description of Artificial Sequence: Synthetic coding sequence
  source 1..225: mol_type = other DNA
atgggccggcggagcagcaagtgctgctgcatctacgagaagcccagggcattcggcgagtcctcgactgagagcgacgaagaggaggaagaaggctgcggccacacccactgtgtgcgtggccacagaaaggggcgccgtcgcgcgacgctgggtcctacccccacaacacctcctcagccaccagatccaagtcagcctccacccggcccaatgcagcattag

SEQ ID NO: 201450 - DNA, 225 bp, synthetic construct
  misc_feature 1..225: note = Description of Artificial Sequence: Synthetic coding sequence
  source 1..225: mol_type = other DNA
atgggccggcggagcagcaagtgctgctgcatctacgagaagccccgggctttcggagagtccagcaccgaaagcgacgaggaggaggaggaaggctgtggccacacacactgtgtcagggggcacaggaaaggcagacggagggcgaccttaggtcctactccaaccacgccaccgcaaccccctgacccgtcccagccgccacctggaccaatgcaacactag

SEQ ID NO: 201451 - DNA, 225 bp, synthetic construct
  misc_feature 1..225: note = Description of Artificial Sequence: Synthetic coding sequence
  source 1..225: mol_type = other DNA
atgggccggcggagcagcaagtgctgctgcatctacgagaagccccgagcttttggcgaatcttccaccgagtctgacgaggaggaggaggaggggtgcgggcatacccactgtgtgagaggtcaccggaaaggcagaaggcgcgcaacacttggccccacaccaacgactccgccgcaacctccagatcctagccagccacctccggggcctatgcaacattag

SEQ ID NO: 201452 - DNA, 225 bp, synthetic construct
  misc_feature 1..225: note = Description of Artificial Sequence: Synthetic coding sequence
  source 1..225: mol_type = other DNA
atgggccggcggagcagcaagtgctgctgcatctacgagaagcccagagcattcggggagtcttccacagagtctgacgaagaagaggaagagggctgcgggcacacgcattgcgtccgcggtcaccgtaaaggcagacgtagagctacacttggcccaacacctacgacaccaccgcaaccacccgatccctcacagcctcccccaggcccaatgcaacactag

SEQ ID NO: 201453 - DNA, 225 bp, synthetic construct
  misc_feature 1..225: note = Description of Artificial Sequence: Synthetic coding sequence
  source 1..225: mol_type = other DNA
atgggccggcggagcagcaagtgctgctgcatctacgagaagccccgggcttttggcgaatcatccacagaatcagacgaagaggaggaagaagggtgtggccacacccactgtgttcgtggccaccggaagggaagaaggcgagctacactggggcctactccaacgacaccaccacagccccccgatccttcacagcccccgcctggtccgatgcagcactag

SEQ ID NO: 201454 - DNA, 225 bp, synthetic construct
  misc_feature 1..225: note = Description of Artificial Sequence: Synthetic coding sequence
  source 1..225: mol_type = other DNA
atgggccggcggagcagcaagtgctgctgcatctacgagaagccccgggcgtttggcgaatccagcaccgaatcagatgaagaggaagaagaagggtgcgggcacacacactgcgtgagaggtcaccgcaagggtcggcgcagagcgacactgggccccactcctaccacgccaccacaaccacctgacccgagccagccacctccgggacctatgcaacattag

SEQ ID NO: 201455 - DNA, 381 bp, synthetic construct
  misc_feature 1..381: note = Description of Artificial Sequence: Synthetic coding sequence
  source 1..381: mol_type = other DNA
atggccgaggccggcgccggcctgagcgagaccgtgaccgagaccactgtgactgtcactacggagccagaaaacaggagtctcaccattaaactgagaaaaagaaagcctgaaaaaaaagtagagtggacgtctgacaccgtagataacgaacacatgggtcggagaagctcaaaatgctgttgtatctatgagaagcctcgggccttcggagaaagcagcacagagagtgacgaggaggaagaggagggatgtggtcacacccattgcgtcagaggccataggaaaggccggcgccgcgcgactctgggccctacacccaccacacccccacagccaccagacccatctcagcctccccccggccctatgcagcactag

SEQ ID NO: 201456 - DNA, 381 bp, synthetic construct
  misc_feature 1..381: note = Description of Artificial Sequence: Synthetic coding sequence
  source 1..381: mol_type = other DNA
atggccgaggccggcgccggcctgagcgagaccgtgaccgagaccactgtgaccgtcacgactgaaccagagaatcgcagtttaacaatcaagctaagaaagagaaaacccgaaaagaaggtggaatggacttccgacacggtagacaacgaacacatgggcaggcgaagctccaaatgctgctgtatatacgaaaagccccgagccttcggagaatcctctaccgagtctgatgaagaggaggaggagggatgtgggcatactcactgcgtccgcggccaccggaaagggagacgcagggctacgttggggcccacacccactacccccccccagcccccggaccccagccagccaccccccgggccaatgcagcactag

SEQ ID NO: 201457 - DNA, 225 bp, synthetic construct
  misc_feature 1..225: note = Description of Artificial Sequence: Synthetic coding sequence
  source 1..225: mol_type = other DNA
atgggccggcggagcagcaagtgctgctgcatctacgagaagcccagagccttcggggagtcttctactgaatcagacgaagaggaggaggagggatgtggccatacccattgcgtccgggggcacaggaaaggaaggcggagagctaccctgggtccaacccctacaacccctccccagcctccagatcccagccaacccccccccggaccgatgcagcactag

SEQ ID NO: 201458 - DNA, 225 bp, synthetic construct
  misc_feature 1..225: note = Description of Artificial Sequence: Synthetic coding sequence
  source 1..225: mol_type = other DNA
atgggccggcggagcagcaagtgctgctgcatctacgagaagccccgcgcttttggcgagtcatccactgaaagtgatgaagaggaggaagaaggctgtggacatacccactgcgttcgaggacatcggaaaggcaggcgaagggctaccttaggtcctaccccaactactcctccgcagccccctgatccatctcagccgcccccaggacccatgcagcactag

SEQ ID NO: 201459 - DNA, 225 bp, synthetic construct
  misc_feature 1..225: note = Description of Artificial Sequence: Synthetic coding sequence
  source 1..225: mol_type = other DNA
atgggccggcggagcagcaagtgctgctgcatctacgagaagccccgagctttcggggagagcagtacagagtcggacgaggaagaagaagagggctgcggccatacacactgtgtcagaggccacagaaaggggcgccgacgtgccacactgggcccgacgcccactacccccccacaacccccagaccctagccagcctccaccgggtccgatgcagcactag

SEQ ID NO: 201460 - DNA, 381 bp, synthetic construct
  misc_feature 1..381: note = Description of Artificial Sequence: Synthetic coding sequence
  source 1..381: mol_type = other DNA
atggccgaggccggcgccggcctgagcgagaccgtgaccgagaccactgttacagttacaacagagccagagaaccggtcgttaacaattaagttgaggaagcgcaaaccagagaaaaaggtggagtggacctctgacaccgtggacaatgaacatatgggccggcggtcctctaaatgttgttgcatctatgaaaaaccacgcgcttttggcgagtcatccaccgagagtgatgaggaggaggaagagggatgtggccacactcactgcgtgagagggcatcggaaggggcggcggcgtgctactctgggtccgaccccaactacacccccccagcctcccgacccttctcaacctccccctggaccaatgcagcactag

SEQ ID NO: 201461 - DNA, 225 bp, synthetic construct
  misc_feature 1..225: note = Description of Artificial Sequence: Synthetic coding sequence
  source 1..225: mol_type = other DNA
atgggccggcggagcagcaagtgctgctgcatctacgagaagcccagggcattcggcgaatcgtctacagagtcagatgaagaggaggaggagggttgtggacatactcactgcgtccgaggtcacaggaagggcaggcgtagagctacactcgggcctactccaacaaccccccctcaacctcccgatccgtcccagcccccacccggcccaatgcagcattag

SEQ ID NO: 201462 - DNA, 225 bp, synthetic construct
  misc_feature 1..225: note = Description of Artificial Sequence: Synthetic coding sequence
  source 1..225: mol_type = other DNA
atgggccggcggagcagcaagtgctgctgcatctacgagaagcccagagctttcggcgagagtagtactgagtctgatgaggaagaagaggagggttgtggccacacgcattgtgtcaggggccaccggaagggccggaggcgagccactctcggccccacacctacgacaccgccccaaccacccgatccatcccagccccctccaggtcctatgcagcattag

SEQ ID NO: 201463 - DNA, 381 bp, synthetic construct
  misc_feature 1..381: note = Description of Artificial Sequence: Synthetic coding sequence
  source 1..381: mol_type = other DNA
atggccgaggccggcgccggcctgagcgagaccgtgaccgagaccactgtgacggtgaccaccgagccagagaatcgctccttgactatcaagcttcggaaaagaaagccggagaagaaggtcgagtggacttctgatacagtcgacaacgagcatatggggcgccgaagtagcaaatgttgctgcatttacgagaagcctcgcgcgtttggagagagcagcaccgagagcgacgaggaggaggaagagggctgtgggcatactcattgcgtccgcgggcaccggaaaggcaggcgccgggcgactctggggcccaccccaacaactccaccacagccacccgaccccagtcagcctccccctgggccaatgcagcattag

SEQ ID NO: 201464 - DNA, 225 bp, synthetic construct
  misc_feature 1..225: note = Description of Artificial Sequence: Synthetic coding sequence
  source 1..225: mol_type = other DNA
atgggccggcggagcagcaagtgctgctgcatctacgagaagccccgagcttttggcgagtcttccaccgaaagcgacgaagaggaagaagagggatgcggacacactcactgcgtcagaggtcatagaaaaggacgtagacgagccacactgggtcctactccaacgaccccaccccagccacccgacccctcccagcctccaccagggcctatgcagcactag

SEQ ID NO: 201465 - DNA, 225 bp, synthetic construct
  misc_feature 1..225: note = Description of Artificial Sequence: Synthetic coding sequence
  source 1..225: mol_type = other DNA
atgggccggcggagcagcaagtgctgctgcatctacgagaagccccgggcctttggggagtcgagcactgagagcgatgaggaggaagaagagggatgcgggcatacccattgcgtccgcgggcataggaaggggcgacgccgggccaccttaggtccaacgcccacaactcctccacagcccccagacccatcccagcccccacctggtccaatgcaacattag

SEQ ID NO: 201466 - DNA, 225 bp, synthetic construct
  misc_feature 1..225: note = Description of Artificial Sequence: Synthetic coding sequence
  source 1..225: mol_type = other DNA
atgggccggcggagcagcaagtgctgctgcatctacgagaagcccagagcgttcggcgaaagtagtacagagtcagatgaggaagaggaggagggctgcggccacacccactgtgtccgtggtcatagaaagggccggcggcgcgccactttggggccgaccccgacgactccgccccaaccgccggacccctcccaaccgccccccgggcctatgcagcattag

SEQ ID NO: 201467 - DNA, 225 bp, synthetic construct
  misc_feature 1..225: note = Description of Artificial Sequence: Synthetic coding sequence
  source 1..225: mol_type = other DNA
atgggccggcggagcagcaagtgctgctgcatctacgagaagccccgggcgtttggcgagtcttcaaccgaatctgacgaagaggaggaagagggctgcggccacacacactgcgtcagggggcaccgcaaaggtcgacggcgagcgactttgggccctactccgacaaccccaccccagccaccagacccatcgcaaccccctccaggccctatgcagcactag

SEQ ID NO: 201468 - DNA, 225 bp, synthetic construct
  misc_feature 1..225: note = Description of Artificial Sequence: Synthetic coding sequence
  source 1..225: mol_type = other DNA
atgggccggcggagcagcaagtgctgctgcatctacgagaagcccagagcttttggtgaatcttctaccgagtccgatgaagaggaagaagaggggtgcggccacacccattgcgtgcgagggcatcgtaagggaagacgccgtgctacgctgggccccacacctactacacctccccaaccgccagacccaagtcaaccaccacctgggcccatgcagcactag

SEQ ID NO: 201469 - DNA, 225 bp, synthetic construct
  misc_feature 1..225: note = Description of Artificial Sequence: Synthetic coding sequence
  source 1..225: mol_type = other DNA
atgggccggcggagcagcaagtgctgctgcatctacgagaagccccgagcatttggagagagcagtacagaatccgatgaggaggaggaggaaggctgtgggcacacacactgcgtccgcggccaccgcaagggtaggcggcgcgctaccttgggcccgacacccactacccctccccagccaccagatccctcccaaccaccaccgggtcctatgcaacactag

SEQ ID NO: 201470 - DNA, 381 bp, synthetic construct
  misc_feature 1..381: note = Description of Artificial Sequence: Synthetic coding sequence
  source 1..381: mol_type = other DNA
atggccgaggccggcgccggcctgagcgagaccgtgaccgagaccacagtgacggtgacaactgaacccgagaatcggtccctgacgatcaaattacgtaagcgcaagcctgaaaagaaggtcgagtggactagcgacacagtcgataacgagcacatgggaagacgcagctcgaagtgctgctgtatttacgaaaagcccagggctttcggtgagagctctaccgaaagtgacgaagaggaagaggaggggtgtggacacacgcattgcgttcgcgggcacaggaaaggccgaagacgggccacgctgggcccaacacctaccactcccccccagcccccagaccctagtcaaccccccccagggcctatgcagcactag

SEQ ID NO: 201471 - DNA, 225 bp, synthetic construct
  misc_feature 1..225: note = Description of Artificial Sequence: Synthetic coding sequence
  source 1..225: mol_type = other DNA
atgggccggcggagcagcaagtgctgctgcatctacgagaagcccagagcatttggcgaatcctcaacagaatcggacgaagaggaggaggaggggtgtggccacactcactgcgtgagaggtcatcgcaaaggaagaagaagggccacactcggacctacgccgaccacccctccccaacccccagacccttcacagcctcctccggggcctatgcagcactag

SEQ ID NO: 201472 - DNA, 225 bp, synthetic construct
  misc_feature 1..225: note = Description of Artificial Sequence: Synthetic coding sequence
  source 1..225: mol_type = other DNA
atgggccggcggagcagcaagtgctgctgcatctacgagaagcccagggcctttggtgaatctagcaccgagtccgatgaagaagaagaagagggctgcggccacacccactgcgtgagaggacatcgcaaagggcggaggcgcgctactttgggccccacacccaccaccccaccacaaccccctgacccatcccaacctcccccaggtccgatgcagcactag

SEQ ID NO: 201473 - DNA, 225 bp, synthetic construct
  misc_feature 1..225: note = Description of Artificial Sequence: Synthetic coding sequence
  source 1..225: mol_type = other DNA
atgggccggcggagcagcaagtgctgctgcatctacgagaagccccgcgcttttggcgagagtagcacggagtctgacgaagaagaggaagaagggtgtggacacacccactgcgtccggggtcacaggaaaggccggcgacgcgctactctggggccaacgccaaccacacctccccaaccccctgacccaagtcagcctccaccagggccgatgcagcattag

SEQ ID NO: 201474 - DNA, 225 bp, synthetic construct
  misc_feature 1..225: note = Description of Artificial Sequence: Synthetic coding sequence
  source 1..225: mol_type = other DNA
atgggccggcggagcagcaagtgctgctgcatctacgagaagccccgggcttttggagagtcaagcaccgagtccgacgaagaggaagaggaaggatgcggccatacacactgtgtaagaggccatcgcaaagggcgccgcagggcgacactggggccgacaccaaccactcctccccagcccccagatccatcacagccacccccgggtcccatgcaacattag

SEQ ID NO: 201475 - DNA, 225 bp, synthetic construct
  misc_feature 1..225: note = Description of Artificial Sequence: Synthetic coding sequence
  source 1..225: mol_type = other DNA
atgggccggcggagcagcaagtgctgctgcatctacgagaagcccagagcctttggggaatcaagtacagaaagcgatgaagaggaggaagaaggctgtgggcatacccattgcgtgagggggcataggaagggccgcagaagagccacactgggaccaactcctactactccaccgcagcccccggatccctcccaacctcctccgggtcctatgcagcactag

SEQ ID NO: 201476 - DNA, 225 bp, synthetic construct
  misc_feature 1..225: note = Description of Artificial Sequence: Synthetic coding sequence
  source 1..225: mol_type = other DNA
atgggccggcggagcagcaagtgctgctgcatctacgagaagccccgcgccttcggagagtcctccaccgaatctgacgaggaggaagaggagggttgtggacacacccactgcgtcagggggcacaggaaaggtaggcgccgcgccacccttggcccaacacctaccaccccccctcagccgcctgacccgtcgcaacctcctccaggcccaatgcagcattag

SEQ ID NO: 201477 - DNA, 381 bp, synthetic construct
  misc_feature 1..381: note = Description of Artificial Sequence: Synthetic coding sequence
  source 1..381: mol_type = other DNA
atggccgaggccggcgccggcctgagcgagaccgtgaccgagaccaccgttacagtaactactgaacctgagaatcggtcattgacaatcaaacttcgcaaaaggaagccagaaaaaaaagttgagtggacctcggataccgtggataatgaacatatgggacgtcggagcagtaaatgttgttgcatttacgaaaagcccagggccttcggtgaatctagcacagaatcagacgaggaggaagaagaggggtgcggacatacccactgcgtgcggggtcaccgcaaaggcagacgacgtgctaccctaggtcctaccccaaccacacctccccagccccccgatccctcgcagcctccacctggccccatgcagcattag

SEQ ID NO: 201478 - DNA, 225 bp, synthetic construct
  misc_feature 1..225: note = Description of Artificial Sequence: Synthetic coding sequence
  source 1..225: mol_type = other DNA
atgggccggcggagcagcaagtgctgctgcatctacgagaagcccagagcatttggcgagagctctaccgaatccgatgaagaggaggaggaaggctgtggtcatacccattgcgtcagaggccataggaaggggcggcgccgggccacattggggcccactcccacaactcccccccagcccccggacccctcacaaccgcccccagggcctatgcagcactag

SEQ ID NO: 201479 - DNA, 225 bp, synthetic construct
  misc_feature 1..225: note = Description of Artificial Sequence: Synthetic coding sequence
  source 1..225: mol_type = other DNA
atgggccggcggagcagcaagtgctgctgcatctacgagaagccccgtgctttcggggagagcagcaccgaaagcgatgaggaagaggaagagggttgtggacatacccactgcgttagggggcaccggaagggcagacgccgggcaacgctggggcccactccgacaaccccccctcagccaccagatccctcacaaccacccccgggccccatgcagcactag

SEQ ID NO: 201480 - DNA, 225 bp, synthetic construct
  misc_feature 1..225: note = Description of Artificial Sequence: Synthetic coding sequence
  source 1..225: mol_type = other DNA
atgggccggcggagcagcaagtgctgctgcatctacgagaagcccagagcttttggagagagctccaccgaaagtgatgaagaggaggaggaggggtgcggtcacacccattgcgtccgcggccaccgaaagggtagaaggagagctaccctggggcctacaccgaccacgccaccccagccccctgatcctagtcagcctccaccaggacctatgcagcattag

SEQ ID NO: 201481 - DNA, 444 bp, synthetic construct
  misc_feature 1..444: note = Description of Artificial Sequence: Synthetic coding sequence
  source 1..444: mol_type = other DNA
atggccgacagcggcaccgccggcggcgccgccctggccgcccccgcaccgggacccggcagcggcggacctggcccccgggtctatttccagagcccgccaggtgccgccggggaaggtccaggcggcgccgatgatgaaggaccagttcgacggcaaggcaaggttactgtgaagtacgatcggaaagagttaaggaagcgattgaatctggaggagtggattctggaacagctcacccgactttacgactgccaggaagaagagattccagagttggagatagatgtggatgagctgctcgacatggaatccgatgacgcacgcgccgctcgtgtgaaagagttactagtcgactgctacaaacctacagaagcctttatttcgggcttgctcgacaagattagaggcatgcagaagctgtctacaccgcaaaagaagtag

SEQ ID NO: 201482 - DNA, 498 bp, synthetic construct
  misc_feature 1..498: note = Description of Artificial Sequence: Synthetic coding sequence
  source 1..498: mol_type = other DNA
atgagcgtggccaccggcagcagcgagaccgccggcggcgccagcggaggcggcgcacgagtattctttcaaagcccacgcggtggagcgggggggagccctgggtctagctctggcagcggctcctctcgcgaggatagcgctcccgtggccaccgcagccgccgccggtcaagtgcagcaacagcagcagaggcggcatcagcagggaaaggttacagttaagtatgacaggaaggaactcaggaagagattagtgctggaggagtggatcgttgagcaactgggacaactgtacgggtgtgaggaggaagagatgccagaggtggagattgacattgacgacctgctggatgccgactccgacgaggagcgggcctcaaagctccaggaagccctcgtcgactgttataaaccaactgaggaatttatcaaggagctcctgagcaggatccgcggtatgcgcaagctcagcccacctcagaaaaagtcagtgtag

SEQ ID NO: 201483 - DNA, 438 bp, synthetic construct
  misc_feature 1..438: note = Description of Artificial Sequence: Synthetic coding sequence
  source 1..438: mol_type = other DNA
atgctgagcagcagccccgccagctgcaccagccccagccccgacggggaaaatccgtgtaaaaaggtacactgggccagcgggcgaagacgcacaagcagcaccgatagcgagagtaagtcccatcccgattcctctaaaatccctcgttctcggagaccatcaaggctgaccgttaagtacgataggggccagttgcaacggtggttagagatggagcagtgggtggacgctcaggtgcaggagttattccaggaccaggcaacaccttccgagcccgagatagacctggaggctctgatggacctgagcactgaagagcagaagacccaactcgaggctatcttgggtaactgtccgcgccccacggaagcgtttattagcgagctcctgagccagctcaaaaagctgcgaagactgagccgccctcagaagtag

SEQ ID NO: 201484 - DNA, 603 bp, synthetic construct
  misc_feature 1..603: note = Description of Artificial Sequence: Synthetic coding sequence
  source 1..603: mol_type = other DNA
atgctgagcagcagccccgccagctgcaccagccccagccccgacggcgaaaacccctgcaagaaggttcattgggccagtgggaggcggcgaacgtcaagcactgacagtgagtcaaaatcacatccagatagctcaaagattcccaggagcaggaggcctagccgcctgactgtcaagtatgatcgtgggcaactgcagcgatggttggaaatggagcagtgggtcgacgctcaggtgcaggagctgtttcagtcgctggccttgtcaccaaggctggaatgtagtggcgtcatccattcgctgcagttgctcccccctgggttcaaccgattcagttgtctgagttcatggagcagttgggactacgggatcaagcagcccttgctatcactccgcctgacctggaaactgagctggatatatccccagaggtcgcggaggttgtcttggcgcccattcttaggtaccgcccccgcacctcagcgtttgctgagcctgtcctgttctgtcaatagcagaaattctggagacagcgccgggctgagaaataagcctgagcgaccatccctagccgcctctgcactgcctggattgccttag

SEQ ID NO: 201485 - DNA, 516 bp, synthetic construct
  misc_feature 1..516: note = Description of Artificial Sequence: Synthetic coding sequence
  source 1..516: mol_type = other DNA
atggagcaggacaacagcccccggaagatccagttcaccgtgcccttgctggagcctcacctggaccctgaggcggcagaacagatccgcaggaggaggccaaccccggccactcttgtcttgacaagtgatcagtcgagccccgaaattgacgaggaccgcatccctaatcctcatctgaagtccactttagccatgagccctaggcaaagaaaaaagatgactagaatcactcccacaatgaaggaactgcagatgatggtcgaacaccatttgggccagcagcaacagggggaagaacctgaaggagccgctgaatctactgagacacaggagtctcggccaccagggatccctgataccgaggtggaatcaaggctgggaacgtccggaacagccaaaaagactgctgagtgtattcctaagactcacgagcgcggtagcaaagagcccagcactaaggaaccatccacccatataccccctctcgatagcaagggtgcaaatagcgtgtag

SEQ ID NO: 201486 - DNA, 462 bp, synthetic construct
  misc_feature 1..462: note = Description of Artificial Sequence: Synthetic coding sequence
  source 1..462: mol_type = other DNA
atggagcaggacaacagcccccggaagatccagttcaccgtgcccttattggagccacacctagatcctgaagccgccgaacagataagacggagaagacccacccctgccactcttgtgctgacctcggaccagtcctctccagagattgacgaagatcggatccccaatccccacttgaagaagttacagaacgcaagcctgaaacttactcgggaagctgtaagaaatccagcacagaaaaacccccagcccatttatcatcattggattcccagagagcctaccagatgtcatcggagaggcggcaccggcggacaaaaatctgttgggggcttcccttgctctacccacacactggcgcccttctatgttttcacacgcagtattcttctactaaagcgtggggagcgcatgtcccatcccctggaaccacgggacgaccccactaagatgccctag

SEQ ID NO: 201487 - DNA, 330 bp, synthetic construct
  misc_feature 1..330: note = Description of Artificial Sequence: Synthetic coding sequence
  source 1..330: mol_type = other DNA
atggagcccaacagccccaagaagatccagttcgccgtgcccgtgtttcaatctcagattgctccagaggctgccgagcagatacggaagcgccgccccaccccagcgtcgctggtgattctgaatgaacataaccccccggaaattgacgacaaaagaggacctaatacccaaggtgagctccaaaatgcctcaccgaaacagaggaagcagagtgtgtatacaccccctaccattaagggagtgaagcacctgaaaggacagaatgaatctgcatttcctgaagaggaggaaggcaccaacgagcgggaagaacaaagggaccattag

SEQ ID NO: 201488 - DNA, 330 bp, synthetic construct
  misc_feature 1..330: note = Description of Artificial Sequence: Synthetic coding sequence
  source 1..330: mol_type = other DNA
atggagcccaacagccccaagaagatccagttcgccgtgcccgtgttccagtcccagatcgccccagaggccgctgagcaaattaggaaaagacgtcctacgcctgcgtccctggtgatcctgaatgagcataacccacctgagattgacgataagcggggtccaaacacccagggtgaactgcagaacgcgagccctaagcagcgaaagcagagcgtgtacacccctcctaccatcaagggagtgaagcacttaaaaggacaaaatgagtccgccttccccgaagaagaagaagggaccaatgagagggaagagcagcgagatcattag

SEQ ID NO: 201489 - DNA, 330 bp, synthetic construct
  misc_feature 1..330: note = Description of Artificial Sequence: Synthetic coding sequence
  source 1..330: mol_type = other DNA
atggagcccaacagccccaagaagatccagttcgccgtgcccgtgttccaatcccagatcgcacctgaggcggccgagcagatcagaaagaggcggcccaccccagccagtctagtgattctgaatgagcacaacccacctgagattgacgacaaacgaggccccaatacgcagggagagctccagaacgccagccccaaacaaagaaaacaatccgtttacactccccctacaatcaaaggcgttaagcacttgaaagggcagaacgagtccgcatttccggaggaggaagagggcaccaatgagagggaggagcaacgtgatcactag

SEQ ID NO: 201490 - DNA, 618 bp, synthetic construct
  misc_feature 1..618: note = Description of Artificial Sequence: Synthetic coding sequence
  source 1..618: mol_type = other DNA
atggccgccagcaccgccagccaccggcccatcaagggcatcctgaagaacaaaaccagtacaacctctagcatggtcgcaagcgccgaacagccgagggggaatgttgacgaggagttgtcaaaaaaatcacaaaagtgggatgagatgaacattttggcgacgtatcatcctgctgacaaagattacggtctcatgaagatagatgagccatcgactccttatcacagtatgatgggagatgacgaggatgcctgcagtgacacagaggctacggaggccatggcaccggatatcctggcacggaaactcgctgctgctgaaggactggagcccaagtaccggatacaggaacaagaatcctccggtgaagaagacagcgatctatcccctgaggagagagaaaagaagcgacagttcgaaatgaaaaggaagctgcactataacgagggactgaatattaagcttgctcggcagctgataagcaaagacctacacgacgacgatgaagacgaagagatgctcgagaccgccgatggcgaaagcatgaatacagaagaaagcaaccagggctctacaccatcagatcagcagcaaaacaagctgcgaagttcctag

SEQ ID NO: 201491 - DNA, 3093 bp, synthetic construct
  misc_feature 1..3093: note = Description of Artificial Sequence: Synthetic coding sequence
  source 1..3093: mol_type = other DNA
atgaagatggccgacgccaagcagaagcggaacgagcagctgaagagatggataggcagcgagacagacctggagcccccagtcgtcaagaggcagaagaccaaggtgaaattcgatgatggggctgtgtttctggctgcatgtagctccggagacacagatgaggtcctcaagctgcttcacagaggggccgatattaattatgcgaatgtggacgggttgacagcacttcatcaggcatgcatcgatgacaatgtggatatggtgaagttcctagtagaaaacggagctaatatcaatcagcccgataacgagggctggattcctctgcatgccgccgcctcctgtgggtatctggacattgctgagtttctgattggccagggggcccacgttggcgccgtgaactccgaaggagacacgccgctcgacattgccgaagaagaagccatggaggaactcctgcagaacgaggttaataggcagggagtagatatcgaagcagccagaaaggaagaagagagaatcatgctacgcgacgctaggcagtggctgaactccgggcatataaatgacgtgagacacgccaagtcaggtgggactgctttgcacgtggctgccgccaaagggtacacagaagtgttgaagcttctgatacaggcggggtatgacgtcaacatcaaagattatgatggttggacacctctgcacgcggccgcacactgggggaaggaggaagcatgtcgcatactggtcgacaacctctgcgatatggaaatggttaacaaggtaggtcaaactgccttcgatgtggccgacgaagacatcttgggctatctggaggaattgcaaaagaagcaaaacctgctccatagtgaaaaacgcgacaaaaagagccctctaatagaatctaccgctaacatggacaataaccagtcacaaaagacctttaaaaacaaggagactttaattatcgaaccggagaagaacgcttctcggatcgaaagcctggaacaggagaaagttgacgaagaggaggagggaaaaaaggacgagtcctcttgtagtagtgaagaagacgaggaggacgacagtgagtccgaggcagaaactgataagaccaaaccccttgcaagtgtgaccaatgctaacacaagcagcactcaggccgcccctgtagctgtgacaacccccactgttagctcggggcaggctacgcctaccagccccattaaaaaattccccactacagccactaaaataagccccaaagaggaagaacgtaaggacgaatctcctgcgacttggcggctaggccttaggaaaacaggaagctatggagccctcgcggagattacggcgtccaaagagggccagaaggaaaaagacacagctggcgtcactcggtctgcttcctctcctagactttcttcaagcctggataacaaggagaaggagaaagatagcaagggcactaggctcgcctacgtcgcaccaaccattcccagacgactagcctccacctccgacattgaggagaaggaaaaccgggattcatcatcactgcggacctctagctcatatacaaggcggaagtgggaagacgacctcaaaaaaaactcctcagtgaatgagggcagcacataccataagagttgctcctttgggagacggcaggatgacctgatatcctcttctgtcccttctactacctctacacccaccgtaacatcagccgcaggtctgcagaaaagccttctcagtagcacctcaaccactacaaaaatcactacagggtccagttctgctggaacgcaatcgtctacttcaaacagactttgggccgaagactctaccgaaaaagagaaggattctgtgccgactgctgttaccatccccgtggcaccgaccgttgtgaacgcagccgcctccaccaccacgctgactacaacaacagctggcaccgtatcaagtaccacagaggttagagaaaggagacgctcctaccttacccccgttcgtgatgaagaatccgagagccaacgtaaagcccgctccagacaggccagacagtctcgccgatcaacacagggcgtcaccttaacagatcttcaggaggcggaaaagaccattggcaggagccggtccactcgtacgcgcgaacaagagaatgaagagaaagaaaaggaggaaaaagagaaacaggacaaggagaaacaggaagagaaaaaggagtccgaaacttcccgcgaagatgagtacaagcagaagtatagtcggacttatgacgagacgtaccagaggtatcggcccgtgagtacgtcttcatctactaccccctctagctccttaagcaccatgagctctagtttatacgcatccagtcagctgaaccgcccaaactctttagtgggcattaccagcgcctatagcagaggaatcactaaggagaatgaaagagagggcgagaaacgggaagaggagaaagagggcgaagataaatcgcaaccaaagtccattagagagcgccgcagaccgcgagaaaaacggaggtccaccggggtgagtttttggacccaggattctgacgaaaatgagcaggaacagcagtcagatacagaggaagggtcaaataagaaggagacccaaacagactctattagccgatacgaaacatccagcaccagcgccggcgataggtatgacagtctccttgggcggtccggaagctacagttacctagaggaaaggaagccatactcttcccgcctggaaaaagatgactctacggactttaagaagctgtacgagcaaatcctagcagagaacgaaaaactgaaagcccagctccacgacactaacatggaactgaccgacttgaagttgcagcttgagaaggcgacccagcgccaggagcggtttgccgatagaagcctgctggaaatggaaaagcgtgagcgtcgagcactagagaggcggatatccgaaatggaagaggagctgaaaatgttgcccgacctgaaagcggataaccagcgccttaaggacgaaaacggggctctcatccgcgtgatctctaaactgagcaagtag

SEQ ID NO: 201492 - DNA, 2916 bp, synthetic construct
  misc_feature 1..2916: note = Description of Artificial Sequence: Synthetic coding sequence
  source 1..2916: mol_type = other DNA
atgaagatggccgacgccaagcagaagcggaacgagcagctgaagcgttggattggctctgagaccgatctggagccacccgtggtgaagaggcagaagacaaaagtcaagtttgatgacggcgctgtcttcctcgctgcttgttcctctggtgatacggacgaagttttgaagctcctgcaccgtggtgcagatatcaactatgcaaatgtggatggtctgaccgcactgcaccaggcctgtattgacgacaatgtagatatggtcaaatttcttgtggagaatggggctaacattaatcaacccgataatgagggatggattcccctccatgccgccgcgagctgtgggtatctggacatcgctgagtttctgattggtcagggcgcccacgtaggcgccgtgaatagtgagggcgataccccactcgatattgcagaggaggaagctatggaggagctgctgcagaacgaagtgaatcgccaaggggtagacatcgaggcagcccgaaaagaagaagagcgtattatgttgcgtgacgccagacagtggctcaatagtgggcacataaatgacgttcgtcacgcgaaatcgggggggacggccctgcatgttgctgcagcaaaaggctacaccgaggtgctcaagctgctgatccaggctgggtatgatgtgaatattaaggattatgacggctggacacccctacacgcggctgctcactgggggaaggaagaagcctgtaggattctagtggacaatctgtgtgatatggaaatggtgaacaaggtcggacaaaccgcatttgacgtagctgatgaagacatccttggttatcttgaggagctgcaaaagaaacaaaatttactccacagtgaaaagagagataagaagtccccactgatcgaatcaaccgccaacatggataacaaccagagccaaaaaacatttaagaataaagagactctcatcattgagcctgaaaagaatgcatcgaggatcgagtctctagagcaggaaaaggtcgatgaggaagaggaggggaaaaaagacgaaagctcttgcagctctgaagaagacgaggaagacgactcagaaagcgaggcggagacagataaaaccaagcctctcgcctccgtgactaatgcaaacacgagttccacccaggccgctccagtggctgtgaccactcccactgtttcctccggccaggccactcccaccagtcccattaagaaatttcctacaaccgctacgaaaatttcaccgaaggaagaggaacgtaaagatgagtcgcccgcaacctggcggctgggcttgcgtaagacaggatcttacggcgcactggccgaaatcaccgcatcaaaggagggacagaaggaaaaagacaccgctggggtgactagaagtgcctcatctcctcgtctcagttcctctttagacaacaaagaaaaggagaaggattctaagggcactagactcgcatacgttgctccaactattccacgaagactcgcctctaccagcgacatcgaagagaaagagaaccgtgattcttcttctcttagaacctcatccagctacacacgtcgtaaatgggaggacgacttgaaaaagaattcatcggttaatgagggcagcacgtatcataaaagctgcagttttggtagacggcaagatgatcttattagctcctcggttcccagcaccacatcgaccccaactgtgacttctgcggccggcctgcagaagtctctgctgagcagtacatcaactactaccaagattactacaggatcctcttccgcaggcactcaaagccgttcatatcttactcccgtgcgggacgaggaaagcgaaagccagcggaaggcccggagtcggcaggcccgtcagtctcgccgcagcacacagggcgtaacacttacagacctccaggaagccgagaaaactattggacgatcacgctctacccgcacccgcgagcaagagaatgaggagaaggagaaagaagagaaggaaaaacaggataaagaaaagcaggaggaaaagaaagagtcggaaacatcacgggaggatgaatataagcagaaatattctcgaacctacgacgagacctatcagaggtatcgccccgtttcgacaagctcttcaacgactccctcgtcctccctgagcacgatgtcatcttcgctctacgcctcgtcacagctgaatcgccctaatagcctggtcggcatcacttcagcttatagtcgaggaatcactaaggaaaatgaacgcgagggagaaaagagggaggaggagaaagaaggcgaagacaaatctcagcctaaatctatcagagagcggagacgcccacgcgaaaagagaaggagtacgggggtttcattttggactcaagacagcgacgagaacgaacaagagcaacagagcgataccgaagaaggtagtaacaagaaggagactcaagttaataccattacgttatacgagacctcaagtacatccgccggtgacaggtacgacagccttctgggcaggagcggctcctatagctacctagaggagcgaaagccctatagttccagattagagaaggatgatagtaccgatttcaagaaactgtacgagcagattctcgccgaaaacgagaagctcaaagcacaactacacgatactaacatggaactcaccgacctgaaactccagctggagaaggctacgcaacggcaggagaggtttgctgatcgtagtctcctagaaatggagaaacgagagaggagggctttggaacgccgcatttcagagatggaggaggaactcaagatgctaccggatctcaaggctgataaccagcgactaaaggatgagaatggagcgttaatccgcgtaatttcaaagctgtccaagtag

SEQ ID NO: 201493 - DNA, 2925 bp, synthetic construct
  misc_feature 1..2925: note = Description of Artificial Sequence: Synthetic coding sequence
  source 1..2925: mol_type = other DNA
atgaagatggccgacgccaagcagaagcggaacgagcagctgaagcgatggattggatcagagaccgatctcgagccacccgtcgtcaagaggcagaagaccaaggtgaagttcgacgatggggccgtatttctcgctgcttgttcctctggggacaccgacgaggtgttgaaactgttgcaccggggcgctgatattaattacgccaacgtggacggactgaccgccctgcatcaagcgtgcatcgatgataatgttgacatggtcaaatttttggttgagaacggcgcgaacataaaccagcctgataacgaaggctggatccctctgcatgctgccgcctcttgcggatatctggatatcgccgaatttctgatcggacagggggcccacgtgggcgccgtcaatagtgagggagacacacccctcgatatcgcagaagaagaggccatggaagagcttttacagaatgaagtgaatagacagggtgtggatatcgaggccgcacggaaagaagaagagcgcattatgttgcgggacgcccgacagtggctgaacagcgggcatatcaatgatgtccgccacgcaaaatccggcggtaccgcattgcatgtcgctgctgccaagggatacaccgaagtgctgaagctgttgatacaggcgggttatgacgtaaacatcaaggactacgatggctggacacctctgcacgccgcagcacactggggtaaggaggaagcctgtaggattttagtggataatttgtgcgacatggaaatggtgaataaggtcggacagacagctttcgatgttgctgacgaagacattctgggatacctggaggagttacagaaaaaacaaaatctactgcacagcgagaagagagacaagaaatcacccctcattgagtcaaccgctaacatggacaataaccagtctcagaagacattcaaaaacaaggagacgctgataatcgaacccgagaaaaacgcaagccggatcgagagcttggagcaagaaaaagtggatgaggaagaggagggaaagaaggacgagtccagctgctcctccgaagaggacgaggaggatgacagtgaatcagaggcggaaaccgataagactaaacctctggcgagtgtaactaacgctaatacaagttccacccaggccgctcccgtagccgtgaccaccccaactgtctccagcgggcaagctacacccacctcaccaatcaagaagttcccaacaacagccaccaaaatcagtcccaaggaggaggaaaggaaggacgaatcccccgccacctggcgtctaggcctacgaaagacgggcagttatggggcgttagctgagattacagcctctaaggagggccaaaaagagaaggatactgctggggtcaccaggtcggcaagtagccctcgactatcgtcctccctcgacaacaaagaaaaagagaaggactcaaagggcacaagactggcttacgtggcgccaaccatcccccgaagactggcctccacatccgatatagaagaaaaagagaacagggattcatccagcctacggactagctccagttatactagaagaaaatgggaggatgatctcaaaaaaaattcatccgtgaacgaaggtagtacctaccataagtctaccagcaatcgcttgtgggctgaagactcgaccgaaaaggaaaaggatagcgtccctaccgcagtgacgatacctgtggcccctactgttgtcaacgctgcggcctctactacaacattgacaactacgacggccgggactgtctcctcaactactgaagtaagagaacgcaggaggagctacttgacccctgtccgtgatgaggagtctgagtcccagcgcaaagctagatccagacaggcgaggcagagtcggcggtccacccagggcgtgacgctcactgacctccaagaagcggagaaaactatcgggcgaagccggtccactcgaactagagagcaggagaacgaggagaaggagaaggaagagaaggagaaacaagataaggagaaacaggaagaaaagaaagagagcgaaacctctagggaagatgagtataaacagaagtattctaggacatatgacgagacctaccagaggtaccgcccggtgagcacctcctcaagcaccactccaagttcctccctcagtactatgtcctcctcattatacgcttctagccagttgaacaggcctaattctttagtaggtatcaccagcgcttattctagagggattactaaggaaaacgagagagaaggggaaaagcgagaggaagagaaggagggagaggataagagccagcccaaaagtattagagagcgccgtaggcccagggaaaaaaggagatcaactggggtgtcattttggactcaggactcagacgagaatgagcaagagcagcagtcagacaccgaggaggggtcaaataaaaaagaaacccaagtcaacaccatcacactctatgagactagttctacctctgccggcgatcgttatgactcactgctgggaagatccggttcatactcttatctagaggaacggaaaccttactcgagcagactggagaaggacgatagcacagatttcaagaagctgtacgagcagattctggccgaaaacgaaaagctgaaggctcaactgcatgacacaaatatggaactgacagacctcaaacttcagctggagaaagctacgcaaaggcaggaacggttcgctgatcggtctttgctcgagatggaaaagagagaaaggagggcgcttgagcgcaggatctctgagatggaagaagagctgaagatgttgcctgacctcaaggccgacaatcagcggctgaaagacgaaaacggagcactcataagagtgatctccaagttgtcaaaatag

SEQ ID NO: 201494 - DNA, 2988 bp, synthetic construct
  misc_feature 1..2988: note = Description of Artificial Sequence: Synthetic coding sequence
  source 1..2988: mol_type = other DNA
atgaagatggccgacgccaagcagaagcggaacgagcagctgaagagatggatcggaagcgaaacggacctggaacctcccgtagttaagcgacagaagactaaggtgaagtttgatgacggcgcggtgttcctcgccgcctgcagctccggcgacacggatgaggtgctgaaactgctgcaccgcggcgcagatattaactacgctaatgtggatggactgacagccctgcaccaagcttgtattgatgataatgtggacatggtcaagtttctggtcgagaacggcgccaatataaaccagcctgataacgaaggctggattcccctgcacgcagcagctagctgcggctatcttgatatcgctgaattcctcattggccagggcgcgcacgtgggagcggttaatagtgagggcgatactccccttgatatagcagaagaagaagccatggaggagctgctccagaacgaggtgaatcgccaaggcgttgacatcgaagctgcgaggaaagaggaagagaggattatgcttagggatgcccgacagtggctaaactcggggcatataaacgacgtcagacatgctaagtctggcggaacagctctgcacgtcgctgccgccaagggatacacagaagtcctgaaactgctgatacaagctggctatgacgtgaacatcaaagactatgacggttggacaccactccacgcagctgcacactgggggaaagaagaggcttgccgcattctggttgataatttgtgcgacatggagatggtcaacaaagttggtcagaccgctttcgacgtggcagacgaggatattctcggttatctagaagagctgcaaaagaagcaaaatttgttgcattccgaaaaaagagacaagaagagtccactgattgaatcaaccgctaatatggataacaaccagtcccagaaaacctttaagaacaaagaaactctcattatcgagcccgaaaaaaatgctagcaggattgaatcactcgagcaggagaaagtcgacgaggaggaggagggaaaaaaagacgagagtagctgtagcagcgaagaggacgaagaggatgacagcgaatccgaagcagagaccgacaaaacaaagccccttgccagcgttacgaatgctaacacatcatctactcaggctgctcccgtcgccgtgacgacacccaccgtgtccagcgggcaggccactcctacatcacccataaagaaatttcctactactgccaccaagatttctcctaaggaagaggaaagaaaggacgagtctcccgccacgtggcggctcggactgagaaagacagggtcctatggcgctctggctgaaattactgctagcaaggagggacagaaagagaaggacaccgcaggcgttacccggtctgcttccagccctcgactgtcttcctcgctggacaataaagaaaaggagaaggactccaagggcaccaggctggcgtacgtggctcccaccatccctaggcgactcgcctccacatccgacatagaagagaaagaaaaccgcgattctagcagcctgcgaacaagcagtagctacacacgccggaagtgggaagatgatcttaaaaaaaattcttccgtgaatgagggaagtacctaccacaaaagttgctcattcggcaggcgtcaagacgatctcatctcctcttctgtgcccagtactacaagcacacctacagtgacgagtgcagccggattacagaaatctctgctgagttcaactagcaccactactaagataacgactggatcctcttccgccggcacccagtcatctacttctaaccgcttgtgggccgaggattcaactgagaaagagaaggattcggttcctaccgcggtgaccatcccggtggcgcctaccgtggttaacgcggcggcttctactaccacgttaaccacgactacagccggcacagtatcaagtactaccgaggtgagggaacgcaggcgcagttatctgactcccgttcgggatgaggagtcagaatcacagagaaaagccagatcgcgccaggcgcggcaatccagacggagtacccagggcgttaccctgacagacttacaggaagctgaaaagactattgggagatcccgctcgactaggaccagggaacaagagaacgaggaaaaagagaaagaagagaaggaaaagcaggataaagaaaagcaggaggagaagaaagaatctgagacatccagggaagacgaatacaagcagaaatattcccgcacatacgacgagacttatcagcggtaccggcctgtgtcgactagctcctccaccacccccagctcatctctgtccacgatgtcctcttcattgtacgcaagttcccagctcaacagaccaaacagcttggtcggcataacatccgcctacagtagaggcattacgaaggagaacgaacgcgagggggagaaaagggaggaggagaaggaaggggaggacaagagccagccaaagtcgatccgcgagcgccggcgacccagagaaaagaggcgctccacaggcgtgagcttttggactcaggattccgacgagaacgagcaggagcagcaaagcgatactgaggaggggtcaaacaagaaggaaacccaagtgaacaccatcacactgtacgaaacaagctcaaccagcgccggcgaccgctacgacagccttctcgggaggtctgggtcatattcttacctggaggaacgaaaaccatattcctcccggctggagaaagatgacagtacggactttaagaagcggcaagagcggttcgctgatcgcagcctactggagatggagaaacgtgagcgtagagcacttgagcgtagaatcagcgagatggaggaggagctaaaaatgctgcccgatctgaaagccgacaatcagaggctcaaagatgaaaacggcgctctgatccgtgtgataagcaaactctctaaatag

SEQ ID NO: 201495 - DNA, 2988 bp, synthetic construct
  misc_feature 1..2988: note = Description of Artificial Sequence: Synthetic coding sequence
  source 1..2988: mol_type = other DNA
atgaagatggccgacgccaagcagaagcggaacgagcagctgaagcggtggattggctcagagactgacctagaaccacccgtcgtaaagcgtcaaaagactaaggttaaatttgatgacggcgctgtctttctcgcagcttgcagtagtggggatacagatgaggtgctgaagctcctgcaccggggggccgacattaattacgctaacgtcgacggattgacagctctccaccaagcctgcatcgacgacaacgtggacatggtgaagttcttggtggagaatggggcaaatattaaccagcccgataacgagggctggattcccctgcatgccgcggcgtcttgtgggtaccttgatatagccgagtttctcataggacaaggggcccacgttggagccgttaatagcgaaggcgacactccactggatattgctgaagaagaagccatggaagagctgcttcagaacgaggtaaataggcagggcgtggacattgaagctgcccgcaaggaagaggaacggatcatgttgagagacgccaggcagtggcttaattccggccacatcaacgatgttcgacacgcaaagagtgggggaaccgccctccatgttgctgcagctaaagggtatactgaagtccttaagttgctgattcaagccggttatgatgtgaatattaaagactacgacggctggacaccactgcacgctgcagctcactggggcaaagaagaagcttgccggattctagtggacaacctgtgcgatatggaaatggtcaataaagttggccaaactgcttttgatgtcgccgatgaggacatcttgggttacctagaggaactccaaaagaagcaaaacctcttacattccgagaaaagggacaagaagagtcctctcattgaatccaccgctaacatggataacaaccagtcccagaaaacttttaagaacaaggaaactctgatcatcgaacctgagaaaaacgctagtaggattgagagcctcgaacaggagaaggtggatgaggaagaagagggcaaaaaagatgagagctcctgctcaagcgaagaggacgaggaggatgacagtgagtccgaggccgagactgataagacaaaacccttagcttcagtcaccaatgctaacacgtccagcacgcaagctgcccccgtggcggtcaccacccctactgtgagttccgggcaggctacacccacaagccccatcaaaaaattccctacaaccgcaactaagatctctccaaaggaggaagagaggaaagacgagagtcccgcaacatggcgtctcggcctgcgaaaaaccggatcctatggagccctagcagagattaccgcatctaaagaaggacagaaagagaaagacaccgccggcgtgacaaggagcgccagcagcccgcgcctgagctcctcactcgataacaaagaaaaagagaaggatagcaagggtaccaggctagcatacgtggctccaacaataccgagaaggcttgcatccacctccgatatcgaagagaaggagaatagggactcaagtagtctgcgtacatcctcatcctacacccggcggaagtgggaagatgatcttaaaaagaacagctccgtgaacgagggtagcacctaccataaatcctgtagctttggacgaagacaggatgatctgatctcctcgtctgtaccgagcaccacttcaaccccaacggtaacaagcgcggccggtctgcagaaaagcctgctgagctctacatccactacaactaagatcacaacaggctcatcttctgcagggacccagtcctctacatccaaccggctctgggctgaagatagtaccgagaaggaaaaggatagtgtgcccacagctgttaccattcctgttgcgccaacagtagttaatgctgcggcatcaactaccacgctgactacaacaacagccggcacagtatcttccaccaccgaagttcgcgaaaggcggcggtcctacctgacccctgtccgggacgaagagagcgaatctcagcgcaaggcacgcagtaggcaggccaggcaatcacgtcgttccactcaaggagtgacgttaacagacctacaagaggctgagaaaactattgggcgaagccggtccacaagaactagagaacaagagaacgaggaaaaggaaaaggaagagaaagagaaacaggacaaagagaagcaggaggagaagaaagaaagcgagacctcccgcgaggatgaatacaaacaaaagtattctcgcacctacgatgaaacctaccagagatatagacccgtgtcaaccagctcttccactactccgtcatctagtctaagcactatgagcagctctctctatgcctcctcccaactcaatcgtcccaatagcctggtgggcatcacctccgcttatagccgggggatcactaaagaaaacgaacgtgaaggagagaagagggaggaggaaaaggaaggagaggacaagtcccaacccaaaagcatcagagagcggcggagacctagggagaagaggcggtccaccggcgttagcttctggactcaggattctgacgaaaacgaacaagagcaacaaagcgacacagaggaaggttcaaacaagaaggaaacgcaaaccgatagcatttcacgatacgagacctcctcaacttctgcaggagacagatacgatagtttactcggaaggtcgggatcttattcatatctcgaagagaggaagccctactcatctaggctggagaaggatgattctacagattttaaaaagaggcaagagcgtttcgcggatcggtcacttttagaaatggagaagagagagaggcgggccctcgagcgtcgtatatctgaaatggaggaagaacttaaaatgcttccagacctcaaggccgataaccagcgccttaaggatgagaacggcgccctgatccgcgtcatttctaagttgtcgaagtag

SEQ ID NO: 201496 - DNA, 3093 bp, synthetic construct
  misc_feature 1..3093: note = Description of Artificial Sequence: Synthetic coding sequence
  source 1..3093: mol_type = other DNA
atgaagatggccgacgccaagcagaagcggaacgagcagctgaagaggtggataggatccgagacagacctggagccccccgttgtaaagcgtcagaagactaaggtaaaattcgacgatggtgctgtgttcctagccgcctgctcaagcggtgataccgacgaagtgttgaagctgttgcacaggggtgcggatataaactacgcaaatgtggatggcttgactgctctccatcaggcttgtattgatgataacgttgatatggtaaagttccttgtggagaacggcgctaatatcaatcagccagataacgaagggtggatcccattgcatgcagcggccagctgcggctacctggacatcgcggagttcctgatcggacagggggcccatgtcggtgctgttaattccgaaggggacaccccactcgacattgccgaagaggaagcaatggaggagctcctccagaatgaggttaaccgccagggagtggacattgaggccgcacgtaaggaggaggaacgaatcatgctgcgcgacgctcggcagtggctgaactctggacacatcaacgatgtgcgccacgccaagtccggtggcactgccttacatgttgctgctgcgaagggctacaccgaggtgcttaagttgcttatccaggcgggctatgacgtgaacataaaggactatgatggctggacccccctgcacgccgccgcacactgggggaaagaagaggcgtgcaggatcctcgtcgacaacctctgtgatatggagatggtgaacaaagtggggcagactgcattcgatgtggctgatgaggacatactcgggtatcttgaggaactgcagaagaaacagaatttgttacacagcgaaaaaagggataagaagtcacctctcatcgaaagcactgcgaatatggacaacaaccagagccagaaaacatttaagaacaaggagacgctgatcatagaaccggaaaagaacgcatcacgtattgagtcactagaacaggagaaagtggatgaagaagaggagggcaagaaggacgaaagcagctgctcatccgaagaggatgaggaagacgatagtgagtctgaggccgaaaccgataagaccaagcctctggcctccgtgactaacgcaaacacatcgtctactcaggctgcaccagtcgccgtgactactccaactgttagtagtggccaggcgacacctacatcccctatcaaaaagttccccaccacagcaaccaagatctcacctaaagaggaagaacgcaaggacgaaagcccagctacctggcgtctcggcctgcgcaaaacaggatcttacggagccttggcagagatcactgctagcaaagagggccagaaagaaaaggataccgctggcgtgacacggtcagcatcatccccccggctctcgtctagtctggataataaggaaaaggaaaaggacagcaaagggacccggctagcatacgttgcccccacgattcctaggaggctcgcctcaacctctgacattgaggagaaggagaacagagattcttcgagcctcaggacttccagcagctacactagacggaagtgggaagacgacttgaagaaaaacagcagcgtcaacgaaggttccacgtatcataagagctgttcctttggacggcggcaagatgacctaatcagcagctccgtgccaagcactacatctactcccactgtcacgtccgcggcgggtctgcagaagtcactcttatcatctacctcaactaccacaaaaattaccaccggcagttcatcggcaggaactcagtcctcaacgtccaatcgcctctgggcagaggattccacagagaaagagaaggatagcgtcccaacagcggtgacaataccggttgcccctacagtggtcaacgccgccgccagtactaccacactaactactaccactgcgggaaccgtttcaagtacgactgaggtcagggaaaggcggcgcagttatctaacgcctgttagagacgaagaaagtgaaagtcagcgcaaagctcgatctcgccaggctcggcaatcaaggcgcagtactcagggcgtgacccttacagacctacaagaggctgagaagaccattgggagatcccgctccactcggactagggagcaggaaaatgaagagaaggaaaaggaggaaaaggaaaagcaggacaaggagaaacaagaagagaaaaaggagagcgaaacctcccgagaggacgagtataagcaaaagtattcaagaacctacgacgagacctaccagagatataggcccgtgtccacatccagttcgacaactccatcaagttccctgagcaccatgagttcgagcctatacgccagctcccagctcaataggcctaactctctggtggggataaccagcgcatatagccggggtataacgaaggagaacgagcgggagggagagaaaagagaggaggagaaagaaggagaagataagtctcaacccaagtccatccgcgaacgaagacggccccgcgagaagcgaagaagcacaggtgtttcattctggacacaggactccgatgaaaacgagcaggagcaacagtctgataccgaggagggttcaaataaaaaagaaactcagacagattctatttcaagatacgaaacatctagtacatctgctggagatcggtatgattctctgctgggtagatccggctcgtactcctacctcgaagaacgcaagccctacagttcacggttggagaaagatgactcaaccgacttcaagaaactgtatgagcagatcctcgcagaaaacgaaaaactgaaggctcagctgcacgacactaacatggagctcacagaccttaagctgcagctagaaaaggcaacccagcggcaggaacgcttcgcagaccggagccttctagagatggagaaaagagagcgtcgggctctggaacggcggatcagtgagatggaagaggagttaaagatgctgccagacctgaaagccgacaaccagagactgaaggatgaaaatggcgccctgatccgtgtcatctctaaattgtcaaagtag

SEQ ID NO: 201497 - DNA, 3093 bp, synthetic construct
  misc_feature 1..3093: note = Description of Artificial Sequence: Synthetic coding sequence
  source 1..3093: mol_type = other DNA
atgaagatggccgacgccaagcagaagcggaacgagcagctgaagcggtggataggcagtgagacagatctggagcctcccgtggttaaacggcagaagaccaaggtgaaattcgatgacggtgccgtatttttggcagcatgctcatctggcgacacagacgaggttctcaaactccttcatcggggggcagacatcaattatgcgaatgtcgatggactgacagccctgcatcaagcttgtatcgacgacaatgtcgacatggtcaagtttctggttgagaatggtgccaacatcaatcagcctgataatgaaggctggattcctcttcacgcagccgcctcatgcgggtacttggatatcgcagagtttctgatcggccagggagcccatgtcggagccgtcaacagcgagggcgacactcccctcgatattgccgaggaggaggctatggaggagctgctccaaaatgaggtaaaccggcagggagtcgatattgaggcggcaaggaaggaagaggaaaggatcatgctgcgtgacgcgagacaatggctgaactcaggacatattaacgatgtccgccatgcaaaatcaggaggtactgcgttacatgtcgcggcagctaagggctacaccgaggtcttgaaacttctgatacaggcaggttacgatgtgaacatcaaagactacgacggctggactccgctgcatgccgctgcacactgggggaaggaggaagcttgtcgcatcctcgtggataacttatgcgatatggaaatggtgaacaaggtcggccagaccgcctttgacgtggcggacgaggacatcctcggataccttgaggagctgcaaaaaaaacagaacttgctccattctgagaagcgggataaaaaaagtcctttaatcgagtccaccgctaacatggataacaatcaatcacaaaagacattcaagaataaagagacccttattattgaacccgaaaagaacgcctctcggattgaaagtttagagcaggagaaagtggacgaggaagaggaaggcaaaaaggatgagtcttcatgttcgagtgaggaggacgaagaagatgattcggagagcgaagctgaaaccgacaaaaccaaaccattggctagcgtgacaaatgcaaacactagcagtacccaagctgcccctgtggcagtgactaccccgaccgtgtcctccggccaggccaccccaacgtctccaattaagaagttccctactacagcaacaaagatctcaccaaaagaggaggagcgaaaagatgagtcccccgcaacctggcgcttagggctgcgaaaaaccgggagttatggcgccttagcggagatcaccgcttctaaggagggccaaaaagagaaggatacagccggcgtcaccagaagtgcttccagcccccggctttcctccagtttggataacaaggaaaaggagaaagactctaaaggaactagactcgcgtacgtggctccaactatcccgagacgcctcgcatccacgagtgacatcgaggaaaaggaaaatcgcgacagctcctccctgcgcacctcatcgagttacacaaggaggaagtgggaggatgacttgaaaaaaaatagctcagtcaacgagggaagcacctaccataaaagctgctcctttgggcgtaggcaggacgacttgatttcctctagcgtcccgagcactacgtcgacccccaccgtcacttccgcggctggtctgcagaaaagcctgctgagttccacttctaccaccaccaaaatcacgacgggctcaagttccgctgggacacagagtagcactagcaataggctgtgggcagaagatagcacagaaaaggagaaggattctgttcctacagccgtcaccattcccgtggcccccaccgtggtcaatgccgctgcctctacaactacgttgacaactacaacggccggcaccgttagctctacgaccgaggtgagggagagaaggcggagttatcttacccccgttagagatgaggagagtgaaagccagagaaaggctaggtcgcggcaagctagacagagcagacgctccacacagggggtgactttaaccgacttacaggaggccgagaagacaattggccgctcacgaagcacgagaacacgagagcaggaaaatgaagaaaaagagaaggaagaaaaagagaagcaagataaagagaagcaggaggagaaaaaagagagcgagaccagccgcgaagatgagtacaaacagaagtatagtagaacctacgacgagacctatcagagatatagacctgtctccacaagttcttctacaacaccttcgtcaagtctgtccacgatgagctcgagtctatatgccagttcgcagttaaaccgccctaattcactcgtgggaattacttccgcctactccagagggatcaccaaagagaatgagcgagagggagagaagcgggaggaggaaaaggagggagaagataagtcccagccgaagtccatccgggagaggcggcgacctcgcgaaaagcggaggagtacaggcgtgtctttctggacccaggattctgatgaaaatgaacaggaacagcagtccgatacagaagagggctctaacaagaaagagactcaagttaataccattaccctttacgaaacctcctctacttcggcaggtgatcgctatgattctctcctaggtagatcagggtcttactcctatctggaggaaagaaagccttactccagccggctggagaaagacgattcaaccgatttcaagaaactgtacgagcaaatactggctgaaaacgagaagcttaaagcccagctccacgacaccaacatggagctcacggatttaaagctgcagctggagaaagccactcagcgccaggagaggtttgcagatcggtcactgctggaaatggaaaagagagaaaggcgggctctggaacgccgcatttccgagatggaggaggagctgaagatgttacctgatctcaaagccgataaccagcgactcaaggatgagaatggagcgctgatccgggtcatcagcaagctgtccaagtag

SEQ ID NO: 201498 - DNA, 2832 bp, synthetic construct
  misc_feature 1..2832: note = Description of Artificial Sequence: Synthetic coding sequence
  source 1..2832: mol_type = other DNA
atggtgaagttcctggtggagaacggcgccaacatcaaccagcccgataacgaaggttggatcccgctccacgccgctgcctcatgtggttatttagacattgctgagtttctgattggtcaaggcgcccacgtgggagctgtgaatagcgagggggacactccgctcgatatcgcagaggaggaagccatggaggagttgttacagaacgaggttaaccgacagggagtcgacattgaggccgcaagaaaagaggaggagcggattatgctgagggatgccaggcagtggctgaatagcggccacatcaacgatgtccgccacgccaaaagcggcggtactgctctgcacgtggccgccgccaaggggtacacagaggttctgaagctgttgattcaggctgggtacgacgtcaacataaaagactacgatgggtggacccctctgcacgccgccgctcactggggaaaagaagaggcgtgtcggattctggtggataacttgtgtgacatggagatggtaaataaggtgggacagaccgcctttgatgtagccgatgaggatattctaggttacctcgaagaactgcaaaagaaacaaaacttactccactctgaaaaaagagataaaaagtctcccctgatcgagagcactgctaacatggacaacaatcagtcgcagaagacctttaaaaataaggaaaccttgattatcgagcctgagaagaacgcttcccgcattgaaagccttgaacaagagaaagttgatgaagaagaggagggaaagaaagacgaatcatcctgttcctcagaagaggatgaggaagatgacagtgaatcagaagctgaaaccgacaaaacgaagccactggcctccgtgacaaatgcaaacaccagcagcactcaggctgctccagtggcagtgaccactccaacagttagcagcggacaggcaacgcctacatctcccataaaaaagttccctacaactgcaaccaaaatttcacccaaagaggaagaaagaaaagatgagagcccagcgacctggcgcctggggctccggaaaacagggagttacggggctcttgccgagatcactgctagcaaagagggacagaaggagaaagatactgccggggtgactcgttcggcatccagccctcgactttccagcagcctggataataaggagaaggagaaggattctaaggggacccgcctggcttacgtcgccccgaccatcccccgcagactggccagcacatcggacatcgaggagaaagagaatcgagattcttcctcattgcgcactagcagcagttacaccagaaggaagtgggaagacgacctgaaaaaaaatagctccgtgaacgagggctccacgtatcataaatcttgcagctttggaagacgccaggacgacctcatctcatccagtgtgccatctacaacctctacacctaccgtgacctctgcagcaggtctccagaaatccttgctttccagcacatccaccaccacaaaaatcacaacaggctccagttctgcaggcacacagtcctccacctccaataggctctgggcagaggacagtacggagaaagagaaggacagtgtgccaactgcagtaactattcccgtcgctccaactgtggtgaacgccgccgcctccactacaactttgaccacgactaccgccgggacagttagctcaaccacagaggttcgcgaacggaggcgctcatacctcacaccggttcgtgacgaggaaagcgagtcacaacggaaagctaggtctcgccaagctaggcagtcgaggcgttcaacccaaggcgtgacccttaccgacctgcaagaagccgaaaagacgataggccgctctaggtccacgaggacaagagaacaggagaatgaagagaaagagaaagaagaaaaggagaagcaggataaagagaaacaggaggagaagaaggagagtgaaacatcaagagaggacgagtataaacagaagtactctaggacatatgacgagacataccagcgatacagacccgtttcaacctcaagtagtaccaccccctcttccagtttgagtaccatgtcttcaagtctctatgcgagcagccagctcaatcgccccaacagtctcgtgggcatcacctccgcatatagtcgcggcatcaccaaggaaaacgagagagaaggcgaaaaacgggaggaagagaaggagggggaggacaagagtcaaccaaaatctattcgggagcgccgcagacccagagaaaagcgacgttccacgggcgtaagcttttggacacaggatagtgacgagaacgagcaagagcagcagtcagataccgaagaagggtctaacaaaaaggagacccagacagacagcattagcagatacgaaacatcatcaacctcagcaggcgatcgttatgattccctcctcggaagatccggaagttacagctatcttgaggaacggaagccctatagctccaggctcgaaaaggatgactccaccgacttcaagaaattgtatgagcagatattggctgaaaatgaaaagcttaaggcacagctgcacgacacgaacatggaactgaccgacctgaagcttcaactggaaaaggcaactcagagacaggaacggtttgccgataggtctctgcttgagatggaaaagcgtgagcggagggccctggagaggcgcatcagtgagatggaggaggagttaaaaatgctacccgatctgaaggccgacaaccagcggctcaaagatgagaatggagcactcattcgggtgattagtaagctgagcaagtag

SEQ ID NO: 201499 - DNA, 2925 bp, synthetic construct
  misc_feature 1..2925: note = Description of Artificial Sequence: Synthetic coding sequence
  source 1..2925: mol_type = other DNA
atgaagatggccgacgccaagcagaagcggaacgagcagctgaagaggtggatcggatctgagacagacctggagccaccggttgtcaagagacagaagaccaaggttaaatttgatgatggagctgtattcctggctgcctgttcctctggcgatacagacgaggtacttaagctcctgcataggggagcagacatcaactacgctaacgttgatggtctgaccgcactccaccaggcctgcatcgacgataatgtggatatggtgaagtttcttgtcgaaaacggagccaacatcaaccaaccagacaacgaaggctggatccccctccacgccgccgccagctgcggatacctagacatcgcggagttccttatcggtcagggagcccacgttggcgccgtcaactccgaaggtgacacccccttggatattgccgaagaggaggccatggaggaactactgcagaacgaggttaaccgccagggtgttgatatagaggctgcccgaaaagaagaagagaggatcatgctcagggatgctcgtcagtggctcaactctgggcacatcaatgacgtcaggcatgctaaaagtggcggcacggctctgcacgtggcagccgctaagggctacacagaggtactgaaacttctaatccaggcaggctacgatgtgaatattaaagattatgacggctggactccactgcacgccgccgcacactggggcaaggaagaagcatgtcgaattctggtcgataatttgtgcgatatggaaatggtgaacaaagtggggcagactgccttcgatgtagccgatgaagacatcctggggtaccttgaggagctgcagaagaagcagaatttactccatagcgagaaaagagataagaagagccccttaatagagtccactgcaaatatggacaataaccagtcacagaaaacatttaagaacaaggagaccctcatcattgaacccgaaaaaaatgcgtcgcggatcgagagcctggaacaggaaaaagtggacgaagaggaagaaggaaagaaagatgagagctcctgtagcagcgaagaggatgaagaggatgactcagagtcagaagccgagactgacaaaacaaaacccctcgcctcagtgacgaacgcaaatacctcatccacacaggccgcgccagttgctgtgacaacccccacagtctccagcggacaggccacacctacgtcgccaataaaaaaattcccgaccaccgcgaccaagatatcgcccaaggaagaggaacggaaggacgaaagtcctgccacatggcgcctcggacttagaaaaaccggatcatacggggccttagccgagataacagcatcaaaggaagggcagaaggagaaagacaccgctggcgtgacaaggtccgcaagttccccacgcctttcttcctccttggacaataaggagaaggagaaagactccaaggggacccgtctcgcctacgtcgcgcctacgattcctcggcggctggccagcaccagcgacattgaggagaaggagaatcgggacagttcttccctcagaactagctcctcttacacaaggaggaaatgggaggacgatctgaagaaaaacagttccgtgaacgagggctccacataccacaagtccacaagcaaccggctgtgggctgaagactcgaccgagaaagaaaaagatagtgtccccactgctgttaccattccagtggcccctacagtggtgaatgccgcagcttcaaccaccacactgacaaccacaactgccgggaccgtgagtagcaccacggaggtgagggagaggaggaggagctacctgactcctgtgagggacgaagagtctgaatcccaacgaaaggcgagatctcggcaggcccgacagtctcgtagatctacacaaggtgtgactctcactgatttgcaggaagctgagaagactataggacggtcaagatccacacgaacgcgggagcaggagaatgaggaaaaagaaaaagaggagaaagagaaacaagacaaagaaaaacaagaagagaagaaagagtctgaaacgtctcgtgaggatgagtacaaacagaagtattcacggacctatgatgagacataccagagataccgtccagtgtccacatcctcctccacaaccccctccagcagcctgtcaacgatgtctagttcactctacgcgagctcccagctcaaccgccccaactcactggtcgggatcacgtcagcatattcgagaggcattacaaaagaaaatgaacgcgagggtgagaagcgcgaggaagaaaaggagggggaagataagtctcagcccaaatccattagggagagaaggagaccgcgggagaagcgaaggtcaacaggggtcagcttctggactcaggatagcgatgagaatgagcaggaacagcagtccgacacggaagaaggaagtaacaaaaaggagactcaaaccgactccatttcacgatatgaaaccagctcaacctccgctggtgaccgctacgactcccttttgggccgctccggaagctatagctacctggaggaacgaaaaccttacagctcacgcttggaaaaagatgacagcaccgatttcaaaaagctatatgagcagatcctggccgaaaatgagaagctgaaggcccagttgcacgatacaaatatggagctgacggatttaaaactgcaattggagaaggccactcaaagacaagaacggtttgctgaccgatctctgctcgaaatggaaaagcgagaaaggagggccctggagcggaggatatcagaaatggaagaggagctgaagatgttgcccgatctgaaggctgataatcagcgcctgaaggacgagaacggcgcactgatcagggtaatttccaagctttcaaagtag

SEQ ID NO: 201500 - DNA, 2949 bp, synthetic construct
  misc_feature 1..2949: note = Description of Artificial Sequence: Synthetic coding sequence
  source 1..2949: mol_type = other DNA
atggccgagctggagcacctgggcggcaagcgggccgagagcgcccgcatgagaagagcagagcaactgcggagatggcgagggagcctgaccgagcaggagcccgcagagcggagaggcgctggtcgacagcccctcacacgccgaggtagtcctagggtccgctttgaagatggcgcggtttttctggctgcttgcagtagtggggataccgatgaggttcggaaactgctggctcggggagcggatattaacactgttaacgtagacgggttaactgcccttcaccaggcctgtatcgatgaaaacttagacatggttaagttccttgttgagaatcgcgccaatgttaatcagcaggacaatgagggctggaccccacttcatgctgcggctagctgtgggtatttgaatattgcagaatattttattaaccatggggccagcgtggggatcgtgaacagtgaaggagaagtaccctctgatctggccgaggagcccgctatgaaggacctgctgctggaacaggtcaagaaacaaggagttgacctcgaacagtcccggaaggaggaagagcagcagatgctgcaggatgcacggcagtggctgaattccgggaaaattgaagacgtccgccaggcaaggtccggagcaacagccctgcacgtagccgcagccaaaggatattcagaggtcctccgtctcctgattcaggccggttatgagcttaacgtgcaggattatgacggatggactcccctccatgccgctgcacattggggagttaaggaggcatgtagcatcctcgcagaggcactgtgcgacatggatatccggaacaaacttggccagacgccctttgatgtggcagacgagggacttgtagagcacctcgagctgctacagaaaaagcagaacgttctgaggtccgaaaaagagaccagaaataagttaattgaaagtgacctgaacagtaagatacagtccggtttcttcaagaataaagaaaaaatgctctatgaagaggaaacccccaaatcgcaggaaatggaagaggaaaataaggaatcatcttcaagctcttctgaagaggaagaaggggaggatgaggcctcagaaagtgaaacggaaaaagaggcagataagaagcctgaggcattcgtgaatcattccaatagtgaaagcaaaagcagcattactgagcagattccagctcccgctcaaaataccttttctgcctcttcagctaggaggttctcttcagggctttttaataagcccgaagagccaaaagatgagtccccgtcaagctggcggctcgggctgcgcaaaacgggatcccataacatgctcagcgaagtggcaaatagcagagaaccgatcagagatcgaggttcttcaatttatcgaagctccagctccccgaggatcagtgctctgctcgacaacaaggataaggaaagggagaacaagagctatatttcatcactcgctccacggaaactgaattcgactagtgatatcgaagaaaaggagaacagggagtcagcagtgaacctcgttcgttcagggagctacacgcggcagctctggcgggacgaagccaaaggtaacgaaattccgcaaaccatagcaccttccacatacgtcagcacatatttgaagaggacaccgcacaagagccaggctgacactaccgccgagaagaccgccgacaacgtgagcagctccacacccctgtgtgtgataaccaacaggcctctgccctccaccgccaatggggtgaccgcgactcccgtcctgagtatcaccgggactgattcctccgtagaagcccgggagaaaaggcgtagctatctgacacccgtgagagacgaggaggccgagtctcttcgaaaggctcgctctaggcaagcacgacaaaccagacgttctactcaaggagtgaccctgacagacctccaggaggccgagcgaacgttttcacgctccagggcggagcgtcaggctcaggagcaaccccgggagaagcccactgacacagaaggcctagagggctcccccgagaagcacgagccttccgcagtccccgcgaccgaggcaggtgagggtcaacagccatggggacggtctcttgacgaagagcccatctgtcaccggctgcgctgcccagcccagccagataagccaactacaccggcgtcgccttcaacatcccggccctctctgtatacctcgtctcaccttctgtggacgaacagattttctgtccctgactccgagtccagtgaaaccacaacgaacacgactaccgctaaagagatggacaaaaacgaaaatgaagaggccgatctggatgaacagagctctaaaaggctgtcaatccgggagcgcagacgccctaaggagagaaggcggggcactggcattaacttctggaccaaagacgaggatgagaccgacgggagtgaggaagttaaagagacatgggccgaaaggctcaagcgtttggagtcaggcggttccaatccaaccactagtgacagctatggcgatcgcgcctcggccagggctcgacgggaagcccgcgaggcacggttggccaccctgacttccagggtggaggaagacagcaacagggactacaaaaaattgtacgaaagcgcactgaccgaaaaccagaagctaaagactaagctgcaggaagcacaactggagctggccgatatcaagagcaaactggaaaaggtcgcccagcagaagcaggaaaaaacctcggataggtctagcgttttagaaatggaaaagagggagagaagggcactagaaaggaaaatgtcggagatggaagaggaaatgaaggttcttaccgagctgaagtccgacaatcagcgattgaaggacgagaatggtgcccttatccgggtgatctcaaagttgagcaaatag

SEQ ID NO: 201501 - DNA, 1161 bp, synthetic construct
  misc_feature 1..1161: note = Description of Artificial Sequence: Synthetic coding sequence
  source 1..1161: mol_type = other DNA
atggccgagctggagcacctgggcggcaagcgggccgagagcgcccgtatgcgccgcgccgagcaactccggaggtggcgagggagcttaacagagcaggagcctgccgagaggcgaggggcaggcaggcagccacttacgaggcgcgggtcaccaagagtgcggttcgaagatggggctgtgttcctggcagcttgctcaagcggtgacactgatgaagttcgtaaactgctcgcccgcggcgcagatattaatacagtcaatgttgatgggctgacagcacttcaccaggcctgtattgacgagaatttggatatggtcaaattcctcgtggaaaatcgggctaatgtcaaccagcaggataatgagggttggactcctttgcatgctgctgcaagctgcggttacctgaatattgcggaatactttatcaatcacggcgcctctgtgggcatcgtgaattctgaaggagaagttccaagcgaccttgcggaagagcctgcaatgaaagatctcctcttggaacaggtcaagaaacagggagtggacctggaacagtcccggaaagaagaagaacagcagatgctgcaggatgccaggcagtggcttaacagtgggaaaatagaggacgtgcggcaagcccgatccggcgcgactgccctgcacgttgccgcggcaaaaggctacagtgaggtgctgcggcttctcattcaagccgggtatgaactgaacgtgcaggactatgatgggtggactccactccacgccgctgcccattggggcgtgaaagaggcctgttccatcctggccgaggctttatgtgatatggacatccgaaataaacttggacagactccattcgacgtggccgacgaagggctggttgaacatcttgagcttttgcaaaagaagcaaaacgtgcttagaagcgaaaaagagacccgaaataaactcatcgagagcgacctcaatagtaagatccagtcaggattcttcaagaataaagagaagatgctgtacgaggaagaaactcctaaatcacaggaaatggaagaagagaataaagaaagttcctcatctagttctgaggaggaagagggtgaagacgaggcctcagaatctgagacagagaaggaagcagtccttttctggcccttctag

SEQ ID NO: 201502 - DNA, 675 bp, synthetic construct
  misc_feature 1..675: note = Description of Artificial Sequence: Synthetic coding sequence
  source 1..675: mol_type = other DNA
atggacaagaacgagaacgaggaggccgacctggacgagcagagcagcaagaggctgtccattagagagaggcgtcgcccaaaggagcggagaaggggaacagggatcaatttctggaccaaagatgaggacgagactgacggctccgaagaagtgaaggaaacctggcatgagcgactaagccgcctggagtccggcgggagcaatcccacgacttccgattcctatggcgacagggctagcgccagggcaagaagagaagccagggaggcccggctggccaccctcacaagcagggtagaagaggatagcaatagggattacaagaagctctatgaatcagcattaactgagaaccaaaaactgaagacaaaattacaggaggcccagttggagctggccgacattaaatctaaattagagaaggtcgcccagcaaaaacaggagaagacgtctgaccgttcgtcggttctggagatggagaagagggagcggagggcccttgaacgcaagatgtctgagatggaagaagaaatgaagaatctgcatcagctcaaacagattcagacgctcaagcaaatgaacgagcagttgcaagccgagaaccgcgcgcttacaagagtggtggctaggctgtcagaaagcatcgagagttctgatacacaagaattgtag

SEQ ID NO: 201503 - DNA, 627 bp, synthetic construct
  misc_feature 1..627: note = Description of Artificial Sequence: Synthetic coding sequence
  source 1..627: mol_type = other DNA
atggacaagaacgagaacgaggaggccgacctggacgagcagagcagcaaacggctgagtatacgggagcgccgtaggcctaaggagaggcggcgcgggacaggcattaatttctggacaaaggatgaggacgagactgatggatccgaggaggtcaaagagacatggcacgaaaggttaagcagacttgaaagcggcgggtcaaaccctaccaccagcgacagctacggagacagagcttcagccagggcccgcagagaggcgcgagaggcgagactagctactcttacatctcgagtcgaagaggatagcaatagggactacaagaagctctacgaatccgccttaactgagaaccagaaactgaaaacaaaactccaggaagcccagcttgagctggctgacataaaatcaaagctggaaaaggtggctcagcagaagcaggaaaaaacaagtgaccgtagctctgtgctggaaatggagaagagggagaggagagcactggaaaggaaaatgtccgagatggaggaggagatgaaggtgctcaccgagctgaagtcagacaaccagcggttaaaggatgaaaatggcgccctgattcgcgtgatctcgaagctgagtaaatag

SEQ ID NO: 201504 - DNA, 2949 bp, synthetic construct
  misc_feature 1..2949: note = Description of Artificial Sequence: Synthetic coding sequence
  source 1..2949: mol_type = other DNA
atggccgagctggagcacctgggcggcaagcgggccgagagcgcccggatgcgcagggctgaacagttgcgcagatggcgagggtctctcaccgagcaggaacccgcagagagacggggagcgggcaggcagcctcttacgcgcaggggcagtccccgagtccgtttcgaggacggcgctgtgtttctcgccgcttgttcctctggagacacagatgaggtgcgcaaactgctcgcgcggggtgctgacataaacacggtcaacgtggacggccttactgcgctccaccaagcttgtatcgacgagaacctggacatggtcaaattccttgtggagaaccgggcaaatgtgaatcagcaggataacgaaggttggacacccctccatgctgccgcgtcatgtgggtatctcaatatagcagaatacttcatcaaccatggcgccagtgtgggcatcgtcaattctgaaggtgaggtgccttccgacctggccgaagagcctgctatgaaagacctactattggaacaggtgaagaagcagggcgtggacctggaacagtctcggaaggaggaagaacagcaaatgctgcaggatgcacgccagtggctgaacagcggaaagattgaagacgtgcgacaagctagaagcggagcgacagctctgcacgtggccgcagctaaagggtactcagaagtccttaggctgcttatccaagccggttacgagttgaacgtccaggactacgacggttggacccccctgcacgccgcagcacactggggagtaaaggaagcctgttctatactggctgaggcactctgcgacatggacattcgtaataagctgggtcagacaccctttgacgtcgctgacgagggactcgttgaacatctcgaactgcttcagaagaagcagaacgtgctgcggtctgaaaaagagaccaggaacaagctgatcgaatctgacctgaactcaaagatccaatccggatttttcaaaaataaggagaagatgctgtatgaagaagagaccccaaagtcacaggaaatggaggaggagaacaaggaaagctcatcctcttcttcagaggaggaggaaggagaggacgaggccagcgaaagcgagacagagaaggaagctgacaagaaaccagaggctttcgtcaaccatagcaactctgagtcgaagagtagtattaccgaacagattcctgcgcccgcccagaataccttctctgcttcctcggcacggcgtttttcatccggactgtttaacaagcctgaagaaccaaaggatgagtccccatccagctggcggctggggctcagaaagactggatctcacaacatgctttccgaggtggctaactcgcgcgagcctatcagagatagagggtcctcaatttacaggagctccagtagtcctcggatctctgcacttcttgataacaaagacaaggagcgggagaacaagtcctacatttcgtctctggcgccgcggaaacttaactctacttctgatattgaggagaaggagaaccgtgagtcagctgtaaatctcgttagaagtggctcttacaccaggcagctctggcgcgacgaggcgaagggaaatgagattcctcaaactatcgcaccaagtacctacgtgtcaacctacctgaaacgtacacctcacaagagccaggcagatacgactgctgaaaaaacagcggacaatgtcagtagtagtacccccttgtgcgtgatcaccaaccgaccgctccccagtaccgctaacggcgtcaccgccaccccggtactgtcgattaccgggacagacagcagcgtggaggccagagaaaagagaaggtcctatttgactcctgtccgtgacgaggaagccgaatctctgcgcaaggcgcggagcaggcaggcccgacagacgagacggagcacgcaaggcgtgactctaacagacctccaggaggccgagagaacctttagccggtctagagctgagaggcaagctcaggaacagcccagggagaaacctacggataccgaaggcctggagggaagccccgagaaacatgaaccgtcagctgtaccagcaacggaggccggcgagggacagcagccttggggcaggagcttggatgaagagccaatctgtcaccggttacggtgtcctgcccagcccgataaacccacgacacctgcctctcccagcaccagccgtcctagtctgtacacctcatcccatcttttgtggacaaatcggttttctgtacctgacagcgagtcatccgaaactacaacgaacacaaccacagctaaggagatggacaagaatgagaacgaggaagccgatctggacgagcagagctcaaagcggctatccatccgtgaaaggcgcagacctaaggaacggaggcgaggcacgggcataaatttctggacaaaggacgaggatgaaacagacggaagcgaggaggtgaaggagacatggcatgagaggctgtcccgacttgaatcaggcggctccaatcccactaccagtgactcttacggcgaccgcgccagcgcgcgggctcgtagggaagctagagaagcccgcctggctacattaactagcagagtcgaagaggattctaaccgggattacaaaaaactgtatgagtccgctctgaccgaaaatcagaaacttaagacaaaactgcaagaggcacagcttgagcttgccgatatcaaaagcaagctagagaaggttgctcaacagaagcaggagaaaacatctgaccggtcgtccgtcttggaaatggagaaacgtgagaggagggccctagaacgcaaaatgtcagagatggaggaggaaatgaaggttcttaccgagctgaagagtgacaatcagagactgaaggacgaaaatggcgcactgatccgcgtgatctctaagctctctaaatag

SEQ ID NO: 201505 - DNA, 2349 bp, synthetic construct
  misc_feature 1..2349: note = Description of Artificial Sequence: Synthetic coding sequence
  source 1..2349: mol_type = other DNA
atgagcggcgaggacggccccgccgccggccccggcgccgccgccgcggctgctcgggagcgtcggcgtgagcagctccgccagtggggggcgagagcgggggcagaacccggcccaggtgaacgaagggcccgcacagtacgtttcgagagagctgccgaattcctcgcagcttgcgcaggcggcgatctggacgaagcccggctgatgctgcgggctgcagacccagggccaggcgccgagttagatcccgcagcccccccccctgctcgcgcagtgttagattctacgaatgccgacgggatatcggcccttcatcaggcctgcattgacgagaacttggaggtggtcagattcttggtcgagcaaggcgccaccgtcaaccaagccgataacgagggctggacgccactgcacgtggccgcgagttgcggctatctggatatcgcccggtatctgctgtcccacggggcgaacatcgcagctgtcaactccgacggggatttgcccctggacctggccgaatcagacgcaatggaaggtctgctcaaagctgagatcgcgaggagaggcgtagatgtggaggccgctaaaagagccgaggaggaactgcttctgcacgatactcgctgttggctaaatggaggggcgatgcctgaggcccggcaccctcgcactggggcaagcgccctgcacgtggctgcagccaaaggatacatcgaggtgatgcgtttgctgctgcaggccggctatgacccagagctgcgagatggagatggctggacccctctgcatgcagcagctcactggggcgtagaagatgcttgtcgtcttctggcagaacatggtggcggcatggatagcctgacccacgcaggtcagcgcccgtgcgatctggctgatgaggaggtactgagcctgctcgaagagcttgcccgaaagcaggaggatttgcggaatcagaaagaggctagccaaagtcgaggccaggagccacaagctcccagctcatctaagcataggagaagcagtgtgtgccgtttgtcttcgagagagaagatttctttacaggatcttagtaaagagcgccggcccgggggcgcaggcgggcccccaatacaagacgaggacgaaggagaagaagggcccaccgagccgccccctgccgagcctagaactctgaacggagtctcaagtcccccacacccgagcccgaagtctcctgtgcaactggaggaggctccgttttcaagacgattcggtctccttaaaacgggatcatcgggcgctctgggcccaccggagcgcaggaccgccgagggcgccccaggcgcgggcttacagcgcagcgcttcgtcctcatggctcgaaggcacatctacgcaagcgaaggagctccgcctggctaggatcacccctacgccatcccccaagcttcccgagccgagcgtgctgtcagaggtcactaaacctcctccatgtctggagaacagttcaccaccctcccgaatccctgagcctgagagcccagcaaagcccaacgtcccaactgcaagcacggcccctcctgcggatagcagggaccgcaggagatcataccaaatgccggtgcgcgatgaagagagcgaatcccagagaaaggccaggtctcgcctgatgagacaatctcggagatctacccaaggagtcaccttgacggatctgaaggaggccgagaaagccgccggtaaagccccggaaagcgagaagccagctcagagtctcgacccaagccggaggccaagggtgcctggagtcgagaacagcgacagccctgctcagagggccgaggcccccgatgggcaggggccagggcctcaggcagcacgcgagcatagaaaagtgggaaaagagtggaggggccctgccgaaggcgaggaggctgaaccagccgataggagccaggagtccagcacactggaagggggcccatctgcaagacgccagcggtggcagagggacctgaaccctgagccagaacccgagtccgaagagcccgatggtggctttaggacactgtatgccgagctgcggcgggagaacgaacgcctccgggaagccctgactgagaccaccctaaggttggctcagctgaaggtggagctggagcgtgctacccagcgccaggagagattcgcagaacggcctgcgctgctcgaacttgaacggtttgagcgacgagcacttgaacgaaaagccgcagaactcgaagaagaactgaaagccttgtccgacttacgcgctgataaccaacgcctcaaagacgaaaacgcagcattgattagggtcattagtaaactgtcgaaatag

SEQ ID NO: 201506 - DNA, 2160 bp, synthetic construct
  misc_feature 1..2160: note = Description of Artificial Sequence: Synthetic coding sequence
  source 1..2160: mol_type = other DNA
atgagcggcgaggacggccccgccgccggccccggcgccgccgccgcggccgccagagagcggcggagggagcagctgagacagtggggagcccgtgcaggggctgagcccggtcccggggagcggagggcccgtacggtgagattcgagagggcggctgagttccttgcggcctgtgctggcggagacctggacgaggctagactgatgctgagagcagccgaccccggccctggagctgagcttgacccagccgctcccccccctgcaagagccgtgctcgactccacaaatgctgatgggatttccgccctacatcaggcctgtattgacgagaatctggaggtggtccgcttcctggttgagcagggagccacagtgaatcaggccgacaatgaaggctggactcctctgcacgtcgctgcctcttgtggttaccttgatatcgcccgctatttgttaagccacggtgcaaatatcgccgcagttaattccgatggtgaccttcctctggatctcgcagagtcagatgccatggagggcctgctgaaagccgagattgcccgcagaggggtggacgttgaggcggccaaacgggcagaagaggagctcctcttgcacgacactcggtgctggctgaatggcggggccatgccagaggcgagacaccctagaactggcgccagtgccctccatgttgccgccgctaagggatatatagaggtgatgcgtctcctactgcaagcaggttatgacccagagttgcgggacggagatggctggacgcccctccatgcagcggctcattggggagtcgaggacgcatgccgcctacttgcagagcacggcgggggaatggatagcctcacacatgctgggcaacggccttgcgacctcgctgacgaagaagttctgtccctgctcgaggagctggcgagaaaacaggaggacttacgaaatcagaaggaagcgtctcagagcaggggacaagagccacaagcgccatcttcatcaaagcatagaaggtccagcgtgtgcagactgtcctcaagggaaaaaatttctttgcaagacctaagtaaagaacgtcgacccggcggcgctggtggcccgcccattcaggacgaagacgaaggtgaagaaggtcctaccgagcctccacccgcggagccccgcacgctcaatggtgtgtccagccccccccacccatcacccaagtcacccgtacaactggaagaagcacctttttcccgccggttcggactactaaaaacaggaagcagcggcgccctggggcccccagagagaaggacagccgaaggagcccctggcgccggtctgcaaagaagcgcatcctcatcctggctagaaggtacctccacacaggcaaaagaactgaggctcgctcgcatcacccccacgccatcccccaagctccccgaaccctccgtgctctccgaagttacaaagccaccaccctgtctggagaactccagccccccatctaggataccagagcccgagtctcccgcaaagccgaacgtgcctacagcctctactgcccccccagcagacagcagggataggcggcgcagttaccaaatgccagttagggatgaggaatctgaatcccaaaggaaggccaggtctcgcttgatgcggcagtcgcgacgcagcacccaaggcgtgacgctaacagatttgaaagaggcagagaaggctggcgaggaagcagagcctgctgatagaagccaggaatctagtaccttagagggaggcccatcagcccgccggcagcggtggcaacgggatttaaaccctgaacctgaacccgagtctgaagagcctgatggtggcttcaggacactgtatgcagagctgcgcagagaaaacgagcgacttcgcgaagctctcaccgagactactcttagacttgctcagctgaaagtggaactggaaagggccactcaacgccaggaaaggtttgcggagcgtccagcactgctcgagttggaaagatttgagcgccgcgccctggagcgcaaagccgccgagctcgaggaagaattaaaggccttatctgacctgagagctgataatcaacggttgaaagatgaaaacgcagccctgatccgtgtgatttctaaactctctaaatag

SEQ ID NO: 201507 - DNA, 2124 bp, synthetic construct
  misc_feature 1..2124: note = Description of Artificial Sequence: Synthetic coding sequence
  source 1..2124: mol_type = other DNA
atgcggaacggcggcccctgccagcccctggccgccggcccccgggccgaaggtgccagtgtgaactggtccgtgacggcttgggggcccggaacacaagcctgcatcgatgagaacctggaagttgttcggttcttggtggagcaaggcgcaacagtgaaccaggcggataatgaaggttggacaccactccacgtcgctgcttcctgcgggtacctcgacattgcccgttaccttctgtcgcacggagcgaatatcgccgcagtgaactccgacggagatctgcccttggatctggcagagtccgatgccatggagggcctgctgaaagcagaaattgcaagacgtggcgttgacgtcgaggctgcgaagagagccgaagaagagttactgctccatgacacccgctgctggctgaacggcggagccatgcccgaggcccgtcacccacgcactggcgcttccgcccttcacgttgctgcagctaagggctacatcgaggtgatgcggctgcttcttcaggcaggttatgatccagagctgagagacggcgatggatggaccccgttgcacgctgctgctcattggggagtggaagatgcctgtagacttctcgcagaacacggaggcgggatggactccctcactcacgccggacagaggccgtgcgatttggctgacgaagaagtgctaagtctccttgaggaactcgccaggaaacaggaagacttacggaaccaaaaagaagcctctcagagcagggggcaggagccccaggcaccctcaagctccaagcaccgcaggtcctctgtatgtagactctcttcccgcgagaaaatctcactacaggatctcagtaaagagcgtcggccgggcggcgccggtggcccacctatacaggatgaggatgagggtgaggaaggccctaccgaaccacctcccgcagagccgagaacattgaacggcgtgagctctcctccgcacccatcgcctaagtccccggtgcagctcgaggaagctccattttctagacgattcggactactgaagaccggatcttcaggcgctctgggcccgcccgagcgccggactgctgagggggcacctggagcaggactgcagagaagcgctagtagctcctggctagaggggacctctactcaggcaaaagagcttaggttggcccggataacaccaactccctcccctaaattgcccgagcctagcgtattgtcagaggtaactaaaccccctccttgcctagagaactcctcgccccctagcaggatccctgagcccgaatccccagcaaaacctaatgtacccaccgccagtactgccccccccgccgactccagagatagaaggagaagctatcagatgccagttcgggatgaggaatcagagagtcagagaaaggcacggagtagactcatgcgccagagcaggcgcagcacccaaggcgtcaccctgacagacctgaaggaggccgaaaaggcagccgggaaggctcccgaatctgaaaagcccgcacagagtctggacccttcgcgcaggcctagggtacccggggtcgagaattctgactctccagcacagagagaagctcctgatgggcaaggccccggacctcaggccgcacgggagcaccgcaaggtcgggaaggaatggagagggcccgcggaaggcgaggaggcagagcccgcagacaggagccaggagtccagcacccttgaaggaggcccttcggcgcgtcgacagcggtggcagagagaccttaaccctgagcccgaacctgagtctgaagaaccagacggtggtttccgtactctgtatgccgagctgcgccgagaaaatgagcgcctaagggaggcccttacggagaccactctccggctggcacagctgaaggtcgagttggaaagagcgacacagcggcaggaaagatttgccgagcgcccagcattgttagagctggaaagatttgagcggagagcgttggagcggaaagccgcagagctcgaggaggaactgaaggcactgtctgaccttagggcagataatcagcgcttaaaggacgagaatgccgccttgatccgagtaatctcaaaactatccaagtag

SEQ ID NO: 201508 - DNA, 2142 bp, synthetic construct
  misc_feature 1..2142: note = Description of Artificial Sequence: Synthetic coding sequence
  source 1..2142: mol_type = other DNA
atggagcccggcaccggcggcagccggaagcggctgggcccccgggcaggattccggttctggcctcccttcttccctaggcgctcacaggctggaagctccaagttcccaacccccctcgggcctgaaaattcagggaaccccacgctcctgtcgagcgcccaaccagagacgcgggtcagctattggacaaaactgttatcccagcttctggctccacttccaggcctgctacaaaaagtacttatttggtcccagctgttcgggggaatgtttccgactcggtggctggactttgctggggtctactctgctctcagggctttaaaagggagggagaagccagcggcccccaccgctcagaagagtctgagctcactgcagctggattcatccgacccttcagtgacgtccccactggactggctggaggagggcatccactggcagtactctccacctgatctgaagctcgaactgaaagccaaggggtccgctcttgatccagcggcacaggccttcctgttggagcagcagttgtggggggtcgaattactccccagtagcctccagagcagactgtactcaaatcgggagttgggttccagcccgagcggcccactcaatattcaaagaattgataactttagcgttgtctcttacttgctaaatccctcatacctggactgtttcccacggctagaggtctcttatcagaattcagacggtaactctgaggtggtagggttccagaccctgaccccagagtcatcgtgtctgcgggaggaccactgccatcctcaacccctgagcgctgaacttatcccggcctcctggcaagggtgcccgcctctgtccaccgaaggactccctgaaatccaccatctcagaatgaagcgcctggagttcctccagcaggctaacaaaggccaggatctccccacacctgatcaggacaatggataccattcacttgaagaggagcatagcttgctgcgcatggacccaaaacactgtagggataacccgacccagtttgtgcccgcagcgggagatattcctgggaatactcaggagtctactgaagaaaagatcgagttgctgacgactgaggtgcccctcgccttggaagaagaatctcctagcgagggctgtcccagctctgaaattccaatggagaaggaaccgggtgaggggcgcatctcagtggttgattattcctatctggagggggacctgccaatctctgcgcggcctgcctgctcaaataaactgatagattatattctcggcggagcttccagcgacctggaaaccagcagcgatcccgaaggcgaggactgggatgaggaagctgaagacgacggattcgattctgattcatctctgagcgattccgacctggagcaggaccccgaaggactgcacctctggaactccttctgcagcgtagatccttacaatccacaaaactttacagccaccatccaaacggcagcacgaattgtgccagaagaacctagcgactccgagaaggacctctccggcaaaagcgatctggagaattcatcccaatccggttcattaccagagacccccgagcactcctctggggaagaagatgactgggagtctagcgcggatgaagcagaaagtctgaagctgtggaatagtttctgcaacagtgacgatccctacaacccactcaactttaaagcaccattccagacctctggtgaaaatgaaaagggttgcagggacagcaaaactccttccgagtccatagttgccattagcgaatgccacacactgctaagttgtaaagtccagctgttggggagtcaggagagcgagtgccccgatagtgttcagagggatgtgctatccggtggcagacacacacatgtcaagaggaagaaagtgaccttcttggaggaggtcacagaatactatataagtggggacgaggaccgcaaagggccatgggaggagtttgcacgtgacggttgtaggttccagaaaagaatacaagagacagaagacgccataggctactgcttgacctttgagcaccgcgaacgaatgtttaataggctgcaaggaacttgcttcaaaggtcttaacgtgcttaaacaatgctag

SEQ ID NO: 201509 - DNA, 1872 bp, synthetic construct
  misc_feature 1..1872: note = Description of Artificial Sequence: Synthetic coding sequence
  source 1..1872: mol_type = other DNA
atgttccccacccggtggctggacttcgccggcgtgtacagcgccctgcgcgccctgaaaggccgcgagaagccggccgcaccaaccgctcagaagtccttgtcatctttgcaattggacagctcggatccctctgtaacaagtcccctcgactggctggaagagggtatacattggcagtacagcccgcccgatctgaagctggagctaaaagctaaaggttccgcgttggatccagctgcccaggccttcttgcttgagcaacagctttggggcgtcgagctactgccatcgtcacttcagagcaggttatactcgaacagagagcttggatcttcgccatcaggacccctgaacatccagagaatcgataactttagcgtcgtgtcctacttactgaatccctcctatctggactgcttccctaggcttgaagttagctatcaaaactccgacggtaactccgaggtagtgggctttcaaaccctgacgcccgaaagcagctgccttagggaggatcattgtcaccctcagcccctgagcgccgagctcatcccagccagctggcagggctgccctcccttgagcaccgaagggctgccggagatacatcacctgcgaatgaagcgcctggaattcctgcaacaagcaaacaagggacaagacctgcccactcccgaccaggataacggctaccatagccttgaagaggagcactcactgctgcgaatggatcctaaacattgcagagacaaccctactcagttcgtgcccgccgctggagatatcccaggcaatacccaggaaagtacggaggagaaaatcgaactgctgacaactgaagtccccctggccctggaggaagagtctccctcggaaggctgtcccagcagcgagatacccatggagaaggaacctggagaagggagaataagtgtggttgactattcttacctggagggtgatcttccaatcagcgctagacccgcctgttctaataagttgattgattacattcttgggggagcaagtagtgacctggaaacatccagtgatcccgaaggcgaagattgggatgaagaggcagaggatgacgggttcgacagcgacagcagcctgagtgatagcgatttagaacaggaccctgagggcttgcatctatggaactccttctgctccgttgacccttacaatccccagaacttcactgcaacgatacagaccgcagcccgtatcgttcccgaagagccttcagattcagaaaaggatctgagtggtaagtccgacctggaaaattcatcgcagtccggcagcttacccgagaccccggaacacagcagcggggaggaagacgactgggagagctctgctgacgaggccgagtccctcaagctgtggaattctttctgtaacagcgacgacccttataatcccctcaactttaaggcgcctttccagacctctggagagaacgagaaaggatgtagagattctaagacacctagcgagagcatcgtggcaatctcagagtgtcacacactgcttagctgtaaggtgcagctgctggggtcccaggagtccgagtgccctgatagtgtgcagcgcgatgtactgagcggaggacgccatacacatgtcaaacggaagaaggtgacatttttggaggaagttactgagtattacattagtggggatgaagataggaaaggtccttgggaggagttcgcgagggatggctgtcgctttcagaaacgtatccaggagactgaagatgccattggatattgcctgacctttgaacatagagaaaggatgtttaatcgcttgcaaggcacctgcttcaaggggttgaatgtacttaagcagtgctag

SEQ ID NO: 201510 - DNA, 1704 bp, synthetic construct
  misc_feature 1..1704: note = Description of Artificial Sequence: Synthetic coding sequence
  source 1..1704: mol_type = other DNA
atggccagccacgtggacctgctgaccgagctgcagctgctggagaaggtgcccactctcgaacgcttgcgtgctgctcaaaagcgtagggcccagcagttgaagaagtgggcccagtatgaacaggacttgcagcaccgcaaaaggaaacacgaaagaaagcggagtactggcgggcggcgaaagaaagtgtcattcgaagcctccgtggctctcctggaagcgagcctgcggaacgatgccgaggaggtccggtactttctgaagaacaaggtcagtccggatctctgtaatgaagatggactgacagctctacaccagtgctgtatcgacaattttgaagagatcgtcaagctgctgttaagtcatggagcaaatgtgaatgccaaagataatgaactgtggacccccctccacgctgcagcaacctgcggccacattaacttggttaagattttagtccagtatggggcagatctcttagccgtgaactctgatgggaacatgccttacgatctttgcgaagatgaaccaacactggacgttattgagacatgcatggcatatcaaggaatcacgcaagagaaaatcaatgagatgagggtcgcgcccgagcaacagatgattgccgacattcattgtatgatcgcagcgggacaggacctggattggatcgacgcccagggcgcaacattgttgcacattgcaggcgctaacggttatttacgagcggcagaactgcttctggatcatggagtgcgggtggatgtgaaggactgggatggttgggaacccctgcatgccgcagcgttctggggccagatgcagatggcggagttgctcgtctcccacggtgcctctctttctgcccgtacaagcatggacgaaatgcctatcgacctgtgcgaagaggaggagttcaaagtgcttcttctggagctcaaacataagcacgacgtcatcatgaagtctcaactacgccacaaatccagtttgtcgagacgcacaagcagcgctgggtctagaggaaaagtcgtgcgccgggcgagtctgtctgaccgaactaacctctaccgcaaggagtacgaaggcgaggcaatcctttggcagagatccgccgctgaggatcagcgaactagcacatacaatggcgatatcagagagacacgaacagatcaggagaataaggatcccaaccctagactggagaaaccagtgctgcttagtgagttccctactaaaatccccagaggagagctcgacatgccagtcgagaacgggctcagagcaccagtatctgcataccagtacgctctagctaatggcgacgtgtggaaagttcacgaagtgcccgactattctatggcatacggcaatcccggtgtggccgacgccacaccaccctggtcatcatataaagaacagagtccgcagacactgctcgagttgaaaaggcagagggccgccgccaaactgctctctcacccattccttagcacacatcttgggtctagtatggcccggactggggaaagctccagcgaaggcaaagctcctctcattgggggccggacaagcccatatagctccaacgggacctccgtatattacaccgttacaagcggagacccaccgttgctgaagttcaaggctccaattgaagaaatggaggagaaggtccacggatgctgcagaatctcctag

SEQ ID NO: 201511 - DNA, 1578 bp, synthetic construct
  misc_feature 1..1578: note = Description of Artificial Sequence: Synthetic coding sequence
  source 1..1578: mol_type = other DNA
atggccagccacgtggacctgctgaccgagctgcagctgctggagaaggtccccactctggagcgactgagagctgctcagaagaggcgcgcccagcagctcaagaagtgggctcagtatgaacaagatttacaacacagaaaaagaaagcatgagcggaagaggtcgaccgggggccgtagaaagaaagttagctttgaggcaagcgtggctctacttgaagcttccctgcggaacgacgcagaggaggtgcgatatttcctcaaaaataaggtttctcctgatctttgcaatgaggacggtctgaccgctctgcatcagtgctgcattgacaattttgaggagatcgttaagctgctgctgtcccacggggcaaacgtgaatgcgaaggataacgagctttggacccctctacatgctgccgctacttgcgggcacatcaacttagtcaagatcttggtccagtatggtgcagacctcctggccgttaattcggacggcaatatgccctatgacctgtgcgaggacgagcctaccctggatgtgatagaaacttgcatggcctaccagggcatcacccaggagaaaatcaacgagatgcgggtcgctcccgaacaacaaatgatcgcggacattcactgcatgatagccgctggccaggacctggactggattgatgctcaaggcgcaaccttgatgcagatggctgagttactggtgagccacggcgccagcctttcagcccgcacttccatggatgagatgccgattgatctgtgcgaagaagaagagtttaaagtgcttctgctcgaactgaagcacaagcatgatgtcattatgaaatctcaactacgacataaaagcagccttagcagacggactagctcagccgggtctcggggcaaagtggtgcgcagagccagtttaagcgacaggaccaatctctaccggaaagaatatgagggcgaagctattctgtggcagaggagcgccgcggaagaccagcgcaccagcacatataacggcgatattagagagacgagaacagatcaggaaaataaggaccccaatccaaggttggagaaacctgtgctgctctctgagttccctacaaaaatcccacgcggtgaactggatatgcctgtagagaacggcctcagagcccccgtctccgcctatcagtatgctctcgctaatggagatgtgtggaaggtgcatgaagtgcctgactattccatggcttatggcaacccaggcgtagctgacgcaactcccccgtggagcagttacaaggaacagtcaccacaaactctcttggaattgaagcggcagagggctgcagctaagctgttgtcacacccgtttttgtccacgcatctgggatcgagcatggcccggactggagagagttccagcgaggggaaagcgcccctgataggcggtagaacgtccccgtattcatcaaacggcacttcagtatattatacggtgacgtctggagatcccccgttgttaaaatttaaagccccaattgaggaaatggaagagaaagttcatggctgctgtaggatatcttag

SEQ ID NO: 201512 - DNA, 3369 bp, synthetic construct
  misc_feature 1..3369: note = Description of Artificial Sequence: Synthetic coding sequence
  source 1..3369: mol_type = other DNA
atggagcccagcgaggtgcccagccagatcagcaaggacaacttcctcgaggtgcccaacctctccgattccctgtgcgaagatgaagaagtgacgttccaacccggattcagcccccaaccatcacggagggggtccgactcaagcgaagacatctacctcgatacgccctcgtccggcacacgcagggtgtctttcgctgactcttttggctttaatttagtgtcagttaaggaattcgattgttgggagttgccatcagcaagcacaaccttcgatttgggcacggacatctttcatacggaagaatacgtgctcgccccactgttcgatcttccctcaagtaaggaagacctgatgcagcagcttcagattcagaaagccatccttgaatctactgagtccttgctgggatccacgagcatcaagggtatcatccgggtcctgaatgtgagtttcgagaaactcgtgtacgtgcgtatgtccctcgatgactggcaaacccattatgacatcttagcagaatatgtcccgaactcctgcgatggagaaactgatcagtttagcttcaagatcgttttggttcccccataccagaaagatggatcaaaggtggagttttgcattaggtatgagacctccgtggggactttctggtctaacaacaacgggaccaactacacattcatttgccagaagaaggaacaggagccagaaccggtgaaaccttggaaggaagttcccaatcgccagataaaaggttgtctcaaggttaaatccagtaaggaggagtctagcgtcacttccgaggagaacaatttcgaaaacccgaaaaacaccgacacctacatacctactattatatgctctcacgaggacaaggaagatttggaggcttccaaccggaacgtgaaagatgtgaaccgggagcatgacgaacacaatgaaaaagagcttgagcttatgatcaatcagcacttaatcaggactagaagtaccgcttcccgagatgagagaaatacttttagtaccgatcctgtgaacttccccaacaaggctgagggcctggaaaagaagcagatccacggcgagatatgcactgatctcttccaacgttctctgtctccgagctcatctgcagagtcctcagtaaaaggtgacttttattgcaatgagaagtacagctctggagacgattgcacccatcagccttccgaagagaccactagcaatatgggtgaaattaaaccctctcttggcgataccagtagtgacgaactcgtgcagttacataccggctccaaagaggtgctcgatgataatgccaatcctgcacacggaaatgggaccgtccagatcccctgcccctccagcgatcaattgatggctgggaaccttaacaaaaagcacgaaggtggagcaaaaaacatcgaggtgaaggatctaggatgcctgcgccgtgactttcacagcgacacgtctgcttgtttaaaggaaagcacagaggaaggctcttccaaggaagactactatgggaacggcaaggacgacgaggaacaaaggatttacctgggagtcaatgagaagcaacgcaaaaactttcagacgattctgcacgatcaggagcgaaagatgggaaatcctaagataagtgtggctgggattggggctagcaatcgcgatctcgccacactcctaagcgaacacaccgcaatccccacccgcgcaataacggcagacgtgtcacatagtccacggacaaatctgtcctgggaagaggcggtccttacgccagaacaccaccacttgacgtccgaaggttctgctttaggtggtattacaggtcaggtttgctcctcccgaaccggtaatgtcctgcggaatgactatctgttccaggtagaggagaaaagcgggggcatcaacagtgaggaccaagacaattctccccagcacaagcagagctggaacgtgttggaatcccagggcaaaagccgggagaacaagacaaacataaccgagcatatcaaaggacagacagattgtgaggatgtatggggtaagcgggacaataccagatctcttaaagcaacaactgaggagctttttacatgccaagagacagtttgttgcgagctgtccagtctggcggatcatggcatcactgaaaaagccgaagcagggacagcctacataattaaaaccacttcggaatccacccccgagtccatgtcagcccgagagaaggccattatcgcgaaactgccgcaggaaacagccaggagtgatagaccaatagaagttaaagagactgcgttcgatccacacgagggccgtaatgatgattcgcactatacattgtgtcagagagacacggttggagtaatctatgataacgatttcgaaaaagaaagcaggctcggcatctgcaacgtgagggtggatgaaatggaaaaggaggagacgatgtcgatgtacaaccccaggaaaacgcatgacagagagaagtgcggcacaggcaacatcacatcagtggaggagtcctcatgggtaatcaccgaatatcagaaggctacctccaagcttgaccttcagctaggaatgctaccaaccgacaaaaccgttttcagtgaaaaccgtgacctgcggcaagttcaagagttaagcaaaaaaaccgattctgacgcgatcgtgcactctgcgttcaattcagataccaatagagctccacagaactcatcccccttcagcaagcatcacacagaaatctcggtttctacgaacgaacaggctattgcggttgaaaatgctgttaccactatggccagtcagcctatttccaccaagagcgagaatatttgcaactcaaccagggagatccaggggattgagaaacacccgtatcctgaatctaaacctgaagaggtatccagatcctccgggatcgtcacatctggctcacgcaaggagaggtgtatcggccagatttttcagacagaagagtattccgtggaaaagagtttgggccccatgattctgattaacaaacccctggaaaatatggaggaggctagacacgaaaacgaaggcctggtgagctctggccagagcctgtatacaagtggcgaaaaggaatctgacagctctgcttcgactagtctcccagtggaggaatcccaggcccagggtaatgaatcccttttttccaagtatactaacagcaaaataccctattttcttcttttcctgatatttcttatcactgtgtaccactacgatctgatgattggactcacattttatgtgctgtcactatcctggctgtcatgggaagaaggccggcaaaaggaaagtgtgaagaagaaatag

SEQ ID NO: 201513 - DNA, 954 bp, synthetic construct
  misc_feature 1..954: note = Description of Artificial Sequence: Synthetic coding sequence
  source 1..954: mol_type = other DNA
atgagctgcacccggatgatccaggtgctggacccccggcccctgaccagcagcgtgatgccagtggacgtagcaatgcggctatgtctggctcactcaccccccgttaagagttttctgggaccatatgatgagtttcagagaagacattttgtcaacaagttaaagccactcaagtcttgcctcaacattaagcataaagccaaaagccagaatgattggaagtgctcccacaaccaggctaaaaaaagagtagtgttcgccgatagtaaggggttatcactgacagccatacacgttttcagcgacctgccggaggagcccgcgtgggatttacagtttgacttactggatttgaacgacatttcgtctgccctgaaacaccatgaggaaaaaaatttgatcctggacttcccacagccatctacggactatctaagcttccgtagccacttccagaaaaatttcgtgtgtctcgagaattgtagcctgcaggaacgaacagtgactggtacagtcaaagtgaagaacgtgtcctttgagaagaaggtgcaaattcggattacgtttgatagttggaagaattacaccgatgtggactgcgtatacatgaagaatgtgtacggaggtactgatagcgacactttttcattcgctattgatttacccccagtgattccaaccgaacagaagatcgagttctgcatcagctaccacgccaatgggcaggtgttttgggataataatgacggacagaattaccgtatcgtccacgttcagtggaagcccgacggcgtgcagactcaaatggcaccccaggattgcgccttccaccagacttcgccaaaaactgagctcgagtcaaccatcttcggatcacccaggcttgcttctgggctgtttcctgagtggcagtcctggggtcgcatggagaatctggcctcgtacaggtag

SEQ ID NO: 201514 - DNA, 894 bp, synthetic construct
  misc_feature 1..894: note = Description of Artificial Sequence: Synthetic coding sequence
  source 1..894: mol_type = other DNA
atgagctgcacccggatgatccaggtgctggacccccggcccctgacgagcagcgtcatgcctgtcgacgtcgccatgcggttgtgcctagcccactctcctccagtgaagtcatttctcggaccctatgatgaattccagaggaggcacttcgtcaataagctaaaacctctgaagtcgtgcctgaacatcaaacacaaagcaaaaagtcagaacgactggaaatgctcccataatcaagctaagaaacgagtggtctttgctgacagtaaaggtctcagtcttaccgccatccacgtttttagtgacttgcccgaggaacccgcgtgggacctccagttcgaccttctcgacctaaacgacattagctccgccctgagcttccggtcccactttcagaagaactttgtttgcttggaaaactgttctctgcaggagcggacagttactggaacagtgaaggtcaagaatgtgtccttcgagaaaaaggtgcaaatacgcattacttttgacagctggaagaactacacggacgttgactgtgtgtacatgaaaaacgtatacggcggaactgatagtgacacattttcatttgccattgatcttccaccagtcatcccgacagagcagaagatcgagttttgcattagctaccatgccaacggtcaggtattctgggataacaatgatggccagaactaccgtattgtgcacgttcaatggaaacctgatggggtacagactcagatggctccgcaagactgcgcctttcaccaaacttcacctaaaacagaactggagtcaactatttttggtagtccccggctggcttcgggattgttccctgaatggcagtcttggggaagaatggagaaccttgcctcctaccggtag

SEQ ID NO: 201515 - DNA, 600 bp, synthetic construct
  misc_feature 1..600: note = Description of Artificial Sequence: Synthetic coding sequence
  source 1..600: mol_type = other DNA
atgagcagccccaccagccccctgaagcaccacgaggagaagaaccttatactggactttccacagccatcgaccgattacctgagcttccgcagccattttcagaagaactttgtctgcctggaaaactgttcattgcaggaacgaacggtcactggcaccgtgaaggtgaaaaacgtgtcatttgagaaaaaggtgcagatccggatcactttcgattcatggaagaattacaccgacgtcgattgcgtgtatatgaaaaacgtgtatggtggcacggactctgataccttcagttttgcgatcgacttgcctcccgtaattccaaccgagcagaaaatcgagttctgcatcagttatcatgccaacggtcaggttttttgggataacaacgatggccaaaactacaggatcgtacacgtgcagtggaagccagacggagtccagactcagatggccccacaggattgtgcttttcaccagaccagccctaaaacagagctggagtctaccatcttcggctcccctcgactggcctcaggcctcttccccgaatggcagtcatggggccgaatggaaaacttggcaagctatcggtag

SEQ ID NO: 201516 - DNA, 900 bp, synthetic construct
  misc_feature 1..900: note = Description of Artificial Sequence: Synthetic coding sequence
  source 1..900: mol_type = other DNA
atgagccggggccccagcagcgccgtgctgcccagcgccctgggctcccggaaattaggacctcgttctctcagttgtctatcagacttggacggtggcgtggcactggaaccgagagcatgccggccaccaggatcacccgggcgcgcccctcctccaactcccgcaccaagcgggtgtgatcctaggctcaggcccattattctgcgacgagcacggtctctccccagcagccctgaaagacgccagaaagctgctggggcccccggagccgcctgtcgccctgggtgtagccagaagctcagagtaaggttcgcggatgcgctcgggctggagcttgcccaggtgaaggtgttcaacgctggggatgacccctcagtgcccctgcacgttctgtcaaggctagcaataaatagcgacctatgctgctccagtcaggacctggaattcaccctccactgtttagtccctgatttccctcccccagttgaggcggccgacttcggggagaggctgcagagacaactggtgtgcctggagcgggtgacctgttcggacctgggtatctcagggaccgttcgagtatgcaatgtggccttcgagaagcaagttgccgtgcgttataccttcagcggttggaggtccactcatgaggcggtagcccgctggcggggccccgccggcccagaaggcacggaggacgtatttacgtttgggttccccgtacccccatttctcttggagttaggctctagggtgcacttcgccgtgaggtatcaggtagctggtgctgaatactgggataataacgatcacagggattattctctgacatgtaggaatcacgctcttcacatgccacggggcgaatgtgaggagagttggatccattttatctag

SEQ ID NO: 201517 - DNA, 756 bp, synthetic construct
  misc_feature 1..756: note = Description of Artificial Sequence: Synthetic coding sequence
  source 1..756: mol_type = other DNA
atgacccggctgaccgtgctggccctgctggccggcctgctggccagctccagggcaggaagctcacctctgctagatatcgtcggaggcagaaaggcccggcccagacagtttccgttcttagctagcatccagaatcagggtagacatttctgtggcggagccctaattcacgcacgcttcgtgatgactgccgcctcttgctttcaatctcagaatcctggcgtgagcacggtcgtactgggtgcatatgatctcaggcggagggagcgacaaagcaggcagacatttagcatttcctctatgtctgagaatggctacgacccgcaacagaacctaaatgacctcatgctccttcaactcgacagggaagcgaacctgacttcctctgttacgatcctgcctctccctctgcagaacgccaccgtggaggccggcacacgatgccaggttgccggatgggggtctcaaaggagtgggggccggttaagccgattccccaggttcgttaacgtgaccgtgacaccagaggatcagtgtcgtccaaataacgtgtgtaccggggtccttactcgtcggggaggtatctgcaatggcgacgggggtactcccctggtgtgcgaagggctcgctcatggggtcgcctcctttagcctgggtccctgcggacgcgggccagactttttcacacgagtggcgttattccgtgattggatagacggagtgctcaataatcccggacccggacctgcctag

SEQ ID NO: 201518 - DNA, 954 bp, synthetic construct
  misc_feature 1..954: note = Description of Artificial Sequence: Synthetic coding sequence
  source 1..954: mol_type = other DNA
atggccgccgagcggggcgccggccagcagcagagccaggagatgatggaagaggaacacgaactccccgtggacatggagaccatcaatttggacagagacgccgaggacgttgatttaaaccattaccgtatcggaaagatcgaagggttcgaggtactcaagaaagtcaaaactctgtgtctgaggcaaaatttaatcaagtgcatcgagaacctcgaggaactgcagtccctcagggaactggatctttacgataatcaaatcaagaaaatcgagaacctggaggccctgactgagttagagattctggatatatctttcaatcttttgcgaaacatcgaaggggtagataaacttacacgactgaaaaaactgttccttgtcaataataagatctctaagatagagaatctgagcaacctgcaccagttgcagatgcttgagttgggttccaatcgcatccgcgccatcgagaatattgatacattaaccaacttagaatccctgttcctcgggaagaataagatcactaaattgcagaacttggacgcactgaccaaccttactgttctgagtatgcagagtaaccgactgacgaaaatcgaagggctccagaaccttgtgaacctgagagagctctacctcagccacaacggtatagaggtaatcgagggcctggaaaataacaacaagctgacgatgctagacattgccagcaatcgcatcaagaaaatcgagaacatttcgcacctaacggaactccaagagttctggatgaatgataatctgctagagagttggtctgacctggatgagttgaagggcgctaggagtctcgaaacagtgtatctggagcgcaatcctctgcagaaagacccacaatatagacggaaagttatgctggctctgccttccgtccggcagatcgacgccactttcgttcggttctag

SEQ ID NO: 201519 - DNA, 714 bp, synthetic construct
  misc_feature 1..714: note = Description of Artificial Sequence: Synthetic coding sequence
  source 1..714: mol_type = other DNA
atggccgccgagcggggcgccggccagcagcagagccaggagatgatggaggaagaacacgagttgcctgtggatatggaaaccataaatctggatcgcgatgccgaagatgtggatctcaatcactaccggatcgggaaaattgaaggcttcgaagtgcttaaaaaggttaaaacattgtgcttgaggcagaacttgattaagtgcatcgagaatctggaggagctgcagagtctccgcgaactggatctttatgataatcagataaagaaaattgagaaccttgaagctctgaccgagctcgaaatcttagacataagtttcaatctcctccggaacatcgagggtgtcgataaacttacgcggctgaaaaagctgtttttggttaataacaaaattagtaagattgaaaatctgagtaacctccaccagctgcagatgctggaactaggctccaatagaatcagagctatcgaaaacatagacacgcttacaaatctggagagtctatttttggggaaaaataagatcactaagctgcagaatctggacgcgttgacgaatcttactgtgctcagcatgcagtcgaaccggctgactaaaatcgagggccttcagaatctcgtcaacctgagggaactctatctgtcacataatgggattgaggtgattgaagggctggagaacaacgtccaggatagtttgacttattag

SEQ ID NO: 201520 - DNA, 843 bp, synthetic construct
  misc_feature 1..843: note = Description of Artificial Sequence: Synthetic coding sequence
  source 1..843: mol_type = other DNA
atggccgccgagcggggcgccggccagcagcagagccaggagatgatggaggttgacagacgggtcgagagtgaagagagcggcgatgaggaggggaaaaaacacagcagtggcatcgttgcagacctcagtgaacagtcattgaaggatggggaagagaggggtgaagaagaccctgaggaagaacacgagctgcctgttgatatggagacaattaacctggatcgggatgcagaggacgttgacctcaaccactacagaataggtaagatcgaagggttcgaagtgctgaagaaagttaagactctctgtctgcgtcagaatcttattaagtgcatcgaaaatctcgaggaattgcagtccctgcgggaacttgacctgtacgataatcagataaagaagattgagaacctggaagccctgacagaacttgagatcctcgatatcagctttaacctgctccggaatattgaaggcgtggacaaactgacccgccttaaaaagctctttctcgttaataataaaatctccaagatcgagaatcttagcaatctacatcagctacagatgttggaactgggctcgaaccgcatccgggcaatagagaacatcgacacccttactaacctcgagtctctgtttctcggaaaaaataagattactaagctgcagaatctcgacgcactcaccaacctcaccgtgctgagtatgcagtcaaacaggcttacaaagattgagggactgcagaacctggtgaatttaagggagctgtatctatcccacaatgggattgaggtcattgagggtctcgaaaataatgtccaggatagcttgacatattag

SEQ ID NO: 201521 - DNA, 1083 bp, synthetic construct
  misc_feature 1..1083: note = Description of Artificial Sequence: Synthetic coding sequence
  source 1..1083: mol_type = other DNA
atggccgccgagcggggcgccggccagcagcagagccaggagatgatggaggtggatagaagagtggaatcagaggagtctggggacgaagagggcaagaaacattcctcaggtatcgtcgccgacctttctgaacagagtctgaaagacggcgaagaacgaggagaggaggaccccgaggaggagcacgaactgcctgttgatatggagacaatcaatctggaccgcgatgcggaagacgtggatttaaatcactaccggattgggaagattgaaggcttcgaggtccttaagaaggttaagaccttatgcttgagacaaaatctcattaaatgtatcgaaaacctggaggagctccaaagtcttagggagttggacctttacgataaccaaattaagaagatagagaatctcgaggcactaacagagctcgagattctggacataagcttcaatctgctgagaaatatagaaggagtggataagcttacccggcttaagaagttgttcctcgtgaacaataaaatctccaaaattgaaaatctgtccaatctgcaccagcttcagatgctggagctcgggtccaatcggatcagagcaatcgaaaacatcgacaccctcacaaatttggagagtctgtttctgggaaagaacaagattacaaagttacagaacttggacgccctgactaatctgacagttctcagcatgcagagcaataggttgaccaaaattgaaggactgcagaatctcgtcaacttgcgggaactgtacctctcacacaacggtatcgaggtcatcgagggacttgagaacaataataaacttacaatgctcgacatcgcatccaaccggattaaaaagatcgaaaacatcagtcacctgacagagcttcaggagttctggatgaatgataatctattagagagctggtccgatctggacgagctgaagggcgctcgcagcctggaaactgtgtacctcgagaggaacccactccagaaggatccccagtatcgccggaaagtgatgttggctctgccctccgtcagacagatcgacgcaacgttcgtcagattctag

SEQ ID NO: 201522 - DNA, 384 bp, synthetic construct
  misc_feature 1..384: note = Description of Artificial Sequence: Synthetic coding sequence
  source 1..384: mol_type = other DNA
atggtgcagaccgccgtggtgcccgtgaagaagaagcgggtggaggggcccggatcattaggccttgaagaatctgggtcaagaaggatgcagaacttcgctttttcgggaggactgtatggcgggttaccgcctacacatagcgaggctggttctcagccacacggcatccatggtactgccctaattggagggttgcctatgccctacccaaatctggcccccgatgtagacctgaccccagttgtgccatctgccgtgaatatgaacccagcccccaacccggccgtgtacaatccagaagcagtcaacgaacccaagaagaaaaagtatgcaaaagaagcctggccaggtaaaaagccaacgccttccttacttatttag

SEQ ID NO: 201523 - DNA, 1056 bp, synthetic construct
  misc_feature 1..1056: note = Description of Artificial Sequence: Synthetic coding sequence
  source 1..1056: mol_type = other DNA
atggccgccgccgccaacagcggcagcagcctgcccctgttcgactgtccgacgtgggctgggaagccccctcccggcctccatttggacgtggtgaagggagacaagctaatcgagaagttaatcattgacgagaaaaagtactacctgttcggacggaatcccgatctctgcgatttcacaatcgatcaccagtcctgcagccgagtccatgccgccctagtataccacaagcatctcaagagagtctttctcatagatcttaactcaacccacggcactttcctggggcatattcgcctagagcctcacaaacctcaacagatcccaattgactctactgtctcgttcggtgcctcaacaagggcctacaccctgagggagaaaccacagactctcccaagcgcagtcaagggagatgagaaaatgggcggtgaggatgatgagttgaaaggcctgcttggtctccccgaagaggagaccgagcttgataatctgacagagttcaatactgcacacaacaaacgcatatctacactgactatagaggagggaaacttagatattcaaagaccaaagagaaaaagaaagaactctcgagtaaccttttcagaagacgacgaaattattaatcctgaggatgtcgatccgagcgtgggacgttttcgcaacatggtccagacagctgtagtgccagtcaaaaaaaagagggtggagggaccagggtcccttgggctggaggaatccgggagcagaaggatgcaaaattttgctttctccgggggcctgtacggcggccttccaccaacacactctgaggctggctcgcagccccacggtatccacggcaccgctctcattggcggcctgcccatgccttacccaaacctggcccctgatgttgacctaacccccgtggttcccagtgctgtcaatatgaacccagccccaaacccagccgtttacaaccctgaggctgtgaatgagcctaagaagaagaaatacgctaaagaggcttggccgggaaagaagcccactcctagcctcctgatttag

SEQ ID NO: 201524 - DNA, 630 bp, synthetic construct
  misc_feature 1..630: note = Description of Artificial Sequence: Synthetic coding sequence
  source 1..630: mol_type = other DNA
atgggcggcgaggacgacgagctgaagggcctgctgggcctgcccgaagaggaaacggagctcgacaacctcactgagtttaacaccgcccacaataagcgcattagcaccttgacgatagaagaaggcaatctggatatccagagacctaagaggaaaaggaagaattcacgcgttaccttttcagaggatgacgaaattattaatcctgaggatgtggacccctcagtgggacggtttcggaacatggtgcagacggctgttgtgccagtgaagaagaagcgcgtggaaggacctgggagtctggggctggaagagtccgggtcgagaaggatgcagaacttcgccttctctggagggctatacggtggattgcctcctacgcatagcgaggcggggtcccagccccacgggatacacggaaccgctcttataggcggtctgccgatgccctaccccaacctcgcccctgacgtggatttgacacccgtggtgccgtctgccgtaaacatgaatcctgctcccaacccggcagtttataaccccgaagctgtcaacgagcctaaaaaaaaaaagtatgctaaggaagcctggccgggtaagaagcccacccctagcttgttgatatag

SEQ ID NO: 201525 - DNA, 711 bp, synthetic construct
  misc_feature 1..711: note = Description of Artificial Sequence: Synthetic coding sequence
  source 1..711: mol_type = other DNA
atgggcggcgaggacgacgagctgaagggcctgctgggcctgcccgaagaggaaacggaattggataacctaacggaattcaacaccgcacacaataaaaggattagtactctgacaatcgaggagggcaaccttgatatacaaaggcctaaaaggaagcgtaaaaattcacgcgttacgttttctgaggacgacgagattataaaccctgaagacgttgaccccagcgtgggtaggttccggaatatggtgcagacggctgtggtccccgtgaagaaaaaaagagtggaggggccggggtctcttggcctggaagagtccgggagcaggcgcatgcagaactttgccttctcgggtggactctacggaggcctgcccccgacgcatagcgaggccgggtctcaacctcacggcattcatggcacagcgctcattggagggctccctatgccctaccccaatctcgcaccggatgtcgatctgactccagtggttccttctgctgttaacatgaatccggcacccaacccagccgtgtacaatccagaggctgtgaatgagcccaagaaaaagaagtacgccaaggaggcttggccagggtgtgaattcgtgagtcagagcttgatcgctacggccatctggaagtgtctgctgaaggcccagagtctgggcctggggggaaatgccccctcacctctgtattataaatag

SEQ ID NO: 201526 - DNA, 618 bp, synthetic construct
  misc_feature 1..618: note = Description of Artificial Sequence: Synthetic coding sequence
  source 1..618: mol_type = other DNA
atgggcggcgaggacgacgagctgaagggcctgctgggcctgcccgaggaggagaccgagctcgataatctgaccgagttcaacaccgctcataataaaaggatttcaactttgactatagaggagggaaatctggacatacaacgcccgaagcggaaaaggaagaattctcgagttacattcagcgaagacgacgagattattaaccctgaagacgttgacccttccgtcggccggtttaggaatatggtgcagaccgcggttgtgccggtgaagaagaagagagtggaggggccaggtagcctcggcctcgaggagtcagggagcaggcgcatgcagaatttcgcgttttccggtggcctgtacggtgggctccctcctacccattcggaggccggcagccagccccacggaattcacgggactgccctgattggaggactcccaatgccgtaccctaacctggcgcccgacgtcgatttgacaccagtggtcccatctgcggtgaacatgaatcccgcgccaaatcctgcggtctataacccggaggccgtgaacgaaccaaaaaagaagaagtacgccaaagaagcctggcctggcaagaagcccactccatag

SEQ ID NO: 201527 - DNA, 600 bp, synthetic construct
  misc_feature 1..600: note = Description of Artificial Sequence: Synthetic coding sequence
  source 1..600: mol_type = other DNA
atggccgccgccgccaacagcggcagcagcctgcccctgttcgactgcccaacctgggcgggcaagccacctcccgggcttcatctcgacgtggtcaagggggacaaactgatcgagaaactgatcattgatgaaaagaagtactacctgtttgggcgcaatccggatctctgcgactttactattgatcatcaatcgtgcagtagagtacacgctgctctcgtgtatcataagcacctgaaaagggtgtttttgattgaccttaactccacccacggcacattcctgggccacatcaggctggagccccacaagccacagcaaataccaatcgactccacagtgtccttcggagccagcacccgcgcctatacactgcgagaaaagccccaaaccctgccctctgcggtgaaaggggatgagaaaatgggcggcgaagatgacgaacttaagggcctacttggcctcccagaagaggagacagaattggataatttaactgagttcaatacagcccataatcacatggcttcaatgggacaacactcttctgtagcatgcccttgccacacacagacgcttcccctgatgtggacttag

SEQ ID NO: 201528 - DNA, 3891 bp, synthetic construct
  misc_feature 1..3891: note = Description of Artificial Sequence: Synthetic coding sequence
  source 1..3891: mol_type = other DNA
atgctgaagaccgagagcagcggcgagcggaccaccctgcggagcgcctccccccaccggaacgcttatcgaactgagtttcaggcgctgaagagtacttttgataaacctaaaagtgacggagaacagaagactaaggaaggtgagggatctcaacaaagtcggggcaggaaatatgggtccaatgtgaaccgcattaagaacttattcatgcagatggggatggaaccgaacgaaaatgccgctgttattgctaagacccggggtaaaggagggcacagctcacctcagagaaggatgaagccaaaggaattcctggaaaagactgatggaagcgtggttaagctggagagctccgtctccgagcgtatctctaggtttgacaccatgtatgatggaccaagttatagcaagtttacagaaaccaggaagatgtttgagcggtccgttcacgaaagtgggcagaacaatcggtactcccccaagaaggagaaggcaggcgggagcgaacctcaggacgaatggggcggcagcaagagcaaccgtggctcaaccgattctctggacagcctctccagtcgcacagaagctgtgtctcccaccgtgagccagctcagcgccgtcttcgagaacactgacagcccttcagccatcattagcgaaaaagctgaaaacaatgaatattctgtgactggccactatcccctgaatctacccagtgttaccgttaccaacctggacacttttgggcatctgaaggactctaattcctggccccccagcaataaacgcggggtcgatacggaagatgcccacaagtccaacgcaacccctgtgcccgaggtcgcatccaaatccactagtttggcctccatacccggagaagagatccagcagagcaaagaaccagaggatagtacgtctaaccaacaaactcccgacagcatcgataaggatggccccgaggagccctgtgctgagtcaaaggccatgccaaagtccgaaattcctagcccacagtcccaacttctcgaagatgccgaagcgaacctggtcggcagagaggctgcaaaacagcagcggaaggagctcgcgggcggcgacttcacaagtccagatgcatcggccagttcgtgtggaaaggaagtgccagaagactctaataactttgacgggtctcacgtgtatatgcactcagattacaacgtctatcgagttcgtagccggtataatagcgactggggcgaaacaggcactgagcaggacgaggaagaggacagcgatgaaaactcctactatcagccagacatggagtatagcgaaatagttggtttgcctgaggaagaagagatccccgccaacagaaagattaagtttagctcagcccccattaaagtttttaacacatacagtaatgaggactacgatcggcggaatgatgaagtcgatccagtggccgcatctgccgagtacgaactcgaaaagagggttgagaaactggaactttttcctgtcgagctggaaaaggacgaagatggactgggcatcagcattatcggtatgggagtgggtgccgacgcgggactcgagaagctgggcatttttgtcaaaacagtaaccgaaggaggcgcagcacagagggatggccgtattcaggtgaatgatcagatcgttgaagtggacgggatatctctggtcggggtaactcagaatttcgcggccaccgtgctgcgcaatactaagggtaatgtgaggttcgtgatcggccgcgagaagcctggccaagtgtccgaggttgcccagctgatttcccagactctcgaacaggaacggagacagcgcgagttgctggagcagcactacgcacagtatgatgctgatgacgatgagaccggtgagtacgcaactgatgaggaggaggacgaagtcggccctgttctgccggggagcgacatggcaatagaagttttcgaactgcctgagaacgaagatatgttcagcccttcagaactggacacttcaaagctttcacataaattcaaagagctgcagatcaaacatgccgttacggaggctgagatccagaagttgaagacaaaactgcaggcagctgagaatgagaaagttaggtgggagctggagaagacccagttacagcaaaacatcgaggagaacaaggaacgtatgctgaaactggaaagctactggattgaagcacagacgctctgccatacagttaacgagcacctgaaggagacccagtcccagtaccaagccctcgagaaaaaatacaataaagccaaaaagctgatcaaggatttccagcagaaagaactcgatttcatcaaacggcaggaagccgaaagaaaaaagatcgaggacctggagaaagcacacctcgtcgaggttcagggtctgcaggtacgcatccgtgacctggaagctgaagtttttcgtctcctgaaacaaaatggcacccaggtgaataataacaataacatctttgagcggaggacatctctcggcgaggtgtctaaaggcgacacaatggagaatctagatggtaagcaaaccagttgtcaggacggcctgtctcaggacctcaatgaggctgtgccggagacagagcggctcgactctaaagctctgaagacaagagctcagttgtccgtcaagaataggagacagcgtccctctcggactcgcctctacgacagcgtcagcagcaccgacggtgaagactccctggagcgcaagggcctcaggacctcctccccggaaagcgatagtggcgtgcctccgctgaccccagtcgatagtaatgtgcctttctctagcgatcacattgcagagttccaggaagagcccctggaccccgaaatggggccgctctcctctatgtggggagacacctccctgttctctacaagcaagtcggaccacgatgttgaggagagtccatgccatcatcagacgaccaacaaaaagattttaagggaaaaggacgatgcgaaagatcccaaaagcctcagggcctctagctccctggctgtacaggggggaaagatcaagcgaaaatttgtagatctgggcgccccgctgcgacggaattcatctaaggggaaaaagtggaaagagaaagagaaagaagctagtcgattttctgcaggatcacgcatatttaggggacggttagagaattggacaccaaagccttgcagcaccgcccagactagcacacgcagcccatgtatgcctttcagctggtttaacgacagcaggaaagggtcctacagctttagaaacctccctgccccgaccagcagccttcagccatctcctgagactttgatttccgacaaaaagggctcgaagaacttcacgtttaacgacgatttcagcccctcctccacaagtagtgcagaccttagtggattgggcgccgaacccaaaacccccgggctcagtcagtctctcgctttaagttccgacgagattcttgacgatggacagtcccctaagcattcccagtgtcagaacagagccgtgcaggaatggtcggtgcaacaggtctctcattggttaatgagcctgaacttagagcaatatgtgtccgagttttctgctcagaatatcaccggcgagcagctgctacaactggacggtaataagctcaaggctctggggatgacggcttcccaagacagagcggtggtcaaaaagaaactgaaggaaatgaagatgtctcttgagaaggcccgtaaggctcaggagaaaatggagaaacagagagaaaaacttcgtcgaaaagaacaagagcaaatgcagaggaagtccaaaaagaccgagaaaatgaccagcactactgcggagggggcaggagagcagtag

SEQ ID NO: 201529 - DNA, 3297 bp, synthetic construct
  misc_feature 1..3297: note = Description of Artificial Sequence: Synthetic coding sequence
  source 1..3297: mol_type = other DNA
atgctgaagaccgagagcagcggcgagcggaccaccctgcggagcgcatcacctcacagaaatgcatatcgaaccgaatttcaggccctcaaatctacctttgataaaccaaaatcagacggcgagcagaagactaaagagggggaaggctctcagcagtctcgcggacggaagtacggctccaacgtcaatagaatcaaaaacctgttcatgcagatgggcatggaacccaacgagaatgcagccgtgatcgctaagacgcgaggcaaaggcggccacagcagcccgcaaagacggatgaaaccaaaggaattcctggagaagaccgatggttcagtagtaaagcttgaatcatccgtgagcgagaggatctcaaggtttgacaccatgtacgacggccccagttatagcaagtttacggagacaaggaaaatgtttgaacgcagcgtgcacgagagcggccagaacaatcggtattctcctaagaaagaaaaagcagggggctccgagccccaggatgaatggggaggaagcaagagcaaccgtggttccacggactctctggacagtctgagcagtaggaccgaggccgtcagcccaactgtgtcccagctctcagccgtgtttgagaacaccgattctccctccgccatcatctcagagaaggctgaaaataacgagtattctgtcactgggcactatcctttgaatctccccagtgtgaccgtgacgaatctggacactttcgggcatctcaaagactcgaactcatggccgcctagcaacaagcgcggggtcgacactgaggacgcccataagtctaacgccacgccagtcccagaggtcgccagtaagtcaaccagtctcgctagtattcctggagaagagatacagcaatccaaggagccggaggatagcacgtctaaccaacagacaccagactccatcgataaggatgggccagaggagccttgtgctgagtccaaggccatgcccaagagcgaaattccgtcaccacaatcccaactgctcgaggatgccgaagctaatttggtgggtagagaagctgcaaagcagcagcgtaaggagctggctggtggtgattttacttccccagacgctagcgcctcatcgtgcggaaaagaagtgcctgaagactccaataactttgatgggtcccatgtttatatgcattccgactataacgtctatcgagtcagatcacgatacaattcggactggggcgagaccgggacagagcaagacgaagaggaagattccgacgaaaattcctactatcagccagacatggaatattctgagatagtcgggctacctgaggaggaggagattccagcgaacaggaagataaagttctcaagtgcccctatcaaggtctttaatacctactcaaatgaagattatgataggcgaaacgacgaggtcgaccccgttgctgcctccgccgagtacgagctggaaaaacgtgtggaaaagctcgagttgtttcctgtcgaactcgaaaaagatgaagatggccttggaatttcaatcattgggatgggggtcggagcagatgccgggctggagaaactaggcatctttgtgaagaccgtgacagagggtggcgcagctcaaagggacggccggatccaagttaatgaccagatcgttgaggtggatggaatctcattggtcggagtaacccagaatttcgcagcaaccgtcttgcggaacactaaaggtaacgtacggtttgtcatcggaagagaaaaacccggacaggttagcgaggttgcccagctgatctcacagactttagaacaggagaggcgtcaaagggaactgcttgagcagcactacgcccagtacgacgcggatgatgacgaaaccggtgaatacgccactgatgaagaggaggatgaagtcgggcctgtgctgcctggaagcgatatggcaattgaggtgtttgaattgcccgagaacgaagatatgttcagcccctccgaacttgatactagcaagctgtctcacaagtttaaagaactgcagataaagcatgccgtgacagaggctgagattcagaagcttaagacaaaactgcaggccgccgagaacgagaaagttcgctgggaactggaaaagacgcaactgcagcaaaatatcgaggagaacaaagagaggatgctgaagctcgaatcttactggatcgaagcccagaccctgtgccacacggtgaacgagcacctcaaggagacccagagccaataccaggccctggagaaaaaatacaataaagctaagaaattgataaaagatttccagcagaaagagctcgatttcatcaagcgtcaggaggccgaacgcaaaaagattgaagacctggagaaggcccacctggtggaggtgcaaggactgcaggtgagaatcagggaccttgaggccgaagtctttagactgctgaaacagaatgggacccaggttaataacaataataacattttcgaacggcgcacttccctgggtgaggtgtccaaaggagacaccatggagaacttggatggtaagcagacttcttgccaggatggtctctcccaggacctgaacgaggccgtacccgagacagagcgactcgattctaaagcgctcaagactcgagcccaactgagcgtgaaaaatcgcaggcaacgacctagccgaacccgcctatacgattctgtgtcttctaccgacggggaagactccctggagcgcaaaaacttcactttcaatgacgatttctcaccatcttcaacgtcttctgctgatctgtccggcctgggagctgaaccaaaaactcctggcctttcacagtccctagccctgtccagcgacgaatccctggatatgatcgatgatgagattctggacgatggacaaagtcctaaacactcgcagtgccagaacagagccgtgcaagaatggtcagtacagcaggtgtctcactggcttatgtccttgaatctagagcagtatgtctcagaattcagtgcccagaatatcactggcgaacagctgctgcagctggatggaaacaagctcaaagctctcgggatgacagcttctcaagacagagcagtcgtaaagaagaagctcaaagagatgaagatgtctctggagaaagcaaggaaagcgcaggaaaagatggaaaaacagcgagaaaaactgcggcgcaaagagcaggagcaaatgcaacgaaaaagtaagaagaccgagaagatgaccagcacaacagccgaaggagccggggaacagtag

SEQ ID NO: 201530 - DNA, 222 bp, synthetic construct
  misc_feature 1..222: note = Description of Artificial Sequence: Synthetic coding sequence
  source 1..222: mol_type = other DNA
atgctgaagaccgagagcagcggcgagcggaccaccctgcggagcgcgtcaccgcacagaaatgcgtataggacagaatttcaggccctgaaatctaccttcgacaagccaaagtctgacggggagcaaaagactaaagagggggaaggatcccagcagtcgcggggacgaaagtatggaagcaacgtgaaccgcatcaaaaacttgttcatgcagatgtag

SEQ ID NO: 201531 - DNA, 126 bp, synthetic construct
  misc_feature 1..126: note = Description of Artificial Sequence: Synthetic coding sequence
  source 1..126: mol_type = other DNA
atgctgaagaccgagagcagcggcgagcggaccaccctgcggagcgcctcgccccatcgcaacgcatatcgcaccgagtttcaggcactgaaaagtaccttcgacaagcctaagagtgacggatag

SEQ ID NO: 201532 - DNA, 3297 bp, synthetic construct
  misc_feature 1..3297: note = Description of Artificial Sequence: Synthetic coding sequence
  source 1..3297: mol_type = other DNA
atgctgaagaccgagagcagcggcgagcggaccaccctgcggagcgctagccctcacaggaacgcctatagaactgaattccaagcactgaaatcaacgtttgataaacctaaaagcgacggggagcagaagaccaaggagggcgagggtagtcagcagtccagaggacgaaagtacgggagcaatgtgaatcgcattaaaaacctctttatgcagatggggatggaaccaaatgagaacgcagctgttatcgccaaaacccgggggaagggtgggcactcttcaccacagcgcagaatgaagcctaaggaattcctggagaagaccgatggttccgtcgtaaagctggagagcagtgtatccgagcggatttcccgattcgatactatgtacgacggacctagctacagtaagtttaccgagacccgcaagatgttcgaacggtccgtccatgagagcggtcagaataaccgctactctcctaagaaagagaaggcagggggatccgaaccacaggacgagtggggcggcagtaagagcaaccgcgggagcacggactccttggatagtctcagcagccgtacggaggcagtatcaccgacagtctcacagctctcggctgttttcgaaaacacagacagcccttctgctatcatttcagagaaagccgagaacaacgagtactctgtgactggccattatcctctgaacctcccaagcgtgaccgtgaccaacctcgatacgttcggccacttgaaagacagcaatagctggccgcccagcaacaaacgcggtgtagacaccgaggacgcccacaaatccaacgctactcctgtccccgaagttgcttcaaagagtactagcttagcctccatccccggcgaagaaatccaacagtcaaaagagcctgaggacagtactagtaatcaacagacacctgatagtattgataaggatggcccagaagagccctgtgcggagtcaaaggctatgcccaagtctgaaatcccgagtccccaatcccaactgttggaggacgccgaagctaacctggtaggacgcgaggcggcaaagcagcagaggaaagaactggcagggggggatttcacgagcccagacgcctccgcatccagctgcggtaaagaagtcccagaggacagcaataactttgacggcagtcatgtgtacatgcactccgactataacgtgtaccgcgtgcgaagtaggtataacagcgactggggcgagacaggaaccgaacaagacgaggaggaagactccgacgaaaattcctactatcagcctgatatggaatattcagaaattgttgggttgcccgaagaagaggagatcccagcaaaccggaaaattaaatttagctctgcacccataaaggtgtttaatacctattctaatgaggattatgacaggcgaaacgacgaggtggatcccgtcgcagcaagcgccgaatacgagctcgagaagagagttgagaagctggagctgtttcctgtcgaactcgaaaaggatgaagacggcctgggcatctctattatcgggatgggcgtcggtgccgatgctgggctcgagaagctaggaattttcgtgaagactgtgactgaaggcggggccgcacagcgggacggccggatccaggtgaatgaccagatcgtggaggttgatggtatttcgctggtaggcgttacacagaactttgccgcaaccgttttacgaaatacaaagggaaatgtgcggtttgttattggacgggaaaagcccgggcaggtgtcagaggtagcccagcttatcagccagacgctggaacaggagcgtaggcagcgcgagctactcgagcaacattacgcccagtacgatgcagatgacgacgaaaccggagagtacgctaccgatgaggaggaagacgaggtcggacccgtgctgcccgggtccgatatggcgatcgaagtgttcgaactacctgagaacgaagacatgtttagtccttcagaactcgacaccagcaaactgagccataaatttaaggaactccagatcaagcacgcagtgaccgaggccgagatccagaagctgaaaaccaaactccaggctgctgaaaatgaaaaggttcggtgggagctggaaaaaactcagttgcagcagaacattgaggaaaacaaggagaggatgctcaagctcgagtcctactggattgaagctcaaacactgtgccataccgtcaatgagcacctgaaggagactcagagccaatatcaggcactcgaaaaaaagtacaacaaggcaaaaaaactcatcaaagactttcagcaaaaggagctggattttatcaagagacaggaggctgaaagaaaaaagatagaagacctggaaaaggctcacctggtcgaagtgcagggactacaggttagaatacgcgacctggaagctgaagtattccgccttctgaagcagaacggcacacaggtgaacaacaataataacatattcgagagacgcacatctctgggtgaggtatcaaaaggggacaccatggagaatctcgacggcaagcagacctcctgtcaggatggtctgtcacaggatctcaacgaagcggtacctgaaacggagagactcgattcaaaggcgctgaaaactcgggctcagctgtcggtcaagaatcgccgtcagagaccatcacggactagactgtatgactcagtaagtagcacagacggcgaggattccctggaacggaagaatttcacttttaacgatgatttcagccccagtagcacctcttcagcagacctatccggactgggagcagagccaaaaacaccaggtctgtctcagagcttggccctgtccagcgatgagtctttagatatgattgatgatgagattctggacgacggtcagagcccaaagcatagtcagtgccagaacagagctgtgcaggagtggtctgtgcaacaagtgtcccattggctgatgtcccttaatctcgagcagtacgtaagcgaattttccgcccaaaatatcaccggcgagcagctgctccagcttgacgggaacaagctcaaagcactgggcatgactgcgtcccaggatcgggctgtagtgaaaaagaagctcaaggaaatgaagatgagcctggaaaaggctcgcaaagcccaagaaaagatggagaaacagcgggaaaaactgcgaaggaaagaacaggaacagatgcaaagaaagtcaaagaagaccgaaaaaatgacgtccactacagctgagggcgcgggcgagcagtag

SEQ ID NO: 201533 - DNA, 3762 bp, synthetic construct
  misc_feature 1..3762: note = Description of Artificial Sequence: Synthetic coding sequence
  source 1..3762: mol_type = other DNA
atgctgaagaccgagagcagcggcgagcggaccaccctgcggagcgcgtcaccacatcgcaacgcgtatagaaccgagtttcaagcgctgaagtccacgtttgataagcctaagagcgatggtgaacagaaaaccaaagaaggcgaagggagccagcagagtagaggccggaagtatggctcaaacgtaaaccgcattaagaatttgtttatgcagatggggatggaacctaacgagaatgccgcggtgatagcgaaaacaaggggaaaaggaggccactctagcccacagcgccgcatgaagcctaaagaatttttggaaaaaaccgacgggtcagtggtgaaattggagtccagcgtgagcgaaaggatttcacgctttgacacgatgtatgacggccctagctattctaaatttactgagaccagaaaaatgtttgaaaggagtgtacacgagagtgggcagaataaccgatatagtcccaaaaaggaaaaggccggaggcagcgagccacaagatgaatggggtgggtctaaatccaatcgagggtccacggattctcttgactctctttccagcaggaccgaagccgtgtctccaaccgtgagccagctgtctgcggtgtttgagaacacagattcaccctctgcgataatctccgagaaggccgagaacaatgagtacagcgtcactggtcattatcccctcaacctccctagtgttacagtgaccaacttagacactttcgggcacctgaaagactcaaactcctggcccccctccaataagaggggggttgataccgaggatgcccacaaaagtaatgctacgcccgtgccggaagtagccagtaagtctacctccctcgcaagcatccccggagaagagatacagcaaagtaaggaaccagaagacagcacaagcaatcagcagacccctgattccattgacaaggatgggcctgaggagccatgtgcagagagcaaggccatgcctaaaagcgaaataccctcacctcaatcacaattgttggaggacgccgaggcaaatttggtgggcagggaagcggcaaagcaacagcgaaaggagttggccggaggtgatttcacctcaccggatgcctcagcatcatcatgtggaaaggaagtacccgaagatagcaacaatttcgatgggagccacgtatatatgcacagcgactacaatgtgtacagagtcagatcccgttataactcagattggggggagacagggaccgaacaggacgaagaagaggacagcgatgaaaattcatactaccaaccggacatggagtatagcgagattgtgggcttacccgaggaggaggaaattccggcgaacagaaaaattaaattcagcagcgcgcccataaaggtgttcaatacttattcgaatgaagactatgaccgaaggaatgatgaggtagatccagtggcggcttcagcagaatatgaactggaaaaaagggtcgaaaagttggaactgttccctgtggaacttgagaaagacgaagatgggttgggcatctccatcatcggaatgggggttggagctgacgctggcctggagaagctggggatcttcgttaagactgtgacggaaggcggagccgcccagcgcgacggacgtatccaggtaaatgatcagattgtagaggtggacggtataagcctcgtcggggtgactcaaaacttcgcagcgaccgtgctccggaatacaaagggtaatgtgcgctttgtgatcggccgggaaaaacccggccaggtgtctgaagtggctcagctgatatctcagaccttggaacaggaacgcaggcagcgcgagttacttgagcagcactatgcccagtatgacgccgacgacgatgagaccggcgagtatgccaccgatgaagaagaagacgaggttggtcctgtgctcccaggctccgatatggccatcgaggtgtttgagctgccagaaaatgaagatatgttcagtccctcggagttagatacgtctaaattatctcataagttcaaggaactgcagattaagcacgccgtcacagaggctgaaattcagaagttaaaaactaagttgcaggccgctgaaaacgagaaggttcgctgggaactcgaaaagacacagctccagcagaacatcgaggagaacaaagaaagaatgctgaagttggaatcatactggattgaggcccagaccctttgccataccgtaaatgagcatctgaaagaaacacagtcgcaatatcaagcacttgagaagaagtacaacaaggcgaaaaaactgattaaagatttccagcagaaagaactggacttcattaaacggcaagaggccgagagaaagaaaatcgaagacctcgagaaagctcatctggtggaagtgcaaggcctgcaggtacgcattcgggatctggaggccgaagtgtttaggctacttaagcagaatggaacacaggtaaataacaataacaatatctttgaacgccgcacatccttaggtgaggtgagtaagggcgacacaatggagaacctcgacggtaagcagactagctgtcaagatggactgtcgcaggatctgaacgaggccgtccccgagacagagcgactggattccaaggccctgaagacacgagcacagctatcagtgaaaaatcggaggcaacgaccttcaagaacccggctgtacgatagcgtttccagcacagatggcgaggattctctagagcgtaaaccatcaaacagtttctataaccacatgcacatcaccaaactgctgcctcccaaagggctgcgaacttcctctccggagagtgattctggcgtgcctcccttgacgcctgtggacagcaacgtgccattcagttccgatcatatcgcggaatttcaagaggagcccttagatcctgagatgggccccttgtcttccatgtggggggatacctcattgttttccactagcaagtctgatcacgacgtggaagaaagcccctgtcatcatcagactaccaataaaaagatccttcgcgagaaagacgatgctaaagatccgaaatctctgagggccagctcttctttggcagtacaggggggcaaaatcaaacgcaaatttgttgatttaggagcgcctctacgcaggaactcttctaaaggcaagaagtggaaagagaaggagaaggaggcctccaggttctccgcggggagcaggatcttccggggtcgccttgagaactggacccccaagccatgctccacagctcagacttcaacacggtctccatgcatgcccttctcttggttcaatgacagtagaaagggttcttattcatttagaaatctgcccgcacctaccagctctctgcagccctcccctgagactttaatttccgacaagaagggctctaagaattttactttcaatgatgatttttcacctagcagcacgtcctccgcagacctgtctggcctgggagccgagcccaaaacacctgggctcagtcagagtctcgctctgagcagtgatgaagcactcgggatgacggccagccaagatcgggccgtggtcaagaagaagctgaaagaaatgaagatgtcccttgaaaaggctcgcaaggctcaagaaaagatggagaagcaaagggagaagttgcggaggaaagagcaagaacagatgcaaagaaaatctaagaagaccgagaaaatgacctccacaaccgcagagggagcgggcgagcagtag

SEQ ID NO: 201534 - DNA, 930 bp, synthetic construct
  misc_feature 1..930: note = Description of Artificial Sequence: Synthetic coding sequence
  source 1..930: mol_type = other DNA
atggacgagaaggtgttcaccaaggagctggaccagtggatcgagcagttgaacgaatgcaagcaactgagtgaaagccaggtcaaaagtctgtgcgaaaaggcaaaggaaattctgaccaaggagtcgaacgtgcaggaggtacgatgccctgtgaccgtatgtggggacgtccatggacaattccacgacttgatggagctatttaggatcggcggcaaaagcccagacacaaattacctgttcatgggcgactacgttgacagagggtactactcagtggagacagtgaccctgttagtggcactcaaggtgcggtatcgtgagcgcataacaatacttaggggcaatcacgaatccagacagatcacccaggtgtacgggttctacgatgagtgtctgcgtaaatacggcaatgcaaatgtctggaaatattttaccgatctgttcgactatctccccctgacggccctggtggacgggcaaatcttttgtctgcacgggggtctgtccccgtctattgataccctggaccacattcgagctctggatcgattacaggaagtccctcatgaagggccaatgtgcgacttgttgtggtcagaccctgatgacagaggcggttggggtatttctccccgcggtgccggatacacattcggccaagatatctctgaaacttttaaccatgcaaatggcctgacacttgtgtcccgcgctcatcagttagtgatggagggctacaattggtgccatgaccgtaatgtggtgactatattctccgcacccaattactgttacaggtgcgggaatcaggccgctattatggagctcgacgatacactcaagtatagcttcctgcaatttgacccagcccctcgccggggcgagcctcatgtcacccgccgcaccccagactattttctttag

SEQ ID NO: 201535 - DNA, 1407 bp, synthetic construct
  misc_feature 1..1407: note = Description of Artificial Sequence: Synthetic coding sequence
  source 1..1407: mol_type = other DNA
atggcccccccccccgcccgggtgcacctgggcgccttcctggccgtaacacccaacccgggcagcgctgccagcggcacagaagccgccgccgccactccatccaaggtttggggatcttctgcaggtcgtattgagccccggggtggtggacgcggtgccttgcccacatccatggggcagcacggtccaagcgctcgtgcccgcgcaggccgagcccctggcccccgcccagctagagaggcttccccgaggctgagagtccacaagacatttaagttcgtggtggtgggagtgcttctgcaagtcgtgccgagctcagccgcaaccataaaactgcacgaccagagcatcgggacccagcagtgggagcattcaccactaggagagctgtgtcctccaggcagccatcgctctgagcacccaggggcttgtaatcggtgtaccgaaggggtgggttacaccaacgcctccaacaatctctttgcatgtcttccatgtacagcatgcaagtctgatgaagaggaaaggagtccatgtactaccacaagaaatacagcttgccagtgtaagcctgggacatttcgtaatgataacagcgccgagatgtgccggaaatgttcacggggatgcccacgcgggatggtgaaggtgaaagactgcactccctggagtgacatagagtgcgtgcataaggagagtggcaacggccataacatctgggttatccttgtggttactctcgttgtgccgctcctcctggtcgcggtcctgattgtgtgctgctgcattggctctggatgcgggggcgacccgaagtgcatggaccgagtttgcttttggcgactgggtctcctgagaggacccggcgcggaagataacgcccataatgagatattgagcaatgcggacagcctctccactttcgtgtccgagcagcagatggagagtcaggaacccgccgatctaacgggagtaacagtacagagccctggcgaagcacagtgcttgctgggcccagctgaagctgagggatcacaaaggcgaaggctgctggtccctgcaaacggtgcagatcctaccgagacgctgatgctctttttcgataagttcgcgaacattgtaccgtttgattcctgggaccagcttatgaggcagcttgatttgacgaaaaatgagattgacgtggtgcgagcaggcacggccggtccaggtgatgccctgtacgcgatgttgatgaaatgggtcaataagaccggaaggaacgcaagtatccacaccttactcgacgccttggaacggatggaagagcgccacgcccgggaaaagatccaggacctgttggtggatagtggtaagttcatctatctggaagatgggacaggctcagccgtcagtttggaatag

SEQ ID NO: 201536 - DNA, 930 bp, synthetic construct
  misc_feature 1..930: note = Description of Artificial Sequence: Synthetic coding sequence
  source 1..930: mol_type = other DNA
atggacgacaaggccttcaccaaggagctggaccagtgggtggagcagttaaacgagtgtaagcagctaaatgaaaaccaggtgcgtacactgtgcgaaaaagcgaaggagatactcaccaaagagagcaatgtacaggaagtacgctgcccggtgaccgtctgtggggatgtgcacgggcagttccacgacctcatggagctgtttcgaattgggggcaaatctccagataccaattatctgtttatgggggactacgtcgaccgcggctattattccgtggaaacagtaactctgctcgttgctctcaaggtgcgctatccagagaggattactatcctgcgcggcaaccacgagagtcgccaaatcacccaggtttatggcttctacgacgagtgtcttcggaaatacggaaacgcaaacgtatggaagtactttactgacctattcgactacctcccactcaccgctcttgtcgacggccagattttctgcctccatggcggtttgtctccttccatcgacacactggatcatatccgggcactggacaggctgcaagaggtgcctcacgagggaccgatgtgtgacctgctttggagcgatcccgatgacagaggcgggtggggaataagtccccgcggtgctggctatacattcggccaggacatctctgaaaccttcaatcatgctaacggtctgacattagtcagcagggcgcatcagcttgttatggagggatataattggtgtcacgacaggaacgttgtcaccatttttagcgctcctaactattgttacaggtgcggaaaccaggctgcaatcatggaactagacgatactttgaaatatagcttcctacagttcgatcccgccccgcggcggggggaaccacacgtgaccaggcggacaccagactacttcctgtag

SEQ ID NO: 201537 - DNA, 1461 bp, synthetic construct
  misc_feature 1..1461: note = Description of Artificial Sequence: Synthetic coding sequence
  source 1..1461: mol_type = other DNA
atgagcagcagcagcccccccgccggcgccgccagcgccgccatctccgcctccgaaaaggtagacggatttaccaggaagagcgtgaggaaggcccaacgacagaagaggagtcaaggctcatctcagttccggtcccagggtagccaggctgaactgcatcctctgccccagctcaaagacgctacaagcaatgaacagcaggagttgttctgtcagaaactgcaacagtgttgtatcctgtttgattttatggactctgtatctgacttgaaatcaaaagagataaaacgggccaccctcaacgagctcgtggaatacgtgtccactaatagaggtgtcattgtggaaagtgcttacagcgatatcgttaagatgattagcgcgaatattttcagaaccctcccaccttctgacaaccctgactttgatccagaagaagacgagcccacactcgaggcttcttggcctcatattcagctagtctacgaatttttccttagatttttagagagtccagatttccagcccagtatagctaagagatatatcgatcaaaaattcgtgcagcagctgcttgagttgtttgattcagaggacccccgggagcgagatttcttgaaaacggtcctccaccggatttacggaaagtttctcggcctgcgggccttcatcaggaagcagatcaacaacatctttcttcgcttcatctacgaaacagagcatttcaatggagtcgccgaactcttagagattttgggcagcattatcaatggctttgcactgcccctcaaagccgaacataagcagtttctgatgaaggttcttatccctatgcacacagccaaaggattggctttatttcatgcgcaattagcatattgcgtggtccagttcctggaaaaggacactacactcacagaaccggtcatccgcggactgctaaaattctggccaaagacgtgctcccagaaggaggtgatgtttctcggagagattgaggagattttagacgtgatcgagcctacacaattcaagaagatcgaagaaccgctgttcaagcaaatttccaagtgcgtgagctcatcacatttccaggttgccgaacgggcactgtacttctggaacaacgaatacatactgtcattgattgaagagaatatagacaaaatccttccaataatgttcgccagtctctataagatttcaaaagaacattggaaccctacaatcgtagctttagtatacaacgtgctaaagacgttgatggaaatgaacgggaagctcttcgacgatttgacgagtagttacaaggctgagagacaaagagaaaaaaaaaaagagctcgaaagagaagaattatggaagaaactggaggagctaaagctgaaaaaggccctggagaagcagaacagtgcctacaatatgcactctattctcagtaataccagtgcggagtag

SEQ ID NO: 201538 - DNA, 1290 bp, synthetic construct
  misc_feature 1..1290: note = Description of Artificial Sequence: Synthetic coding sequence
  source 1..1290: mol_type = other DNA
atgatcatgaacgccaccagcaacgagcagcaggagctgttctgccagaagctgcagcagtgttgtatcctcttcgacttcatggactccgtgtcagatctgaagagtaaggagattaaaagggcaaccctgaacgagcttgtcgaatacgtctccacaaatcgtggcgtgatcgtggagtcggcgtacagcgacattgtcaagatgatttccgcaaacatatttcggaccctgccaccctcagacaacccggactttgaccccgaagaagatgagccaacattagaagccagctggccacatattcagttagtctatgaatttttcttaagattcctcgagagtcccgattttcagccttccatcgccaagcggtatattgaccagaagtttgtgcagcagctgctggagctgttcgacagcgaggatcctcgggagcgagattttctgaaaaccgtactgcataggatttatggcaaatttctgggccttagggccttcatcaggaaacagataaacaacattttcctcaggtttatctatgagactgagcacttcaatggagtcgcggagctgttggagattctgggaagcatcattaacgggttcgccttaccactgaaagccgagcataaacagttcctgatgaaagtcctgatccccatgcatacggcaaaaggtctggccctctttcatgcacaattggcctactgcgtggtgcaatttctcgagaaagacacaactctgacggaacctgtgatcaggggactcctgaagttttggcctaagacatgttcacagaaagaagtgatgttcctcggcgaaatcgaggagatcttagatgtcatcgagcctactcagttcaagaaaattgaggagcctttgttcaagcagatttcgaaatgtgtgtccagctcccatttccaagtcgcagagagagctttatatttctggaacaacgaatatatactgtcacttattgaggaaaatatagacaaaattctgcctattatgttcgctagtctgtacaagatttcaaaggaacattggaaccccacaatcgtggctcttgtgtacaatgtgctgaaaacacttatggaaatgaacggcaagctgttcgacgatcttacttcctcatacaaagcagagcggcagcgagagaagaagaaagagctggaacgtgaggagctctggaaaaaacttgaagaactgaaactcaagaaggcattggagaaacagaatagtgcttacaatatgcattccatcctctccaataccagtgcagagtag

SEQ ID NO: 201539 - DNA, 1461 bp, synthetic construct
  misc_feature 1..1461: note = Description of Artificial Sequence: Synthetic coding sequence
  source 1..1461: mol_type = other DNA
atgagcagcagcagcccccccgccggcgccgccagcgccgccatctccgcttccgagaaagtggacggattcactcgaaagagcgtccggaaggcccaaaggcagaagcggtcacagggatcaagccagtttagatcccagggcagccaggcagagctgcaccccttgccacagcttaaagacgcaacctccaatgagcagcaggagctattctgtcagaaactccaacagtgctgtattctttttgattttatggattccgtgtccgatctcaaaagtaaagaaatcaagcgcgccacgctgaacgaactggtggaatacgtgagtacaaatagaggcgtaattgtcgaatccgcttactccgacattgtgaagatgatcagtgccaacatctttaggaccctcccgccctctgacaatcctgatttcgacccagaagaggatgagcctaccctggaggcgagttggccacacattcagctggtgtacgaattcttcttaaggttccttgagagtcccgacttccagccttcaattgctaagcgatacattgaccagaagttcgtccagcagcttttggaattgttcgattccgaggatccaagagagcgtgacttcctcaagaccgttctgcataggatctatggcaaattcttgggactcagggcctttataaggaaacagattaataatatatttctgaggtttatctatgaaactgaacatttcaacggggtggcagaactgcttgaaatacttggttccataattaacggttttgccctgcctctgaaagccgaacataagcagttcctcatgaaggttctcattcctatgcacaccgctaaaggtctggccttatttcatgctcagttagcatattgcgtggtccagttcctagagaaagacacaaccctcacagagcccgtgatccgcggcttgctgaagttctggcccaagacctgtagccaaaaggaggtgatgtttctgggggagattgaggagatactagatgtgatcgaaccgacacaatttaagaagatcgaagaaccgctattcaaacagatttcaaagtgtgtctccagttcacacttccaggtcgcggagcgagctctctatttctggaataatgaatacatccttagcctgattgaggaaaatattgacaagattctgcccataatgttcgccagcctatataaaatctcaaaggaacattggaatcccacaatagtggccttggtctataatgtcctgaagacgctgatggagatgaacgggaaactttttgacgatcttacctcaagttacaaggccgaaagacaacgggagaaaaaaaaggagctcgaacgtgaggagctatggaaaaagctcgaggaactgaaactgaagaaggccctggaaaaacagaacagcgcctataacatgcactctattcttagcaacacttctgccgagtag

SEQ ID NO: 201540 - DNA, 1341 bp, synthetic construct
  misc_feature 1..1341: note = Description of Artificial Sequence: Synthetic coding sequence
  source 1..1341: mol_type = other DNA
atgaagtgcttcagccggtacctgccctacatcttccggccccccaataccattctgtccagcagttgccatactgaagctgatatcatctctaccgtggagtttaatcatacaggcgaactcctagcaacaggggataaagggggtcgtgtagtcatctttcaaagagaacaggagagtaagaaccaggtccaccgcaggggggagtacaatgtgtacagcacatttcagagtcacgagcctgagttcgattatttaaaatccctggaaattgaggagaaaatcaacaagatacgctggctgcctcagcagaacgccgcttatttcttgctaagcacaaatgataagaccgtgaaactgtggaaagtgtcagagagagataaacgcccagaaggatataatctcaaggatgaagaagggcggctgagggacccggccaccatcactacactacgagttccagtcttacgcccgatggacctaatggtagaggcaacccccagacgagttttcgctaacgcacacacatatcacattaacagcatctctgttaattcagattacgagacctacatgtcagctgacgacctgaggattaacctgtggaactttgagataaccaaccagtctttcaacatcgtggatattaaacctgccaacatggaggagctgacagaggtaattacagcagccgagtttcatccccaccattgcaataccttcgtgtatagtagtagtaagggcaccattcgactgtgcgacatgagggccagtgctctctgcgataggcatacgaagttctttgaggagcccgaggatcccagcaatcgatctttcttctccgaaattatctcatcgatttcagacgtaaagtttagccacagcgggaggtacatcatgacaagggactacctgaccgtgaaggtctgggacctcaacatggaaaaccgccccatagagacataccaggtgcacgactacctccgctcgaaactctgctcattgtacgagaatgattgcattttcgataagtttgaatgcgtatggaacgggagcgactccgtgataatgactggtagttacaataacttcttccgtatgttcgaccggaacacgaaacgtgatgtaactctcgaggcaagtcgtgagaatagcaagccacgcgccatcttgaaacccaggaaggtgtgcgtgggcgggaagcgtaggaaagatgaaatatcggtagactccctcgacttcagtaaaaagatcctgcacacggcctggcatcctagtgagaatatcatcgcagttgccgctactaacaatctgtacatctttcaggataaagtcaattag

SEQ ID NO: 201541 - DNA, 1332 bp, synthetic construct
  misc_feature 1..1332: note = Description of Artificial Sequence: Synthetic coding sequence
  source 1..1332: mol_type = other DNA
atggaggaggacatcgacacccggaagatcaacaacagcttcctgagagaccattcttatgctacagaggccgacataatctcaactgtggagtttaatcacacaggtgaactcctggcgacgggtgataagggcggaagggttgttatttttcagcgcgaacaggaaagtaagaaccaggtgcacaggaggggagagtacaatgtgtactctacattccagtcacacgagccagagttcgattaccttaagtctttggagattgaagaaaaaattaacaagatcaggtggttaccacagcagaacgcggcatattttctcctgtctactaatgacaagaccgtgaagctctggaaagtatcagagagagacaagagaccagagggctataacctgaaggatgaagagggaaggctgcgtgaccccgctacaatcacaacactacgagtccccgtgcttcgcccgatggatctgatggttgaagcaacgccacgtcgcgtttttgccaatgctcacacctaccacattaacagcatctctgtaaattcggactacgaaacctacatgtctgccgacgatctgaggatcaacctatggaacttcgaaatcaccaaccagtcatttaacatagtggatatcaaacccgcaaacatggaggagttgacggaagtcatcaccgcagcggagtttcacccccaccattgcaatacgtttgtgtattcatcatccaagggcacgatacggctttgcgacatgagagccagcgccctgtgcgaccgtcacactaaattctttgaagagccagaagatccaagcaaccggtccttcttcagtgagataataagctctatctccgatgtaaagttcagtcactcgggccggtatattatgacacgggactacctgactgttaaggtgtgggacctaaacatggagaatcgcccaatcgaaacttatcaagttcatgattatttgagatcaaaactgtgttcactctacgagaatgactgtatcttcgataaattcgaatgcgtgtggaacggctccgatagcgtcatcatgacggggagttataacaattttttccggatgtttgacaggaacacaaaacgagacgttaccctggaggccagccgtgaaaatagcaagccccgggcaatcctgaagccccgaaaggtgtgtgtgggaggcaaaaggaggaaggacgaaatctctgttgatagcttggacttttccaaaaagattttacacactgcatggcatccaagtgagaacatcattgccgtagccgcaactaacaacctatatattttccaggataaggtgaactag

SEQ ID NO: 201542 - DNA, 1506 bp, synthetic construct
  misc_feature 1..1506: note = Description of Artificial Sequence: Synthetic coding sequence
  source 1..1506: mol_type = other DNA
atggtgctgcagcccagcgagcggcactaccgggactggaaccaccgaaggctcgggccctggtgttcgcccacgggctccccagccccgctgagctgtgaaacaggatgcggagagggctcctggattctcgtgtgcagactgcttgttcctacacaggtgagtctgctgtccatggaagaggacattgacacgagaaaaattaacaactccttcctcagggaccactcttatgcaaccgaggctgacatcatcagtaccgtggagtttaaccacaccggggagttgttggcaacgggagataagggaggccgggttgttattttccagcgtgagcaagagtccaagaaccaagtgcacagaagaggcgaatataacgtctactccacatttcagtcccatgagcccgagtttgattaccttaaaagtctggaaatcgaggagaagatcaacaaaattcggtggttgccccagcagaatgcagcatattttttgctgagcacaaacgacaagacggtcaagctgtggaaagtgtcggagagagataagagaccagaggggtataacctgaaggacgaagaaggccgtctaagagacccggccactatcaccacattgagggtgcccgtgctgcggcctatggacctgatggtagaggccactcctcgccgcgtcttcgcaaacgcacacacctaccatattaattccattagtgtgaatagtgattatgagacttatatgtctgccgatgatctccgcattaacctctggaacttcgaaatcactaaccagtccttcaacattgtggatatcaagccggcgaacatggaggagctgactgaagttataaccgccgccgagtttcatccacaccactgtaacaccttcgtctactcgtcctctaagggtaccatacggctctgtgacatgcgggcttcagcgctgtgcgaccgtcacactaagttttttgaggaaccagaggaccctagcaaccgaagttttttttctgaaatcatctcaagtatttcagacgtcaagttcagccatagcgggaggtatattatgacgagggactacctgaccgtaaaggtctgggatttgaatatggagaatcgcccaatcgagacataccaggtccacgattacctcagatccaagctctgtagcctctacgaaaacgactgtatcttcgataagtttgaatgcgtttggaacggatcggattctgttatcatgactgggagttacaataactttttccgcatgttcgataggaataccaagcgggatgtgactttggaggccagtagagaaaactctaagccaagagccatcctgaaacctagaaaagtgtgtgtcggaggaaaacggcgtaaagatgaaatttccgtggacagtctggacttttcgaaaaaaatcttgcataccgcgtggcatccctcggaaaatatcattgctgtggctgccacaaataacttatatatttttcaggacaaagtgaactag

SEQ ID NO: 201543 - DNA, 1299 bp, synthetic construct
  misc_feature 1..1299: note = Description of Artificial Sequence: Synthetic coding sequence
  source 1..1299: mol_type = other DNA
atgaactaccccgacgagaacacctacggcaacaaggccgacatcatttctactgtggaattcaaccacactggagagttgctcgctaccggagataaggggggacgggtcgtcatctttcagcgagaacaggaaagcaagaaccaggttcatcgccggggggaatacaatgtgtactccaccttccaaagccacgaacccgagttcgactacctcaagtcactggaaatcgaggagaaaatcaacaagattagatggcttccacagcagaatgccgcctatttcctgctctcaaccaacgacaaaaccgtgaagttatggaaagtctcagagcgcgataaaaggccggagggatataatctcaaagacgaggaggggcggttgagggatcctgccaccatcacaaccctcagagtgcccgttctccggcccatggacctgatggtggaagcaacaccccgtcgagttttcgctaacgcccacacatatcatattaatagcatctccgtcaacagtgattatgaaacctacatgtccgcggacgatcttagaattaacctgtggaacttcgagatcaccaatcagagcttcaacatcgtggacatcaaacccgcaaacatggaggaactcactgaggtgattactgcagcagagtttcatccccatcattgtaataccttcgtatactcatcgtcaaagggaactattcggctgtgcgacatgcgcgcgagcgccctgtgtgaccgccacactaaattctttgaagagccggaggatcctagtaaccggtccttcttcagtgaaataatttcgtccatcagcgacgtgaaatttagccatagtggacgctacataatgaccagggattatcttaccgtgaaggtttgggacttgaacatggaaaataggcccattgaaacatatcaggtgcacgactatctgagatctaagctatgctctctttacgaaaatgattgtatatttgataagtttgaatgcgtttggaatggctctgactcagtcatcatgacaggcagctacaataatttttttcgcatgttcgaccgcaacacaaagagggatgtcacactcgaagcgtccagggaaaatagcaagcccagggctattcttaaaccccggaaggtatgcgtgggggggaagcgtagaaaggatgagatttcggtcgacagtttggatttctcaaaaaaaattctacacacagcgtggcacccatcagaaaacattattgccgtggcagcgaccaacaacctgtacattttccaggataaggtgaactag

SEQ ID NO: 201544 - DNA, 1332 bp, synthetic construct
  misc_feature 1..1332: note = Description of Artificial Sequence: Synthetic coding sequence
  source 1..1332: mol_type = other DNA
atggaggaggacatcgacacccggaagatcaacaacagcttcctgagagatcactcctacgctacagaagctgacattatctccacagtagaattcaatcacaccggggaactgttagctacaggtgacaaaggggggcgcgtggtcatatttcagcgagaacaagaatctaaaaaccaggtgcatcgccgaggggaatacaacgtgtattccacattccaatcccatgaacctgagttcgactatcttaaaagcctggagattgaggaaaaaattaataaaatccggtggctcccgcagcagaacgctgcctacttcctactgagtacaaacgataagactgtcaaactctggaaggtctccgagagagacaagaggcccgagggctacaatcttaaggatgaggaggggcgcctgagggatcctgccactattacaacacttagagtgcctgtgcttcggccaatggacctaatggttgaggctacaccacggagggtgttcgctaatgcacatacatatcatatcaacagcatctctgttaactccgactacgagacatacatgagtgccgatgacctacgtataaacctgtggaatttcgagatcacaaaccagagctttaatatagtggatatcaagcccgccaacatggaggagctgaccgaggtgattacagcagccgaattccatccccatcactgcaatacatttgtatattccagctccaaggggacaattaggttgtgtgatatgagggcttctgctttgtgcgatcgtcatacgaaattcttcgaagaaccagaggatccctctaaccggtctttttttagcgaaatcatcagctccatttccgacgtgaaattttctcatagcggtcgttacattatgacaagagattacctaactgtgaaagtctgggatctgaatatggagaataggcctattgaaacttatcaagtccatgactacctcaggtccaagctatgctcactgtacgaaaacgattgtatatttgataagttcgaatgcgtgtggaatggctcagacagcgtgattatgacaggatcatataataatttttttaggatgtttgaccgaaacactaagcgcgacgtgactctcgaggcatctcgcgagaatagcaaaccccgggcaatccttaagccacgcaaagtgtgtgtcggggggaaaagacgcaaggacgagatctccgtagacagcctggactttagcaaaaagatactccatacagcgtggcacccaagcgagaatatcatcgccgtggccgccaccaataacctgtatattttccaggacaaggtgaactag

SEQ ID NO: 201545 - DNA, 1332 bp, synthetic construct
  misc_feature 1..1332: note = Description of Artificial Sequence: Synthetic coding sequence
  source 1..1332: mol_type = other DNA
atggaggaggacatcgacacccggaagatcaacaacagcttcctgcgcgaccattcctacgccaccgaagccgatatcatctcaacagtcgagtttaaccacactggcgaactgctggccaccggtgacaagggaggccgcgttgtgatatttcagcgggaacaggaatccaaaaatcaggtgcatcgaagaggcgagtacaacgtgtattctacattccaatcccatgagccagagtttgattatctgaaatcgctcgaaatcgaagagaagattaataaaattagatggctcccacagcagaatgctgcatatttcttgctgagtactaacgacaagaccgtgaaactgtggaaggtttcagagcgcgacaaaaggcccgagggatacaacctgaaggacgaggagggaagattacgggatccagctacaattactactttgagggtgccggtgctccgccctatggatctgatggtcgaagccacacctagacgtgtttttgccaacgcccacacataccatattaattctattagtgttaatagtgattatgaaacctatatgagtgcggacgacctgcgcatcaacctctggaacttcgagattacaaatcagagcttcaacattgtggacattaaacccgccaacatggaagagctgaccgaggtcatcacagccgccgagttccatcctcaccattgcaatacattcgtgtactcatccagtaagggaacaattcggctctgcgacatgcgggcatccgcactctgcgacagacacacgaagttcttcgaggaaccagaagatccttctaaccgcagtttcttctcagagatcatttcctccatcagcgatgtgaaattctcccactcagggaggtacattatgactagagattaccttactgtgaaggtctgggatcttaacatggagaatcggcccatagagacgtatcaggtacacgactacctgcgatccaaattgtgtagtctttatgagaacgactgcattttcgacaagtttgagtgcgtgtggaatggcagcgatagcgtcattatgacaggctcctacaataattttttccgaatgttcgataggaataccaagcgcgacgtcacgctggaggcctctcgagaaaattccaagcctcgagctattttgaaaccccggaaggtttgtgtgggaggtaaaagaagaaaggacgaaatctcggtcgacagcttagacttctctaaaaagatactgcacacagcctggcacccaagcgagaacatcattgcggtggctgccactaacaatctatacattttccaggacaaagttaactag

SEQ ID NO: 201546 - DNA, 1530 bp, synthetic construct
  misc_feature 1..1530: note = Description of Artificial Sequence: Synthetic coding sequence
  source 1..1530: mol_type = other DNA
atgctgctgagcctgcccgccctgcacctgcagaccagcgagcaccacccattcttccagctccctcatcggagactgggcccttggtgctcccccacaggctcaccagcccctctatcatgcgagactggctgcggagagggttcctggatcctggtgtgcagacttctggtgcccactcaggtgtccctgctgtccatggaagaggacatcgataccagaaagatcaataacagcttcttgagagaccactcgtacgcaactgaggcagatatcataagcaccgtggaatttaatcataccggtgaattactggccacgggggacaagggtgggcgcgtggttatcttccaacgcgaacaggaatcaaaaaaccaggtgcatcgccgcggggagtacaatgtgtattcaacatttcagtcacatgaaccagagtttgactatctgaagtccctcgagattgaggaaaaaatcaataagatacgctggcttcctcaacaaaatgccgcctactttctgctgagtaccaacgacaagactgtgaaactctggaaggtgtccgagcgcgacaaaagaccggagggatataatttgaaagacgaagaaggaaggctgcgcgatccagccaccatcactaccctgcgggtgcctgtgctgcgccctatggacctgatggtcgaagccaccccccgaagagtatttgccaacgctcatacataccatatcaatagtatctctgtaaattccgactacgagacttatatgtccgctgacgacttgcggattaacttgtggaacttcgagattaccaaccaatcgttcaacatcgtagacataaagcctgcgaatatggaggagctgaccgaagtcattacggctgccgagtttcacccacatcactgcaatacatttgtgtacagctccagtaaggggaccatccgcctctgcgacatgagagcttctgcgctttgtgatagacacaccaaattttttgaagaacccgaagatccaagtaataggtctttcttctctgagattatctcaagcatatccgatgtcaagtttagtcactcgggaaggtatattatgacgagggactatctgaccgttaaagtctgggacctgaatatggagaatcgcccgattgaaacttatcaagtgcatgactatctccgatctaagctgtgctcattgtacgaaaatgactgcattttcgacaagtttgaatgcgtatggaatggttccgactctgtcataatgactggttcatacaacaactttttccgcatgttcgaccgaaatacaaagcgggatgtgactctcgaagccagtcgcgaaaattccaagcccagggctattctcaagccacgtaaggtctgtgttgggggaaagagaaggaaagacgagatatctgtcgatagccttgatttcagtaagaaaatcctacacaccgcctggcatccctcggaaaatattattgcagtcgcagctaccaataacctgtacattttccaggacaaggttaactag

SEQ ID NO: 201547 - DNA, 1332 bp, synthetic construct
  misc_feature 1..1332: note = Description of Artificial Sequence: Synthetic coding sequence
  source 1..1332: mol_type = other DNA
atggaggaggacatcgacacccggaagatcaacaacagcttcctgcgtgaccattcatacgcaactgaagccgatatcatttctaccgtcgagttcaatcacacgggagagctgctggccaccggtgataaaggcgggagggtggtgatatttcagagggaacaagagagtaagaatcaggtccaccgtcgaggagagtacaacgtgtacagtacattccagagccatgagcccgagtttgactatctaaaaagtttggagattgaggagaagatcaataagattcgctggctgccccagcaaaatgccgcatatttcctgctctcaacgaatgacaagactgtgaagctctggaaggtcagtgagcgcgacaaacgacctgagggatataacctaaaagacgaggagggccgcctgagagatcctgccaccataactaccctgcgggtgccagtgttaaggcctatggaccttatggtggaggccacgccccgacgtgtattcgcaaacgcacacacatatcacataaactcgatctctgtgaatagtgactatgaaacgtacatgtccgctgatgatctgcggataaacctctggaatttcgagatcactaaccagagctttaatatagtggatataaaacccgccaatatggaagagctgaccgaagttatcaccgcagcagagttccatccacaccattgtaacactttcgtatactctagttcaaaaggcacaattcggctttgtgatatgcgggccagtgcactctgtgatcgccacactaaattttttgaggagccagaggatcctagtaaccggtccttctttagtgagattatatctagtataagtgatgttaagttctcccacagcggaagatacatcatgactcgtgactatctgaccgtaaaggtttgggacctgaatatggaaaatcgccctatcgaaacttaccaggttcatgattaccttagatcaaagctatgctctctgtacgaaaatgactgcatatttgataaatttgagtgcgtgtggaacggaagcgacagcgtaatcatgaccgggtcgtataacaacttcttcaggatgttcgacaggaataccaaaagagacgtgactttggaagcatccagggaaaattcaaaacccagagcaatcctcaagcctcggaaagtctgcgttggggggaagagacgcaaggatgaaattagcgtggactcccttgattttagcaaaaaaatcttgcatacggcctggcacccgagtgagaacatcattgccgtggcggctactaacaacctctatattttccaggataaggtcaactag

SEQ ID NO: 201548 - DNA, 1350 bp, synthetic construct
  misc_feature 1..1350: note = Description of Artificial Sequence: Synthetic coding sequence
  source 1..1350: mol_type = other DNA
atgatccccggcatcggcaccctgacccaggacaccctgtggtgcttctctcaagtgaagggtactatcgagatcggcaccactgaagccgacataatcagcactgtggagttcaatcacacaggtgaacttctggctacaggagacaaggggggtagggtggtgatcttccaaagggagcaagagtccaagaatcaggtccaccgccgcggggagtacaacgtttactcaacgttccaaagccatgagccggaattcgactatttaaaatccttagagattgaagagaagatcaataaaattcggtggttgcctcaacagaacgccgcttattttcttctcagcaccaacgacaaaacagttaagctttggaaagtgtcagagcgagacaagcggcctgagggatacaacctcaaagatgaggaaggcaggttgagagaccccgccacaattactactttacgagtgcccgttctgcgtcccatggacctgatggtcgaggctactccccgcagagttttcgccaatgcccatacatatcacataaactctatttctgtcaatagtgattatgagacttacatgtccgcggacgatctgagaatcaacctttggaattttgaaatcacaaatcagagtttcaacatcgttgacatcaagcctgcaaatatggaggagctcacagaagtcattaccgccgccgaattccacccccaccactgtaacacgtttgtttatagcagctccaagggcaccatcagattgtgcgacatgagagcatcggccctgtgtgatcgacacactaagtttttcgaggaaccagaggacccctccaatcggagttttttcagtgaaataatctcatccatctcagacgtcaagttttcccacagcggacgctatatcatgactcgggattacctcaccgtaaaagtgtgggaccttaatatggagaaccggccgattgagacatatcaggtccacgattatctgcgaagcaaattgtgtagcttatacgaaaacgattgcatcttcgataagtttgagtgtgtgtggaatggttcagactcagtcataatgacagggtcatacaacaactttttccgcatgttcgaccggaacactaagagagacgtgacactggaggcaagtcgagagaactccaagccccgggcaatcctcaagcccagaaaagtctgcgtagggggcaagagacgcaaagacgaaatcagcgtggatagcctggatttctctaaaaagatcctccacacagcctggcatcccagcgaaaatataattgccgtcgccgccaccaacaacctctacatctttcaggacaaggtaaattag

SEQ ID NO: 201549 - DNA, 1299 bp, synthetic construct
  misc_feature 1..1299: note = Description of Artificial Sequence: Synthetic coding sequence
  source 1..1299: mol_type = other DNA
atgaactaccccgacgagaacacctacggcaacaaggccgacatcatctccacagtcgagtttaatcatactggcgagctcttggctaccggagataagggaggtcgtgtggtgatatttcagagagaacaagagtctaagaaccaggtacaccgtcgcggggagtataatgtgtatagtacgttccagtcacatgagcccgaattcgactacctgaaatccctggaaatcgaggagaagattaataaaattcgctggcttccccagcagaatgcggcgtattttctgctatctactaacgacaagacggtcaaactttggaaagtgagtgaaagagacaagagacctgaaggctacaaccttaaagacgaagagggaaggctacgcgacccagcaactattacaacactgagggtgccagtcctcaggccaatggacctcatggtggaggccactcccaggcgggtgtttgccaacgctcacacgtaccacattaatagcataagcgtgaattctgattacgaaacctacatgtctgctgacgatttaagaataaacctgtggaattttgagattactaatcagtcattcaacattgtggacatcaaacccgcgaacatggaagaactgactgaagtcataactgccgcggagtttcaccctcaccactgcaacacgttcgtttattctagttcaaagggcactataaggctgtgtgatatgcgcgccagcgcactctgcgatcggcataccaagttttttgaggagcctgaggatccttccaaccggtcgttctttagcgagattattagctccatttctgacgtcaagttttcacacagtgggcggtatattatgacgcgggactacttgaccgtcaaggtgtgggacctcaacatggagaataggccgatagagacttatcaagtccacgactacttgagaagtaagctctgttctttgtatgagaatgactgtattttcgacaagttcgaatgtgtgtggaatgggagcgactctgtgataatgacgggttcatacaacaacttttttcgcatgtttgaccgcaataccaagagggatgtgaccctggaggcttctcgtgaaaatagcaaacctcgtgcgattctcaagccaaggaaggtctgtgtggggggtaaacgcagaaaggatgagatctcagttgacagcctcgatttctccaagaagattctgcatacggcatggcatcccagcgaaaacatcatcgccgtggctgccactaataatctctacatattccaggacaaagtgaactag

SEQ ID NO: 201550 - DNA, 1494 bp, synthetic construct
  misc_feature 1..1494: note = Description of Artificial Sequence: Synthetic coding sequence
  source 1..1494: mol_type = other DNA
atggagaccaagctgccccccgccagcacccccaccagccccagctcccctggactcagccctgtcccaccacccgacaaggttgatggcttctcacgtcgctcactgcggcgagctaggccgaggagatctcattccagctcgcagtttcgttatcagtcaaatcagcaggagctgacacccttgccattgctaaaggacgtgccagcatccgaactccacgaactactctcacgtaagctcgcacagtgcggcgttatgtttgactttctcgactgtgttgcagatctgaagggaaaggaggtaaagagggccgccctgaatgaactggtggaatgcgttggctccactagaggagttctgatcgaacctgtttacccagatatcattagaatgatctctgtgaatatcttcagaacactgcctccgtcggaaaatcccgaattcgaccctgaggaggacgaacccaacctggaacccagctggccacacctgcagctggtttatgagttcttcttgagattcctggagtcccccgatttccaacccagtgtcgctaagagatatgtggaccagaaattcgtccttatgcttttggaactgttcgactcagaggacccccgagaacgggagtacctgaagacaatactgcatcgggtttatggaaaattcctcggtctgcgcgcctacatcaggaaacagtgcaatcacatatttttgagattcatctacgagtttgagcacttcaatggggttgccgagttgctggaaattctcggtagcatcattaatggatttgccttgcctctcaaaacagagcacaagcagtttctagtccgggttctcatccccctccactctgtgaagtcgctatctgtgttccacgcgcaactcgcgtactgtgtggtgcagttcttggagaaagatgctaccctgaccgagcatgtcatcagagggctccttaagtattggcccaagacctgcacccagaaagaagtgatgttcttaggggaaatggaagaaatcctagatgttatcgagccatcacagtttgtcaaaatccaggagcctctgtttaagcaggtggctcgctgcgtgagcagccctcattttcaggtggccgagagagccctgtacttctggaataacgagtatattctgtcattgattgaggataactgccacaccgttctgccagccgtgtttggcaccctgtaccaggtgagcaaagagcactggaatcagaccatagtgtctctgatatacaacgtcctgaagacatttatggagatgaacgggaagctttttgacgaactcacggcctcttacaaactcgagaaacagcaggaacaacaaaaggcgcaggagcggcaggaactatggcaggggctggaagaactcagactaaggaggctgcagggaacacagggcgctaaggaggctccgctccaacgtctcaccccacaagtggccgcttccggcggacaaagttag

SEQ ID NO: 201551 - DNA, 1107 bp, synthetic construct
  misc_feature 1..1107: note = Description of Artificial Sequence: Synthetic coding sequence
  source 1..1107: mol_type = other DNA
agcgtgcagagccaccccgcccccccccggccccgggagaacccccgcgggagcgagagcctaccctgccgtctgactgctatggagaccaaactgccgccagcaagcacccctacaagcccgtccagcccaggactctcaccagttcccccaccggataaagtggatggcttttcacgcaggtctctaagacgggcacgccctcgccggtcacacagcagctcccagttcagatatcaatccaatcaacaagaactaacacctctgcccctcttgaaagacgtgccggcctctgagctccacgaattactctcacgcaagctcgctcaatgtggcgtcatgttcgatttcctggattgcgtagctgacctgaaaggaaaagaggtcaagcgtgcagctctcaacgagcttgtggagtgtgtaggaagtactcgcggcgtgctaattgagcctgtttatccagatatcataaggatgatcagtgtgaacatcttcaggacactgccaccatccgaaaaccccgagtttgacccagaagaagatgaaccaaacctcgaaccttcctggccccacctgcaactggtatatgagttcttccttaggttcctggagtcacctgactttcagccaagcgtcgctaaacgctatgtagaccagaagttcgttctcatgcttctggaactgtttgactctgaggaccctagagagcgagagtacctgaagaccattctgcatagagtatatggcaaatttctcgggttgagggcatacatacgaaaacagtgcaaccacattttcctgaggtttatttacgagttcgaacactttaacggagtggccgagctcctcgagatcctcggctcaatcataaacggcttcgcactcccgctgaaaaccgaacataaaccaggcagcagacctgacccacctgccttgtgccaagtcgctgtctgcctgccctgtccggctggtatactgtgtggcgccgtgcccggtgaaggctgccacagtgatagagcccgggatcccggtgctgctcaaatacttgccaaaaatctgcaccccgaggggggagacgtgtcaggtggcgacggaagagactcgtag

SEQ ID NO: 201552 - DNA, 582 bp, synthetic construct
  misc_feature 1..582: note = Description of Artificial Sequence: Synthetic coding sequence
  source 1..582: mol_type = other DNA
atggagaccaagctgccccccgccagcacccccaccagccccagctcgccaggattaagccccgtgccacccccagataaagtagatggcttttctcggcggagcctccgtcgagcccggccacgtcgctcccatagttcaagtcagttcaggtaccagtcaaatcagcaggagctcactcctctccctcttctgaaagatgtcccagccagtgagctgcatgagctgttatccaggaagcttgcccagtgcggcgtgatgttcgatttcctggactgtgtcgccgatctgaaaggaaaagaggtgaagcgagccgctctcaatgagctggtggaatgcgtaggctcaacaagaggtgtcctcattgagcctgtgtatccagatattatacggatgatctccgtcaacatttttaggaccctgccgcccagcgagaaccctgaattcgatccagaggaagacgagcctaacttggaaccatcctggccacatctccagctcgtctatgagttttttttgagatttctggaatccccggactttcagccgtccgtcgcgaagcggtacgtggatcagaagtag

SEQ ID NO: 201553 - DNA, 1494 bp, synthetic construct
  misc_feature 1..1494: note = Description of Artificial Sequence: Synthetic coding sequence
  source 1..1494: mol_type = other DNA
atggagaccaagctgccccccgccagcacccccaccagccccagctcacctggcctgtccccggtgcctccgcccgacaaagtggacggcttctctcggcgcagcctgcgtcgagcccggccacggcggtctcactctagtagtcagtttcgataccagtccaatcagcaggagctaacccctttgcctctgttaaaagacgtgcccgcttccgaactgcacgagctactgagccggaagctcgcccagtgtggcgttatgttcgacttcctcgattgcgtcgctgatttgaaagggaaggaagtaaaaagagcagctctgaatgaattggtcgaatgcgtcggcagcactaggggcgtgctgattgagccagtgtaccccgacataattaggatgataagcgtaaatatcttccgaaccctgcccccttcagagaacccagaattcgaccccgaggaagatgaaccaaatctagagccaagttggccccacctgcagctcgtgtatgaatttttcctgaggttcttagaatcccctgactttcagcctagcgtggccaagcggtatgttgaccaaaagttcgtcttaatgttactggagctctttgattctgaagatccgagagagcgggaatatctgaagaccatactgcatcgggtgtacggaaagttccttggcctgcgcgcttacatccgcaaacagtgcaaccacatctttcttcgctttatatacgaattcgaacatttcaatggggttgccgaactcctcgaaatattaggctctataataaacggattcgcattgccactgaagaccgagcataagcaatttctcgttagggtgttgattccactgcattctgtgaaatctctgtccgtctttcatgcacagcttgcttactgcgtggtccagttcctggagaaggatgccactctaacagagcatgtgatcagggggctgctgaagtattggccaaagacctgtactcagaaggaggtcatgtttctaggagagatggaagaaatactggacgtgatagaaccctcacagtttgtaaaaattcaagagccactctttaaacaggtggctcgctgcgtctcatccccccactttcaggtcgcagagcgcgccctttatttttggaacaatgagtatatactaagcctcatcgaggacaattgccacacggtgctgcctgccgtctttggaacattgtatcaagtgtcaaaagaacattggaatcagacaattgtatcattgatctataacgttctgaagaccttcatggagatgaacggaaagctctttgacgagttgactgcctcatacaaactggaaaagcaacaggaacaacaaaaggcccaagagagacaagagctgtggcagggtctggaagagttacgactgagacgcttacagggtacgcagggcgctaaagaggctccactgcagaggttgacgccgcaggtcgccgccagtggaggccaatcttag

SEQ ID NO: 201554 - DNA, 408 bp, synthetic construct
  misc_feature 1..408: note = Description of Artificial Sequence: Synthetic coding sequence
  source 1..408: mol_type = other DNA
atggaggagctgaccgaggtgatcaccgccgccgagttccacccccaccagtgtaatgtgtttgtctactcatctagcaaggggacaatacgtctgtgtgacatgcgaagcagcgccctttgcgacagacatagtaaatttttcgaagaacctgaggacccgtcttcccgcagttttttctcagaaattatatcgtccatcagtgacgttaagttctcccacagcggacgttatatgatgactcgggatccagtgggcgagggtgtgggtccccaacaccgcgctggaaggtggcgccccactcggagtacctccacatgtgccgcgtcttctgctctgtcaatgcgaacaacagcctcgctcacctcgctgtccgtagcgggcacggtcagaatcgcccctagctag

SEQ ID NO: 201555 - DNA, 1269 bp, synthetic construct
  misc_feature 1..1269: note = Description of Artificial Sequence: Synthetic coding sequence
  source 1..1269: mol_type = other DNA
ctgaccgccgacatcatcagcaccgtggagttcaactacagcggcgacttgctcgccactggtgacaaaggcggccgggtagtcatatttcaacgggaacaggagaacaagagtcgcccacactcccggggtgaatataatgtctatagtacatttcagagccacgagcccgagtttgattatctaaaatccctggagatcgaggaaaaaataaataagattagatggttaccacagcagaacgccgcccatttcctgctcagcacaaatgataagactatcaagctgtggaagatctcagaaagggataagcgggccgagggttacaacctaaaagacgaggacggcagactgcgcgatccctttcggattacggctctgcgagtgccaatccttaaacccatggacctcatggtagaggccagtccccggcggatttttgctaacgctcacacataccatataaattccattagtgtgaatagcgaccacgaaacctatttgtcagccgacgatctgagaattaacctgtggcacctagagattaccgacagatcattcaatatcgtcgacattaagcctgccaatatggaagagctcactgaagtgattaccgccgcggagttccatccccaccagtgcaacgtgttcgtctattcttcttccaaaggaacaatccgactgtgcgacatgcgaagttctgccctctgtgacagacactcaaaatttttcgaggagcctgaagacccaagttcaagatccttcttctctgaaataatcagttcaatttctgacgttaagtttagccacagtggtcggtacatgatgacccgagattacctgagtgttaaagtgtgggacctcaatatggaatcccgtccagtggagactcatcaggtacatgaatacctcagatcaaaactgtgctctctgtatgaaaatgactgcatttttgataagtttgagtgttgctggaatggtagtgatagcgctataatgaccggttcttataataactttttccgcatgttcgatcgggataccaggcgggatgtaacactggaggcttcaagagagagcagcaaacctagagccagcttgaaacccaggaaggtgtgcactggcggtaaaagacggaaggatgagatctccgtggattctttggatttcaacaagaaaattctgcacaccgcttggcaccccgttgataacgtcatagcagttgccgccacaaataatctgtacatctttcaggataaaataaactag

SEQ ID NO: 201556 - DNA, 1713 bp, synthetic construct
  misc_feature 1..1713: note = Description of Artificial Sequence: Synthetic coding sequence
  source 1..1713: mol_type = other DNA
atgccctacaagctgaagaaggagaaggagccccccaaggtggccaaatgcacggccaagccttcatccagtggaaaagacggcggcggggaaaataccgaggaagcccagccccagccccagccccaaccacaaccccaggcacagtctcaaccacctagctctaacaagcgacccagcaattccaccccaccgcctactcagctgtctaagataaaatattccgggggaccacagatcgtcaagaaggagctgtttatacagaagctccggcagtgctgcgtgttgtttgattttgtctcagatcccttgtccgacctgaaatttaaagaggtgaagcgggcagggcttaacgagatggtggagtacatcacccattcgcgggacgtcgtcactgaggctatctatcctgaagccgtgaccatgttcagtgtgaacttatttcgcaccctgcctcctagctccaacccaaccggagccgaattcgaccctgaagaggatgaaccgacactggaagctgcgtggcctcaccttcagctggtgtacgaatttttcctccggtttttggaaagccccgactttcagccgaacatcgctaagaagtacattgaccagaaatttgtgctagccttgctggatttgttcgacagcgaagatccccgggagagggactttctaaagaccatactgcaccgtatatatggcaaatttttgggcttgagagcatatatcagaaggcagatcaatcatatcttttatcgtttcatctacgagaccgagcatcataatggcatcgccgagctgctggagatcctgggcagcatcatcaacggctttgcccttccactcaaagaggagcataagatgtttcttattcgagtgttactgccactgcataaagttaagtccttaagtgtctaccaccctcagctggcctattgcgtggtgcagttcctggaaaaggaatcaagccttacagagcctgtgattgtgggactgctgaagttttggccaaaaacccattctcctaaagaagtcatgtttctgaacgagctcgaagaaatacttgacgtaattgaacccagcgagttttctaaggtaatggaacctctcttcagacaactcgccaaatgtgtcagctcgccacattttcaggtggccgagcgagcactgtactactggaacaacgagtacataatgtccctcatctcagataatgccgcacgggtcctgccgataatgttccccgccttgtatcggaattcaaaatcgcattggaataagacaatccacggcctgatctacaacgcactgaagctgtttatggaaatgaaccagaagttgttcgatgattgtactcaacagtataaggccgaaaagcagaagggaaggttccggatgaaggagagggaggaaatgtggcaaaaaattgaggagctggctcgcctgaaccctcagtatcctatgtttagggccccacctcctcttcctccagtgtactccatggagaccgagacccccacagccgaagatattcagctgctcaagcgaaccgtggaaaccgaggctgtccaaatgttaaaggacatcaagaaggaaaaggtcctgctccgccggaagtctgagctcccccaggatgtgtacactatcaaggccctcgaggcacacaagagggctgaggagttcctgaccgcttcacaggaggccctgtag

SEQ ID NO: 201557 - DNA, 1491 bp, synthetic construct
  misc_feature 1..1491: note = Description of Artificial Sequence: Synthetic coding sequence
  source 1..1491: mol_type = other DNA
atgccctacaagctgaagaaggagaaggagctgttcatccagaagttgagacagtgctgtgtgctgtttgattttgtgtctgacccactgtcagatctgaagtttaaggaggtcaagagggcagggttgaacgaaatggtggagtacatcactcatagccgcgatgtggtgacagaagcaatctatcccgaagccgtaaccatgttttcagttaatctgttcagaacactaccgcccagttccaatcccacaggagcagagttcgaccctgaggaagatgaaccaacgctggaagcagcatggccccatcttcagctggtgtatgagttttttctgagatttctcgagagtccggatttccagcctaatatcgcaaagaagtacattgatcagaaattcgtattagctctgctggacctgttcgattccgaggaccctcgagaacgagactttttaaagacgatcttacatcgcatttacgggaaattcctgggcttgcgagcctacataagacggcagatcaaccatatattctacagattcatctatgagaccgaacaccacaacggtatcgctgaactgcttgagatcctagggagtatcataaatggtttcgccctccctctcaaagaagagcacaagatgttcttaattcgggtgctgctgccgcttcataaagtgaagtccttaagcgtgtaccaccctcagttggcctattgtgtcgtgcaatttttagaaaaggagagctctcttacagagccagtcatcgtggggctgctgaaattttggcccaagacccatagtcccaaagaagtgatgtttttgaatgagcttgaggagattcttgacgtaatcgaaccatccgaattcagcaaggtgatggaacctctgtttaggcaactggccaaatgtgtctcctcacctcactttcaggtggcagagagggccttatactattggaacaatgaatatattatgagtctgatttccgacaacgccgctagagtgttacccattatgtttccggcactgtaccgcaatagcaagagtcattggaacaaaactatccacggtctcatatataacgcactcaagcttttcatggagatgaatcaaaaactgtttgatgactgcactcagcaatacaaagcagagaaacagaagggccgctttaggatgaaagagagggaggaaatgtggcaaaaaatcgaagagttagctcgcctgaatccgcagtaccccatgtttcgcgcccctcccccattgcctccggtgtacagtatggagaccgagactcctacagcagaggatattcagcttctcaagagaactgtggagaccgaagcagtgcaaatgctgaaggacatcaagaaagagaaagtgctccttaggcgcaagagcgagctgccccaggacgtttatactatcaaagccctggaagcccacaagagggctgaggagttcttaacagcaagtcaagaagccttatag

SEQ ID NO: 201558 - DNA, 1515 bp, synthetic construct
  misc_feature 1..1515: note = Description of Artificial Sequence: Synthetic coding sequence
  source 1..1515: mol_type = other DNA
tgaaagaaggagcggcggcagagcagcagccggttcaacctgagcaagaaccgggaattgcagaaactccctgcattaaaggattcacctacgcaggaaagagaggagctttttatacagaagctgcgacagtgttgcgtgctatttgacttcgtttccgatccactgtctgacttaaagtttaaggaagtcaagagagcaggcctgaacgagatggtggagtacattacccacagccgcgacgtggtgactgaggcaatttaccccgaggccgtgaccatgttctctgtgaatctcttcagaacattgcccccttcatcgaaccctacgggagcggagttcgatccagaagaggatgaaccaaccctcgaagctgcgtggcctcaccttcagctggtatatgagtttttcctccgattcctggagagccctgattttcagccaaacatcgcaaagaagtacattgaccagaagtttgtgctggcactactggatctgtttgacagcgaggatccccgggaaagggattttcttaaaacaatcttacaccggatatatggtaagttcctcggcctgagggcttatatcagacggcaaatcaaccatatcttctaccgcttcatttacgaaactgagcaccacaacggcattgctgagcttctggagatcctaggatcaattatcaacggttttgccttgcctcttaaggaggagcacaagatgtttctgattcgcgttctgctacctctccataaggtcaagtcactgagcgtctaccacccacaagtgattgtcggcctcttgaaattctggccaaagacgcacagtcccaaagaggtcatgtttctcaacgaactggaggagatccttgacgtcattgagccctcagaattcagtaaggtgatggaacccctcttcaggcaactggctaaatgcgtatcgagtccccacttccaggttgcagaaagagctctgtattactggaataatgaatatatcatgtcactgatctcagacaatgcagccagggtgttgccaattatgtttccagctctgtaccggaactccaagagccattggaataagacaattcacgggttaatctataacgccttgaagctgtttatggaaatgaaccagaagctttttgacgattgtacacaacagtacaaggctgagaagcagaaaggacgatttagaatgaaagagagagaagagatgtggcagaagatcgaagaactggctcgcctaaaccctcagtatccaatgtttcgggccccgccacccctaccaccagtgtactctatggagaccgaaacacccacggctgaggatatccagttgctcaaaaggacggtagagaccgaggctgtgcagatgctcaaggacatcaaaaaagagaaagtgctcctgagaagaaaaagcgagctcccccaggatgtgtatacaattaaggctctggaagctcacaagcgggctgaagagttcctgaccgcatcccaagaggcactctag

SEQ ID NO: 201559 - DNA, 1809 bp, synthetic construct
  misc_feature 1..1809: note = Description of Artificial Sequence: Synthetic coding sequence
  source 1..1809: mol_type = other DNA
atgccctacaagctgaagaaggagaaggagccccccaaggtggccaaatgcaccgccaaacctagcagcagcggtaaggatggaggtggcgaaaatacagaagaggcccaaccccagcctcagccccagccacagcctcaggcccaatctcagcctcctagtagcaataaaagacctagcaacagtaccccaccgcctacccagttgtccaagatcaagtacagtggcggtccacaaattgtcaagaaagaaagaagacagtcttcttcaaggttcaatctttccaagaaccgggagctgcagaaactgcccgctctaaaggacagtcctacacaggagcgcgaggaactctttatccagaagctaagacaatgctgcgtcttattcgacttcgtgtcggacccgcttagcgatttgaagttcaaagaagtcaagagggccggcttaaacgagatggttgagtatatcacacactcgcgggacgtagtgaccgaggccatctaccccgaagcggtaaccatgttctctgtgaacctttttcgcacccttccaccaagctcaaatcccactggagctgagttcgatcccgaagaggatgagcctaccctggaggcggcctggccacaccttcagttggtctatgagttcttcctacgattcctggagtccccagatttccagcctaacatcgccaagaagtatatagaccaaaagtttgtattggctctgcttgatctcttcgactctgaggatccgagagaaagggatttcttgaagactatccttcaccggatatatggcaagttcttgggcctgcgggcctacatccggcgccagatcaaccatatattctatcggttcatttatgaaaccgagcatcacaacggaattgcagagcttctcgaaatcttggggagcatcatcaacggcttcgcccttccgctcaaggaggaacacaagatgttcctgatccgtgttcttctgccactgcataaagtgaaaagcctgagcgtgtatcaccctcagctggcttattgtgtggtacagttccttgaaaaggaatcatccctgacagagcccgtgatcgtggggttgcttaagttctggccaaagacacatagccctaaggaggttatgttcctgaatgagctcgaggagattctggatgtgatcgagccatctgaattcagtaaggttatggagcctctgtttcggcagctggccaagtgcgtctcatcaccccattttcaggtagctgaacgtgcgctctattattggaataacgagtacatcatgtcattaatctccgacaatgctgcacgtgtgctgccaatcatgttccctgcgctgtatcgcaactccaagagccattggaacaagacaatacacgggctaatttacaatgcattaaaactgttcatggagatgaatcagaagctgtttgatgattgtacgcagcagtacaaagcagagaagcaaaagggacgtttccgaatgaaggaaagggaagaaatgtggcagaagattgaggaactagcgcgtctgaacccccaataccctatgtttcgcgcccctccccctctacccccagtctacagcatggaaacggagaccccaacggccgaggatatccagctgctgaaacggaccgtggagaccgaagccgtgcagatgctcaaagacataaaaaaggagaaggtgctcctgaggagaaagtctgaactgccacaggacgtctacactattaaagcccttgaagcacacaagagggccgaggaatttttgacagcatcccaagaggctttatag

SEQ ID NO: 201560 - DNA, 1755 bp, synthetic construct
  misc_feature 1..1755: note = Description of Artificial Sequence: Synthetic coding sequence
  source 1..1755: mol_type = other DNA
atgccctacaagctgaagaaggagaaggagccccccaaggtggccaagtgcactgctaagccatcatcttccggaaaggacggtggcggagaaaatacagaagaagctcaacctcaaccccagcctcaaccgcagccgcaggcacaaagccagccgccaagctcgaacaaaaggccctccaattcaacacccccgccgacacagctgagcaaaatcaagtacagcggtgggccccagattgtcaaaaaggagcggcgccaaagttcttcccgtttcaacctgtcaaagaacagagaattgcagaaactccctgctctgaaggactcccccactcaagagcgcgaagagttattcattcagaagctccggcagtgttgcgtactgtttgacttcgtatccgaccccctgtctgaccttaagttcaaagaggtaaaaagagctgggttgaacgaaatggtggaatacatcactcatagccgtgatgttgtgacagaggccatttacccagaggctgtcacaatgtttagcgtaaatctctttcgaaccctgcctccgtcatccaacccaacaggggccgagtttgaccctgaggaggacgagcccaccctcgaagccgcctggccccacctccaactagtctacgagtttttcctgagatttctcgagtcccccgattttcagccaaatatcgcaaaaaaatatatcgaccaaaaattcgtgttggccctgttagacctttttgattctgaggaccctcgcgagcgcgattttctcaaaactatcctgcaccggatatatggtaagttcctgggacttagggcatacatcagacgacaaataaaccatatcttctataggtttatatacgagacagaacaccacaatggcatagctgaactcctagaaattttgggctccatcataaatggctttgcacttccacttaaggaggagcataaaatgtttcttatccgggtgctgctgcccctgcacaaagtcaagtcgctgtccgtatatcacccacaagtgattgtcggtttgctgaaattttggccaaagacccactcacccaaagaagttatgttcctgaatgagcttgaagaaattctggacgtgatcgaaccttccgaattcagcaaggtcatggaaccgcttttccgccagctggcaaaatgtgtttcatctccacacttccaggtggctgagagggcattgtactactggaataacgagtacatcatgtcccttattagcgacaatgccgctagagtcttgcccatcatgttcccagctctctatagaaattcaaaatcgcattggaataagaccatccatggcctgatatataacgcacttaaactcttcatggaaatgaaccagaaactattcgacgattgtacccagcaatataaagccgagaagcagaaaggccggtttcgcatgaaggagcgcgaggaaatgtggcaaaagatcgaagagcttgctcggttaaatccccagtatcctatgtttcgagcccctcccccgctgcctcctgtctactccatggaaacggaaacgccaacagctgaagatattcagctgctcaagcggacggtcgaaactgaggccgtacagatgcttaaggatattaagaaagagaaggttctactgcgaaggaagtcagaactgccccaggacgtctatactattaaagcactggaagctcataagcgtgctgaagagttcttaacagcatcacaggaagccctgtag

SEQ ID NO: 201561 - DNA, 1404 bp, synthetic construct
  misc_feature 1..1404: note = Description of Artificial Sequence: Synthetic coding sequence
  source 1..1404: mol_type = other DNA
atgagcagcgcccccaccaccccccccagcgtggacaaggtggacggattctctaggaagtctgttagaaaagcccgccagaaaagaagccagtcttcatcacaattccggagccaaggtaaaccaatcgagcttacccccttaccgcttctgaaggacgtcccaagttctgagcagcctgaactgttcctaaagaagctccaacaatgctgtgtcatcttcgatttcatggacacgctctccgacctgaaaatgaaagagtacaagagatctaccctgaatgagttagtggactacattaccatcagccgcggctgcttgacagagcaaacatatccagaggtcgtccgtatggtatcatgcaatatctttcggactctacccccgagcgacagtaacgagtttgaccctgaagaggacgagccaaccctcgaggcctcatggccacacctgcagctggtctacgaattcttcatacggtttctggaaagccaggagttccaaccttccattgccaagaaatatatcgatcagaagttcgtccttcagctcttagagctgtttgattctgaggacccacgggagcgagattatctcaagacagtgctgcacagaatttatgggaagtttcttggcctcagggccttcataagaaaacaaattaataacatttttctcaggtttgtgtatgaaaccgagcactttaatggagtagctgagttacttgaaatcctgggatccatcattaatggctttgctctgcctcttaaggcggaacataaacagtttctggttaaagtgctcatcccacttcatactgtgcgttcactttcactgtttcatgctcagctggcgtactgtatcgtgcaattcctcgagaaggatccttcactgacagagccagtcatcaggggccttatgaagttctggccaaagacttgctcgcagaaagaggttatgttcttgggagagcttgaagagattctagacgtgatcgaaccctcacagttcgtaaagatccaggagccattgtttaaacagatcgccaaatgtgtctcatcccctcacttccaagtggcggagcgagctctgtactactggaacaacgagtacatcatgtctttgattgaggaaaactctaatgtgatccttcccatcatgttctcctctctctatagaatatcaaaagaacactggaatccagccatagtggcactagtgtataatgtcctgaaagccttcatggagatgaactctacaatgttcgacgaactgaccgccacctacaagtctgaccggcaacgtgagaaaaaaaaagagaaagaaagagaagaactctggaagaaactggaggacctggaactgaaaaggggcctgcgccgtgacggaatcattcctacttag

SEQ ID NO: 201562 - DNA, 1176 bp, synthetic construct
  misc_feature 1..1176: note = Description of Artificial Sequence: Synthetic coding sequence
  source 1..1176: mol_type = other DNA
atggacaccctgagcgacctgaagatgaaggagtacaagcggagcacactgaatgagctggttgattatatcacaattagtagaggctgcctgaccgaacagacataccccgaggtggtgaggatggtctcctgcaatattttccggactcttccacccagcgactcaaatgaattcgaccccgaagaggacgagccaacactcgaggccagttggccccaccttcagctggtgtatgagttcttcattagattcctggaatcacaggagtttcagccctctattgctaaaaaatatatcgaccagaaatttgtgctgcaactgctggagctcttcgatagtgaggatcctcgtgaacgcgattacctgaagaccgtgttgcatcgcatttatggaaagtttctcggccttcgagcatttatccggaagcaaataaataatatctttctccgcttcgtgtacgagaccgaacacttcaacggtgtggctgaactgttggaaatattgggcagcatcatcaacggtttcgctctgcctttaaaagcagagcacaaacaatttctggttaaggtcttgatcccactgcacaccgtacgatccttatccctgtttcacgcccaattagcctattgtattgttcagtttctggaaaaggatcctagtttgacagagcctgtgattcggggtctgatgaaattctggcccaagacatgttctcagaaagaggtgatgttcctgggggaattggaggaaattctggacgtgattgagcccagccaatttgtcaagatccaggaaccgctgttcaagcagatcgctaaatgcgtgagctccccacattttcaggtcgctgaaagagcgctctattactggaacaatgaatacatcatgagcctaattgaggaaaacagtaacgtgatcctaccaataatgtttagttccctgtacagaatttccaaggaacactggaaccctgccatagtcgctttggtctataatgtgctcaaagcctttatggagatgaacagcaccatgttcgacgagctgaccgctacctataagtccgatcggcaacgtgagaagaagaaagaaaaggaacgagaagagctctggaagaagctcgaggacctggagctcaagcgcggacttaggcgagatggaatcatccccacctag

SEQ ID NO: 201563 - DNA, 1389 bp, synthetic construct
  misc_feature 1..1389: note = Description of Artificial Sequence: Synthetic coding sequence
  source 1..1389: mol_type = other DNA
atgagcagcgcccccaccaccccccccagcgtggacaaggtggacggcttctccaggaaatctgttcggaaagcccggcagaaacgttcccagtcctctagccagttccgctcacagggtaaacccattgagctgacacccctgcctttattgaaggatgtcccgtccagcgagcagccagaattgtttctgaaaaaacttcagcagtgctgtgtgatcttcgactttatggacacactgtcagatcttaagatgaaggaatacaagcggagtacactcaatgaactcgtagactacattacaatcagcagaggctgtttgacggagcagacttaccccgaggtcgtccgaatggttagctgcaacatctttaggactctccctccgtcagacagcaacgaatttgaccccgaagaagatgaacctacattagaggccagttggccacacctgcagttagtgtacgagttctttatccgcttcctcgaatcacaggagtttcagccatccatcgcaaagaaatatattgatcagaagtttgtgttgcagttgttggaactgttcgattcagaggacccgcgcgagagggattacctcaagacggtgttgcaccgcatttatggaaagttcttaggcctgcgcgcttttatccgaaagcagatcaataatatttttcttagattcgtttatgagactgaacattttaacggtgtggcagagctcctcgagatcctcggcagcatcatcaatgggttcgctctgccactgaaggcagagcacaaacagtttctggttaaggtcctgatcccccttcacacagtacgaagcctatcgctgtttcacgctcagttagcctactgcattgtacaatttctagaaaaagacccctctctaactgaacccgtgatccgcggcctgatgaaattctggcctaagacctgttctcaaaaggaggtaatgttccttggcgagctcgaggaaatcctagacgttatagagccatcccagttcgtgaagatacaagagcccttgttcaaacagatcgcaaaatgcgtgagtagtcctcatttccaggtagccgagcgagccctgtattattggaataacgaatatataatgtccctgattgaagagaatagcaatgtgatcctgcccattatgttctcatccctgtacagaatctcaaaagaacactggaatcctgccatcgtggcactcgtgtataatgtactaaaagctttcatggagatgaacagtaccatgtttgatgaactgacagcaacatataacgagaaaaagaaagagaaagagcgtgaggagctttggaaaaagctggaagatctagagctaaagcgcgggcttcgacgtgatggtatcatcccaacctag

SEQ ID NO: 201564 - DNA, 1344 bp, synthetic construct
  misc_feature 1..1344: note = Description of Artificial Sequence: Synthetic coding sequence
  source 1..1344: mol_type = other DNA
atgggcctgagcttcttcagcaagcacctgcccatccaggagggccaaccatgggccttgaagacaccagcggacatcatcagcacagtggagttcaatcacaccggagagctgctggccacgggagacaagggcggaagggttgtgatatttcagagagaacccgaatcaaaaaacgctccccacagtcaaggggagtatgatgtttattctacgttccagtcacatgagcccgagtttgattacctgaagtcgcttgagattgaggagaaaattaacaaaataaagtggctgccccaacagaatgcagctcattctttgctgagcacaaacgacaaaaccatcaagctttggaagattaccgaacgggataagagacctgagggatataacttaaaagacgaggaaggaaagctcaaggacctttcaacagtaaccagtctgcaggttccggtgcttaaacccatggacctgatggttgaggtgagcccaaggcgcatatttgctaatggacatacctatcacatcaactcaatctctgttaactcggactgcgaaacgtatatgtcagcagatgatctgagaatcaatctctggcatctggccatcaccgacagatcctttaacattgttgacataaaacccgctaacatggaggacctgactgaagtgattaccgcctctgagttccatccccaccactgcaatctgttcgtgtacagttcgagtaagggctccctcagactctgcgatatgagggccgccgccttgtgcgataagcactccaaactctttgaagagccagaggacccctcaaaccggagtttctttagtgagatcatcagttcagtaagtgacgtcaagttctctcattcgggacggtacatgctcacgagagactatctcacggtgaaggtttgggacctgaacatggaagctaggccaatagaaacctatcaggtccacgactaccttcgcagtaagttgtgctcactatacgaaaatgactgcattttcgacaaattcgaatgcgcatggaatggatctgatagtgtaataatgacaggtgcttataataacttttttagaatgttcgatcgcaacactaagagagacgtcacattggaggcctcaagagagagcagcaagcccagagctgtgctgaagccgcgcagggtctgtgttggagggaaacggaggagggacgacatctccgtggacagcctggacttcacaaagaagatcctccatacagcctggcaccccgcggagaatattatcgctatcgctgctactaacaacctctacatattccaggataaggtgaactccgacatgcactag

SEQ ID NO: 201565 - DNA, 1344 bp, synthetic construct
  misc_feature 1..1344: note = Description of Artificial Sequence: Synthetic coding sequence
  source 1..1344: mol_type = other DNA
atgggcgaggacaccgacacccggaagatcaaccacagcttcctgagagatcacagctatgtcacagaagcagatattatatctaccgtagagttcaaccacaccggcgagctccttgcgaccggtgacaagggcggccgagtggtcatctttcagcgagagccggaaagcaaaaatgccccccacagccagggtgagtacgatgtgtacagcacatttcagtcccacgagccagagtttgactacttaaagtctctggaaatcgaggaaaagatcaataagatcaaatggctgccccagcagaatgcagctcactccctcctctcaaccaatgataagactattaaactctggaagatcaccgagcgcgacaagagacccgaggggtacaatttaaaggacgaggaagggaagttgaaggacttaagtactgtaacatccctgcaggttccggtcttaaaacctatggatctgatggtcgaagtgtctcccagacggatattcgccaacggacacacataccacattaactcaatctccgtgaacagcgattgtgagacctacatgagcgctgatgacctccgcattaacctctggcacttagctatcactgaccgctccttcaacattgtcgacataaagcccgctaacatggaggacctgactgaagtgatcactgcaagtgagtttcatccacaccactgcaacctcttcgtctacagctcctctaaagggtcactcagattgtgtgacatgagagctgcagcgctctgcgataaacacagcaaactattcgaggagcctgaagatccctcgaatcggagtttttttagcgagatcatatcatcagtaagcgatgtgaagttctctcatagcggtaggtacatgctgaccagggactatctgactgttaaagtctgggatcttaatatggaagcccgaccgatcgagacgtatcaggtgcatgactacctgcgatccaagctatgctccctgtatgaaaatgactgtatctttgacaagttcgagtgcgcatggaatgggagcgattccgtgattatgacgggtgcttacaacaacttctttcgaatgtttgatcgtaataccaagcgagacgtgaccttggaagccagccgcgaaagcagcaaaccccgagctgtcctgaaaccacgacgcgtatgcgtgggaggaaaacgtaggagagatgatattagcgtcgattctctggactttactaaaaagattctgcataccgcttggcatcctgctgaaaatatcatcgctattgcagccacgaataacctctatattttccaagacaaggtgaattcagacatgcattag

SEQ ID NO: 201566 - DNA, 1323 bp, synthetic construct
  misc_feature 1..1323: note = Description of Artificial Sequence: Synthetic coding sequence
  source 1..1323: mol_type = other DNA
atgcgggaggccgacaccctgcggcccccccagctgatggaggtgagtgcggacattatttcgactgtcgaattcaaccacaccggcgagctgttagccaccggtgacaaagggggtcgggtagtgatattccagagagagcctgagagcaaaaatgccccccacagccagggcgaatacgacgtgtactcaacattccagtcacatgaaccagaatttgattacttaaaaagcttggagatagaagagaaaatcaacaagatcaaatggctgccacagcagaatgccgctcacagcttgctgagcacaaacgataaaaccataaagttgtggaagattaccgaaagggataagcgacctgaaggctataacttgaaagacgaggaaggaaagctaaaggatttatcaacggtcactagcttgcaggtgcccgtgctcaaaccaatggatctgatggtagaagtgagcccccgtagaatctttgctaacggccatacataccacatcaacagtatcagcgtcaattccgattgtgagacctacatgtccgccgatgatctgagaattaatctctggcatctggccatcactgaccggagctttaatatcgttgacatcaaacccgccaacatggaagacctgaccgaagtcattaccgcctctgaatttcatccccaccactgtaatctgtttgtgtacagtagcagtaaaggatctcttaggttgtgcgacatgcgcgccgcggccctgtgtgataaacactccaaactgttcgaggagcccgaggatcccagcaaccggagtttcttcagcgaaattataagcagtgtttctgacgtcaaattttctcactcaggacggtacatgctaaccagggactatctcactgtcaaggtctgggatttgaatatggaggcacgccctattgagacctatcaagtccacgattatctgaggtccaagctgtgcagcttgtatgaaaacgactgtatatttgacaaattcgaatgcgcctggaacgggagtgactccgtaattatgactggagcttataataactttttccgcatgtttgatcgaaacacaaaaagggatgtgaccttggaggctagcagagagtccagcaagccccgtgccgtattgaaaccgcgccgagtatgtgttggcggcaagcggcggagagacgacattagtgtcgacagcctcgattttacgaagaaaatcctccatactgcatggcatcctgccgagaatattattgcaattgctgccaccaacaacctgtacatttttcaagacaaggtgaattccgacatgcactag

SEQ ID NO: 201567 - DNA, 1323 bp, synthetic construct
  misc_feature 1..1323: note = Description of Artificial Sequence: Synthetic coding sequence
  source 1..1323: mol_type = other DNA
atgcgggaggccgacaccctgcggcccccccagctgatggaggtgagcgctgatattatctctaccgtggaatttaatcatacaggagagcttttagcaacaggggacaagggagggcgggtggtgatctttcaacgcgagccagaatctaagaacgctccacactcgcagggcgaatacgacgtctactccacattccaaagccacgagcctgagtttgattaccttaaaagccttgagattgaggaaaagatcaacaagataaaatggttgccacagcagaatgccgcccacagcttgctctccactaacgataagactataaagctgtggaaaattacagagcgtgataaacgccccgaagggtacaatctgaaggacgaagaaggcaagctgaaggacctgtctaccgtcaccagcctgcaggtgcctgtgctgaagccgatggatctcatggtcgaagtcagcccacgccgcattttcgctaacggccatacttaccatatcaatagtatatcagttaattcggattgtgaaacatatatgtccgctgatgacttgaggatcaacctgtggcatctggcaatcaccgataggagttttaatatcgtggacatcaaacccgccaacatggaagacctcacagaggttattaccgcatctgagttccacccccatcattgcaatctctttgtttattcgtcctcaaaaggatcacttagactttgcgacatgagggctgccgctctctgtgataagcactccaagttgttcgaagagccggaggaccctagcaataggtcctttttcagcgagattataagtagcgtttccgatgtgaagttcagccactccgggcggtatatgctgacccgcgactacctgacggtcaaagtgtgggacctgaatatggaggcacgaccaatcgaaacttaccaggtgcacgattacttgaggagtaaactgtgctctctgtatgagaacgactgtatttttgataagttcgagtgcgcatggaatgggtcggacagcgtgattatgaccggcgcatacaataacttttttcggatgtttgaccggaatacaaagagggatgtgactctggaagcaagccgcgagtcaagcaagcccagagccgtgctcaaaccacggagagtttgtgttgggggaaaacgaaggcgtgatgatatatctgtggattctctggatttcacgaaaaaaatactccacacagcctggcatcccgccgaaaatattatcgccatcgctgcaactaacaacctgtacatctttcaggataaagttaactccgatatgcattag

SEQ ID NO: 201568 - DNA, 1293 bp, synthetic construct
  misc_feature 1..1293: note = Description of Artificial Sequence: Synthetic coding sequence
  source 1..1293: mol_type = other DNA
atgggcaagcgggacaccgccgacatcatcagcaccgtggagttcaaccacactggtgagctgctcgccactggggacaaaggggggcgagtggtcattttccaacgcgagcccgagagcaagaatgccccacactcccaaggagagtatgacgtctacagtactttccagtctcacgaacccgaattcgactaccttaaaagcctcgaaatcgaggagaagatcaacaaaatcaaatggctgccccagcagaacgctgcccactcgcttctgtcgacaaatgacaagaccatcaagctctggaaaattaccgaacgtgataagcgacctgagggctataacctgaaggacgaggagggtaagctgaaggatctgtcaactgtcacatccctgcaagtgcccgtactgaagccaatggatctgatggtagaagtcagcccccgtagaatttttgctaacgggcacacctatcacattaattctatctccgtgaattccgactgcgaaacctacatgtctgccgacgatctgcgtattaacctttggcatttggctatcaccgatcggagcttcaatattgtggatatcaagcccgccaacatggaagaccttaccgaggttatcacagcatccgaattccaccctcatcattgtaacctgtttgtctactcttcaagcaaaggctcgttacgcctgtgcgatatgagagccgcagctctgtgtgacaagcatagtaagttgtttgaagagcccgaggatcccagtaatagatcttttttcagcgagattataagttcagtctcagacgttaagtttagtcattctggccgatacatgctaacccgagattacttgaccgtcaaagtctgggaccttaacatggaggcacgtcctatcgagacctaccaagttcacgattatctgcggtcaaagttgtgtagcctgtatgagaacgactgtatctttgataaatttgagtgcgcctggaacggctcagattctgtcataatgaccggagcatataacaactttttccgaatgtttgaccggaacacaaagagggatgttactctcgaggccagccgcgagagcagcaaacccagggccgtcctgaagccaaggcgagtttgtgttggggggaaaaggaggcgcgacgatattagtgtcgatagtctcgactttacaaagaagatcctgcacactgcgtggcaccccgctgaaaatattatagccatcgcggcaactaacaatctatatatttttcaggacaaggtaaatagcgatatgcattag

SEQ ID NO: 201569 - DNA, 1623 bp, synthetic construct
  misc_feature 1..1623: note = Description of Artificial Sequence: Synthetic coding sequence
  source 1..1623: mol_type = other DNA
atgcccaacaagaacaagaaggagaaggagagccccaaggccggcaaaagtggtaagtccagcaaggagggccaggacactgtcgagtccgaacagataagcgtccgcaaaaattcactcgtggcagttcccagcacagtgagcgctaagattaaggtaccagttagccagccgattgtgaaaaaggacaaaagacagaatagcagccggttctccgcaagcaacaatagggagctccagaagttgccctccctgaaagacgtcccaccagccgatcaggagaagctgtttatacaaaagctgcgacagtgttgcgtgctctttgacttcgtgagcgaccctctcagcgatctgaagtggaaggaggtcaaaagagccgccttatctgagatggtcgagtacatcactcacaaccggaacgttatcactgagcctatttatcccgaggtagtgcacatgttcgcagtgaacatgttcaggacgctgcctccttccagtaatcccaccggcgcggagtttgatcccgaagaagacgaaccaacactggaagcagcctggccccatctgcaactcgtatacgagttttttttgcgatttttggaaagccccgactttcagcctaatattgcaaagaagtacattgaccagaaatttgtgttacagctgctggagctgtttgattctgaggatccccgcgaacgagacttcctgaaaaccaccttacatagaatttatggtaagttcctgggacttagggcatatatcaggaaacagattaacaatatcttctacaggttcatctatgaaacagagcaccacaacgggatcgctgagctgctggagattcttgggtccatcattaacggctttgctttgccgctaaaggaggagcacaagattttcctccttaaggtgttgctgcccctgcacaaagttaagtccctttctgtttaccacccgcagttagcatattgtgttgtccagttcctggaaaaggatagcacactcacagaacccgtggtaatggcgctgctgaagtactggcctaaaactcactctcccaaggaagttatgtttttgaacgagctggaagagatcctggatgtaatcgagccttcagagtttgtgaaaattatggaacctttattccgacagttagccaaatgcgtgtctagcccccattttcaggtcgcagaacgcgcactttactactggaacaatgaatacataatgagcctaattagtgacaacgcagccaagattctgcctataatgttcccttccttgtatcgcaactctaagactcactggaataagaccatacacggcttaatctacaatgcactgaagctgtttatggagatgaaccagaaactcttcgatgattgcacacaacagttcaaggcggagaaactgaaagagaaactgaaaatgaaggagagagaggaagcttgggtgaagatcgagaatctggccaaagcaaatccccaggctcaaaaagacccaaagaaggacaggcccctggccagacggaaatctgagcttcctcaggatccccatactaaaaaagcattggaagcacactgcagagcagatgagttggcctcccaggacggcagatag

SEQ ID NO: 201570 - DNA, 1575 bp, synthetic construct
  misc_feature 1..1575: note = Description of Artificial Sequence: Synthetic coding sequence
  source 1..1575: mol_type = other DNA
atgctgacctgcaacaaggccggcagccggatggtggtggacgccgctaatagcaatgggcccttccagccagtggttctgcttcacattagggacgtgccacccgcagatcaggagaagctgttcatccagaaactgaggcagtgctgcgttctgttcgattttgtgtcagatccgctttcggacctgaaatggaaagaggtgaagcgcgccgccctttccgagatggtggagtatattacgcacaacaggaacgttattaccgaaccgatttaccctgaggtggttcatatgttcgccgtcaacatgtttagaacattaccaccctctagcaacccaactggagctgaatttgatccagaggaggacgaacctaccctagaagccgcctggcctcacctccagttggtgtatgagttcttcctgaggttcctagaatcaccggacttccagcctaacatagctaagaagtatatagatcagaagtttgtacttcaactgctggaactcttcgattcagaggatcccagagaacgcgacttcctcaagacaacactgcatcgcatttacggaaaattcttggggctgcgcgcttatatcagaaagcagattaacaatatcttctacagatttatatacgaaacagaacatcataatggcattgctgagctgctggaaatacttggctctattatcaatggattcgctctgcctctcaaagaggagcacaaaatctttttgctcaaagttctcctgcctctgcataaagtgaaatctctgtcagtgtaccaccctcagttggcctattgcgtcgttcaatttctcgaaaaggactccacactcacagagccagtggttatggccctgctgaaatattggcccaagacccactcccctaaggaagtaatgttccttaatgagctcgaggagatcctagacgtaatcgaacctagcgagttcgttaaaatcatggagcctcttttcagacagctcgcaaagtgcgtcagcagtccacactttcaggttgcagagagggctctttattactggaataatgagtacatcatgagcctgattagcgacaacgcagccaagatcctgccaatcatgttcccttccctgtatcgtaacagtaagactcactggaacaaaacaatacatggcctgatctataacgcgctcaagttgtttatggagatgaaccagaagctgttcgacgattgtacccagcagtttaaggccgaaaagctcaaagaaaagctaaagatgaaggagagggaggaggcctgggtgaaaattgagaatctggccaaggcaaatccgcaatataccgtgtactcccaggcctcaacaatgtccattccagtcgctatggagaccgacggaccactgttcgaggacgtccaaatgctgcgcaaaaccgtaaaggacgaggctcaccaagcacagaaagatccaaaaaaagataggcccctggcgaggcgcaaatcggagttgccacaagatccacataccaagaaagcgctggaagcgcattgccgggctgacgaacttgccagccaggatggtcggtag

SEQ ID NO: 201571 - DNA, 783 bp, synthetic construct
  misc_feature 1..783: note = Description of Artificial Sequence: Synthetic coding sequence
  source 1..783: mol_type = other DNA
atgttccggaccctgccccccagcagcaaccccaccggcgccgagttcgaccccgaagaagatgagcctaccctggaagccgcctggccccaccttcagttagtttacgagttcttcctgagattcctagagtctcctgattttcagccgaacattgctaagaaatatattgatcaaaagttcgtcctccaattactggagctcttcgacagcgaggaccctagagagcgggactttttgaaaaccaccctccaccggatctacggcaaattccttggcttgcgcgcctatattaggaaacaaatcaacaacattttctaccggtttatctatgaaacagagcatcataacggtattgctgaactgttggaaattttgggtagcatcattaacggctttgcactcccacttaaagaggaacacaagatctttctgctaaaggtcttactgcctctccataaggttaagtcgctgagtgtttatcacccccagctcgcctattgcgtcgtacagttcttggagaaggattctaccctgacggaacctgtagtcatggcattgctgaagtactggcctaagacccacagtccgaaagaggttatgtttttgaacgagctggaggaaatactggacgttattgagccaagtgagttcgtcaagattatggagcccctgttccgtcagctggctaaatgtgtatcctctccgcactttcaggataacacttggctggacattcagaggcctgaagccctgcacggggacgagcctaaagcgatttag

SEQ ID NO: 201572 - DNA, 1458 bp, synthetic construct
  misc_feature 1..1458: note = Description of Artificial Sequence: Synthetic coding sequence
  source 1..1458: mol_type = other DNA
atgctgacctgcaacaaggccggcagccggatggtggtggacgccgccaattcaaacgggccatttcagccggtggtcttactgcacattagggatgtacccccagcggatcaggagaaactgttcatccagaaactgagacagtgttgcgtactctttgacttcgtgtccgacccactgtctgacttgaagtggaaggaggtgaagcgcgctgctctgagcgaaatggttgaatacattacacacaaccgtaatgtgattaccgagcctatctatcctgaagttgtgcacatgttcgcagtcaacatgtttagaaccctgccgccgtccagtaaccctaccggcgccgaatttgaccctgaggaggatgagcccacattggaggccgcttggccacacttgcagctggtctatgagttcttccttcggtttctggaaagccccgactttcaacctaacatcgctaaaaagtatatcgaccagaagttcgttctgcagttactggaacttttcgactcagaggacccacgggagagagacttcttgaaaactaccctacacagaatatatggcaagtttcttggactcagggcctacatccgcaagcagattaacaacatcttctataggttcatttatgaaacagagcaccataatggcatcgccgagctgcttgaaatcctcggctctataattaacggttttgccctgcccctgaaggaagaacataagatttttctcctcaaagtgctgctccctctgcacaaggtgaagagcctgtccgtgtatcatccacaacttgcttactgtgtagtgcagtttctggagaaggactccactttgaccgaacccgtggttatggcactccttaagtattggcctaagacccatagtccaaaagaggtgatgttccttaatgaactggaggagatcctggacgttatcgaaccctccgagttcgtcaagataatggaaccattgtttagacaactggccaagtgcgtttcatccccgcacttccaggtcgccgagcgcgccttatactactggaataatgagtatatcatgagcctgattagcgacaatgccgcaaagattctccctattatgttccctagtttataccgaaattcgaaaacccattggaataagacaattcacggactcatctataacgctctgaagctgtttatggaaatgaatcaaaaattattcgacgactgcacccagcagtttaaggcagagaaactaaaggaaaaactcaagatgaaggagcgcgaggaggcatgggtgaagatcgaaaacctcgcgaaggcgaaccctcaggcacagaaagatcccaagaaggatagacccttagctaggaggaagtcagagcttcctcaggatcctcacactaagaaggccttagaggcacattgccgcgcagacgaattggcctcccaggatggcagatag

SEQ ID NO: 201573 - DNA, 1668 bp, synthetic construct
  misc_feature 1..1668: note = Description of Artificial Sequence: Synthetic coding sequence
  source 1..1668: mol_type = other DNA
atgcccaacaagaacaagaaggagaaggagagccccaaggccggcaagtccggtaaatcaagtaaagaggggcaggatactgtcgaatctgagggcacaagccccgaggagccctcctcgcccaaagtgccaccacctctgctcccagaactgcttgtcctgatctttggcggactgcagggccgcgacgtgccacccgccgatcaagagaaactgtttatccagaagcttcggcagtgctgcgttctgtttgattttgtgagcgaccccctcagtgatctgaaatggaaggaggtgaaacgggcggcactgagtgagatggtggagtatatcacacataatcgaaatgtaattacagaaccgatttatcctgaggttgtgcacatgtttgcggtgaatatgttccgaaccctgcccccgtccagcaaccccaccggtgccgagttcgatccagaggaggacgagccaactctcgaagcagcatggccccacttgcagctggtgtatgagttttttctccgctttctggaatccccagatttccagccgaatattgcaaagaagtacattgaccagaaatttgtgttacaactgttggagcttttcgatagcgaggatccacgcgaacgggattttctcaagactacgctccatcggatctacggaaagttccttggcttgcgcgcctacatcagaaaacagatcaataacatcttctacagatttatttatgaaacagaacatcacaacggtattgctgaacttctggaaatcttgggttctattatcaatggctttgctttgcctctgaaggaagagcacaagatatttctgctgaaagtgctgctgcctttgcacaaagtgaaatctctttccgtgtaccatccacaactggcctactgtgttgtgcagtttctcgaaaaggactccacactcactgaaccagtggtcatggcactgttgaaatactggccaaagacacactcccccaaggaggtaatgttccttaatgagctcgaagaaatcctggatgtaatcgagccctccgaattcgtgaaaattatggaacccctgtttcggcagcttgccaagtgcgtttccagcccacacttccaagtggcagagcgggctttatactactggaacaacgagtacattatgtccctgatcagtgacaatgccgcaaaaatcttgcccatcatgtttcccagtctgtatcgtaatagtaagacacactggaacaaaacaattcacggactcatatataacgccctcaagctcttcatggagatgaaccagaaattatttgacgattgcactcagcagtttaaagcggaaaaactaaaggagaaactgaaaatgaaggaacgcgaagaagcctgggtgaaaatcgaaaacctggcaaaagccaatccgcagtacaccgtttactcacaggcaagtactatgagtatcccagttgcgatggagacggatggtccgctgttcgaggacgttcaaatgttaagaaagacggtcaaggatgaggcccatcaggctcagaaggatcctaaaaaagaccggcctttggcccgccgaaagtcagagctgcctcaggacccacacaccaagaaggcactcgaggcacattgccgagctgacgaactggctagccaggatggacgctag

SEQ ID NO: 201574 - DNA, 1350 bp, synthetic construct
  misc_feature 1..1350: note = Description of Artificial Sequence: Synthetic coding sequence
  source 1..1350: mol_type = other DNA
atgctgacctgcaacaaggccggcagccggatggtggtggacgccgccaactcaaatggcccgttccagcccgtcgtattactccacattcgcgacgtcccacccgccgatcaagagaaactttttattcaaaaacttagacaatgctgtgttctgttcgatttcgtgagcgacccactgtccgaccttaagtggaaagaggtgaaaagggcggccctttcagaaatggtggagtacatcacccacaataggaatgttatcacggagcccatctatcctgaagtggtccatatgtttgctgtcaacatgtttcgtaccctgccacccagctccaacccaactggcgccgagttcgatcctgaggaggatgagcctacgctggaagccgcttggccacacctgcagctcgtgtatgagttctttctcaggtttctggaatcaccagacttccagcctaacatcgcaaagaaatatatcgatcagaaatttgtgctacagcttttggaattatttgatagcgaggacccacgtgagcgcgattttctcaaaacgacacttcacagaatttacggaaaattcctgggcctgcgtgcttatattcggaagcagatcaataacatattttatcgtttcatctacgagaccgagcaccacaacggaatcgccgaactgctggagatcctagggtctattatcaacggttttgctctgcctctgaaggaagagcacaaaatattcctcctgaaagtgctgttacctctgcataaggtaaagagcctgagtgtctaccacccacagctggcttactgcgtcgtgcagtttctcgaaaaagactccaccttgacagagcctgtggtgatggccctcctaaaatactggcctaaaacacacagccccaaagaggtgatgttcctcaacgaactggaagaaattctggacgtgattgaaccttccgagtttgttaagatcatggaaccactctttagacagcttgcaaagtgtgtctcttctccccattttcaggtggctgagcgggcactgtactactggaacaatgagtacatcatgagcctcatttcagataatgccgccaagatcctgcctatcatgttcccctccctgtatcggaatagcaagacccactggaacaagactatccacggactcatttataacgcacttaagctgttcatggagatgaaccaaaagcttttcgacgattgcactcagcaattcaaagctgagaaactaaaggagaagctgaagatgaaagagcgggaggaggcatgggtaaagatagagaacctcgcaaaggccaatccccaagtgctgaaaaaaagaattacatag

SEQ ID NO: 201575 - DNA, 1155 bp, synthetic construct
  misc_feature 1..1155: note = Description of Artificial Sequence: Synthetic coding sequence
  source 1..1155: mol_type = other DNA
atgctgacctgcaacaaggccggcagccggatggtggtggacgccgctaacagcaatggcccattccagccagtcgtcctgctgcatatcagggacgtaccgcccgcagaccaggaaaaattgttcatccagaaactgcgacagtgttgcgtgctattcgacttcgtttccgatcccctgagtgatctgaaatggaaagaggtaaagcgagcggcgttgagtgagatggtagagtatataacacacaaccgcaacgttataaccgaacctatttacccagaagttgtgcacatgttcgcagtgaacatgttccgcactctccctccgtcatccaacccaactggggctgagttcgatccagaggaagacgaaccgactttggaagcggcatggccacatctccagctggtttacgagttcttcttaaggttcctggagagtccagacttccagcccaatatcgcaaaaaaatacattgaccaaaagtttgtgttacagctacttgaactgtttgattccgaggatcccagggaacgcgacttcctgaaaaccaccctccatcggatctacggcaagtttctcgggcttcgagcgtatatacgcaagcagatcaacaacatcttctaccgttttatatatgagacagagcatcacaatgggattgctgaattgctcgagattttaggcagcattataaacgggtttgctctcccactaaaggaggaacataagatattcctgctaaaggtgctcctccccctgcataaggtgaagagcctctccgtttatcatccccagcttgcgtactgcgtagtacagttcctcgagaaagatagtactctgactgaaccagtcgtcatggcactcctgaagtactggccgaagactcacagtcctaaggaagtcatgttcttgaacgaactggaagaaatcctggacgtcatcgagccatcagaatttgtgaagataatggaacctttattccgacagctagcaaagtgcgttagctccccacacttccaagtcgcggaacgcgccctgtattactggaacaatgaatacatcatgtcacttatatccgataatgcagccaagatcctgccaataatgttcccttccctgtacagaaactccaagactcattggaacaagtag

SEQ ID NO: 201576 - DNA, 1662 bp, synthetic construct
  misc_feature 1..1662: note = Description of Artificial Sequence: Synthetic coding sequence
  source 1..1662: mol_type = other DNA
aacaagaacaagaaggagaaggagagccccaaggccggcaagagcggtaaatcctcaaaggagggccaggacaccgtagaaagcgaaggcacctcccctgaagagccaagttctccaaaagttcctcctcctttgctgcctgagctgctggtcctgattttcggcggacttcagggtcgtgatgttccacccgccgatcaggagaagctattcatccagaagctgaggcagtgctgcgttctctttgacttcgtctccgatccactaagtgatctcaaatggaaggaagtgaagagagcagccctgagcgaaatggtggagtacattactcacaatagaaacgtcatcacggagcccatctatcccgaagtggttcacatgttcgccgtgaatatgttccgcacccttcctccttcatccaaccccacaggagccgagttcgatccagaagaggatgaacccaccctggaggctgcttggcctcacctgcagctggtatacgaattcttcttgcgcttcctggaaagtcccgattttcagccaaacattgcgaagaagtacatcgaccagaagttcgtgctccagttgttggaactcttcgatagtgaagaccccagggagagagacttcctgaaaaccaccctccatcgaatttatgggaagttccttggtctccgcgcatacattaggaagcagattaacaacattttttatcggttcatttacgaaacagaacatcacaatggtatcgccgagctcctcgagatcctgggaagtattatcaatggcttcgcccttcctttaaaagaggaacacaaaatcttcctgctcaaagtgctcctccctctgcataaggtaaagtccctaagtgtgtaccatccgcaactggcttactgcgtggtccagttcctggagaaggatagcacgctcacagagccagtggtgatggctttgttgaagtactggccgaaaacacattctcctaaagaggtcatgttccttaacgaacttgaggagatcctagatgtgattgaaccatcggagttcgtaaaaataatggagccactctttaggcagttggctaagtgcgtgtcctcaccgcattttcaggtcgctgaacgagcgctgtattattggaacaatgaatacatcatgagtcttatctctgataatgcagccaagatcctccctataatgttccctagcctgtatcgcaatagcaagacacattggaacaaaactatccacggcctcatatacaatgccctgaaactgttcatggaaatgaatcagaagctgttcgacgactgcacccagcagtttaaggctgagaagctcaaggagaagctgaaaatgaaggagagggaagaagcgtgggtgaagatcgagaatctcgctaaagcgaatccccagtacactgtatattcccaggccagtactatgagcattccagtagctatggaaacagacgggccactttttgaagatgtgcagatgttgagaaagaccgtaaaggacgaagcacaccaagcgcagaaggatcccaagaaggacaggcctctggctcgcagaaagagtgaactacctcaggatccacacaccaagaaggcattagaggctcactgtcgtgccgacgagctcgcaagtcaggatggccgctag

SEQ ID NO: 201577 - DNA, 1077 bp, synthetic construct
  misc_feature 1..1077: note = Description of Artificial Sequence: Synthetic coding sequence
  source 1..1077: mol_type = other DNA
atggccgagggcgagcggcagcccccccccgacagcagcgaggaggcacccccagcgactcaaaattttatcatcccaaaaaaggagatccataccgtccctgacatgggaaaatggaaacgatctcaggcttacgcagactacatcggcttcatcctgaccctgaatgaaggagtgaaggggaaaaaactgacattcgagtacagagtgtcagagatgtggaacgaagtacatgaagaaaaagagcaggctgccaagcagtcagtgtcatgcgatgaatgtatcccactcccgcgggcggggcattgcgccccatctgaagccatagagaagctggtcgctctcttaaatactctggatagatggatcgacgagaccccccctgtggatcagccatctcgttttggaaataaggcctacaggacctggtatgctaagctggacgaggaagccgaaaacctcgtggccactgtcgttcctacacacttggccgctgccgtgccagaggtggctgtatacctgaaggaaagcgtcgggaattctactcgcatagactacggaaccggacacgaagccgcattcgccgctttcttatgttgcctgtgcaaaataggagtgctaagagtggatgaccagatcgcaattgtgttcaaggtgttcaaccgctatctggaggtgatgcgcaaattacaaaaaacataccggatggaacccgctggaagccagggcgtctggggtctcgatgattttcagttcttgccttttatctggggcagctctcagctcatagaccatccctatttagaaccaagacattttgtcgacgagaaggctgtgaacgagaatcacaaagattacatgttcctggagtgcatcttattcattactgaaatgaaaacaggcccattcgcggaacattctaatcagctctggaacataagcgcggttccctcatggagcaaggttaaccaagggcttatcagaatgtacaaagctgaatgtctggaaaagttcccagtgatccaacacttcaagtttgggtctttgctccctatccaccccgtcacatcaggttag

SEQ ID NO: 201578 - DNA, 990 bp, synthetic construct
  misc_feature 1..990: note = Description of Artificial Sequence: Synthetic coding sequence
  source 1..990: mol_type = other DNA
atggccgagggcgagcggcagcccccccccgacagcagcgaggaggctccacctgctactcagaactttataatccctaaaaaagagattcacacggttcccgacatgggcaagtggaagcgaagccaggtgccatttgggaccgtggcctatgctgactatatcggctttatcctgactctgaacgagggggtaaaaggtaagaagttaacctttgagtatagagtgagtgaagccatcgagaagttggtagccctcttaaacacgttggaccgttggatcgatgagacaccccccgtcgatcagcctagcaggtttggcaacaaggcttatcgaacttggtatgccaagctcgacgaagaggctgagaatttggtggctacggttgtcccgacccacctagcagcagcggtaccagaagttgctgtgtaccttaaggaaagtgtgggtaactcaactagaatcgattatggcaccggccatgaggccgccttcgccgccttcctctgttgcctttgtaagattggagttttaagagtggacgatcagatcgccattgtttttaaggtctttaaccggtatctggaggtgatgagaaagctacagaagacatacagaatggaacccgcaggctcccagggggtatggggcttggatgatttccagttcttgccctttatctggggatctagtcagctaatcgatcatccttatctagaaccgcggcattttgtagacgagaaagctgtcaacgaaaaccataaagattacatgtttcttgagtgtatcctgtttattacagagatgaagacgggtccttttgccgaacacagcaaccagctttggaacatttctgccgtgccctcctggagtaaagtgaaccaggggctgatcaggatgtataaggctgagtgtcttgaaaaatttcctgtcattcagcactttaagtttggttccctgctgcctatacacccagtcactagcggatag

SEQ ID NO: 201579 - DNA, 846 bp, synthetic construct
  misc_feature 1..846: note = Description of Artificial Sequence: Synthetic coding sequence
  source 1..846: mol_type = other DNA
atggccgagggcgagcggcagcccccccccgacagcagcgaggaggcccctcccgccacacagaatttcattatccccaagaaggagattcacactgtgcctgacatggggaaatggaagcgctcccaggcctacgccgattacattgggtttatccttaccctcaacgagggcgtgaaagggaagaaactcaccttcgagtatagggtgagtgaagaggcagagaacctggtggcaaccgtcgtccccactcatctggctgccgccgtccctgaggtcgctgtgtacctgaaggagtccgtcgggaattccacacgcatcgactacgggactggacacgaagccgccttcgcagcctttctctgttgcttatgcaaaatcggggtgctgcgcgtcgacgatcagatagctatcgtcttcaaggtcttcaaccgatacctcgaagtcatgcgcaaactgcagaagacatatcggatggagccggcgggcagtcaaggcgtatggggactggacgactttcagttcttaccatttatttggggctcgtcccagttgatagatcacccctacctcgagcctcgtcattttgtagatgagaaggccgtgaatgagaaccacaaggactacatgtttctcgaatgcatccttttcattaccgaaatgaagaccggcccctttgcagaacattcgaatcagctctggaacatctccgccgtcccgagctggtcaaaagtgaatcagggtttaattcggatgtataaggctgaatgccttgagaaattccctgttattcagcactttaagttcggcagtctcctccccattcaccctgtcaccagcggttag

SEQ ID NO: 201580 - DNA, 885 bp, synthetic construct
  misc_feature 1..885: note = Description of Artificial Sequence: Synthetic coding sequence
  source 1..885: mol_type = other DNA
atggccgagggcgagcggcagcccccccccgacagcagcgaggaggctcctccagccacccagaatttcattatacctaagaaagagattcacactgtgcccgacatgggaaagtggaagcggtctcaagctatcgaaaaacttgtcgctctgttgaatacgttggataggtggatagacgagaccccacccgtggatcagcctagtcggttcggcaataaagcttataggacatggtatgccaagttagatgaagaagccgagaatttagtcgccaccgttgtccctacccatctcgccgccgccgtgcccgaggtcgcggtgtacctgaaagagagcgtgggaaattctactaggattgactacggcaccgggcatgaagctgccttcgccgccttcctctgttgcttatgcaaaattggcgtcttgagggttgatgaccagattgcgattgtgttcaaggttttcaacaggtacctggaagtgatgcgaaaactgcagaaaacctacaggatggaaccagcaggtagccaaggcgtgtgggggttagatgacttccagtttctgccctttatctggggttcctctcaattgatagatcacccctatttagagccccggcacttcgtagatgagaaggcagtgaacgaaaatcacaaagattacatgtttctggaatgcatcctctttatcaccgagatgaagacaggtccatttgccgagcactcgaatcaactctggaacatatctgctgtgccttcatggagtaaggtaaaccagggcctgatcaggatgtataaggccgaatgtctggaaaagtttccagtgattcagcacttcaagtttggtagcctgttgcctatccacccagtaacatctgggtag

SEQ ID NO: 201581 - DNA, 972 bp, synthetic construct
  misc_feature 1..972: note = Description of Artificial Sequence: Synthetic coding sequence
  source 1..972: mol_type = other DNA
atggccgagggcgagcggcagcccccccccgacagcagcgaggaggcacctccagccacccaaaacttcatcataccaaagaaggagattcacaccgtgcccgatatggggaagtggaagcgctcccaagcctacgccgactacatcggtttcattctcacgctcaacgagggagtgaaagggaaaaaacttacctttgaatatcgcgtgtcagaggcaattgagaagctggtggcgctactgaacaccctggacaggtggattgacgagactcctcctgttgaccagccctcacggtttggaaacaaggcttaccgaacctggtacgccaaattggacgaggaagctgaaaacctcgtagccacggtggtcccgacccatctggcggccgctgtacccgaagttgcagtgtatctcaaagagtccgtcggcaacagcacacggattgattacggcacagggcatgaggccgcattcgccgctttcctgtgttgcttgtgtaaaatcggggtcttacgcgtggacgaccagattgctatagtttttaaagtgttcaaccggtatttagaagtgatgaggaagctgcaaaagacctatcggatggagcccgcggggagccagggggtctggggccttgatgacttccagttcttacccttcatttggggcagctctcaacttattgatcatccttacctggagcctcgtcactttgtggatgaaaaggccgtcaatgagaatcataaggactatatgttcctcgagtgtatcctgtttattactgagatgaagactggcccattcgctgagcacagtaatcagctgtggaacatctctgctgtgccttcctggagtaaggtaaaccagggtctgattaggatgtataaagcagaatgtttagaaaagtttccagtgatccagcatttcaaatttgggagtctgttaccaattcacccggtcacaagcggttag

SEQ ID NO: 201582 - DNA, 972 bp, synthetic construct
  misc_feature 1..972: note = Description of Artificial Sequence: Synthetic coding sequence
  source 1..972: mol_type = other DNA
atggccgagggcgagcggcagcccccccccgacagcagcgaggaggctcccccagcaacccagaactttattatccccaagaaagagattcacactgtcccagacatggggaaatggaaaaggtctcaagcttatgctgactatatcggtttcatcctcactctgaacgagggagtcaaggggaaaaaacttacattcgagtacagggttagcgaggctatcgagaagctggtcgctctgctgaatacgctcgataggtggatcgatgagaccccaccggttgatcaaccaagccgcttcggcaacaaggcttacaggacatggtatgcgaaactggacgaggaggccgaaaatctcgtcgctactgtggttccaacccaccttgcagccgcagtgccagaggtcgcagtgtatctgaaggagtcagtgggaaactctacccgaattgattatgggaccggacacgaagctgctttcgccgccttcctgtgctgcctctgcaagataggcgtcctccgggtggacgaccagatcgccatcgtgtttaaggtgtttaaccggtacctcgaggtgatgcgcaagctacagaagacctacagaatggaaccggctggcagtcagggagtgtggggcctggacgacttccagtttctccccttcatctggggatcatcccagctcattgaccacccatatctggaacctaggcatttcgtggatgagaaagcagtgaacgagaaccacaaggactatatgttcctggagtgcattctcttcatcacagagatgaagaccggaccgtttgccgagcattcaaaccagttatggaacattagcgcagtgccttcctggtctaaggtgaatcaaggcctcatcaggatgtataaggccgagtgtttggagaaatttcctgtcatccagcattttaagtttggaagtctgcttccgatacacccagtgacgtccggatag

SEQ ID NO: 201583 - DNA, 792 bp, synthetic construct
  misc_feature 1..792: note = Description of Artificial Sequence: Synthetic coding sequence
  source 1..792: mol_type = other DNA
atgggcaagtggaagcggagccaggcctacgccgactacatcggcttcatcctcaccctgaatgagggggtcaaaggcaaaaagttaacattcgagtatcgcgtgtcagaggccatagagaaattagtcgcccttctgaacaccctggatagatggatcgatgagacccctcccgtagaccagcccagccgctttggtaacaaggcataccgaacctggtacgcgaagctggacgaggaggcggagaacttggttgccaccgtggttcccacgcacctggccgcagccgtacccgaggtggccgtttacttaaaggagtccgtgggaaattctacaaggatcgattatggaaccggacacgaagcggcattcgccgcattcttgtgctgcctgtgcaagataggcgtgctgcgggtcgatgatcaaatcgctatcgttttcaaggtcttcaatcgctatctagaggtgatgcgcaaattgcagaaaacatacagaatggagcccgcaggctcccagggagtgtggggcttagacgattttcagttcctgccttttatatggggatcctcacaactgattgatcacccatatcttgaaccccggcatttcgtggatgagaaagcggtgaatgaaaatcacaaagactacatgtttctggagtgcatcctgttcattactgaaatgaagaccggcccatttgccgaacactccaatcagctctggaacatttccgcggtacctagttggagcaaggtaaaccagggattgatcaggatgtacaaggccgagtag

SEQ ID NO: 201584 - DNA, 1125 bp, synthetic construct
  misc_feature 1..1125: note = Description of Artificial Sequence: Synthetic coding sequence
  source 1..1125: mol_type = other DNA
atggccgagggcgagcggcagcccccccccgacagcagcgaggaggccccccccgccacccaaaacttcatcatccccaaaaaagagatccacactgtgcccgacatgggtaagtggaagcgtagccaggcctatgccgactacattggtttcatcctgacacttaacgagggggtcaaagggaaaaaattgacctttgagtatagagtgagtgaaatgtggaacgaggtccatgaggagaaagagcaggcagctaagcagtcagtgtcctgtgatgagtgcattccccttccgcgcgcaggacattgcgcgccatctgaggccatagagaaactggttgccctgcttaatactctggaccgctggatcgatgaaaccccaccagtggatcagccgtcgcgttttggaaataaagcctatcggacttggtatgccaaacttgatgaagaggcggaaaacctagtcgccactgtggtgcctactcacctggccgctgccgtgccagaggtggccgtgtacttaaaagagagcgtcggcaattcaaccaggattgattatggaacaggccacgaggccgccttcgccgcttttttgtgttgcctgtgcaagattggggtgctgcgagtagacgatcagatcgccattgtcttcaaagtctttaatagatatctcgaagtcatgcgtaagctgcagaaaacatatcgtatggagcctgctggctcccagggggtatggggcttggatgactttcagtttcttccctttatctggggatctagtcagctcatcgaccatccatatctggaacctagacatttcgtggatgaaaaagcagtgaatgagaaccacaaggactatatgttcctggaatgcatcctcttcatcactgagatgaagaccgggccctttgcagaacactcaaatcagttgtggaacatctccgcagtcccaagttggagcaaagtcaatcagggccttataaggatgtataaagctgaagctagtccttccgatacctggggtttggggatcagccacctcgggcacggacagtccgagaaacaccagccgccacagccccgcaaggccgctgtccagctttgccctgatgaacttggcgggtag

SEQ ID NO: 201585 - DNA, 456 bp, synthetic construct
  misc_feature 1..456: note = Description of Artificial Sequence: Synthetic coding sequence
  source 1..456: mol_type = other DNA
atgaagaccggccccttcgccgagcacagcaaccagctgtggaacatttctgcggtaccaagctggagcaaggttaatcagggcctgattaggatgtacaaagccgaggtctcaggaggatggcccgtctgtccctcccttttacctcacttagtcctgggctgggggcaaagcaaacgctgcggcacttgggggagctgcttcctattgcctcattgctttgccttgaacctgaggcccgctccactgaccctgggagcaagcgagtcccccatatggggtatgggctcccaacgcagtacatctcacccgagccccgaaaaactgcaatcatcatccgtactaatgtcgctcgaggctgaggctagaacctgctgtatgggatccgggggggatggtgggctaccatccccattgagttctggacagaggctattgaaagcgagagccgtgtag

SEQ ID NO: 201586 - DNA, 2802 bp, synthetic construct
  misc_feature 1..2802: note = Description of Artificial Sequence: Synthetic coding sequence
  source 1..2802: mol_type = other DNA
atggccgacctgagcctgctgcaggaggacctgcaggaggacgccgatggcagtctcgatttcgtttcccaggacgaaatgttgacccctctcgggagattggataaatacgcagcctccgaaaatatcttcaatcgccagatggttgcccggagcctcctcgacactttgagggaagtatgtgacgacgagagagactgtatcgcagtgttggagaggatctcgaggttggccgacgacagcgagcccacggttcgggccgaactcatggagcaagtaccacatattgcactgttttgtcaggagaataggccgtctatcccttacgcattttccaagtttctgttacctatcgtcgtgcgctacctggccgaccagaacaaccaggtccgaaaaacctctcaagcggcgctactggccctgttggagcaggaactgatcgagcggtttgacgtggaaacaaaagtatgccccgtgctcatagagcttacagcacccgattctaatgatgatgttaaaactgaagctgttgcaataatgtgtaagatggctcctatggtcggcaaggacattacagagagactgattctgccacgtttttgtgaaatgtgttgcgattgccgcatgttccacgtgcgcaaggtgtgtgcagctaacttcggggacatttgctcagtcgtgggacagcaggctaccgaggagatgctgctgccacgattttttcagctgtgtagcgataatgtgtggggtgtgcgaaaagcctgcgctgaatgcttcatggccgtcagttgcgccacctgtcaagagatacgtcgcacaaagctgtctgctctgttcatcaacttgatctcagatccctctcgctgggtgcgacaggctgcttttcagagcctggggccttttattagcaccttcgctaatccatcctcctccgggcagtatttcaaggaggagtcaaaatccagcgaggagatgagcgtcgaaaataaaaaccgcactagggatcaggaggctccggaggacgttcaagtaagacctgaggacactcctagcgacctgtcggtttctaattccagtgtaattctggaaaatacgatggaggatcacgcagccgaggcttcaggaaaacccctgggcgagatcagcgtgcctctggattcatctctcttgtgtactctaagctcagagagccaccaggaggctgctagcaacgagaatgacaagaaaccaggaaattataagtccatgttacggcctgaagtcgggacaacttcacaggactcagcactcctcgaccaggagctgtataacagctttcatttctggaggaccccactccctgagatagatctggacatcgagctggagcagaattctggcggaaaaccatccccagaaggtcctgaggaagagtcagagggacctgtgcctagctctccaaatattaccatggccaccagaaaggagctcgaggagatgatcgagaatctcgaaccacacatcgatgatcctgacgtcaaggcccaggtcgaagtgttaagtgctgctctgcgagccagtagtctcgatgcacacgaggagaccattagcattgagaaaaggtccgacctccaggacgaactagacatcaacgagctgccaaactgtaaaattaaccaagaagactctgtgcctctcatcagcgacgccgtcgaaaatatggacagcaccctccattacatacactcggattctgatctgtcaaataacagttctttttctcccgatgaggaacgccggacaaaggtgcaggacgtggtgcctcaggctctgctcgaccagtatctgtctatgactgacccaagtagggcccaaacagtcgataccgagatcgccaagcattgtgcctatagcctccctggcgtggcactgaccctcggcagacagaattggcattgtctaagggaaacttacgagacactggccagtgatatgcaatggaaagtgcggcgtaccttagcgttctccatccatgagttagcagtcatcctgggagaccaactcaccgcagcagatctggtgcccatattcaacggttttctgaaggacctggacgaggttagaattggcgtgctgaagcatctccacgactttctaaaactgctgcacattgacaaacgacgtgagtacctgtaccagctgcaggagttcctggtgacggataactcccgaaactggcgcttccgcgccgaacttgctgagcaactcattctcctcctggaattgtatagcccaagagatgtgtacgactatctccggcctatagctttgaatctatgtgcagacaaggtttcttctgtgagatggatctcttataagttagtcagcgagatggtcaaaaaactccatgctgccaccccgcccaccttcggggtggatctgataaatgagctggtggagaactttggtaggtgcccaaagtggtcgggtcgtcaagccttcgtgtttgtatgccagaccgtaattgaggatgattgtctccctatggatcagttcgctgtgcatcttatgccacatcttctgactctagctaatgatcgggtcccaaatgtgagagttctactggccaagacacttaggcagaccctcttggaaaaagattactttctcgcctccgcaagctgccaccaggaagccgtggaacagaccattatggcacttcaaatggacagggatagtgatgtgaaatacttcgccagcatccacccagcaagtacaaagatttccgaggacgccatgagcacagcgagtagcacctattag

SEQ ID NO: 201587 - DNA, 924 bp, synthetic construct
  misc_feature 1..924: note = Description of Artificial Sequence: Synthetic coding sequence
  source 1..924: mol_type = other DNA
atggccgagatcagcgacctggaccggcagatcgagcagctgcggcgatgcgaactgataaaagagtcagaggtcaaggctttatgtgcaaaagcaagggagatactggtggaggagagtaatgtgcagagagtggattctcccgttaccgtgtgtggagatatccacggacaattttatgacttaaaagaattatttagagtgggcggggacgtgccggagactaattatctgtttatgggtgactttgtggatagaggcttttatagcgttgagacattcttactgttgctggccctgaaggtgcgctaccccgataggattacacttattaggggcaaccacgagagccggcagattacccaggtgtacgggttttatgacgagtgcctgcggaaatacggaagcgtgaccgtctggcgctactgtaccgaaatttttgactatttaagcctgtcagctattattgacgggaagattttctgcgtacacggtgggctgtctccttcgattcaaacactggaccagatacgcactattgatcggaaacaggaagtgccacacgacggacctatgtgcgatctgctctggagcgatcccgaggataccacagggtggggggtttctccgcgtggcgccggctacttgttcggaagtgatgtggtcgcacagttcaatgctgctaacgacatcgatatgatctgcagggcccaccagctagtgatggagggatacaagtggcacttcaatgaaaccgtgctcactgtgtggagtgctcccaattattgttatcgctgcggcaatgttgcagcgattctggagctggatgaacacctgcagaaggacttcattatctttgaagcggctccccaggagacacggggtattccctccaagaaacccgtggcagactacttcctctag

SEQ ID NO: 201588 - DNA, 1413 bp, synthetic construct
  misc_feature 1..1413: note = Description of Artificial Sequence: Synthetic coding sequence
  source 1..1413: mol_type = other DNA
atgctgcaggtgcggacctacctgaccgagcccaccgtgcgggccgagttgatggaacaagtgccacacatagctctgttctgtcaagagaaccgccccagcattccctatgcattctcgaagttcctgcttccaatagtcgtgagatacctcgcagaccagaataatcaggttcgcaaaacttctcaggccgcactgctggccttgctcgagcaggagctgatcgagcggttcgatgtcgagacaaaggtttgtcccgtgttaattgagttgactgccccagacagtaatgatgacgtgaaaaccgaggccgttgccatcatgtgcaaaatggcaccaatggtggggaaggatatcaccgaacggctaatcctacctcgtttctgcgagatgtgttgcgactgccggatgttccacgtgcgcaaagtatgtgccgctaattttggggatatttgctctgtcgtagggcagcaggccacagaggaaatgctgcttcccagattcttccagttatgctcagacaatgtatggggcgtccgaaaagcctgcgctgaatgctttatggctgtctcctgcgcgacctgccaggaaatccgccggaccaagctttccgctctcttcatcaacctcatttctgacccttctagatgggtaagacaggctgcctttcaatcactggggccgttcataagtaccttcgctaacccatccagctccggacagtatttcaaagaagagtctaagagctctgaagagatgtcagtggagaataaaaaccgcacccgtgatcaagaagcaccagaggatgtgcaggtgagacccgaagacacccccagcgacctttccgtctctaacagcagcgttattttggagaacactatggaagatcacgctgctgaggcaagcgggaagcccctgggtgaaataagcgtgccactggactcttcactcctgtgtactctgagttctgagagccatcaggaagcggcctccaacgagaacgacaaaaaacccgggaattataaaagtatgctgaggcccgaggtaggaaccacatcacaagattccgctctgctcgaccaggagttatataatagctttcatttctggcgcacccccctgcccgaaatagacttggatatcgagctggagcagaacagtggcggcaaaccatcacctgagggacccgaagaggagtcagagggcccggttcccagctcaccaaatattacaatggccacgcggaaagaattagaggagatgattgaaaatctggaaccccatatcgatgatcctgacgttaaggcacaggtggaggtgctgtccgctgccctcagagcaagctcattggatgcacacgaggaaacaatctccattaaacgtgaagtcatttgcaagatgaattggatttag

SEQ ID NO: 201589 - DNA, 2853 bp, synthetic construct
  misc_feature 1..2853: note = Description of Artificial Sequence: Synthetic coding sequence
  source 1..2853: mol_type = other DNA
atggccgacctgagcctgctgcaggaggacctgcaggaggacgccgatgggtttggggtcgacgattattcgtcggagtctgatgtcatcatcattccaagcgctctggacttcgtctcccaggacgaaatgctgactccccttggccggcttgacaagtacgctgcgagcgagaatatcttcaacaggcagatggtggctaggagcctgctggacaccctgcgagaggtgtgcgacgatgagagggattgcatcgccgtgctggagcgcattagtcgtttagccgacgactctgagccaacggtgagggccgagctgatggagcaggtgccccacatcgccctgttttgccaggaaaatagacccagtattccttatgctttttccaaatttttgctcccaatagtcgtgcggtatttggccgatcagaataaccaggtgagaaagaccagccaagctgcactgctcgcactgttggaacaggagctgattgagcgcttcgatgtggagaccaaggtctgccctgtgctgatcgagttgactgcccccgactccaatgatgacgtaaagaccgaggccgtggccatcatgtgcaagatggctccaatggtcggcaaggacattactgaacgcctgattcttccgcgcttttgtgagatgtgttgcgattgtcggatgttccacgttcgcaaagtctgcgccgctaactttggtgatatctgttcagtagtgggacagcaggctaccgaggaaatgttgttgcctaggttctttcagctgtgttctgacaatgtatggggtgtgagaaaggcctgcgctgagtgctttatggccgtgagctgtgcaacatgccaggagataagacgaaccaaactgagtgccctctttatcaacctgatctcagacccatcaaggtgggtacgccaggctgcgtttcagtcactggggcccttcatcagcactttcgccaatccaagttcgtccggccagtacttcaaagaagagtcgaaaagtagcgaagagatgtccgtggaaaataagaatcggacccgagatcaggaagcacccgaagacgttcaggttaggcccgaggatactccgtcggacctatcagtatctaatagttcagtgatcttggaaaacaccatggaggatcatgcggccgaagcttcaggtaagccactgggagaaatttccgttcctctggactcatctctcctttgcaccctttccagcgagagccaccaagaggccgcctcgaacgagaatgacaaaaagccagggaactataagtccatgctgaggcccgaagtggggaccacgagccaggattctgcgcttctcgatcaggagttgtataattcctttcacttctggagaacccccctgcccgaaatcgatctggacatcgaactcgagcagaacagcggaggcaagccttcccccgaagggcccgaggaggagagcgaaggccctgtgccttcctcgcccaacatcaccatggcgaccagaaaggaacttgaggaaatgatcgagaatctggagccacatatcgacgacccagatgttaaggctcaagtggaggtgttatcagcagccctgcgcgcttcgagtcttgatgctcacgaggagaccattagtatcgagaagaggtctgatctgcaggacgagctagacatcaatgaactgcctaactgcaaaattaaccaagaggatagtgttcccctcatatccgatgctgtcgaaaatatggatagtacactgcattatatccatagcgattccgatctgtcgaacaactcctccttcagccctgatgaagaacggagaacaaaggtacaggatgttgtgccacaggctctccttgaccaatacttgtcaatgacagaccccagtcgcgctcagacagtcgataccgagatcgctaaacactgcgcatattccctgccaggggttgccctgactctaggacggcagaattggcactgtctgcgcgaaacatatgagaccctggcatcagatatgcagtggaaggtacgacggaccttagcattcagcattcatgaactggcagtgatacttggggaccaacttactgccgccgaccttgtgcctattttcaatgggtttttaaaggatctggatgaggtgcgcattggtgtgttgaagcatcttcacgatttcttgaaactcctccacattgataagcggcgagagtacctttatcagttgcaggaatttcttgttaccgacaactcaagaaattggcggttcagggctgagctggcagaacagctcattctactcctggagctatattctcccagagacgtctatgactacctgagacccatagcactgaacctatgcgcagacaaggtgagcagcgttcgttggatcagttataagctagtgagcgagatggtcaagaaattacatgcagcgacccctccaacctttggcgtagatctgattaacgagctagtagaaaactttggccggtgccctaagtggtccggccgccaggctttcgttttcgtctgccagacggtgattgaagacgattgcctgcctatggatcagtttgctgtgcacctaatgcctcatctgctgacactggccaacgatcgagtgccaaacgtaagggtactgctggctaagaccctgcggcaaactttactggaaaaagattacttcctggcgtcggcaagctgccaccaggaagccgtagaacagacaatcatggctctccagatggaccgagacagtgacgttaagtactttgccagtattcacccagcctcaacaaaaatctcagaggacgctatgagcactgcttcctcaacctactag

SEQ ID NO: 201590 - DNA, 1086 bp, synthetic construct
  misc_feature 1..1086: note = Description of Artificial Sequence: Synthetic coding sequence
  source 1..1086: mol_type = other DNA
atggacgacttccggaccagcgcccccgagccccggggcccccccaaccccaacgtggagtatattccattcgacgagatgaaggaacgtatactgaaaatagtcacagggttcaacggaatacccttcaccatccaacggttatgtgagctactgaccgaccctagaaggaactacacaggtacagacaagttcctcaggggcgtagagaaaaatgtcatggtggtgagctgcgtgtatccttccagtgaaaaaaacaattctaatagcttaaatcggatgaatggcgtgatgttccctgggaattcccctagttacaccgaacgaagtaatatcaacggcccaggaacccctcgccccctgaatagacccaaggtttctctctctgcccccatgaccactaatggcctacccgagtccaccgatagcaaggaagcaaacctgcagcagaatgaagaaaaaaaccattccgactcctcaacgtctgaaagtgaggttagctcagtgtcccctttgaagaacaagcacccagacgaggatgccgtggaggccgaggggcacgaggtgaagagactccgttttgacaaagagggagaagtgagggagacagcgagccaaaccacttcgtccgaaattagctccgtgatggtcggggagaccgaggcgtcaagtagttcgcaggataaggacaaggattccaggtgtactcgccaacactgtacggaggaggatgaagaggaggatgaggaggaagaggaggaaagcttcatgaccagtagggaaatgataccagagcgaaagaaccaggagaaggagagcgacgatgcccttaccgtgaacgaagagacatccgaggagaataaccagatggaggaatcagacgttagtcaggctgagaaggacctccttcactccgagggatccgaaaacgaagggccggtgtcaagctcttcatccgattgtagggagacagaggagcttgtgggctcaaattcttccaagactggcgagattttaagtgagagttctatggagaacgatgacgaggccactgaggtcacagacgaacccatggagcaggactag

SEQ ID NO: 201591 - DNA, 1254 bp, synthetic construct
  misc_feature 1..1254: note = Description of Artificial Sequence: Synthetic coding sequence
  source 1..1254: mol_type = other DNA
atggacgtggagcggctgcaggaggccctgaaggacttcgagaagcgcggaaagaaggaagtgtgccctgtattggatcagtttttgtgtcatgttgccaagacaggggagaccatgattcagtggagtcaattcaagggctacttcatcttcaagctcgaaaaagtgatggatgatttcaggactagcgcacctgaaccccgagggcctcctaatccaaatgtggaatacatcccctttgacgaaatgaaagaaaggatcctcaagatcgtaaccgggttcaatggaataccatttaccatacagcgcttgtgcgagctcctgacggatccccgccgaaattacacgggcaccgataagttcttacgtggcgtcgaaaagaatgtcatggttgtaagttgtgtgtatccctcaagcgaaaaaaacaatagcaacagcctgaaccggatgaatggggtcatgttccccggtaatagcccttcatatactgaaaggagtaatatcaacggacccggcactccgcggcctctaaatcgcccaaaggtgtccttgtccgctccaatgactactaacgggttacctgagtccactgactccaaagaggccaacctgcaacaaaacgaagaaaaaaatcattctgactcatctacaagtgagtccgaggtgtcatccgtcagtccgcttaagaataagcatcccgatgaagatgccgtggaggcggagggccacgaagtgaaaaggcttaggtttgataaggagggtgaggtgagggagactgcctcccagacaacttcatccgagatctctagcgtgatggtcggcgaaaccgaagcctcatcatcttcccaggacaaggacaaagatagtagatgcaccagacagcactgtacagaggaggatgaagaggaagatgaggaagaagaggaggagagcttcatgaccagtcgggagatgatccctgagcgaaaaaaccaagagaaagagtccgatgacgctctgacagtgaatgaggagacgagcgaggaaaacaaccagatggaagaaagtgatgtatcgcaagctgagaaggatctgcttcactccgaaggcagtgagaatgaaggtcccgttagttcctcatcttccgattgtagagagaccgaggagttggtgggtagtaactcttcaaaaactggggaaatattaagcgagtccagtatggaaaatgatgacgaggccactgaagtcacagacgaacctatggaacaagattag

SEQ ID NO: 201592 - DNA, 1083 bp, synthetic construct
  misc_feature 1..1083: note = Description of Artificial Sequence: Synthetic coding sequence
  source 1..1083: mol_type = other DNA
atggacgtggagcggctgcaggaggccctgaaggacttcgagaagagggggaagaaggaagtgtgtcctgtgttggatcagtttttgtgtcatgttgcgaaaacaggcgagaccattataccattcactatacagagactctgcgaattactcaccgatccaaggcgcaactacactggtaccgataaattcctcaggggcgttgaaaaaaatgtgatggttgtgagctgcgtatacccatcctccgagaagaacaattccaatagtttaaaccggatgaacggggtaatgtttccaggaaactcacccagttacacagagcgctccaatatcaacggtcccggtacgccaaggcctttaaatcgcccaaaagtgagcctaagtgcccccatgacgacaaatgggttgcctgaatcaacagactccaaagaggcaaatctgcagcagaacgaggagaaaaaccattccgattctagcacgtctgaatctgaggtgagctccgttagcccccttaagaacaaacaccccgacgaagacgccgtcgaggccgaaggtcacgaagttaaacgactgagattcgacaaagaaggggaggtgagagaaacagcatcccagaccacgtcatctgagatatcaagtgtcatggtgggggagaccgaggcaagctcctctagccaggataaagacaaggactctaggtgtacacggcaacactgcactgaagaggacgaggaggaggacgaagaagaggaggaggaaagcttcatgacctcgagggagatgataccagagagaaaaaaccaagagaaggagtccgacgacgcgttgaccgtgaacgaggagacaagtgaggagaataaccaaatggaggagtccgatgtgtctcaagctgaaaaggaccttctgcattcagaaggaagcgaaaatgaaggcccagtaagcagctcatccagcgattgccgagagaccgaagagctcgtcggcagcaactctagtaaaacaggagagatcctctctgaatcgagtatggagaatgatgatgaagcaacggaagtgaccgatgaaccaatggagcaggattag

SEQ ID NO: 201593 - DNA, 1116 bp, synthetic construct
  misc_feature 1..1116: note = Description of Artificial Sequence: Synthetic coding sequence
  source 1..1116: mol_type = other DNA
atggccctgggcaagttccgggccgccctgcgggactacgagaccgtggtaaaagttaagccacacgataaggatgctaagatgaagtatcaagagtgtaataagatcgtcaagcaaaaggctttcgaaagggccatcgctggagacgagcataaacgatcagtggtagacagcctggatatcgagtccatgacaattgaagacgagtattccggccccaagttagaagatggcaaagtcaccatttcatttatgaaggagctgatgcaatggtacaaggaccagaagaagttgcataggaagtgtgcctatcagactgaaaaaattactgtttgtggagatacacatgggcaattttacgacctgctcaatattttcgagctcaatgggcttccatccgagactaatccatatatatttaacggggatttcgttgatcgcggctccttctctgtggaagtgatcctcacattgtttggcttcaaactgctgtatcctgaccatttccacctcctgcgcggaaaccacgagaccgataacatgaaccagatttatggcttcgaaggggaagtaaaagccaagtataccgctcaaatgtatgagctattcagcgaagtgttcgagtggctcccgctggcacagtgcattaatggcaaagtgttgatcatgcatggaggactcttttcagaggacggagtgactctggacgacatacgcaaaatcgagcggaacaggcagccccccgatagtgggccaatgtgcgacttgctatggtccgacccccagccacagaacggaaggagcatttctaagagaggtgttagttgccagtttggccccgacgttaccaaagcctttctagaagagaacaatctggactacatcattagatcacacgaagtcaaggcagaaggatacgaagttgcccatggcgggaggtgtgtaacagtgtttagtgcccccaactactgcgaccagatgggcaacaaggcttcttacatacacctccaggggtcggatctgagaccacagtttcaccaatttaccgccgtcccgcacccgaatgtcaaacctatggcttacgcgaatactttattgcaactgggcatgatgtag

SEQ ID NO: 201594 - DNA, 1500 bp, synthetic construct
  misc_feature 1..1500: note = Description of Artificial Sequence: Synthetic coding sequence
  source 1..1500: mol_type = other DNA
atggccatggccgagggcgagcggaccgagtgcgccgagcccccccgggacgagccccccgccgacggggctctgaaacgtgccgaagagctgaaaacccaggcaaacgactacttcaaagctaaggattacgaaaacgccatcaaattttattcccaggcaatagagctcaatccatctaacgccatctattacggcaacaggtcattagcttacctgcgcacggagtgttatggttatgcactcggagacgccacccgggccattgagctagacaaaaaatacattaagggctactaccggcgagccgcatcaaatatggcactcgggaaattccgggcagctctcagggattatgaaacggtcgtgaaggttaaaccgcatgataaggacgcaaagatgaaatatcaggagtgtaacaaaatcgtgaagcagaaggcattcgaacgagccattgcaggggacgagcataaaaggtccgtggtggactcactcgatattgagtcaatgaccattgaggacgagtatagcgggcctaagctagaggacggcaaggtaacaatctccttcatgaaagagctgatgcaatggtacaaagaccagaagaagctgcaccgtaaatgtgcatatcagattctagtccaggtcaaagaggtgctcagtaagctgtctaccctggtggagacaactttgaaggagacagaaaagatcacagtgtgcggggatacgcacggacagttctacgacctgctgaacattttcgagctgaatggtctgccaagtgagactaatccgtacattttcaacggggattttgtggataggggcagcttcagcgttgaagtaattctcacactttttggattcaagctcttgtatccggaccacttccatctactgcgcggtaatcatgagaccgacaacatgaaccagatttacgggtttgaaggtgaagtcaaggccaaatatacagcccagatgtatgagcttttttcggaagtctttgagtggctgcccctggcccagtgtataaatggcaaagtactgattatgcacggcggcttatttagtgaagacggggtaacactagacgacatccgcaaaatcgagaggaatcgccagcctcctgacagcggacccatgtgtgatctgctgtggtcagatcctcagccacaaaatggcagaagcatcagcaaaagaggggtgagttgtcagttcggtcccgacgtaacaaaggcattcctcgaggagaataatctggattatatcatcaggtctcatgaggtgaaggccgagggctatgaggtagcacatgggggcagatgtgtcactgtcttttcagcccccaactactgtgatcagatgggtaataaggcttcctacattcatctacagggaagtgatttaagaccacagtttcaccagtttacggcggtgcctcacccaaacgtaaaaccaatggcctatgcaaataccctgcttcagctgggcatgatgtag

SEQ ID NO: 201595 - DNA, 1461 bp, synthetic construct
  misc_feature 1..1461: note = Description of Artificial Sequence: Synthetic coding sequence
  source 1..1461: mol_type = other DNA
atggccatggccgagggcgagcggaccgagtgcgccgagccccccagagacgaaccgcctgctgatggggccctgaaaagagccgaagagctgaaaacacaggcaaacgattacttcaaggctaaggactatgaaaacgcgatcaaattctatagccaggctattgaactgaatccgagcaacgctatatactatgggtacgcactgggagatgcaacacgggcaatcgagctagataagaagtatatcaaggggtattaccgacgggcagcatcaaacatggccctggggaagtttcgcgccgccctcagagattacgagacagtggttaaggttaaaccccacgataaggatgccaaaatgaaataccaagagtgcaataagattgtgaagcagaaggcattcgaaagggccattgccggcgatgagcataagcgaagcgtcgttgacagcctggatatcgagtccatgacgatcgaggacgagtactcagggcccaagctggaagatggaaaagtaaccattagcttcatgaaggaactgatgcagtggtataaggaccaaaaaaaactccaccggaaatgcgcctatcagattctggtgcaagttaaagaggtgctgtccaaattatcaactctggtcgaaacaacattgaaagaaacagaaaaaattactgtgtgcggcgacacccatggccagttctatgatctgttgaatatctttgagctgaatggcctgccctcggaaactaacccatatattttcaacggcgacttcgtcgacaggggatcattctctgtcgaagtgatcctcactctgttcgggttcaaactgctgtaccccgaccactttcatctgctcagagggaatcatgagaccgataacatgaaccagatctacggatttgagggagaagtcaaggccaaatacactgctcagatgtatgaacttttctccgaggtgtttgagtggcttccactggcccagtgtatcaatggtaaagtattgatcatgcatggaggcctgtttagcgaagacggcgtaacactggatgatattaggaagattgaaagaaatcgccagccacctgatagcggcccgatgtgcgacctattatggagcgatcctcagccacagaacggacgatctatctcaaagcggggggtctcctgccaatttggtcccgatgtcacgaaagcttttctggaagagaataatttggactatatcatacggagtcatgaagtcaaggctgaggggtacgaggtggcacacggtgggcggtgtgtaaccgtatttagtgcgcccaactattgtgatcagatgggaaacaaagcaagttacatccatctgcagggctcagacctgcgccctcagtttcatcagtttacagcagtcccacacccaaatgtcaagcccatggcctacgccaacactctcctacagctcgggatgatgtag

SEQ ID NO: 201596 - DNA, 1458 bp, synthetic construct
  misc_feature 1..1458: note = Description of Artificial Sequence: Synthetic coding sequence
  source 1..1458: mol_type = other DNA
tgaatggccgagggcgagcggaccgagtgcgccgagcccccccgggatgaaccacctgctgacggggcattgaagagggccgaggaactcaaaacacaagcgaatgactactttaaagccaaagactatgagaatgctataaagttttacagccaggccattgaactaaatcctagtaacgctatctactacggaaacagatccctggcctacctccgcacagaatgttatggctatgccctgggggacgcgacaagggccatcgaactggacaagaagtacatcaaaggttactacaggagagcagccagcaatatggctctgggcaagtttcgcgcagcactgcgtgattatgaaacggtcgtgaaagtaaaacctcatgacaaggatgcaaagatgaagtatcaggagtgcaacaagatcgtgaagcagaaggcttttgaaagagcaatcgcaggcgatgaacacaaacgctctgtggtggactcactggatatagagtctatgaccattgaggatgaatactccgggcccaagctggaggatggcaaagtgaccatcagcttcatgaaagaactgatgcagtggtacaaagaccagaagaaactgcatcgcaagtgtgcataccaaattctggttcaggtgaaggaagtgttgtctaagctaagtactctcgtggagactaccctcaaagaaacagaaaagattaccgtgtgtggtgatacgcacgggcagttctatgacctgcttaacatctttgagttgaacgggctgccttccgagactaacccatacatttttaacggagattttgtcgatcgcggtagcttctccgtggaggtgattttaacactgttcggattcaagctgctctatcctgatcactttcatttgttgcggggaaatcatgaaaccgacaatatgaatcaaatctatggatttgaaggtgaagtgaaagccaagtatacagcacagatgtacgaactctttagcgaagtgttcgagtggctgcccctggctcagtgtattaatggcaaggtcctcatcatgcacggcggcctcttttcagaggacggagtgacactggatgatatccgtaagatcgagcggaatagacaaccaccagactctggcccgatgtgcgaccttctgtggtccgaccctcagccacagaacggaagatccattagcaaacggggggtaagctgtcaatttggcccagatgtcacaaaggcatttctggaggaaaataaccttgactacataatccgcagccatgaggtgaaggcggagggctacgaggtcgctcatggggggcgatgcgttactgtgtttagcgctccaaattactgtgatcagatggggaataaggcgagctatatccacctccaggggagcgacctccggccacagtttcaccagtttacagcagttggacgcccttcaagcggatcttag

SEQ ID NO: 201597 - DNA, 477 bp, synthetic construct
  misc_feature 1..477: note = Description of Artificial Sequence: Synthetic coding sequence
  source 1..477: mol_type = other DNA
atgctgaccgtggccgccctgatcgacgagcagatcctgtgcgtgcacgggggtctcagccctgatattaagactctggatcagataagaaccatcgagagaaaccaggagataccgcataaaggtgccttctgtgacctggtctggtccgaccctgaggatgtggatacttgggccattagccctagaggggccgggtggctgttcggtgccaaggtgacgaacgaatttgtgcacatcaataaccttaaactgatttgccgggctcaccagctggttcatgagggatataagttcatgtttgatgagaaactggtgaccgtgtggagtgcaccaaactattgctacaggtgcggaaatatagcctctatcatggtcttcaaagatgtaaacacgcgcgaaccaaagctcttccgcgcagtgcctgattctgagcgagtaattcccccaagaactaccacaccctactttctgtag

SEQ ID NO: 201598 - DNA, 918 bp, synthetic construct
  misc_feature 1..918: note = Description of Artificial Sequence: Synthetic coding sequence
  source 1..918: mol_type = other DNA
atggcccccctggacctggacaagtacgtggagatcgcccggctgtgcaagtacctcccagagaatgatctgaaacgactgtgcgactacgtttgcgatctcctgctggaagagtccaatgtacagcctgtgtccacacctgtgactgtgtgcggagacattcatggccaattttatgatctttgcgaactcttccgtacaggaggtcaagtgcctgacacgaattacatttttatgggcgacttcgttgatcgcgggtattatagcttggagacctttacctacctgctggccctaaaagcaaaatggcccgatcgaattaccctactgcggggcaatcacgagtctcggcagattacccaggtgtatggcttctatgatgaatgccagactaaatatggcaacgcgaacgcctggaggtattgcacgaaggtgtttgacatgcttaccgtcgccgctcttatcgacgagcaaatcctgtgtgtccacggcgggttgtcgcccgatatcaaaaccctggaccagatcagaactatagaacggaaccaggagataccccataagggggccttctgcgatttggtgtggtctgatcctgaagatgtcgatacctgggctatctcaccaaggggagcaggatggctgtttggagctaaggtcactaatgaattcgtgcatatcaataatcttaagcttatctgccgagcacatcagcttgtccatgagggatataagttcatgtttgacgagaagctagtaacagtctggtcagcccccaattactgttatagatgcggaaacattgcatccattatggttttcaaggatgtgaacactcgcgagccaaagctttttcgtgccgtgccagattccgaaagagttatccctccccgcacaacaaccccctatttcctatag

SEQ ID NO: 201599 - DNA, 852 bp, synthetic construct
  misc_feature 1..852: note = Description of Artificial Sequence: Synthetic coding sequence
  source 1..852: mol_type = other DNA
atggcccccctggacctggacaagtacgtggagatcgcccggctgtgtaagtatctgcccgaaaacgatctgaaacgcttatgcgactacgtgtgcgatctgctactggaggagagcaatgtacagcctgttagcaccccagtaaccgtgtgcggcgacatccacgggcaaggggacttcgtcgatcgcgggtattactcccttgaaaccttcacctacctattggctctgaaagccaaatggcccgaccggataactctgttacgggggaatcatgagagcagacagattactcaagtttatggcttttatgacgagtgccaaaccaaatatgggaatgctaatgcctggaggtactgtacaaaagttttcgatatgttaaccgttgctgctttgattgacgaacagattctttgcgtacatggcggactatcccctgatattaaaacactggaccaaattcggacaattgaacggaatcaggaaattccacataagggagccttttgtgatttggtgtggtccgaccccgaagatgtggatacctgggcaattagtccccgtggggccgggtggctgtttggcgctaaggtgacaaacgaattcgttcatatcaacaacttgaagctgatttgccgcgctcatcagttagtgcatgaaggatataaattcatgtttgacgagaagctcgtaacagtttggtccgcaccaaattactgctataggtgtgggaatattgcttctattatggtctttaaggatgtaaacacgcgggagccgaaactattcagagcggtcccagactcagagcgcgtcattcctccaagaactacaacaccatattttttgtag

SEQ ID NO: 201600 - DNA, 1029 bp, synthetic construct
  misc_feature 1..1029: note = Description of Artificial Sequence: Synthetic coding sequence
  source 1..1029: mol_type = other DNA
atggcccccctggacctggacaagtacgtggagatcgcccggctgtgcaagtatttgcccgaaaatgatctcaaggtctcacccatatgcggattagcaccaagtggttgtggagcccctgcaggtcggcctttcctatcacctggaccaccgccagtgttccatttccttaggttcctgaaggagcgcctgtgcgattatgtctgcgacttactgctggaagaaagtaatgtgcaaccggttagtacacccgtaacagtgtgcggagacattcatggacagttttacgacctgtgcgaacttttcaggacgggcggccaagtcccagataccaattacatttttatgggcgatttcgtggaccggggctactattccctggaaacatttacctatctactggccctgaaagcaaaatggcctgatcggattaccctccttcggggaaaccatgaaagccgacagattacccaggtttacggattttacgatgagtgccagactaagtacggcaacgccaatgcatggcgttactgtacgaaagtgttcgacatgctcacggtggctgccctgatcgatgaacagatactgtgcgtgcacggcggactgagcccagacattaagacactggaccagatccgcacgattgagaggaaccaggaaatccctcacaaaggcgccttttgcgacttggtgtggtctgacccagaggatgtggacacgtgggcgatttcccccaggggcgccggctggctgttcggggctaaggttaccaacgaatttgttcacatcaacaatctgaagctgatttgccgagcacatcagcttgtgcatgagggctacaaattcatgttcgatgaaaaactggtgacagtgtggagtgcgccaaattattgctaccggtgcggcaatatcgctagcattatggtcttcaaggacgtcaatacccgcgaacccaagctgttccgggccgtgccggactccgagagggtcattcctccaagaactaccacgccttatttcctctag

SEQ ID NO: 201601 - DNA, 378 bp, synthetic construct
  misc_feature 1..378: note = Description of Artificial Sequence: Synthetic coding sequence
  source 1..378: mol_type = other DNA
atgttcctgctgccccggctgcagctgctgggccagatgcggctgtgcgattacgtgtgcgatctgctactcgaagagtccaacgtccagccagtgtccacacctgtcactgtttgtggggatattcatggccagttttacgacctgtgtgaacttttccgtaccggtgggcaggtcccggatacgaactatattttcatgggcgattttgtcgacagggggtactactccctggaaacttttacttacttactggcactgaaagccaaatggccagatcgtatcactctgctcagaggcaatcatgagagcaggcagatcactcaggtctatggattttatgatgagtgccagactaagtacgggaatgctaattag

SEQ ID NO: 201602 - DNA, 1161 bp, synthetic construct
  misc_feature 1..1161: note = Description of Artificial Sequence: Synthetic coding sequence
  source 1..1161: mol_type = other DNA
atgagcgccctggagaagagcatgcacctgggccggctgcccagcaggccacctctgccagggagtggcggatctcagagcggcgcgaaaatgcgaatgggccctggacgcaagagagatttcagcccggtgccatggagccagtactttgaatccatggaggacgtagaagtggagaatgaaactggaaaggatacttttagggtttacaagtctggatcggaaggccccgtgctgttactccttcacggcggtggacacagcgcactgtcatgggccgtgtttaccgccgctatcatctcccgggtccaatgtcgaatcgtggccctggatctccgaagccacggcgaaacaaaagttaagaacccagaggacctgtcagccgagacaatggccaaagacgtagggaatgtggtagaggctatgtatggagatttgcccccgcccataatgctaatcgggcatagcatggggggcgccatagcagttcacacagccagcagcaacctggtaccctcccttctcggcctttgcatgattgacgtcgtagaagggacagccatggatgcactgaattccatgcagaacttcctgcggggccggcccaaaacctttaaaagtcttgagaatgcaatcgaatggagtgtgaagtccggtcagatccgcaacctggagtctgctcgcgtgtcaatggtgggccaggtgaagcaatgtgaaggtataaccagcccagaggggagtaagtccatcgttgaaggaatcattgaagaggaagaggaagatgaggaggggagtgagtctatcagtaagcgcaagaaggaggatgacatggagactaagaaagaccatccctatacctggcgcattgaattagccaaaactgagaaatattgggacggttggtttcgtggattaagtaacctgttcttgagctgccctataccgaagttgctccttctggctggcgtggacaggctggataaggatctgaccatcgggcagatgcaaggcaagttccagatgcaggtactgccccagtgcggccatgcagtgcacgaagatgctccggacaaggtggcggaggccgtggctacttttctcatccgacatagatttgccgagcccatcggcggcttccagtgcgtttttccaggatgttag

SEQ ID NO: 201603 - DNA, 600 bp, synthetic construct
  misc_feature 1..600: note = Description of Artificial Sequence: Synthetic coding sequence
  source 1..600: mol_type = other DNA
atggacgccctgaacagcatgcagaacttcctgcggggccggcccaaaacatttaagagcctggaaaacgcaatagagtggagtgtgaaaagcggacagattcgaaatctcgaaagtgcccgagtgtcgatggttggccaagtgaaacaatgtgagggcatcacatctccagaggggtctaaatccatcgtggaaggcattatcgaagaagaggaggaagacgaagaggggtcggagtccataagcaagagaaaaaaggaagacgacatggagactaagaaagaccatccttacacgtggcggatcgagctggcgaaaacagagaaatactgggacggatggttccggggtcttagcaatctgttcttgagttgcccaattccaaaacttttgctgctggcgggagtggataggctggacaaggatctgaccataggacagatgcagggcaaatttcaaatgcaagtgctgccacagtgcgggcatgccgttcatgaggatgcccccgacaaggtagccgaagctgtggctacctttcttataaggcaccgctttgccgagccaattggcggcttccagtgcgtctttcctggatgctag

SEQ ID NO: 201604 - DNA, 1203 bp, synthetic construct
  misc_feature 1..1203: note = Description of Artificial Sequence: Synthetic coding sequence
  source 1..1203: mol_type = other DNA
atgagcgccctggagaagagcatgcacctgggccggctgcccagccgccctcccctccctggctcaggcggatctcaatctggggctaaaatgaggatggggcccggccgcaaacgcgacttctcccctgtcccctggtcacagtatttcgagtccatggaggacgtggaagtggagaacgaaactggcaaagatactttccgggtgtacaaaagtggttctgagggaccggtcctacttctccttcacgggggtgggcacagcgccctgtcttgggctgttttcactgccgctatcatctctcgcgttcagtgtcgcattgtggcattagacctgagatctcatggcgagactaaagtaaaaaatccagaagatttgtcagctgagacaatggcaaaggacgtgggcaacgtggtggaggcgatgtacggcgatcttccccctccaataatgctgataggacactcaatggggggtgccattgcagtgcacaccgcctcctctaacttggttcctagccttttaggtctatgcatgattgacgtggtagaaggcacggcaatggatgcacttaatagcatgcaaaatttcttgcgtggcagacccaagacattcaagagcctggaaaatgcaattgagtggtccgtaaaaagcggccagatccggaacctggaatcggcacgagtatctatggtcgggcaagtgaaacagtgcgagggcattacaagccctgaagggagcaaatctattgtagaaggtattatcgaggaggaggaagaggatgaggaaggttctgaaagcatctctaagaggaagaaagaggacgacatggaaggccttcccagtgagacacagaatcttttgctttttctgcagaccaagaaggatcacccctacacatggagaatagagttggcgaaaactgagaagtattgggacggatggttccggggcctgagtaatttatttctaagctgccctataccgaaactgttgctgctggcaggcgtggaccgcctggacaaagatctgaccattggccagatgcaaggtaaattccaaatgcaggttctgcctcagtgtggccacgccgtgcacgaagacgccccagacaaggtggccgaagcggtggctacttttctcatacggcaccgatttgccgagccaataggtggctttcagtgcgtgtttcccgggtgttag

SEQ ID NO: 201605 - DNA, 1776 bp, synthetic construct
  misc_feature 1..1776: note = Description of Artificial Sequence: Synthetic coding sequence
  source 1..1776: mol_type = other DNA
atgggctgcagcagcagcagcaccaagacccggcggagcgacaccagcctgcgcgccgcgcttataattcagaattggtaccgaggctataaggccagactaaaggcgcgccagcactacgccttgacaatatttcagagcatcgaatacgccgacgaacagggtcaaatgcagctgtctacattcttttccttcatgcttgagaactatacccacatacacaaagaagaactggagctaaggaaccagtccctggaatctgaacaagacatgagggaccgctgggactacgttgacagcattgatgtacctgattcttacaatggccctcggctccagttccctctgacttgtacagatatagacctgctcttggaagctttcaaagaacagcaaatcctacacgcccactacgtcctcgaggtgctgtttgagacgaaaaaagtgcttaaacagatgcctaatttcactcatatccaaacatccccttcaaaggaggtgaccatttgcggagacttacacggaaaactcgatgatctctttctcattttctacaagaatggtctgcccagcgagagaaacccttatgtgtttaacggcgatttcgtggatcgaggtaagaattctatcgagatcctaatgatactttgcgtgagctttttggtttacccaaacgacttgcacctaaacagaggaaaccatgaggactttatgatgaacctacgatacggcttcacgaaggaaattctgcacaagtataaactgcatgggaagcgcattctgcagatcctggaggagttctacgcatggcttcctatcggcacaatcgtggacaatgaaatactggtgatccacggcgggatttcagagacaactgacctaaatctgctgcacagagtcgaacgcaataagatgaagagtgtattgatccctcctaccgagacgaaccgtgaccacgacacagatagtaaacacaacaaggttggggtcacatttaatgcacacgggcgaattaaaacgaacggcagtccgacagagcacttgactgagcacgaatgggagcaggttgttactatcttctctgcctctaactattatgaggaggggtccaaccggggagcctacattaaactttgcagcggtacaacgcctcgcttttttcagtatcaggtgaccaaagctacctgctttcagcctctgcgtcagcgcgtggatacaatggagaattccgctatcaaaatcttaagagaacgagtcatcagccgaaaaagtgatctcactagggccttccaactccaagatcaccgaaagtccggtaaactatccgtgtcgcagtgggctttctgtatggagaacattctcggtctgaacttgccatggcgctctctatcctccaacctcgttaatatcgaccagaacggcaatgtggagtatatgtcctcgttccaaaacattcgaatcgagaaacccgtgcaggaagcccactcaacactagtggaaactctgtacaggtaccgttccgatttagagataattttcaacgccatcgacactgatcattcaggcctgataagtgtcgaagaattcagggcaatgtggaaactgtttagttcgcactacaacgtccacatagacgactcccaggtcaacaaactcgcaaatatcatggatctgaacaaggacggaagtatcgattttaacgagtttcttaaagccttttatgtggtacacagatacgaagacctgatgaagcccgacgtgacaaacctgggttag

SEQ ID NO: 201606 - DNA, 1803 bp, synthetic construct
  misc_feature 1..1803: note = Description of Artificial Sequence: Synthetic coding sequence
  source 1..1803: mol_type = other DNA
atgggctgcagcagcagcagcaccaagacccggcggagcgacacctcacttcgcgccgccttgattatccagaactggtacagaggatacaaggcacggctgaaggcacgccaacactatgccctcacaattttccagtccatagaatacgcagatgaacagggacagatgcaactgtctacatttttctcctttatgctcgaaaactatacccacattcataaggaggagctcgaaattcttcacgcacattacgttctggaagttttattcgagaccaagaaagttctgaagcaaatgcctaacttcactcatatccaaacctccccatctaaagaagtcacaatttgcggcgacttgcatggcaagctggatgatctcttccttattttttacaaaaacgggcttccctccgaaaggaacccatatgtctttaatggcgacttcgtggacagaggcaaaaacagcatcgagattttgatgatcctatgcgtttcttttctggtctatccaaacgatctgcacctcaaccgtggcaaccacgaggacttcatgatgaacctacgatatggtttcaccaaggagatcctgcataagtataagttacacggaaagagaattcttcagatccttgaagagttctatgcctggctaccaataggtacaatagtcgacaatgaaattttagtaattcacggtgggattagcgagactactgatctgaacctactgcacagggtcgagcgcaacaagatgaagagcgtcctgatccctcctacagagaccaaccgcgatcacgataccgactctaaacacaacaaggtgggcgtgacgttcaacgcgcacggcagaataaagacaaatgggagtcccactgaacacctgacggagcacgaatgggagcagataatcgacattctgtggagtgacccccgaggtaagaacggctgcttcccgaacacgtgtcgcggcgggggatgctactttggtccagacgtaacctccaagattctgaacaagtaccagcttaaaatgcttatacgttcacatgaatgtaagcctgaagggtacgagatctgccacgacgggaaggtggtgaccattttctctgcatcaaactattatgaggaagggtccaaccggggcgcgtatattaaactgtgctcaggtactacacctcgattcttccagtatcaggtgaccaaggccacctgcttccagcccctccgacagcgagttgacactatggagaatagcgccattaaaatccttcgcgagcgcgttattagcaggaagtcagacctgactagggcttttcaactacaggatcataggaagagcggcaagctatcagtgagccagtgggctttctgtatggagaatatcttagggctaaatctcccttggagatctctttcatctaatctcgtcaacatcgaccaaaacggtaatgtcgagtacatgtcatcttttcagaacattcgcattgaaaagcccgttcaggaagcgcatagcactctagtggaaactttatatcggtacagatcagatttggagattattttcaacgctattgacactgatcactctggtctgatcagcgtggaggagttccgggcgatgtggaagctgttctccagccactataatgtgcacatagatgacagccaagtgaataagcttgctaatataatggacctgaacaaagatggttccatcgattttaacgagtttttgaaagccttttacgtggtgcaccggtacgaggatctgatgaagcctgacgtgacgaatctcgggtag

SEQ ID NO: 201607 - DNA, 1962 bp, synthetic construct
  misc_feature 1..1962: note = Description of Artificial Sequence: Synthetic coding sequence
  source 1..1962: mol_type = other DNA
atgggctgcagcagcagcagcaccaagacccggcggagcgacaccagcctaagggctgcccttattatccaaaattggtaccggggctataaggcaaggttgaaagccagacaacactacgcattgacaatctttcagagcatagagtatgccgacgagcagggccagatgcagctttcaacctttttctctttcatgctcgaaaactatacccacattcacaaggaagaactagagttgagaaatcaaagcctggagtcagaacaggacatgcgagaccggtgggactatgtagactcaatcgatgtccccgacagttataacggacctcgcttgcagtttcccttgacctgcaccgacatagacctgctgttagaggccttcaaagagcagcaaatcctccacgctcattacgtgttggaggtacttttcgaaacaaagaaagttttgaagcagatgcctaacttcactcatattcagacatctccatcaaaggaggttactatctgtggggacctgcacggaaagcttgatgatcttttcctgatattttataaaaacggcctgccctcagaaagaaatccatacgtctttaacggtgacttcgttgaccgcggcaaaaatagcattgagatcctgatgattctctgcgtgtcatttctggtgtaccccaatgacctacacctaaaccggggaaaccatgaagacttcatgatgaatttgagatatggctttactaaggaaatcctccacaagtataaactgcatggtaaacgcattctgcaaattcttgaggagttctacgcgtggttgcctatcgggaccatagtggacaacgaaatacttgtcatccacggaggcatcagcgagaccaccgacctgaatctgctgcatcgcgtcgagaggaataagatgaaatctgtgttgatccccccaacagaaacaaaccgcgatcacgataccgactccaaacacaataaggtcggagtgacatttaacgcccacggtcgcataaagacgaatgggagccccaccgagcacctgacggaacatgaatgggagcagattatcgacatactctggagtgaccctcgaggcaagaacggatgcttccctaacacctgtaggggcggaggctgttactttggtccggatgtcacctcaaagatcttaaataagtaccagttgaagatgctcattcgcagtcacgagtgcaagcctgagggttatgaaatttgccacgacggcaaagtggtaactatctttagcgcatccaattattatgaagaggggtccaatagaggagcatacatcaagttatgctccggaaccaccccccggtttttccagtatcaggtgaccaaggccacttgctttcaaccattacgccagcgggtcgacactatggaaaactccgccattaagatactgcgggagagagtcatttctcgcaagtccgatctcactcgggccttccagctgcaggaccacaggaaatctggtaaacttagtgtgagccagtgggccttttgcatggagaacattctgggcctgaatctaccttggcgttctctgtcgtcaaatctggtgaatatcgatcagaacggcaacgttgaatatatgtcctccttccaaaatatccggattgaaaaaccagtgcaagaggctcatagcacgctggtcgagactttatacagatatagaagcgatttagagattatctttaatgcgatagataccgaccactccggattgatttcggtcgaagaattccgagctatgtggaaactgttctcatctcactataacgtacatattgatgatagtcaggtcaacaagctggcaaacattatggatttaaacaaagatggctccattgacttcaacgaattcctgaaagccttctatgtggtacataggtacgaggatctgatgaagccagatgtaaccaacttgggatag

SEQ ID NO: 201608 - DNA, 1131 bp, synthetic construct
  misc_feature 1..1131: note = Description of Artificial Sequence: Synthetic coding sequence
  source 1..1131: mol_type = other DNA
atgggctgcagcagcagcagcaccaagacccggcggagcgacaccagccttcgggcagctctcatcattcaaaattggtatagagggtacaaggcgagactgaaagcacgacagcactacgctcttacaattttccagtcaattgaatacgccgatgaacagggccagatgcagctatccacttttttctctttcatgctggagaattatacgcacatacacaaggaggaattggagctgcggaaccaatcacttgagtccgaacaggatatgcgagatcgctgggattacgtcgactccatcgatgtccccgattcatataacgggcccagactacagttccccttgacatgtacagatattgatttgctcctggaggcattcaaagagcagcaaatcttgcatgcgcattatgtcttggaggtcctcttcgaaacaaagaaggtcttaaagcagatgcccaatttcactcacatacagacctccccatccaaggaagtgaccatctgtggagatcttcacgggaaattagacgatctgttccttatattctataaaaatggcttgccatccgagaggaatccttacgtatttaatggcgacttcgtggacagaggaaagaactccatagaaattttaatgatactgtgtgtatccttcttggtgtacccaaacgacctgcatctcaaccggggaaaccatgaagattttatgatgaatctgaggtatgggttcactaaagagattcttcacaaatacaaactccacgggaaacgcatcctgcagatccttgaggaattctacgcctggctgcctattggaacaatagtggacaatgaaattctggtgattcatggaggtatctcagagacaacagacctgaatctgctgcacagagtcgaacggaataaaatgaagtcagtgctgatccctcctactgagacaaatcgtgaccacgacactgacagtaaacataataaagtgggagtgactttcaacgcccatggaagaatcaagaccaacggatcccccacagagcacctgaccgaacatgaatgggaacagtccggctactacgggaagcaacgacaccaggatatcaagagggaatccgactttaccaagaagtag

SEQ ID NO: 201609 - DNA, 1767 bp, synthetic construct
  misc_feature 1..1767: note = Description of Artificial Sequence: Synthetic coding sequence
  source 1..1767: mol_type = other DNA
atgctggagaactacacccacatccacaaggaggagctggagctgcgaaaccagtctctcgagagtgaacaggacatgagggacagatgggattatgtcgactctatagacgtccccgacagctataatgggccacgcctgcagtttcccctgacatgtacggatatcgaccttctgctggaggccttcaaagaacagcagatacttcatgcccactatgtgctcgaagtgctgttcgagacaaaaaaagttcttaagcaaatgcccaattttacccatattcagacttctccaagcaaggaggtgactatctgcggcgatctccatggcaaactcgatgatctgttcttgatcttttacaagaatggattacctagcgagcggaacccatatgtgtttaacggcgactttgtcgaccgtggcaagaactccatcgagatcttgatgattttgtgtgtaagcttccttgtctaccccaacgatttgcatcttaatcgcggtaatcacgaggactttatgatgaaccttaggtacggatttactaaggaaattctgcataaatataagttacatggcaagaggattttgcagattttggaggaattctatgcctggttgccaatcgggaccattgtcgacaatgagattctggttattcatggcggcatatcagaaaccactgaccttaacctgctccacagagtcgagagaaacaaaatgaaatccgttctgatacccccaaccgagaccaaccgggatcacgacaccgacagcaaacataataaggtaggtgttacattcaacgcccacgggagaattaaaactaacggatctcccactgagcatcttaccgaacatgagtgggagcaaattatcgatatcctgtggtctgatcctaggggtaagaacggatgttttcccaacacatgtaggggcggaggctgctactttgggccagatgttacttcaaagatactgaacaaataccaactaaagatgctgatcaggtctcatgagtgtaaacctgaaggttacgagatttgccacgatggcaaagtcgtcacaatattttctgcttcaaactattatgaggagggtagcaacaggggcgcctacataaaactgtgtagtggaacaacacccagattcttccagtatcaggtaaccaaagccacctgttttcaaccactacgacagcgggttgatacgatggagaatagcgcgataaagatcctgagggagcgggttatcagtcgcaaatctgaccttacacgagcattccagctgcaagatcaccgcaagtcaggtaaactgagcgtctcccagtgggccttttgcatggagaacatcttagggctgaacttgccatggaggtctctgagctccaacttggtgaatattgatcagaacggcaacgtcgagtacatgtccagtttccagaatatcagaattgaaaaacccgtacaggaagcccattctactctggttgagaccctgtacaggtataggtccgatctggagatcatctttaatgctatcgatactgaccacagcgggctgatctctgtcgaggagtttcgagctatgtggaagctgttttccagtcactataatgtgcacattgatgattcacaagtaaacaagctggcaaacattatggacctcaataaagacgggagcatcgattttaacgagttcctcaaggccttttacgttgtgcatcggtatgaagacctgatgaagcctgacgtaaccaacttgggatag

SEQ ID NO: 201610 - DNA, 2262 bp, synthetic construct
  misc_feature 1..2262: note = Description of Artificial Sequence: Synthetic coding sequence
  source 1..2262: mol_type = other DNA
atgggcagcggcaccagcacccagcaccacttcgccttccagaacgctgagagagcgtttaaagctgccgccctgatccaacggtggtataggaggtatgttgcccggctagagatgcgtagacgttgtacttggtccattttccaatcgattgagtatgccggtcagcaagaccaagttaaactgcatgattttttctcttatctcatggatcacttcattccgtcatcccataacgacagagattttttgacccgcatttttaccgaagacagatttgctcaggattcggaaatgaaaaaatgctctgattacgagtccatcgaagtgccggatagctataccggacctagactctccttccccctgctacctgaccatgccactgcccttgtggaggccttcagactgaaacagcagctgcacgcacgatatgtgctaaatcttttgtatgagaccaagaaacacctggtgcaattgccaaatataaatagagtgagtacctgctacagcgaggagatcactgtttgcggggatttacatggacagctcgatgatctgatttttattttctacaaaaacgggctgccaagcccagagagatcatacgtcttcaacggagatttcgtcgacagaggtaaggatagtgtggagatactgatgatcttgttcgctttcatgctcgtctatcctaaagagttccacttgaatcgcggcaaccacgaagaccacatggtgaacttgcggtacgggtttaccaaggaggtaatgaataagtacaaagtacatggcaaggaaatcctgcggactctccaggacgtcttttgctggttgcctctcgcgaccttgatagatgagaaagtgctgatccttcatgggggtgtgagcgatattacagatttggagctacttgacaagatagaaagatctaaaatcgtgtctacaatgcggtgtaagaccaggcaaaagagtgaaaaacaaatggaggagaaacgcagagctaatcagaagagcagcgcccagggccctattccttggtttctacctgagtctcgttcactcccatcttctccattgaggttgggcagctataaagcgcagaaaactagccgctcctcctctataccgtgcagtggtagccttgacggacgggagctgagcaggcaggtgaggagctccgtggagttggaacttgaacgatgccgccagcaagcagggctcctggtcacaggcgagaaagaggaaccgtctcggtccgcctcagaagcagatagtgaggcgggggaactgcgtaagcctacacaagaagagtggcgccaggtcgtggacatactgtggtctgatcccatggcccaggagggctgtaaggccaataccatcagaggcggaggttgttattttgggccagatgtaacccagcagctcttgcagaaatacaacatgcagttcctgataaggagccacgagtgcaagcccgaaggctatgagttctgccataaccggaaagtgttaaccatcttctccgcaagcaattactacgaagtgggctcaaatcgcggggcatatgttaaactgggaccagcccttacaccgcacattgtgcagtaccaggcgaataaagtcacccacactttgacaatgcgacaacgaatcagtagggttgaggaaagtgctctgagagcacttcgggaaaaactgttcgcccacagcagcgatctactttccgagtttaaaaagcacgatgcagacaaggtgggcttgatcaccctgagcgattgggctgcagcagtggagtctgtcctgcacctaggcctgccttggagaatgctgcgtccccagctggtgaactcttctgccgacaacatgttggagtacaaatcatggcttaagaacctggccaaggagcagctgtcaagggaaaatatccagtcaagtctattagagacgctctacaggaaccggagcaatctcgagacaatatttcgaatcatcgacagcgaccattctgggttcatctcactggacgaattcaggcagacttggaaactcttcagctcacacatgaacattgatattacagacgattgcatctgtgacctagctagaagtatcgattttaacaaagacggacacattgacataaatgagttcttagaagccttcagattggtggagaagagttgccccgaaggagacgcaagtgaatgcccccaggccaccaacgctaaggactccggctgtagctctccaggggcacattag

SEQ ID NO: 201611 - DNA, 1797 bp, synthetic construct
  misc_feature 1..1797: note = Description of Artificial Sequence: Synthetic coding sequence
  source 1..1797: mol_type = other DNA
atgggcagcggcaccagcacccagcaccacttcgccttccagaacgcggagagagcctttaaagccgccgcgctgattcaacggtggtatcgcagatacgtcgcccggctggaaatgcggaggcggtgcacgtggagcatcttccagagtatcgagtacgccggccaacaggaccaggtcaaactccacgatttttttagctacctgatggaccatttcatcccatcatcacataatgaccgggattttcttacacgtatcttcaccgaggataggttcgcccaggactcggaaatgaagaagtgctccgactatgagtccattgaggtccccgactcttatacaggacccagactttcttttccgctgttacctgaccacgcaaccgccttggttgaggcctttcgtctgaagcagcagctacatgctcggtacgtgctcaatctgctatatgagacaaagaagcacctggtgcagcttcccaacataaacagagtgagcacatgttattcagaggagatcaccgtttgcggtgatctgcatgggcagctcgatgacctcattttcattttttataagaatgggctgccgtcccctgaacggagctatgtgtttaacggcgacttcgtggacagaggtaaagactcagttgagattttaatgattctcttcgcgtttatgctggtctatcccaaggagttccacctgaatcgcggaaatcatgaggaccatatggtcaacctgcggtacggtttcaccaaagaggtgatgaataaatacaaggttcatggtaaggagattctgagaacgctgcaggacgtcttttgctggctgcccctggctacattgatagatgagaaagtgttgatcctgcatggaggggtgtccgacatcaccgatctcgaactgctcgacaagatagaaaggagcaaaattgtctctacgatgcgttgtaagacacggcagaagtcagaaaagcagatggaggaaaaaaggagggcaaatcagaagtcatccgctcaggggcccataccctggttcttgcccgagagtcgcagcctgccttcaagcccactcagactgggcagctacaaagctcagaagacttcccgcagcagctcgatcccttgtagtggaagcttggatggtagagaactaagtcgtcaggtgcggtctagcgtggagttggagctcgagagatgccggcagcaggccgggctgctcgtgaccggagagaaagaggaaccatctcggagtgccagtgaggctgacagcgaggccggcgaacttaggaagcctactcaggaagaatggcggcaggtcgttgatatcctctggtctgacccgatggctcaggaagggtgcaaagcaaacacaatccgcgggggcgggtgctactttggccccgatgtcacgcagcaactattgcagaaatacaacatgcagtttctaatcagatcacatgaatgcaaaccagaaggctatgaattttgccacaacagaaaagtccttacaatttttagcgcttctaactattacgaagtgggctcaaatagaggagcttacgttaaactcggcccagcgctgacaccccatatcgtacagtatcaggccaataaggtgactcacactctcaccatgagacagagaatttcgcgagtggaggagtccgccctgcgcgctctccgggagaagctatttgcacatagttcagatctgctgtcagaattcaagaagcatgacgcagacaaagtgggccttgcaagctcccaactatgttactatcagcagaagtag

SEQ ID NO: 201612 - DNA, 1440 bp, synthetic construct
  misc_feature 1..1440: note = Description of Artificial Sequence: Synthetic coding sequence
  source 1..1440: mol_type = other DNA
atgggcgccttcctggacaagcccaagaccgagaagcacaacgcccacggggccggaaatggcctgcggtacggtttaagttcaatgcaggggtggcgagttgagatggaggacgcccatactgctgtggtgggaattcctcatgggctggaagactggagcttctttgccgtgtatgatgggcacgctggctcaagagtcgcaaattactgctctacacacctcctggaacacattaccactaacgaggattttcgtgcagcgggaaaatcaggttcggctcttgaactgagcgttgagaatgtgaagaacggcatccggaccgggtttttgaaaatagacgagtatatgaggaacttcagtgacctacggaatgggatggatagaagcgggtccaccgctgtgggggttatgatctctcccaaacatatctacttcatcaattgtggagactctcgcgccgtgctgtaccgaaatggccaggtgtgttttagtacccaggaccacaagccctgtaatccaagagagaaagagcggattcaaaatgccgggggctctgtgatgatccagagagtcaatggctctctggcagtatcccgcgccttaggagattacgactacaaatgcgtggacgggaagggtcccactgagcagcttgtgagccctgaacccgaagtttacgaaattctccgggcagaggaagacgaattcatcatactggcttgtgacggcatctgggacgtgatgtcaaacgaggaactgtgcgaatacgttaagagcaggctcgaagtgagcgatgatctggaaaacgtgtgcaactgggtggtggatacatgcctccataagggctctagagataacatgtccattgtgctggtctgcttcagcaatgcccctaaggtcagcgacgaagcagtgaaaaaagacagcgagctggacaagcatttagaatctcgcgtggaggagatcatggagaagagtggtgaagaggggatgcccgacctggcccacgtgatgcgaattttatcagcagagaacattccaaatttgccccctggcggcggtctggccggaaaacggaatgttattgaggccgtgtattcgcgtctaaacccccatcgcgagagcgacggggcaagtgatgaagccgaggaatccggatcccaaggcaaactcgtggaggcattaaggcagatgcgcattaaccatcgaggaaactaccgtcagctgctggaagaaatgctgacctcctaccgcctggccaaagtcgagggggaggagtcaccagccgagccggcggccactgctacatcctcaaacagcgacgccgggaaccccgtgaccatgcaagagtcccatactgagtcagaaagcggcctggcagaactggacagcagtaacgaagacgccggcactaagatgagtggagagaaaatttag

SEQ ID NO: 201613 - DNA, 579 bp, synthetic construct
  misc_feature 1..579: note = Description of Artificial Sequence: Synthetic coding sequence
  source 1..579: mol_type = other DNA
atgagcatcgtgctggtgtgcttcagcaacgcccccaaggtgagcgatgaagccgtcaaaaaggacagcgaactggataaacacctggagtctagagtggaggaaattatggagaagtctggcgaagaaggcatgcccgacctggcacacgtcatgaggatcctgagcgccgaaaacattcccaatttacctcccggcggcgggctggccggcaagagaaacgtgattgaagctgtttactcgcgtcttaatccccatcgtgagtcggacggcgcaagcgacgaagccgaggaaagcggatctcaggggaagcttgtagaagccctgcgccagatgcggatcaatcatcggggcaactaccggcagttgctggaagagatgctcaccagttacaggctggctaaggtcgagggagaagagtcccctgcagagcctgctgcaactgctacctcttcaaactccgacgctgggaatcctgtaacgatgcaagagtcacacacagaatctgagtccggcttggccgagctggactcaagcaatgaagacgcggggacaaagatgtccggcgagaagatttag

SEQ ID NO: 201614 - DNA, 1164 bp, synthetic construct
  misc_feature 1..1164: note = Description of Artificial Sequence: Synthetic coding sequence
  source 1..1164: mol_type = other DNA
atgggcgccttcctggacaagcccaagaccgagaagcacaacgcccatggggctgggaatggtctccggtatgggctatcatctatgcagggatggagagtggagatggaagacgcacatacagccgttgtggggataccccacggcctggaggactggtcctttttcgccgtctacgacgggcatgctggttctcgggtggccaactactgctccacacatctgttggagcatattacaacaaatgaagattttcgggctgctggaaagtccgggtctgccctcgagctgtcagttgagaacgtgaagaacggaatccggacaggttttctcaagatcgacgaatacatgcgaaacttctcggatttgagaaacggtatggatcgttccgggtcaaccgccgtgggggtgatgatctcaccaaagcatatatacttcatcaactgcggagacagccgcgccgtactgtatcggaacggccaggtctgttttagcacacaggatcacaaaccctgtaatccgcgtgaaaaagagcgcatccaaaacgcgggaggctcagtgatgatccagcgggttaacgggagtcttgcggtgtctcgggcattaggtgactacgattacaaatgcgtagacgggaagggccctacagagcagcttgtttcacctgagccagaggtgtatgagattctccgcgccgaagaggacgagtttatcattttagcttgtgacgggatatgggatgtgatgagcaatgaggaactctgcgaatatgtgaaaagcagactggaagtttctgacgatttggaaaacgtgtgtaactgggttgttgatacttgcctgcataaggggagtagggataatatgagtatcgttctggtatgcttttcaaacgcccccaaagtgtcagacgaggccgtcaaaaaagactccgaactagataaacatctcgaaagccgtgtagaggagatcatggaaaaatctggagaggagggcatgcctgacctggctcacgtcatgcggatcctgagtgccgagaatatcccgaatctccctcctggcgggggacttgccgggaaacgaaatgtgattgaagcagtatattcacggttaaatccccaccgagagtcagatgggggggccggcgacttggaggacccctggtag

SEQ ID NO: 201615 - DNA, 1143 bp, synthetic construct
  misc_feature 1..1143: note = Description of Artificial Sequence: Synthetic coding sequence
  source 1..1143: mol_type = other DNA
atgggcgccttcctggacaagcccaagaccgagaagcacaacgcccacggggccggcaacggtctcaggtatggcctatcctccatgcaaggctggcgagtagagatggaggacgcacatactgcagtggttggcattccacacggactggaggattggtctttctttgcagtatacgacgggcacgccgggtctcgagtggctaattactgttctacacacttactggaacacattacaacgaacgaggactttagagctgccggcaaaagtgggagtgctctggaacttagtgttgaaaacgtgaaaaacggaattcgcaccggctttttaaagatcgacgagtatatgcggaacttctctgacctgcgcaatggtatggacagatctggtagtactgctgttggtgtcatgatctctcccaagcacatttactttattaactgcggggattctagggctgtcctctaccggaacggacaagtgtgcttttcgactcaagaccacaagccttgcaacccacgggaaaaggagcggattcagaatgcagggggcagtgtcatgatccaaagggttaatgggtctcttgctgtctcacgcgcattaggcgactacgactacaagtgcgttgatgggaaggggcctaccgagcagctggtttcccctgaacccgaagtctacgagattttacgggctgaggaggacgaattcattatcttggcttgtgacggcatttgggatgtgatgtctaacgaagaactgtgtgagtacgtgaagagccggttagaagtgtctgatgatctcgagaatgtgtgtaattgggttgttgatacctgtctgcacaaaggttcacgcgataacatgagcattgtcttggtttgcttttccaacgcaccaaaagtgagcgatgaggcagtgaagaaggattccgagttggataaacatctggaatccagggtcgaagagattatggagaaatcaggtgaggaaggtatgcccgatctagctcacgtgatgagaattctgagcgcagaaaatattcccaacctacccccgggtggaggcctggcaggaaaacgcaacgtaattgaagcggtatattcccgtctgaatccccaccgcgagagcgacgggcagaaatag

SEQ ID NO: 201616 - DNA, 984 bp, synthetic construct
  misc_feature 1..984: note = Description of Artificial Sequence: Synthetic coding sequence
  source 1..984: mol_type = other DNA
atgggcgccttcctggacaagcccaagaccgagaagcacaacgcccatggagcgggaaatgggctcagatatggactgagctctatgcagggttggagggtggaaatggaggatgctcacacagcagtggttggcatcccccacgggctggaggactggagttttttcgccgtgtacgacggccatgccggcagtcgcgttgctaattactgtagcacgcatctgctggagcatattactaccaatgaggattttcgcgccgccggcaaatccgggagcgctctggagctctcagtagaaaatgtcaagaatggtatacgaactggcttcttgaaaatcgatgagtacatgaggaattttagcgatctgaggaatggaatggatcgatccggttctactgcagtcggtgtgatgatctctcctaaacacatctactttatcaactgcggggattcccgcgccgtgctctataggaatggacaggtgtgtttcagcacccaggaccacaaaccatgtaacccccgcgagaaggaaaggatccaaaacgccggaggcagtgttatgatacagcgtgtcaatgggagtctcgccgtcagtagggctctgggtgactacgactacaaatgcgtggatggcaaggggcctacagaacagctcgtgtcgcccgaaccggaggtgtacgaaatcctgcgcgcagaagaggatgagtttatcatactggcctgtgacgggatctgggatgtgatgagcaatgaggagctctgtgaatatgtcaaaagccggctcgaagtgtccgatgacctagagaacgtgtgtaattgggtcgtagacacatgcctgcacaagggaagcagagataacatgtccatcgtcttggtatgtttctccaatgcccccaaagtaagcgacgaggccgtcaagaaagatagtgagttggataagcatctggagtcacgtgtcgagggtaagacaaatgccttctag

SEQ ID NO: 201617 - DNA, 1137 bp, synthetic construct
  misc_feature 1..1137: note = Description of Artificial Sequence: Synthetic coding sequence
  source 1..1137: mol_type = other DNA
atgggcgccttcctggacaagcccaagaccgagaagcacaacgcccacggcgctggcaacggactgcggtacggcctgtccagcatgcagggctggcgcgttgagatggaggacgcgcatactgcggtagtggggatcccccacggcctggaggattggagtttttttgctgtctacgatggccacgcaggttctcgggttgcaaattattgttccacccacttacttgagcacatcacgaccaacgaggacttcagggcggcgggcaaaagtgggtccgctctggaactgagtgtcgagaacgtcaagaatgggatccggacaggatttctcaagattgacgaatatatgcgcaactttagcgatcttaggaacggaatggaccgttccggtagcactgccgtcggggtgatgataagccccaaacacatctactttatcaactgcggagacagccgtgccgtgttgtacaggaacgggcaggtatgtttcagtactcaagaccacaagccctgtaatcctcgggagaaggaaagaattcagaacgccggagggtcggtcatgatccagcgagtaaacgggtccttagcggtgtcaagagctctgggtgactatgactataaatgcgtcgatgggaaaggacctacagaacaactcgtgagccctgaaccggaggtatatgaaatcctgcgtgcagaagaggatgagtttatcatcctagcttgtgacggaatctgggacgtaatgtctaatgaggagctctgcgaatatgttaagtcgcgtctggaagtcagcgacgatcttgaaaacgtgtgcaattgggtcgtagacacctgcttgcataaaggcagccgcgataacatgtcaattgtgctggtctgcttcagcaacgccccgaaggtttcagacgaagccgtgaaaaaggattccgagctagataaacacctagagtcccgagtcgaagaaatcatggagaagtccggggaggaaggcatgcctgacctggctcacgtgatgagaattttatccgcagaaaatatccccaatctaccaccaggcggcgggctggctggaaagaggaacgtcatcgaggcggtatattcccgacttaacccccaccgggagtccgatggatag

SEQ ID NO: 201618 - DNA, 1518 bp, synthetic construct
  misc_feature 1..1518: note = Description of Artificial Sequence: Synthetic coding sequence
  source 1..1518: mol_type = other DNA
atgctgaaccgggtgcggagcgccgtggcccacctggtgagcagcggcggggcacccccccctcgtccaaaatctcctgacctcccgaatgcagcgagtgcaccaccagccgctgcgcctgaggctcctaggtccccacccgctaaggccggcagcggctctgctactcctgctaaagcagtagaagcccgcgcatcgttttcgcgacctacctttctccaactctcccctggaggtctgcgacgagccgacgaccatgctggccgcgccgttcagagcccccccgacactggaaggagactgccttggagcacaggctacgccgaggttatcaacgcaggtaaaagtcgacataacgaggaccaggcctgctgcgaagtcgtgtatgttgaaggacgtcggagtgtgaccggcgtaccccgcgagccctcccggggacagggcctttgcttttactactggggtctgttcgacggtcacgctggtggaggggcggccgagatggcgagcagacttctccatagacacattcgcgagcaattgaaggatcttgtggaaatcctccaggacccctctccacccccgctgtgtctgcctacaacacctggaacccctgacagcagcgacccttcccacctacttggtccccagagttgttggtcctctcagaaagaggtttcccacgaatccctcgtcgttggtgcagtggaaaatgctttccaattgatggatgaacagatggcaagggaacgacgcggtcatcaagtggagggagggtgctgtgccttggtcgtgatctacctgctgggcaaagtttacgtggcaaacgccggcgacagccgcgctataattgtgaggaacggcgagatcatcccaatgagccgagagttcacccctgaaactgaacgtcagcggcttcagctcctgggctttctaaagcccgaactgctgggcagtgagttcacacatttggaattccccaggcgtgtgttacccaaggagttgggccagcggatgctttaccgggatcagaacatgaccgggtgggcatataagaagatagagctggaggatttgagattccctctggtatgtggggagggcaaaaaagcgcgcgtcatggcaaccattggcgtgacacgcggtctcggagatcactcgttgaaggtgtgtagcagcacactcccaatcaagcccttcttgtcgtgtttccctgaggtgagagtttacgacctgacgcagtatgagcactgccctgatgacgtgttggtacttggcactgatggactttgggatgttaccaccgactgcgaggtcgccgcaacggtggaccgggtattgagtgcctacgaacccaacgatcattcacggtacacggcgctggcacaggcactcgtcttaggagctagggggactccgcgcgatagaggctggcggctgcccaacaacaagctgggaagcggagatgacatcagtgtgttcgttatcccactaggcggccctggttcctatagttag

SEQ ID NO: 201619 - DNA, 900 bp, synthetic construct
  misc_feature 1..900: note = Description of Artificial Sequence: Synthetic coding sequence
  source 1..900: mol_type = other DNA
atggccagccggctgctgcaccggcacatccgggagcagctgaaggatctcaaggaggtttctcacgaaagtctggtggtcggggccgttgaaaatgcgttccagctgatggatgagcaaatggccagggagcgaaggggacatcaggtggaaggcggatgctgcgcccttgtggttatctatctgctggggaaggtctatgtagcaaatgccggggactcgagagcaatcatagtccgaaatggtgagattatacccatgtccagagagttcactcctgagactgagcgccagcgacttcagcttctgggatttctgaagcctgagcttctggggtctgagttcacacatctggaattccctaggagagttcttccgaaggaactcgggcaaaggatgttgtacagggaccagaacatgaccgggtgggcctataagaaaatcgagcttgaggacctccggtttccacttgtgtgcggagagggaaagaaggcccgggtgatggccacaatcggggtgactaggggcctcggtgaccatagcctgaaggtttgctcatcgaccttgcctattaagccattcctctcttgctttcccgaggtgagagtttacgacctgacacaatatgagcattgccctgacgacgtcctcgtcttaggcaccgatggtctgtgggatgtcaccacagactgcgaggtggctgctactgtcgacagggtgctaagcgcttatgaaccaaacgatcacagcagatacaccgctctggcgcaggccttggtactcggtgcacgggggactcccagagatcgtgggtggaggctgcccaacaacaagcttgggagcggagatgacatctccgtgttcgtcattccactgggcgggccgggctcatattcatag

SEQ ID NO: 201620 - DNA, 1119 bp, synthetic construct
  misc_feature 1..1119: note = Description of Artificial Sequence: Synthetic coding sequence
  source 1..1119: mol_type = other DNA
atgagcaccgccgccctgatcaccctggtgcggagcggcggcaaccaggtgcgcagaagggttctcctatctagccgcttgctgcaggatgatcgccgagtcaccccgacatgtcacagttctaccagtgagccaagatgctcccgcttcgatcctgatggttcaggaagtcccgccacctgggacaacttcggaatttgggataaccgaattgacgaaccaatcctgcttcctccctcaatcaaatacggtaagcctattcccaaaatttctctggagaacgtgggatgtgcaagccaaataggcaaacggaaggaaaacgaggacagattcgactttgcccagctgaccgacgaagtgttatacttcgcagtatacgacggtcacggtggtcccgctgctgctgacttttgccatacacatatggaaaaatgcatcatggatctgctgcccaaggaaaagaatctggagactctgctgacactggctttcctggagattgacaaggcattcagctctcatgcaaggttgtctgccgatgccacactactgacgtcaggcactacggcaaccgtcgctctgctgcgagacggcattgagctggttgtcgcttctgtaggagacagtcgtgccatcttatgccgaaaagggaagcctatgaagctgacgattgaccatacgccagagcgcaaggacgagaaagaacgcataaagaagtgtggtggcttcgtcgcatggaacagcttaggccagccgcatgtaaacgggagactggcaatgacccggtccatcggtgatctggaccttaagacctccggtgtgatagcagaaccggaaacaaaacggataaagctgcaccacgcagacgatagttttctcgtgctcacaacggatggtatcaatttcatggtgaattcccaggaaatctgcgatttcgtaaaccaatgccacgaccctaacgaagcagcacatgccgtcacagagcaggcgattcaatacggaacggaggacaatagtacagcggtggtcgtgccattcggtgcttgggggaagtacaagaactctgagattaacttctcattcagccgtagtttcgcaagttccggacgatgggcttag

SEQ ID NO: 201621 - DNA, 702 bp, synthetic construct
  misc_feature 1..702: note = Description of Artificial Sequence: Synthetic coding sequence
  source 1..702: mol_type = other DNA
atgagcaccgccgccctgatcaccctggtgcggagcggcggcaaccaagtaagacggagggtcctgctgtctagcaggctgctgcaagacgatcgccgcgtgacaccaacatgtcactcctcgacatcagagccccggtgctcacgattcgaccctgatggctccggatctccagctacctgggacaacttcggaatctgggacaaccggattgatgagcccatacttctgccgccaagtattaagtacgggaaacctatccctaagatttctctggaaaacgttggatgcgcttcacagatcgggaaaaggaaggaaaatgaagaccgctttgatttcgcccagctgaccgacgaggtgctgtacttcgcagtctacgacggtcacggaggccctgccgcagccgacttttgccacacacacatggagaaatgcattatggatctgttacctaaagagaaaaatcttgaaacgttgctcaccctggcttttctggagattgataaagcattctcctcgcacgcgcggctaagtgccgatgagaattgcgcctggtcagccgcactcgacctcgagcctgttgataccatctgtggtgcgagtgtggaaagagaaatttgtctaattctgagccaagtcaaagagtcttcagggtcctaccccggactgagagagggaagtcatatcagtctatcccattag

SEQ ID NO: 201622 - DNA, 702 bp, synthetic construct
  misc_feature 1..702: note = Description of Artificial Sequence: Synthetic coding sequence
  source 1..702: mol_type = other DNA
atgagcaccgccgccctgatcaccctggtgcggagcggcggcaaccaggtgaggcgtagagttctcctgagctctcgtctcctgcaggacgatcgacgggtcactcccacttgccactctagtaccagcgaacctcgatgttcccggttcgaccctgacgggtccggcagtccggccacttgggataacttcgggatctgggataataggattgacgagccaatcttgttgcccccttccattaagtatggcaagcctatccccaagatctcgctggaaaatgttggatgtgcttcccagattggaaaacgaaaggagaacgaggataggtttgacttcgctcaactaacggacgaagttttatatttcgccgtatatgacggccatgggggccctgctgcggccgacttctgccacactcacatggaaaagtgtattatggatctccttccgaaggaaaagaacctggaaaccctcctgaccctggctttccttgaaatcgataaggcgttttcaagtcacgcaaggctgtcagccgatgagaactgcgcatggtccgccgcgctcgacctcgagccagttgacaccatttgtggtgcgtcggttgagagagaaatttgcctgatcctctcacaggtcaaagagtctagcggaagttacccggggttacgtgagggcagccacatctccttgagtcattag

SEQ ID NO: 201623 - DNA, 585 bp, synthetic construct
  misc_feature 1..585: note = Description of Artificial Sequence: Synthetic coding sequence
  source 1..585: mol_type = other DNA
atgatcgaggacaccatgaccctgctgagcctgctgggccggatcatgcggtactttctgttaaggcccgaaaccttattccttctgtgtatctccttggccctgtggagctactttttccatacggacgaggtaaagacaatcgtgaaaagctccagagatgctgtgaagatggtgaaagggaaggtggcagagattatgcaaaatgaccgcctcggcggcctagatgttctggaggctgaattctcaaaaacgtgggagttcaagaatcataatgtagccgtctactcaattcagggacgcagagaccatatggaagatcgatttgaagtattgacagatttagctaacaaaacccaccctagtatctttggaatttttgatgggcatggtggagaaactgcagccgagtatgtaaaaagtagactgcctgaagccctcaaacagcacctccaggactacgaaaaggataaagaaaactcggttctgagttaccagactatcctcgagcagcaaattctcagtatcgaccgtgagatgctcgaaaagctaacagtgtcatatgacgaagccgttacattctag

SEQ ID NO: 201624 - DNA, 1083 bp, synthetic construct
  misc_feature 1..1083: note = Description of Artificial Sequence: Synthetic coding sequence
  source 1..1083: mol_type = other DNA
atgatcgaggacaccatgaccctgctgagcctgctgggccggatcatgaggtacttcctcttgagaccagaaacactgttcctgctttgcatatcactggccctgtggtcttatttttttcacactgacgaagtgaaaactatcgttaagagctcccgcgatgccgttaaaatggtgaagggcaaggtagccgaaatcatgcagaatgatcgcctaggggggctcgatgtgctggaagctgagttttccaaaacatgggagttcaagaatcacaacgtcgctgtgtattcaattcagggcagacgagatcatatggaggatcgcttcgaggtcttaacagatttggctaataagacccatccttccatctttggaatcttcgatggtcatggtggagaaactgctgcagaatacgtgaagtcaagattgcccgaagcgctgaagcagcatcttcaagactacgagaaggataaagaaaatagcgtcctgtcgtaccagaccatccttgagcaacagatcttgtcaatcgatagagaaatgctggagaaactgaccgtgagctatgacgaggctggtaccacttgtctgattgccctactctccgacaaagacctcactgtggcgaatgtgggagacagtcgtggagtgctgtgcgataaggacggaaacgccatccctttatcccatgatcataagccttatcaattaaaggagagaaaacgaatcaagagggccggtggttttatttccttcaatggttcatggcgggtacaagggatactggctatgagcagaagtttaggcgactatcccctgaaaaacctaaacgtcgttatccctgatccggacatcttgaccttcgacctggacaaattgcagccagagttcatgatactggcgtccgacggtttgtgggatgccttctcaaacgaagaggcagttcgatttattaaagaacggctggacgagccacatttcggtgccaagagtattgtgttacagagcttttacaggggatgcccagataacatcacagtcatggtggtgaagttcaggaacagctcgaagacagaggaacagtag

SEQ ID NO: 201625 - DNA, 813 bp, synthetic construct
  misc_feature 1..813: note = Description of Artificial Sequence: Synthetic coding sequence
  source 1..813: mol_type = other DNA
atgcacctgaacggccggtgcatctgccccagcgacccccagttcgtggaggagaagggtattcgcgctgaggacctggtgatcggtgccctggagtccgcatttcaggaatgcgacgaggtgatcggaagggaattggaggctagcggacagatggggggctgtaccgctcttgttgcggtgtcactgcagggaaagctgtacatggccaacgctggtgacagccgggccattttggtgcgcagggacgagatcaggcctttgtcattcgagttcacgccagaaaccgaacgccaaagaatccagcagctggcgttcgtgtaccccgaattgctggccggagaatttacacgactggagtttccgcgaaggctgaaaggggacgacttgggtcagaaggtgctattcagagatcatcatatgtccggttggagctataagagggtggagaagtccgatttaaaataccccctgattcatggtcagggcagacaggcaagactgctgggtacactcgcggtgagccgaggcttgggtgatcatcagctgagagtcctggatactaacatccagctgaagcccttcctgctaagcgtgccgcaagttaccgtgctggatgttgaccaattagaactgcaggaagatgatgtggtggtgatggccaccgacggcttgtgggacgtgctctcaaatgagcaagtcgcgtggctagtgcgctctttccttcccggaaatcaggaggaccctcaccgctactgtagctgctggggaccagcctgggcatgggtgggagcttcttccaagcctaagtag

SEQ ID NO: 201626 - DNA, 897 bp, synthetic construct
  misc_feature 1..897: note = Description of Artificial Sequence: Synthetic coding sequence
  source 1..897: mol_type = other DNA
atgcacctgaacggccggtgcatctgccccagcgacccccagttcgtggaggagaaaggcataagagccgaggatcttgtgataggagccctcgagtctgctttccaggaatgcgacgaggtgattggcagggagctcgaggcctcaggccagatgggtgggtgtaccgccctggtagcagtgtccttacaaggtaagttgtatatggcaaatgcaggggatagtcgcgcaattctggtcagacgggacgagattcgcccccttagcttcgagttcacccccgaaaccgaaaggcagagaatccagcaactcgcctttgtctatccagaactactggcgggtgagtttacccgcctggaatttccacgacgcttaaagggtgatgatctgggccagaaggtcctgtttagggaccaccacatgagcggatggtcatataaacgagtggaaaagagcgatcttaagtatccacttattcacggccagggacggcaggcacgcctgctgggtacattggcggtctccagaggactgggcgaccaccagcttagggtgttagatacaaatattcagctcaaacctttcctgctgtctgtgccccaagtcaccgtgctggacgtcgaccaactcgaactgcaagaagacgatgtcgtggtgatggccacagacgggttgtgggatgttttaagtaacgaacaggttgcttggctagtgagatcattcctgcctgggaaccaggaagatcctcaccgattctcgaagctagctcagatgttgattcactcaacccagggaaaagaagacagtttgaccgaggagggtcaggtctcatacgatgacgtgtctgtcttcgttatccctttgcacagccaaggccaggagtcaagcgaccattag

SEQ ID NO: 201627 - DNA, 744 bp, synthetic construct
  misc_feature 1..744: note = Description of Artificial Sequence: Synthetic coding sequence
  source 1..744: mol_type = other DNA
atgggcggctgcaccgccctggtggccgtgagcctgcagggcaagttgtacatggcaaacgccggcgactcacgagcaatcctggttagacgcgatgaaatcaggccccttagttttgaattcacaccagagacagagcggcagaggatccaacagcttgcatttgtctatcctgagttgctggccggggaatttacccgcctggagtttcctcgcagactgaaaggcgacgatctgggacagaaagtgctcttccgtgatcatcacatgtcgggctggagttataaaagagtggagaagagtgaccttaaatatcctctgattcatgggcaaggacgtcaggcacgtctcctcggaactctagccgtctctagggggctgggggatcatcaattacgcgttctggataccaacatacaactcaagccatttctgttatcggtccctcaggtgaccgtcttggacgtggatcagctggagctgcaggaagacgacgtagtagtgatggccaccgacggcttgtgggacgtcctcagtaacgagcaggttgcctggcttgtgcgctcattcctacctggtaatcaggaggacccacatcgcttcagtaagctggcacaaatgctgattcatagtactcaagggaaagaggattctctcacggaggaagggcaggtctcttacgacgatgtttccgttttcgttatccctctgcactcccagggtcaggaaagcagcgatcactag

SEQ ID NO: 201628 - DNA, 1380 bp, synthetic construct
  misc_feature 1..1380: note = Description of Artificial Sequence: Synthetic coding sequence
  source 1..1380: mol_type = other DNA
atgagcgccggctggttccggcggcggttcctgcccggcgagcccttgcccgcgccacgaccaccaggccctcacgcgtcccccgtaccctacaggcgcccacggtttctccgaggaagcagtagcagcccaggcgccgccgacgcttcccgacgaccagatagcagacccgtgcgatcgcccgcgcgcgggagaaccctgccctggaacgcagggtacgccgaaatcatcaacgcagaaaagtccgaatttaatgaggatcaggcagcttgcggcaaactctgcataagacggtgcgagttcggagccgaagaagaatggctcaccctgtgtccagaggaatttctcaccggccattattgggctctgttcgatggtcacggtgggcccgccgccgcgatcctcgccgccaacaccctccatagttgtttgcgccgccagcttgaagccgtggtggaggggttagtcgctacccaaccacccatgcatctcaatggccggtgcatctgtccttcagacccccagttcgtggaagaaaaagggattcgagccgaagacttagtgataggcgcactggagtccgcttttcaggagtgtgacgaggtgattggccgcgaactggaggcgagcggacagatggggggttgtactgcgttggtggcagtaagcttgcaggggaagctatacatggccaatgctggggacagccgagccatcctggtgcggcgtgatgaaattcgaccgctgtccttcgaattcacccccgagactgagcggcaaaggatccaacaactggcctttgtgtacccggagctgctggccggggagttcacccgcctggagtttcctagaaggctgaagggtgatgacctgggtcaaaaggtcctctttagagatcaccatatgagcggctggtcatataagcgggtcgagaagtccgacttaaagtacccactcattcacgggcaaggtcgacaggcccgtctactcggcacactggccgtgagtcgcggcctgggtgaccaccaactacgagtgttggatacaaatattcaactgaagccctttttgttgtcagtccctcaggtgacagttctggacgttgatcagttagaactccaggaagatgatgtcgttgtgatggctactgatgggttatgggatgtcctgagtaacgaacaggtagcatggttagtgcggtccttcctccccggcaaccaggaggatccccatcgattctctaagctagctcaaatgttgatccattcaactcagggcaaagaggatagccttaccgaagaggggcaggtgtcttacgacgacgtcagtgtgttcgttatacccctacattcgcagggacaagaaagcagcgaccattag

SEQ ID NO: 201629 - DNA, 1821 bp, synthetic construct
  misc_feature 1..1821: note = Description of Artificial Sequence: Synthetic coding sequence
  source 1..1821: mol_type = other DNA
atgcggcggagcgaggtgctggccgaggagagcatcgtgtgcctgcagaaggccctcaatcacctacgggaaatttgggaactgattgggattcctgaggaccaaagattgcaacggaccgaggtagttaagaagcacataaaagagttgctggatatgatgattgctgaggaagagtccctgaaggaacggcttataaaatcaatcagcgtgtgtcagaaagaacttaacaccctgtgcagtgagttgcacgtcgaacccttccaggaagaaggcgagacaactatcctgcaattagagaaagatctgaggacgcaagtggagcttatgaggaaacaaaagaaagagcgcaaacaggagctgaagctcctgcaagagcaggatcaggagctgtgtgaaattctctgtatgccacactacgacatcgatagcgctagtgtgccatcactggaggaattgaaccagtttcgccagcacgtcactacgctacgtgaaactaaagcctcgaggagagaagagttcgtgagtataaagagacagatcatcttgtgcatggaggcccttgaccacacgccagatactagctttgagagagacgttgtgtgcgaagatgaagacgctttctgtctgtctctggaaaacatcgcaacactgcaaaagctgctgcgacaacttgaaatgcagaaaagtcagaatgaagccgtgtgtgaggggttgcgcacacagattagggagctatgggatcggcttcagatcccagaggaggagagagaagctgtggccaccataatgtccgggagcaaggctaaagttagaaaggctctgcagctcgaagtcgataggcttgaggagttgaagatgcagaatatgaaaaaggtaattgaggcaatccgcgtcgaactcgtacagtactgggatcagtgtttttattctcaagaacagaggcaagccttcgctccattctgtgctgaagactacactgagtcgctgctccaactgcatgacgcagagatagtgcgcctcaagaactactatgaggttcataaggaattattcgagggggtccagaagtgggaggagacttggcgactatttctggaattcgagagaaaggcaagtgatcccaaccggttcaccaaccgcggcggtaatctcttgaaagaagagaagcagcgagccaaactgcagaagatgttgcccaagctggaggaagaattgaaggctagaatcgaactgtgggagcaggagcactcaaaagctttcatggtgaatgggcaaaagtttatggagtatgtagccgagcagtgggagatgcacagactggagaaagagagagcaaaacaggaacgacaattgaagaacaagaaacagacggagaccgagatgctttatggctctgcacccaggaccccatccaagaggcgcggccttgcccccaacacacccggcaaagcgaggaaactgaacactacaacaatgagcaacgcaacggccaacagttcaattcgccccattttcggcggaactgtctaccacagcccagtgtcccgcctgccaccctccggaagtaagcccgtcgcagcctctacatgttctgggaagaagactccacggaccggacgccatggtgcaaacaaggaaaacctggagctgaacggcagtatcctgtctggtggatatcccggtagcgccccactccagcggaatttcagcatcaattcggtggccagtacgtatagtgagttcgcccgagagctgagtaaggcttcaaagagcgatgccacgtccggcattttaaattccaccaacatccagagttag

SEQ ID NO: 201630 - DNA, 1701 bp, synthetic construct
  misc_feature 1..1701: note = Description of Artificial Sequence: Synthetic coding sequence
  source 1..1701: mol_type = other DNA
atgcggcggagcgaggtgctggccgaggagagcatcgtgtgcctgcaaaaggcacttaatcacttaagagaaatctgggaactcattgggatccccgaagaccagcgtctgcagcgaacagaagttgttaagaagcacatcaaggagctccttgatatgatgatcgctgaagaggagtccttgaaggagcgcttaattaagagtatcagcgtgtgccagaaggaacttaatacgctgtgcagcgaacttcacgtggagccttttcaggaagagggcgagactacaattctccagctggaaaaggacttaagaactcaggttgagctgatgagaaagcagaaaaaagagaggaaacaggagctcaaactcctccaggaacaggaccaagagctgtgcgagatcttatgcatgccacactacgatattgactcggcttcagttcccagcctggaggaactgaaccagtttcgtcagcatgtaacgacccttagggaaaccaaagcatccaggcgggaggagttcgtgagcataaagaggcagattattctatgcatggaagccctcgatcacacccccgacacctctttcgagcgggatgtagtgtgtgaggacgaagacgctttttgcttatctctggagaacattgctacactgcagaagctgctgcggcagctcgagatgcaaaaatcacaaaacgaggccgtgtgtgaagggttacgtacacagatcagagaactgtgggataggctgcaaatccccgaagaggaaagggaggctgtagccactatcatgtccggcagtaaagccaaggtccggaaggcgctgcagctggaggtggaccgtcttgaagagttaaagatgcagaatatgaaaaaggtgattgaagctatccgcgtggaattggtgcagtactgggatcaatgcttctacagtcaggagcagagacaggcctttgcccctttttgtgccgaggactataccgaatcattgttgcagctgcacgatgcagagattgtccgcttgaagaattactacgaagtccacaaagagcttttcgaaggtgtgcagaagtgggaggagacctggaggctcttcctcgagttcgagcggaaggcaagcgatcctaaccgctttacaaacagggggggaaatctcctaaaggaagagaaacagagggcaaagctgcagaagatgctccccaagttggaggaggagctgaaagccaggattgagctgtgggagcaggaacattctaaagcttttatggtgaacggtcaaaagttcatggaatatgtggctgagcagtgggagatgcatcgactggagaaagagagggccaagcaggagagacagctgaagaataaaaagcagaccgagacagaaatgctctatggttctgcccccagaacacccagtaaaaggagaggtctcgctcctaatacccccggtaaggcacggaagttgaacacaactactatgagcaatgcaacggcgaattcttccattcggcctatttttgggggcactgtgtatcatagccccgtctctcggcttcccccgagcggatcgaagcccgtggcagcatcaacgtgctccgggaagaagacacctcgcacgggaagacacggcgcaaacaaagagaaccttgaactgaacggcagcatcttaagtgctagaacctttaagggctttcaaatttag

SEQ ID NO: 201631 - DNA, 1863 bp, synthetic construct
  misc_feature 1..1863: note = Description of Artificial Sequence: Synthetic coding sequence
  source 1..1863: mol_type = other DNA
atgcggcggagcgaggtgctggccgaggagagcatcgtgtgcctgcaaaaggctctcaatcatcttagagaaatctgggagttgataggaattcccgaggatcagcggctgcaaagaacagaggttgtgaagaagcatattaaggagctgctggatatgatgatcgcagaggaagaatctcttaaggagcgtttgattaagtccatttccgtttgtcagaaagagctgaacaccttgtgctcagagctgcatgttgaaccttttcaggaggagggagagactaccatcctacagctggaaaaagacctgagaacacaggtcgagctcatgcgcaagcaaaagaaagagagaaaacaggagctaaaacttctccaggaacaggatcaggagctgtgcgagatcctgtgcatgccccactatgatattgattcggccagcgttcctagtctggaggagttaaaccagttccggcagcatgtgaccaccctgagagagacgaaggccagtcggcgcgaggaatttgtctcaattaaacgccagattatcctgtgcatggaagccctggaccacacaccagatacttctttcgagcgggatgtggtctgtgaagacgaggacgctttttgtcttagtttggaaaatatcgccaccctccagaagttgttgagacagcttgaaatgcaaaagtcccagaacgaggccgtgtgtgagggactccgaacccaaatcagagagttgtgggataggttgcagattcctgaggaagagcgggaagcagtggccactattatgtccggctccaaggccaaggtaagaaaagcgcttcaattggaggtagatcgacttgaggagttgaaaatgcagaatatgaaaaaagttattgaggcaattagggtcgaactagtacagtattgggaccaatgcttctatagccaggaacaaagacaggcattcgctcctttctgtgccgaagattatacggagtctctgttacagttacacgatgccgagattgtgcggttaaaaaactactatgaggttcataaagagctttttgagggagttcagaaatgggaggaaacatggcgattatttctggaattcgagcgaaaagcctccgaccctaaccgattcaccaaccgcggcggcaacttgctgaaagaagagaagcagcgcgccaagcttcaaaagatgctccctaaactcgaggaggaacttaaagcacgcattgagctgtgggagcaggagcactctaaggcatttatggtcaatgggcagaaattcatggagtatgtcgcagagcaatgggagatgcacagactggaaaaggaaagggccaaacaagagaggcagttaaagaacaagaagcaaactgagactgagatgctttatggaagcgcaccaaggacaccgtccaagaggaggggtcttgcccctaacacccccggaaaggccagaaagttgaacacaaccaccatgtctaacgctacagctaacagctcaatccggcccatctttggaggcactgtgtatcattcccccgtctctcggctccccccgagcggcagtaagcccgtcgccgcgagcacctgctccgggaagaagacacccaggactggacgacacggagccaacaaagagaatttggaactgaatggatccatcttgtccggagggtatccagggtcagccccgcttcagaggaattttagtataaacagcgtggcctccacttactccgaatttgccaaggaccctagcctgagtgactcttctaccgtgggtcttcagcgcgagttaagcaaggccagtaagagcgatgctacctctggaatcctgaatagcactaatattcaaagttag

SEQ ID NO: 201632 - DNA, 1578 bp, synthetic construct
  misc_feature 1..1578: note = Description of Artificial Sequence: Synthetic coding sequence
  source 1..1578: mol_type = other DNA
atgcggcggagcgaggtgctggccgaggagagcatcgtgtgcctgcagaaggcacttaaccacctgcgagaaatctgggaacttatcggcatccccgaggaccagcgcttacagcgcacagaagtcgtgaagaagcacatcaaggaggagggcgagaccaccatacttcagttggaaaaggacctgagaacacaggttgagttaatgagaaaacagaagaaggagagaaagcaagagctgaaactgctgcaggaacaagaccaagaactctgtgaaattctctgtatgcctcactatgacattgactcagcctccgtgccctccctcgaggaattgaatcagttcaggcagcatgttactacattaagagaaaccaaggcaagccgcagagaggagttcgtcagcatcaagagacaaatcattctgtgcatggaggctcttgatcatacacccgatacaagctttgaacgagacgtcgtgtgcgaagatgaagatgctttctgtctgagtctcgagaatatagccacactgcagaaattgctgcggcagttggagatgcaaaagagccagaatgaggccgtatgtgagggcttacggactcagattcgggagctgtgggatcggctgcagattcccgaggaggagagagaagccgtagcaacgattatgtcagggtccaaggctaaagtgcggaaggccctgcagctggaggttgacagactggaggagctgaagatgcagaacatgaagaaggtgatcgaggccatacgggtggagttagtccagtattgggatcaatgtttttattcgcaagaacagcgtcaagccttcgcacccttttgcgcagaggattataccgagtcccttcttcagctccatgacgctgagatcgtgcgcctgaaaaattactacgaagtacataaggaactgtttgagggagtgcaaaagtgggaggaaacctggcggctgttcctggagtttgaaaggaaagcctccgacccaaacagattcacgaaccgcgggggcaacctgctgaaagaggagaaacagcgcgccaaactgcagaagatgctacccaagttggaggaagagctgaaggctagaatagagctgtgggaacaggaacacagcaaggcctttatggtcaacggtcagaaatttatggagtatgtagccgaacaatgggaaatgcaccgtcttgaaaaggaaagggctaagcaagagcggcagttgaagaataaaaaacagaccgaaacagagatgctgtacggatcggctccgaggacgcccagcaaaagacggggtctggcacctaacaccccaggcaaagccaggaagctcaatacaactaccatgagcaatgccaccgccaatagcagtataagacctatttttggcggtacagtgtatcactcccccgtctctcgcctgccaccgagcggttcgaagccagttgcagcttccacttgctccggaaagaagactcccagaacagggcgtcacggagccaacaaggagaacctcgagttgaatggcagcatcctcagcgctagaacatttaaaggcttccagatctag

SEQ ID NO: 201633 - DNA, 696 bp, synthetic construct
  misc_feature 1..696: note = Description of Artificial Sequence: Synthetic coding sequence
  source 1..696: mol_type = other DNA
atgcgggtgctgggcggccggtgcggcgccctgctggcctgcctgttgctcgtgctgcccgtaagcgaggccaacttttgtctctactttaggaacgatttcatatacaacagagcgtgcatttctgttctcgtggggctgtccgggtgcaattttttctactctatttgttttctttctaagcagcaagcctcacaagttctggtcagaaagcgccgtgccaattctctgctcgaggagactaaacagggcaatctggagagagaatgtatcgaagagctatgcaataaagaggaagcccgggaagtatttgaaaacgacccagagacagactatttctatccaaagtacttggtgtgtcttcgtagctttcagactggtctgttcaccgccgccaggcagtccaccaatgcctatcccgacctgcgctcctgtgtaaacgccattcctgatcaatgttcaccccttccgtgtaacgaggacggctacatgagctgtaaagacggcaaggcctcctttacatgcacatgcaagccgggatggcagggggaaaagtgcgagttcgatattaatgagtgcaaggatccctctaacatcaatggcggctgcagtcagatatgtgacaacacgccaggctcttaccattgttcctgcaaaaatggatttgtgatgctgtccaataagaaggattgctag

SEQ ID NO: 201634 - DNA, 2031 bp, synthetic construct
  misc_feature 1..2031: note = Description of Artificial Sequence: Synthetic coding sequence
  source 1..2031: mol_type = other DNA
atgcgggtgctgggcggccggtgcggcgccctgctggcctgcctgctcctggtcttgcctgtctccgaggctaacttcctttctaagcagcaggcttcgcaggtcctggtccggaagcgcagagccaactccctgctagaagaaaccaaacaggggaatctcgaaagggaatgtatagaggaactttgcaataaggaggaggcaagggaggtgtttgagaacgaccccgagacagactatttttacccgaaatatttagtgtgcctgcggtcgtttcagacggggctcttcaccgctgccagacagagcacaaatgcatacccagaccttcgcagctgcgtgaatgccattccagaccagtgcagtcccttgccttgcaatgaagatgggtatatgagctgcaaggatggcaaagcgtcctttacttgcacttgcaaaccaggctggcaaggagagaaatgtgagtttgatataaacgaatgcaaggatcctagcaatattaatggcggatgttcacagatttgtgataacaccccaggctcttatcactgctcctgtaaaaacggttttgtgatgctctctaacaaaaaggattgtaaggacgtcgacgaatgcagccttaaacctagtatttgcgggacagccgtctgtaaaaatatcccaggtgattttgagtgtgaatgccctgaaggctaccgctataatttgaagtccaagtcctgcgaagacatcgacgagtgctctgaaaatatgtgcgcgcagctctgcgtgaattatcccggaggctacacctgctactgcgacggaaaaaaaggatttaaactagctcaagaccagaaaagctgtgaggttgtctctgtgtgcctccctcttaacttggacacaaagtacgaattactctatctagctgagcagttcgcaggtgtagtcctctatctcaaattcagactgcctgaaatcagtaggttcagtgccgaattcgatttcagaacttacgactcagagggagtgattctgtatgccgagtccatcgatcactcagcatggctgctgatcgctcttaggggcggcaaaatcgaggtccagttaaagaatgagcacacgtccaagatcactaccggcggagacgttattaacaacggcctgtggaacatggtgtccgtggaggaactcgagcatagtatttcaatcaagatcgctaaggaagctgttatggacattaataagccaggcccactcttcaagccggagaatggactgctggagaccaaagtgtatttcgcaggctttccccgcaaggtggaatcagagctgattaagcctatcaatccccgattggacgggtgtattcggtcttggaatctgatgaagcaaggcgcttctggcatcaaggagattattcaggagaaacagaacaagcattgccttgtcacagtcgagaagggctcttattacccaggcagcggaatcgctcagttccacattgattacaataatgtctccagcgcggaggggtggcacgtgaatgtcacccttaatatcaggcccagcacaggtactggcgtgatgctggctttagtcagtggtaacaatacagtccctttcgcagttagcctcgtggactctacctccgaaaagtctcaggacatactcctgagtgtggaaaataccgtaatttaccgaatacaggcccttagcctatgttcagatcaacaaagtcacctcgaattccgagttaaccgcaataacctggagctgtcgacccctctcaaaatagagaccatttctcacgaggacctgcagagacagctggcggtactggacaaggcgatgaaagcaaaagtggcgacctatctgggtggcctccctgacgtgccattctctgccactccagtgaacgccttttataatgggtgtatggaggttaacataaacggcgtgcagctcgacctggatgaagcgattagcaagcataatgacattcgcgctcactcctgcccatccgtgtggaaaaagacaaaaaactcatag

SEQ ID NO: 201635 - DNA, 1275 bp, synthetic construct
  misc_feature 1..1275: note = Description of Artificial Sequence: Synthetic coding sequence
  source 1..1275: mol_type = other DNA
atgggctgcggcaccagcaaggtgctgcccgagccccccaaggacgtccaactcgatctggttaaaaaggtagagcctttctctggaaccaagtcagatgtttacaaacatttcatcaccgaggttgactcggtgggaccagtgaaggccggattccccgctgcctcacagtatgcccacccttgcccgggcccacccacagcggggcataccgaaccgcccagtgagccccctcgcagggcccgcgtggccaaataccgggctaaattcgatccccgggtgactgcaaaatacgacatcaaggccctaattggtaggggaagcttttcaagagtcgtgagagtggaacatcgagccacccgtcagccctacgctatcaagatgatcgaaaccaaataccgcgagggaagagaggtgtgcgagtcagagttgcgcgtccttcgaagagtgcggcacgcgaatattatacagctagttgaggtgtttgagacccaggaacgcgtatacatggtaatggagctggccacgggaggcgaattgtttgatagaattatcgcaaaaggcagcttcaccgagcgggacgccacccgggtactgcagatggtccttgacggcgtgagatatctgcacgcattaggcatcacacacagggatctgaaacctgagaacctgctctactatcatccaggaacagatagcaaaattattattactgacttcggccttgcctcggccagaaagaaaggcgacgattgtttgatgaagaccacttgtgggacccctgagtatattgctcctgaggttttggtgaggaagccttatactaatagtgtggacatgtgggccttaggcgtcatcgcatacattcttcttagcggtaccatgccatttgaggatgataataggacaaggctctatcggcagatcctaaggggtaagtacagctacagcggcgagccctggccatctgtgtccaatcttgccaaagattttatcgatcgtttgcttaccgttgaccctggagcaaggatgaccgccctccaggcactgcgccatccctgggtggtttccatggccgcatcatcttctatgaagaacctacacaggagcatctcgcagaatctgttgaaacgggccagtagtaggtgtcagtccacaaagtcagcccagagtactcgatctagcaggtcaacccgatctaataaatctaggcgagtgagggaaagggaacttcgcgagctgaacctcaggtatcagcagcagtacaacggttag

SEQ ID NO: 201636 - DNA, 1953 bp, synthetic construct
  misc_feature 1..1953: note = Description of Artificial Sequence: Synthetic coding sequence
  source 1..1953: mol_type = other DNA
atggcctgccgggagttcgagatgggccggaagaagtgcgagcggtattggcctttatatggcgaagatcctattaccttcgccccttttaagatctcttgtgaggatgagcaggcccgcacagattattttataagaactctcttgttagaattccagaacgaaagtcgacgcctttaccagtttcactacgtaaattggccagaccacgacgtccccagctcttttgacagcatactagatatgatctcactgatgcgcaagtaccaggaacacgaagacgtgcccatttgtatacactgctcagctggctgtggaagaactggcgcgatatgcgccatcgattatacctggaacttgctaaaggccggaaaaattccagaagagttcaatgtgttcaacctgatccaggaaatgcgcacccagaggcattccgccgtacaaactaaggagcagtatgagctggtgcacagagctattgcccagcttttcgaaaagcaactccagctatacgaaatccatggggctcaaaaaattgctgatggagtcaacgaaattaatactgaaaatatggtgagctctattgaaccggagaagcaggactcccctcctcccaaaccccccagaacccgatcctgcctggtggaaggagatgccaaggaggaaatattgcaaccacctgagccccacccagtgcccccaatactcaccccgagccccccatcagcttttccgaccgtgacaactgtgtggcaggacaatgatagataccaccccaagcccgtcttacatatggtgagtagtgaacagcattccgcagacctaaacaggaattactcaaaaagtacagagcttccgggcaagaacgagtcaacaatcgaacagattgacaagaaactggagaggaatctgtccttcgagattaagaaggtcccactgcaggaaggacccaaatctttcgatggaaacactctgctgaatcgcggccacgcaattaaaatcaaatctgctagtccatgcattgccgataagattagtaagcctcaggaactctctagcgacctgaatgtgggggatacctcccaaaactcttgtgtggattgctccgtaacccagtctaataaggtgtctgtcacacccccagaggaatcacagaactcagatacccccccgcggcctgaccgtctcccattggatgagaagggccatgtcacctggtcttttcacggacctgagaatgccatacctatccctgatctgtctgaaggcaattcctccgatataaattatcagacaagaaaaaccgtatctctcacaccttctcccacaacacaggtggagacccccgacctcgtcgaccacgataatactagcccccttttccggacccctctgtcatttactaatcctctacacagcgatgatagtgatagtgacgagcgaaacagcgatggggctgtgacccagaataagaccaacattagcacagcgagcgcaacagtctctgcagctacctcgactgagtctatttccacccgaaaggtcctgccaatgtccattgcaagacataatatcgcaggcaccacccactcaggcgccgagaaggatgttgacgtctctgaagactcgccaccccccctgcctgagcggacccccgagtcattcgtgctggctagcgagcacaatacccccgtgagatccgagtggtcagaattacagagccaggaacgaagcgagcagaagaagagcgagggcctcatcacatctgagaatgaaaagtgtgaccaccctgccggtggtatccattacgagatgtgcattgagtgcccaccgacattttctgacaagagagagcagatcagcgagaatcccaccgaggcaaccgacatcggttttgggaacagatgcggcaagcctaagggacctagagacccccctagtgaatggacatag

SEQ ID NO: 201637 - DNA, 1062 bp, synthetic construct
  misc_feature 1..1062: note = Description of Artificial Sequence: Synthetic coding sequence
  source 1..1062: mol_type = other DNA
atgagccggagcctggacagcgcccggagcttcctggagcggctggaagctaggggtggtcgggagggggccgtacttgccggagagttcagcaagcggtgcgagcgctactgggcccaggagcaagaaccattgcagacaggactgttctgcattaccctgatcaaagaaaaatggttgaatgaggacataatgctccggacccttaaggttacatttcagaaagagtctagatctgtttaccaactgcagtacatgagctggcctgaccgtggagttccaagctctcctgaccacatgctggcgatggtcgaggaggcaagacgactgcagggcagcggccctgaacccctttgtgtacattgcagcgctggatgtggacggacaggcgtcttatgcactgtcgattatgtcaggcagttgctgttaacacagatgattccacccgactttagcttgtttgacgtggtgcttaagatgcggaagcagcggcccgccgccgtgcagactgaggagcagtacaggtttctctaccacaccgtcgcacagatgttttgctctaccctgcagaacgccagcccccattatcagaacatcaaagagaactgcgctcctctatatgacgacgcattgtttctgcgcaccccccaggcccttcttgccatcccacgcccaccaggcggggtgctgcgctcgatctccgtgcctggcagcccagggcacgctatggctgatacgtacgccgttgtacaaaagcggggcgccccagccggagctgggagcggtacgcagacaggaacagggacaggcactggcgccaggtcagctgaagaggccccgctgtattcgaaggtaacaccccgcgcccaacggcccggagcccacgctgaagatgccaggggaacccttcccgggcgggttcccgcagatcagtctccggctgggtccggagcctatgaggacgtcgctggtggcgcacagaccgggggactgggcttcaacctccggattgggagaccaaaagggccccgcgaccccccagccgagtggacacgggtgtag

SEQ ID NO: 201638 - DNA, 1233 bp, synthetic construct
  misc_feature 1..1233: note = Description of Artificial Sequence: Synthetic coding sequence
  source 1..1233: mol_type = other DNA
atgcccaccaccatcgagcgggagttcgaggagctggacacccagcgaaggtggcagcccctgtacttggagattaggaatgagtcgcacgattacccccaccgtgtggctaagttcccagagaatagaaataggaataggtaccgagacgtgtctccatatgaccattcgagagtgaagcttcagaatgcagaaaatgactacattaacgccagcctcgtcgatatagaggaagcccagagaagttacatcttaacccaggggccattgcccaatacctgctgccacttctggctgatggtgtggcaacagaagacaaaggcggttgtgatgcttaacaggatcgtggaaaaggagtctgtgaagtgcgcgcagtattggccaaccgatgaccaggagatgctgtttaaagaaaccggtttcagtgtgaagcttctgtcagaggacgttaagtcttactacaccgtgcaccttctgcaactggaaaatatcaattacatcgaaaacctgtggatcactctctacttgaagttgctgatgctcgacgtcaaacgcagcctcaagtctggagaaactcggaccatttcacatttccactatacaacctggcctgattttggggtgcccgagagtcccgcctcctttctgaatttcttgtttaaagtgcgggagagcggatctctaaatccggaccacgggccggctgttattcattgttccgccggtatcggccgcagtgggaccttcagcctagtggatacctgccttgtgttaatggagaaaggtgacgatatcaacatcaaacaagtccttttaaatatgcggaagtatcggatgggattaatacagacaccagaccaattgaggttcagctatatggccattattgaaggggctaagtgcatcaaaggagacagcagcatacagaaacgttggaaagagttgagcaaggaagacctgagcccagcattcgatcactccccaaacaaaattatgaccgaaaaatacaacgggaataggattggtttagaggaggagaagctcacgggtgatagatgtaccggactaagctccaaaatgcaggatactatggaggagaattctgaatcagctctccgcaagcggattcgcgaagatagaaaggccaccactgcacagaaagtgcagcagatgaaacagcgattgaacgagaacgagaggaagaggaaacggccccgcctgaccgacacatag

SEQ ID NO: 201639 - DNA, 2259 bp, synthetic construct
  misc_feature 1..2259: note = Description of Artificial Sequence: Synthetic coding sequence
  source 1..2259: mol_type = other DNA
atggaccagcgggagatcctgcagaagttcctggacgaggcccagtcgaagaagataaccaaggaagagtttgccaatgagttcctcaaactgaaacgacagagtactaagtataaggctgacaagacgtatcctacaactgtggctgagaaaccaaaaaacatcaagaaaaatcggtacaaagacattctgccgtacgattacagccgggttgagctctcccttattacatctgatgaggactcatcctatatcaatgccaatttcattaaaggcgtgtacgggccaaaggcctatattgccactcagggccccctgagcactacactgctggacttttggcgcatgatatgggaatacagtgtactgatcattgtaatggcctgcatggagtacgaaatgggaaaaaaaaagtgtgaaagatattgggctgagcccggtgagatgcaactcgagttcggcccattttcggtgagctgcgaggccgagaaaagaaaaagcgattatatcattcgcacccttaaagtgaagttcaattccgaaactcgcactatctaccagttccactataaaaattggcccgaccacgacgtaccctcttctatcgaccccattctggagctcatttgggatgttagatgctatcaggaagatgactcggtccctatctgcatacactgctcagcgggctgtggcagaacaggtgtcatctgcgcaatcgactatacctggatgttactgaaggatggatcccaggccaaacattgcatccctgagaagaatcacactctgcaggctgacagctactcacctaatctacctaaatccactaccaaagctgctaagatgatgaatcagcaaagaacgaaaatggagataaaggagtcttctagcttcgattttaggactagtgagatctccgccaaggaggaactggtgcttcacccggccaaatctagtacgtcttttgactttctggagctcaactacagttttgacaaaaatgccgacaccactatgaaatggcagaccaaagcgtttcctatcgtgggggaaccactgcagaagcatcagtcacttgaccttggatcactgctttttgaggggtgttcaaactccaagccagtgaacgctgccgggagatatttcaacagcaaggtgcccattactaggactaagtctacaccttttgagctgattcagcagcgcgaaacaaaagaggtggatagtaaagaaaatttctcttatctggaatcacagcctcatgactcttgcttcgtggaaatgcaggcacagaaggtgatgcacgtcagttccgccgagctcaattattcacttccctatgattctaaacaccagattaggaacgcatccaacgtcaagcatcacgactcttccgcgctgggcgtgtactcatatatccccctcgtggagaacccctacttcagctcctggccccccagcggcaccagttccaagatgagtctggacctccccgagaagcaggacgggactgttttcccttcctcactcctccccacctcatccaccagtttgttctcttattacaacagccatgatagcctcagtcttaactccccgaccaatatctccagtctgctgaaccaggagtctgctgtgcttgcaaccgctcctagaatcgatgatgagattcccccacccctacccgtgtggacccctgagtctttcatcgttgtggaggaggccggggagttctctccgaatgtgcctaaaagtctgtcctccgcagtgaaagtcaagatcgggaccagcctagagtggggagggaccagcgaaccgaagaagtttgacgattcagtgatcctaaggccttctaaaagtgttaaattgcgcagcccgaagtctgagctgcaccaggatagatctagtccgcctccgcccttgcccgagcgcactctggaatcatttttcctggcagacgaggactgtatgcaagcgcaatccatcgaaacatattcgacatcttaccctgatacaatggagaatagcacttccagcaagcagacgttgaaaacaccgggaaagagttttactcgctctaagtccctcaagatactgcgaaacatgaagaagagcatttgcaacagttgtccacccaacaagcctgctgagtcagtccagtcaaacaacagctcatccttcctgaactttggctttgccaaccggttcagtaagccaaaaggcccacgcaaccccccaccaacttggaacatatag

SEQ ID NO: 201640 - DNA, 5724 bp, synthetic construct
  misc_feature 1..5724: note = Description of Artificial Sequence: Synthetic coding sequence
  source 1..5724: mol_type = other DNA
atgctgagccacggcgccggcctggccctgtggatcaccctgagcctgctacagaccggcctcgctgagccggagcgttgtaacttcactctggccgaatccaaggcctcgtcacatagcgtgtctatacagtggcgcatattggggtctccatgcaacttttccctgatctacagctctgacaccctcggtgctgcactgtgtcccaccttccgtattgacaacactacatacggatgtaaccttcaggacctgcaggcgggaaccatttacaatttcagaatcattagtcttgatgaagaacgcaccgtcgtactccaaactgaccccctcccacccgcgaggtttggcgtcagtaaagaaaaaaccacctctacatctctgcatgtgtggtggaccccatcctctggaaaggtgaccagctacgaggtccagctgttcgacgagaataaccagaagattcaaggggtccaaatccaggagtccacatcttggaacgaatacacttttttcaacctcactgccggatccaagtacaatattgcaataacggcggtctccggaggcaaaaggtccttctcagtctatactaacggctctaccgtcccctctccagtgaaggacatcggcatttccactaaggccaactctcttctcatctcttggagccatggttccggcaatgtggaacggtatcgtctgatgcttatggataaaggcattcttgtgcacggcggcgtggtggacaagcatgcgactagctatgccttccacggcctgacacctgggtatttgtacaatctcacagttatgactgaggctgccggattgcagaattaccggtggaagctggttcgcaccgcccccatggaagtgtctaacctgaaggtcaccaacgatgggtccttaacctccctcaaagtgaaatggcagaggcctccaggaaacgtggatagctataatataaccctgtcacacaagggcactatcaaggaaagccgagtgctggccccctggatcacagagactcacttcaaggagctagtccccgggcggctgtatcaggtcacagtctcctgcgtgtcaggcgaactgagtgcacagaaaatggccgtcgggagaacctttcccgataaggtggcaaatcttgaggctaacaacaacggcagaatgcggagtctcgtcgtatcatggtcaccccctgctggggactgggagcagtacagaattctgttgtttaacgattccgtcgtgctcctgaacattactgtgggcaaagaagagacgcagtacgtgatggatgacacgggcctcgtccctggtcgacaatatgaggtggaagtgatcgtcgaatccgggaacctgaaaaactccgaacgttgtcagggcagaacggtcccgcttgccgtccttcaattgcgtgttaaacacgccaatgaaacctcgctgagtatcatgtggcaaaccccagttgctgagtgggagaagtatatcatctccctcgccgatagagacttgctgctgattcacaagagcctgagcaaagacgctaaagagttcactttcacagacctggttcctggccgaaagtatatggccacagtaacatccatcagcggggatttgaagaactcgagctctgttaaaggtcgcaccgttccggcacaggtgaccgacctgcacgttgccaatcagggtatgactagctcacttttcaccaactggacgcaggctcagggagatgtggagttctaccaagtcctcttaatacatgaaaacgtcgtcatcaaaaacgagtctatctccagcgagacctcaaggtacagttttcattcactgaaatctggcagcctctactctgttgttgtaaccacagttagtggtggaataagctcacggcaagtggtggtggagggtagaacagtgccgagtagcgtgtccggcgtgaccgtcaataattcaggccggaacgattacctgtctgttagctggctcctggctcctggggacgttgacaattacgaagtgacactgtcacatgacggcaaagtggtgcaatccctagttatagcgaagtccgttagggagtgctcattttcttccttgacccctggacgtttgtatactgtgacaatcactactcgctccggaaaatatgagaatcactctttttctcaggagcgaacggtgccagataaggtgcagggagttagtgtcagtaactccgctagaagtgactatttgcgcgtgtcctgggtgcacgctactggtgacttcgatcactatgaggttacaatcaaaaacaagaataactttattcagactaagagtataccaaaatcagagaatgagtgcgtctttgtgcagttggtgcccggccggttgtattccgtgacagttactacaaagtcgggacagtacgaggcaaacgagcagggcaatggaagaaccataccggagccggtaaaagaccttacgttgcgaaacagatctaccgaagatctgcacgtgacctggtccggagccaatggagatgtcgaccaatatgaaatccagttgctctttaatgacatgaaggtgttcccgccatttcatttggtgaacaccgctactgagtatcgtttcacaagtctgacaccgggtcgacagtataaaatccttgttctcacaatctctggtgacgttcaacagtccgcttttatcgagggatttaccgttccaagtgctgtcaaaaacatccacataagtccaaacggagctacagactccctgaccgtgaattggacccccggagggggcgatgtcgactcctacaccgtgtcagcttttcggcatagccaaaaggttgacagccagacaatcccaaagcacgtgttcgagcatacgttccacaggctggaagctggggagcagtaccagattatgatcgcctcagtgtccgggtccctgaaaaaccagatcaacgtcgtgggacggacagttccagcagccgtgaccgacctcagaatcactgagaattctacacggcatttgtcgtttaggtggaccgcaagcgagggagagctctcgtggtataacattttcttatataaccccgacggcaacctgcaggagagagcacaggtggacccgttggtccagtcattcagcttccaaaacctgttacaggggcgtatgtacaaaatggttattgtcacgcacagcggagagcttagcaacgaaagctttatcttcggcagaacagtgcctgcctcggtcagccatctcagagggtcaaataggaatactacagatagtctgtggttcaactggagccctgcaagcggggatttcgatttctatgaactcatcctgtataatcctaacggaacaaagaaagagaactggaaagataaagacctgaccgagtggagattccagggattggtccccggacgcaagtacgtactctgggtagtaacccacagcggtgacctgtctaacaaggtgactgccgaatcgaggacggcaccgtccccgccaagtctgatgagttttgcagacatcgccaacacctccttggccatcacctggaaggggcctcctgactggactgactacaacgattttgagttacaatggctgccacgcgatgctcttacagtttttaatccatacaataatcggaagtccgaagggcgaatagtatatggcttgagacctggtcggtcctaccaatttaatgttaaaactgtttctggggacagttggaagacttactctaagcctatcttcggcagcgtcaggactaagcccgataagatccaaaatctccattgtcgtccacagaacagtactgccattgcctgcagttggatcccccccgatagtgactttgacggctactccatagagtgtcgcaaaatggacacccaggaggtggaattttcacgtaagctggaaaaggaaaagagccttctaaatataatgatgctcgtcccacataagcgctacctggtgtctattaaagtccaaagcgctggcatgacttcggaagtcgtggaagattctactataacaatgatcgatcgtccgcctcctccgcctccacatatacgggtcaacgagaaggatgtgctaatctcgaagtcaagtatcaactttacggttaattgttcctggtttagcgacactaacggtgctgtgaagtatttcactgtggtcgtgagagaggccgacggatctgatgagctgaagcctgagcagcaacaccctttgccatcctatcttgaatatcggcataacgctagcattagggtctatcaaaccaactacttcgcatctaaatgcgcagagaacccaaatagcaacagtaaatcatttaacattaagctgggagccgagatggagtcattgggtggcaagtgcgatcccacccagcagaagttctgtgatgggccactcaaaccccacacagcttacagaatttctattagagccttcactcagctctttgatgaagacttgaaagagttcactaagcctctctatagcgacacattcttctcgcttcctatcacgaccgaaagcgaacccctctttggagccattgagggcgtgtcagccggcctgttcctgattggtatgctggtggcagtggtcgcgttgctaatttgccgacaaaaagtctcccatgggagggaaaggccctccgcgcgcctgtcaatccgacgtgaccggccactgtccgtacacctcaatttaggtcaaaagggcaacaggaaaacgagttgcccgattaagatcaaccagtttgaagggcactttatgaagctgcaggctgattccaactatcttctcagtaaggagtacgaggaactcaaggacgtcggaaggaaccagagttgcgatatcgcccttctcccggaaaatagaggcaaaaatagatacaacaacatcttgccttacgacgcgactcgggtcaagttgtctaatgttgatgatgacccgtgttcagattacatcaacgcctcctacattcctgggaataatttcaggcgtgaatacatcgtcacgcagggtcccctcccaggcactaaagacgatttttggaaaatggtctgggagcaaaacgtgcataatatagtgatggtcacacagtgtgtggagaagggtagggttaagtgtgatcactactggccagcagatcaggattccctttattacggggacctgattcttcaaatgttgtcggaatcagttctgcccgagtggaccattagggaattcaagatctgtggggaggaacagttggatgcccatagactgatccggcacttccattatactgtctggcctgatcacggtgtccccgagacaacccagtccctgatccagttcgtccggaccgtgagggattatatcaatcgtagccccggggcgggtcccacagtagttcattgcagcgcaggcgtggggcgtaccggaacttttatagctctcgaccgcatccttcagcaactcgactctaaggactccgtggatatatacggagccgtgcacgatctacggctgcaccgggtccatatggtgcagaccgaatgccagtatgtctatcttcaccaatgcgtacgggatgtgttaagggcaaggaaacttcgcagcgaacaggaaaacccgctctttccaatttacgaaaacgtcaacccagagtatcatcgcgatcccgtctactcccggcactag

SEQ ID NO: 201641 - DNA, 4518 bp, synthetic construct
  misc_feature 1..4518: note = Description of Artificial Sequence: Synthetic coding sequence
  source 1..4518: mol_type = other DNA
atggtgcacgtggcccggctgctgctgctgctgctgaccttcttccttaggacggatgctgagaccccaccacggtttactcgaaccccagtggaccaaaccggcgtcagcggtggggttgcaagtttcatttgtcaggccacaggggacccacgacctaaaatcgtgtggaacaagaagggaaaaaaagtctcaaatcagaggtttgaggtcatagagtttgatgatggatcaggttccgtcctccggatccagccacttcgcacaccccgtgatgaagccatctacgagtgtgtcgccagcaacaatgtgggcgagatctcagtcagcaccaggctaacggtgctgcgagaggatcagatcccacgcggatttcctacaatcgatatggggccacagctgaaggttgtagagaggacacgaaccgcaaccatgctgtgcgcggcgtcaggaaatccagaccccgaaatcacttggttcaaggacttcctgcctgtagacactagtaataacaatggcagaatcaaacagctcagatcggaaagtatcggtgcattgcagatcgagcagtcggaagagagcgatcaagggaaatacgagtgcgtggctaccaacagtgctggcacaaggtattccgctcctgccaacttgtatgtgagagtacgcagggtgccacccaggttttccatcccgccaaccaatcatgagataatgcctgggggtagcgtgaatataacctgtgtagccgtgggtagcccaatgccttatgttaaatggatgttgggtgctgaggatctgacacctgaggacgatatgcccatcggaaggaatgtgctcgagctgaacgatgtgcgtcagagtgctaattatacttgcgttgcaatgtcaactctcggcgtgatagaggcgatagctcagatcaccgtcaaagctcttcctaagccacctggcacccccgtagtcaccgagagtactgcaactagtattacgctgacctgggatagcggaaaccctgagccggtgagttactatattatccagcacaaaccaaagaacagcgaggagctctacaaggaaatagacggcgtcgccacaacacgctactcggttgccggcttgtcaccttacagtgattacgaattcagggtggtggctgtaaacaatattggccgggggccaccatctgagcccgtattgacccagacgtcagaacaggctccaagtagcgcacctagggacgttcaggcgaggatgctttcctctacgaccatcctggtgcagtggaaggaaccagaggagcccaatggccagattcaagggtacagagtgtactatacaatggacccaacacagcatgtaaataactggatgaaacataatgttgctgattctcagatcactactatcggcaacctagtaccacagaaaacctacagtgtcaaggtgctggcatttacgagcataggtgacgggcctctgtcatctgatatccaggtgatcacccagaccggtgtcccagggcaaccattgaacttcaaggcggagcccgagtccgagacttccatcctcctgtcctggacacctcctcgatccgatacaattgcaaactatgaactagtttataaagacggcgagcacggtgaggaacagagaatcaccattgaacccggcacttcctaccgtctgcagggtcttaagccaaactctctctattacttcaggctggcagccaggtcacctcagggactcggagccagcacagccgaaataagtgcacggactatgcagtcgatgttcgccaagaacttccatgtcaaggcagtgatgaaaacgtccgttcttctgtcttgggagatccccgagaattataacagtgccatgcccttcaaaatactgtatgacgatggtaagatggtggaggaagtggatggtagggccacccagaaacttattgtcaatttgaagcccgagaaatcctacagtttcgtcttgactaaccggggcaacagcgccgggggtctgcaacaccgcgtgacagccaagaccgctcctgacgttctgcggactaaacctgcctttatcggtaagaccaatctggacggaatgatcactgtgcaactcccagaagtgccagcaaacgaaaacatcaagggatactatataattattgtgcccctcaaaaagtccaggggaaaattcatcaagccctgggaaagccctgacgagatggagctggatgagctgctcaaggagatttcgcggaaacgccggtcaattagatatgggcgggaggtcgagttaaaaccatacatcgcagctcacttcgacgtgctgcctaccgagtttacactcggggatgataaacactatggcgggttcaccaataaacaactccagagtggccaggagtatgtgttctttgtgctggctgtgatggagcatgcagagtctaagatgtacgccacttccccctacagtgacccagtagtaagcatggatctagacccccagcctataaccgacgaggaggaaggcttaatttgggtggtcggcccggtactggctgtggtttttattatctgcattgtgatcgctatcctactctataagcggaaacgggccgagtctgatagtcggaaaagtagtattcctaataataaggagattccttcacaccaccccaccgaccccgtcgaactgaggcgcttaaacttccagacgcctgggtctgatgacagcggctaccccgggaatctccactcctcttccatggcatcccaccctcctatcccaattctcgaactagccgaccacatcgagcgccttaaggcgaatgacaacctgaaattcagtcaggaatacgagtctatcgatccgggacagcagtttacatgggaacactccaatctggaggtcaataaacccaagaaccgttacgccaacgtgatagcctatgaccacagtcgcgtgctgctctcggccatcgagggtatacccgggagtgactatgtcaacgccaactacatcgatggttaccggaagcagaatgcttacattgccacgcaggggagcctgcctgagactttcggagatttttggcggatgatctgggagcagaggtcagcaacagtagtcatgatgaccaaactggaggaacggtccagagtgaaatgcgaccagtattggccatcacgggggaccgaaactcatggtttggttcaggtcacacttctggatactgtggagctcgctacatactgtgtgcgaacgttcgctctgtacaagaatgggtcaagcgaaaagcgggaggtacgccagtttcagtttacagcatggcccgaccatggggtgccagagcatcccacacccttccttgccttcctacgacgagtaaagacctgtaacccccccgacgcagggcccatggtagtccattgcagcgcgggggtgggacggacgggttgctttatagtaatagatgctatgttagagaggattaaacacgaaaagaccgttgacatctacgggcacgtcactctcatgcgagcacagagaaattacatggtgcagacagaggaccagtacatcttcatccacgatgctctcttggaagctgtaacatgcggcaacaccgaggtgccagcccgtaacctgtatgcctacattcagaaacttacgcagatcgagacaggggagaacgtaacaggtatggaacttgagtttaaaaggctggcaagctccaaggctcatacctctagatttataagtgccaatctcccttgtaataagttcaagaatcgtctcgtaaatatcatgccatacgaaagtactcgagtgtgcttgcagccaatccggggagttgaaggaagtgattatattaacgcctcctttattgacggctatcgtcagcagaaagcctacatagccacccaaggtcccctggccgaaacgaccgaagacttctggcggatgctctgggaacataacagcaccattgttgtgatgctcactaaactccgagagatgggaagggaaaaatgccaccagtattggcccgcggagcgctccgcccggtaccagtatttcgtcgttgatcctatggctgagtacaatatgcctcagtacatcttaagagagttcaaagtgacagatgcgcgcgatggacagagcaggacagtgagacagttccagtttactgattggcccgaacagggcgtgcccaagagcggagaaggatttatagacttcatcggtcaagtgcacaagactaaagaacaattcgggcaagacggccctatctctgtgcattgttctgcaggagtgggccgcaccggtgtttttatcactctgtcaatcgttctggagagaatgcgctacgagggggttgtggatatctttcagacagtgaagatgttgagaacacagaggcccgcgatggtacagaccgaggaccagtatcaattctcatatcgcgctgctttggaatatctcggctcttttgatcattacgccacctag

SEQ ID NO: 201642 - DNA, 4398 bp, synthetic construct
  misc_feature 1..4398: note = Description of Artificial Sequence: Synthetic coding sequence
  source 1..4398: mol_type = other DNA
atgcggggcctgggcacctgcctggccaccctggccggcctgctgctgacagctgctggcgagacattctccggcgggtgtctctttgatgaaccgtatagtacatgcggctattcacagtccgagggggacgactttaactgggagcaggtcaacaccctgacaaaaccaacatccgatccttggatgccttccggaagttttatgctcgtaaatgctagcggcagaccagagggtcagcgagctcacctgctcctcccacagctgaaagaaaacgacactcattgtatcgattttcattactttgtatcaagtaaatcgaactcacctccaggcctcttgaatgtctatgtgaaagtcaataatgggcctctgggcaacccaatctggaatatcagcggggatcccactcggacttggaatagggccgagctggctatttctaccttctggcctaacttctaccaggtgattttcgaagtcattacttccggacatcagggatatcttgccattgatgaagtcaaggtcctgggacatccatgtactcgcacaccccactttctccgcatccagaacgttgaggtcaacgctggtcaattcgctacattccagtgttcagccataggaagaacagtggccggagatcgcctgtggctacaaggaatcgacgtccgcgacgcccctttaaaagagataaaggttacaagcagcagaagatttattgccagttttaacgtggtgaatactactaagcgggacgctggaaagtaccgctgtatgattcggaccgaaggaggggtgggcatctcgaactatgctgagctagtggtcaaggagccacctgtgcccattgcccctccccagttggcgtctgtgggagccacatatctgtggatccagcttaatgccaatagcattaacggcgacgggccaattgtcgcaagggaggtggaatactgtaccgcctcagggtcttggaacgacagacaacctgtggattccacatcatacaagataggtcatcttgatccggacacagaatacgagattagcgtgttgttaacaaggccaggggaaggcgggaccgggtctcctggacctgctcttagaacgagaaccaaatgtgccgacccgatgcgcgggccgagaaagctcgaggtggtcgaggtcaagtctcgacaaatcacaattaggtgggagcccttcggctacaatgtgaccaggtgccactcttataatctaacagttcactattgctatcaagtgggtggacaggaacaggttagggaagaggtctcctgggataccgagaactcacaccctcagcataccatcactaacctatctccatacacaaatgtgagtgttaagttgatcctaatgaacccagagggccgcaaggagtcgcaggagctaattgtacagactgatgaagacttgcccggcgccgtcccaaccgagtccattcaggggtctactttcgaagaaaagatattccttcaatggcgagagcccacacagacatacggcgtgatcaccctgtacgaaattacatataaagctgtctctagctttgaccccgaaattgatctgtcaaaccagagtgggcgagtaagcaaactggggaatgaaacgcattttttgttctttggactctacccaggcaccacgtacagcttcacaatacgcgccagcacggccaaaggctttggacctcctgcgacgaatcagtttaccaccaagatcagcgcaccgtcaatgcccgcatacgagctggagacgccactcaaccagacagacaatactgtcacggtaatgctcaagccagctcattccaggggcgccccagtgtccgtctatcagattgttgtcgaagaagaacggcctcgtcggactaaaaaaactacagagattctcaagtgctaccctgtgcctatccactttcagaacgcctccctcctgaacagtcaatattattttgccgccgagtttcctgcagactccctccaggcggctcagccattcacgatcggggacaataagacgtataacggatattggaatacacctttgcttccatacaagtcataccgcatctactttcaggccgccagcagagccaatggagagacgaagattgattgcgtgcaggtcgccacgaagggggcagcgaccccaaagcctgtcccagagcctgaaaaacagacagaccataccgtcaaaattgcgggcgtaattgctgggatcttgctcttcgtgattatcttcctcggggtagtgcttgtaatgaaaaagagaaagctcgccaaaaagcgcaaggagacaatgtcatccacaagacaggaaatgacagtgatggtaaatagtatggacaaatcatatgcagagcaggggaccaactgcgatgaggcctttagtttcatggacactcacaatctgaatggtaggtccgtctcgtctccctcctcatttacaatgaagacaaatactctgtccacgagtgtccctaactcgtactaccccgacccctttgtgcccaccgctatcctggtcccaattaacgatgaaacacacacgatggcctcggacacatcatctctggtgcagtctcacacatataaaaagcgcgaacctgctgacgtgccctatcaaaccgggcagctacatcccgccatacgtgtggctgatctgctgcagcatatcactcagatgaagtgtgccgaaggttacggcttcaaggaagaatatgagtcatttttcgagggacaatccgctccctgggactcggccaaaaaggatgagaacagaatgaaaaatagatatggtaacatcatcgcctacgatcactcaagggtgcgactgcagacgatcgaaggagacactaattccgactacattaacggaaattatatcgatggataccatcgtcccaaccactatattgctacgcagggcccgatgcaggaaacgatttacgatttctggcggatggtgtggcacgaaaacacagcctccattatcatggtgactaatctggtcgaggtcggtcgtgtgaagtgttgtaagtactggcccgatgataccgaaatatataaggatatcaaagtgactctgattgaaaccgaactcttggcagagtacgtaatccggacgttcgcggtggagaaaaggggcgtgcatgaaatcagagagataagacagtttcatttcactgggtggcctgaccacggtgtgccctaccacgcaaccggcctactgggcttcgtaagacaggtcaagtctaaatctccccctagtgccggccctttggttgtccactgttcggctggcgcaggcagaacgggctgtttcatcgtgattgatataatgctcgatatggccgagagggagggagtggtcgatatttacaattgtgtgagggagcttcgaagccggagggtgaacatggtgcagaccgaggaacagtacgtgtttattcatgatgcaatcctagaggcttgtctctgtggcgacacctccgtccccgcaagtcaagttaggagcctgtactacgatatgaataagctcgaccctcaaaccaactcttctcaaatcaaagaggagttcagaactctcaacatggtgactcctacgcttcgcgtggaagattgcagcatcgcacttctgccaaggaaccacgagaagaaccgatgcatggatattctgccgcccgaccgctgtctaccttttctgattaccattgacggggagtcttcaaattatatcaatgccgctttgatggactcctataagcaaccttctgcctttatagtcacacagcaccctctgcccaacaccgtcaaggatttctggcgtcttgtgttggactaccactgcacatctgtcgtaatgctcaacgacgtggatcctgctcagctctgcccccagtattggcctgagaatggagtacaccgacacggtccaattcaagtggagtttgtgagtgctgaccttgaagaggacatcataagccggatctttcggatttataatgccgctagaccccaagatgggtacaggatggtgcagcagttccaatttctgggttggcctatgtacagagatacacctgtgtctaaaagaagcttcctgaaattgattaggcaggtcgacaagtggcaggaagaatacaatggtggcgagggcagaactgttgtacattgtcttaacggcggcggccgctcgggtacattctgtgcgattagcatcgtatgtgagatgcttagacatcagcgaacagtggacgttttccacgcagtgaaaacactgaggaacaataagccgaatatggtggacctccttgaccagtataagttttgttatgaggtcgccctggagtacctgaattctggttag

SEQ ID NO: 201643 - DNA, 4323 bp, synthetic construct
  misc_feature 1..4323: note = Description of Artificial Sequence: Synthetic coding sequence
  source 1..4323: mol_type = other DNA
atggcccgggcccaggccctggtgctggccctgaccttccagctgtgcgcgccagagaccgaaacacccgctgccggatgtaccttcgaggaagccagtgatccagctgtgccttgtgaatatagccaggcacagtacgacgacttccagtgggaacaggtgcggatccatcccggtaccagggcacccgccgatctgcctcatggaagctatctgatggtgaataccagtcagcatgctccaggacagcgcgcacacgttatttttcagagcctatccgaaaacgatacccactgcgtccaattttcttattttttatacagcagggacggccatagccccggaaccttaggcgtttatgtacgagtaaatggaggccctctcggctcagccgtctggaacatgacaggaagtcatggtcgacagtggcaccaggcggagcttgccgtgagtacattctggcccaatgagtaccaggtgctgtttgaggctctgatcagcccagatcgccgtggctacatggggctggacgatatcttactcctgagctacccatgcgctaaggccccacacttttcacggctgggcgatgttgaagttaacgccgggcagaatgcctctttccagtgcatggctgccggacgagccgccgaggccgagcgcttcctcctgcaacgccagagtggagccctggtgcctgccgcaggggtgagacacatctcccatagacgattcttggccacgtttcccctggcagccgtaagccgggccgagcaagatctgtaccgttgcgtttcccaggcaccacgtggagccggcgtttctaatttcgcggagttaatcgtgaaagagcctccaacacccatagctccacctcaactcctgcgggctggccccacatatttgataattcaattgaacaccaattcaattattggtgacggccccatagtcaggaaagaaatcgaataccgcatggcacgcggaccatgggcagaagtgcacgctgtctccctgcagacatacaaactatggcacctggatcccgacaccgaatacgaaatcagcgtactacttacacggcccggtgacggtggtactggccgcccaggtccccccttaattagtcgtactaaatgcgcagagcctatgagagcacccaaaggattggccttcgccgaaattcaggccaggcagcttacactacagtgggagccgcttggctacaacgtgacacggtgtcacacctacactgtgtccctatgctatcattatacattgggttcttcccacaaccaaacgatccgcgaatgcgtgaagacagaacagggtgttagtcgttacaccataaagaatttacttccttatagaaacgtccatgtgcgattagtgctgacaaaccccgaggggaggaaggaagggaaagaagtgacgttccaaacagacgaggacgtcccttctggaatagccgcagagagtctcactttcacaccattggaagacatgattttcttgaagtgggaggaacctcaggaacccaatggtctgattacccaatatgaaatttcttatcagagtatcgagtcgagtgatcctgccgtgaatgtgcccggccccaggcgcaccattagcaagttgagaaacgaaacatatcacgtcttttctaacctgcatccgggaaccacatacttgttctcagtgcgggccaggacaggaaagggtttcggccaggcggccttgacagagattaccactaacatcagcgctcccagttttgattacgccgatatgccgtctccactcggcgagtcggaaaacacgattaccgtcctcctcaggcctgctcaggggagaggagcccccattagtgtgtatcaggttatcgtggaggaagaacgagccaggcgcttgcgccgcgagcctggcggtcaggactgttttcccgtgcccttgaccttcgaggccgctttggcacgaggtttggtacattatttcggggctgaattggccgcctcttctctgccagaggctatgccctttacagtgggcgacaaccaaacatacagagggttttggaatcctcccctggaaccccgaaaagcgtaccttatttacttccaggcagcaagccacctgaaaggcgagactcgtctgaattgtatccgaatagctaggaaggccgcgtgcaaagagagcaagagaccgctcgaggtctcacagaggtcagaggaaatggggctcatcctaggcatctgtgcaggagggttggccgtgctgatcttgttactcggtgccatcattgtaatcattcgtaaagggaaacctgttaacatgacaaaggccaccgtgaactaccgccaggagaagacccatatgatgtctgctgtcgacagaagctttactgaccaatccaccttgcaggaggatgagcgactggggctcagtttcatggacacccatggatattccacacgcggcgaccagcgttccggaggagtcaccgaggccagttccctcctcggcggttcaccccggagaccgtgcggtcgcaagggctccccataccatactggtcaactgcacccggctgtcagggtggccgacctgcttcagcacatcaaccagatgaaaactgcggaggggtatggatttaaacaagagtatgaatcctttttcgaggggtgggacgctacgaaaaagaaagacaaagtgaagggctcacgccaggagccaatgccagcttacgacaggcacagggtgaagctgcaccctatgcttggtgacccaaatgctgattatataaatgccaattatatcgacattcgaattaatcgggaaggctatcatcggtcaaaccacttcatcgcgacccagggaccaaagccggaaatggtgtatgatttttggcggatggtgtggcaagagcactgcagctcaatagtgatgatcacaaaattggtggaagtcggccgagttaagtgttcccgttactggcctgaggattctgatacttatggcgacatcaaaattatgttggtaaagacagagaccctggcagaatacgtggtcaggaccttcgctttagaacggcgcgggtactcagcacgccatgaggtacggcagtttcactttacggcatggcctgaacatggagttccttaccatgccacgggccttctggcgttcattcgcagggtcaaagcaagtactcctcccgacgctgggcctatcgttattcactgttccgccggcactggtcggactggctgctatatcgtcttagacgtaatgctggatatggccgagtgcgagggtgtcgtcgatatttataactgcgtgaagacactctgctccagacgcgtaaatatgattcagaccgaagaacagtacattttcatacatgacgctatcctggaagcctgcctttgcggcgagacgaccattccagtctccgaattcaaagctacctacaaagaaatgattcggatcgacccacagtcaaactcctcccagctcagagaagaatttcaaaccctcaattctgtcactcccccactcgacgttgaggaatgctctatcgctctgctgcctcgcaatcgagataaaaataggagcatggacgtgcttccccccgacaggtgtctgcctttcctcatctctaccgatggtgacagcaacaattacatcaatgcggccctcactgactcctatactaggtccgcggccttcatcgtgactctgcatccgctgcaaagtacaacgcctgacttttggaggctagtgtatgactacgggtgcaccagtattgtgatgcttaaccagttgaaccagtctaattccgcctggccctgcctacagtactggcctgagcctggaaggcaacagtacggattgatggaagtcgagtttatgagcggaactgcagatgaggacttagtagctagggtgtttcgggtccaaaacatttccagagaaggtcaccttctagtgcgccatttccaatttctcaggtggagcgcgtatagagatacacccgatagcaagaaggcctttctgcatctgctcgccgaagttgacaagtggcaggccgagtccggcgatggacgtacgatcgtacactgtctgaacggcggaggccggtcagggaccttctgtgcctgtgccaccgtgttggaaatgatcaggtgccataacttagtggacgtgttttttgccgctaagacactgcggaattataagcctaatatggtggaaactatggaccagtatcatttttgctatgacgtcgccctggagtatctggagggtctcgagtctcgctag

SEQ ID NO: 201644 - DNA, 4347 bp, synthetic construct
  misc_feature 1..4347: note = Description of Artificial Sequence: Synthetic coding sequence
  source 1..4347: mol_type = other DNA
atgcggatcctgaagcggttcctggcctgcatccagctgctgtgcgtttgccgtctggactgggccaatggctattaccggcagcagcgaaaactcgtggaagagattggctggagctataccggcgccctaaaccagaaaaattggggtaaaaagtaccccacctgcaacagcccgaaacagtcccctatcaatattgacgaggatttgacccaggttaacgtcaacctcaaaaagctgaagttccagggatgggataagacgtcactggaaaacacgttcattcacaatactggaaagacagtggaaatcaacctcacaaacgattaccgcgtgtccggcggagtttcggaaatggttttcaaggcctctaaaatcaccttccactgggggaagtgcaatatgtcgtcagacggctccgagcactcccttgaggggcagaagtttccactcgagatgcagatctactgcttcgatgcagaccgattcagttcctttgaggaagctgtgaagggcaaggggaaacttcgggcactgtccatcctatttgaagtgggcacggaggaaaaccttgacttcaaggccatcatcgacggagtagagtccgtgtcacggttcggcaaacaggcagcacttgacccctttatcctactcaatctgttgcccaactccactgacaaatactacatctacaatggttctctgactagtcctccttgcacagatacagtcgactggatcgtttttaaagacacagtgagcatttcggaatcccagctagcggttttttgtgaagttcttactatgcaacagtctgggtacgtaatgttaatggattacctccagaataattttagagagcagcagtacaagttctctaggcaggtgttcagctcctacaccggtaaggaggaaattcacgaagccgtttgttcaagcgagcccgagaatgtgcaggcagatccagaaaactatactagtctgttggttacttgggagcggccccgggtcgtatacgatactatgatcgaaaagttcgccgtgctctatcagcagctggatggggaagatcaaactaaacacgagtttcttacagatgggtaccaagatttaggcgccatcctcaacaacctacttccaaacatgagctatgtgctccaaatagttgcaatatgtaccaatggcctctacggaaagtatagcgaccagttgatagtcgatatgccgaccgacaatccggagctggatctatttcccgagctcataggtacagaggagatcatcaaggaagaggaagaaggcaaagacattgaggaaggggccattgtgaacccagggcgggacagtgcaaccaaccagattcggaaaaaggagccgcaaatctccaccacaacccattataacagaataggtactaaatataacgaggccaagacaaaccgaagccctacccggggcagtgaattttccgggaaaggggatgtcccaaacacttctttaaatagcacttcacaacctgtaactaagttagctacagagaaggacattagcctgacatcacagaccgtcacagagctccccccacacaccgtggaggggacctccgccagcctcaatgatggatcaaagactgttcttagaagcccccatatgaatctgagtgggaccgcagaaagcctcaataccgtgtccattaccgaatacgaggaagagtccttactgacatcgtttaagttggatacaggcgccgaggactcctcaggctcaagccctgcaacctccgccatcccgttcatctctgaaaacattagtcaggggtatatcttctcatcagagaaccctgagacgatcacatatgacgttctgatcccggaatcagctcgaaacgctagcgaagactctacctcttctggttcagaagaaagtttaaaggatccctccatggaaggaaatgtgtggttcccgtcatcaaccgatatcacagcgcaacctgacgtcggatccggtcgcgagagcttcctccagacaaactacacagagattcgggtagacgaatccgagaagactacaaagagcttcagcgcagggccggttatgtcccaaggcccctccgtgactgacttggagatgccacattattctaccttcgcttactttccaaccgaagttacaccccatgcatttactcccagctccagacagcaggatctggtgagcacagtaaatgtcgtgtatagccaaaccacacagcctgtgtacaatgaagccagcaattcatcgcacgaaagtcggatcggactggccgagggcttagagtctgagaaaaaagcggttatcccactggtgattgtcagcgccctgaccttcatctgtctggtggtcctggtcggaatcctgatttactggaggaagtgtttccaaactgcacatttctatttagaggactccacctcaccaagggtaatcagcacccctcccactcccatctttccaatcagtgatgacgtgggagcgattcccatcaaacactttcccaaacatgtcgcagatttgcacgcatcatccggctttaccgaggagttcgaagaagtgcagtcttgcaccgtcgacctgggcattaccgccgatagcagcaatcatccggacaacaagcacaaaaatagatacattaacatcgtcgcctacgatcattcccgcgtgaagcttgctcagctggcagaaaaagatggcaagcttaccgactatatcaatgccaactacgtggatggctataacaggccgaaagcctatatcgcagcccaggggccactgaaaagcactgcagaggatttttggcgtatgatttgggagcataacgtggaggtgatcgtgatgatcactaatttggttgagaaggggaggcgcaagtgcgaccagtactggcctgctgatggcagcgaagaatatggcaatttcctcgtgacccaaaagtctgtgcaggtgctggcgtactatacagtgagaaactttaccttgcgtaatactaaaatcaagaaaggatctcagaaagggcgccccagcggtcgagtcgtcacccagtaccactacacacaatggcctgacatgggcgtcccggagtatagcctgccagtgctgacgttcgtcagaaaggccgcttacgctaagagacatgctgtagggccagtggttgtgcactgttcagctggtgttgggcggacgggtacctacattgttctggattccatgctgcagcaaatccagcacgaaggcaccgtcaacatctttggctttcttaaacacatccgatcccagcggaattacctggtacagacggaagaacagtatgtgttcatccacgacactctggtagaagctattctgtccaaagagaccgaagtcttggacagccacatccatgcatacgtcaacgctttactgattcctggtccagccggcaaaacgaagcttgaaaaacagtttcaactgctctctcagtcaaatattcagcaatctgactactcggccgcattgaagcagtgtaaccgcgaaaagaataggaccagtagtattatccctgtggaaagatcacgcgtgggtatcagtagtttgagtggagagggtactgactacatcaatgcaagttacatcatggggtattaccagtctaatgaattcatcatcacacagcacccccttctccacacgatcaaagacttttggagaatgatttgggaccacaacgctcagctggtggtgatgattcctgatggccagaacatggccgaggatgagttcgtctattggcctaacaaagacgagcctatcaactgtgaatcttttaaggtaacattgatggcggaggagcacaagtgcctctcgaacgaggaaaagctgatcatccaagacttcatactcgaggcgactcaggacgactacgtgttggaggttcgccatttccagtgcccaaaatggcctaaccctgacagcccaatctctaagacatttgaactgattagtgtgatcaaagaggaagccgcaaacagggacgggccaatgatcgttcacgatgaacacggaggagtgactgccggaacgttctgcgcgctaacaacgctgatgcaccagctcgagaaggagaatagcgtcgatgtttatcaggtggcaaagatgattaaccttatgcgacccggtgtgttcgccgacatcgaacagtatcagttcctgtacaaagtgattctgtcgcttgtctcgaccagacaggaagagaatccgtcaactagccttgattcgaatggcgctgcgctcccagacggcaacattgccgagtccttagaaagtctggtttag

SEQ ID NO: 201645 - DNA, 504 bp, synthetic construct
  misc_feature 1..504: note = Description of Artificial Sequence: Synthetic coding sequence
  source 1..504: mol_type = other DNA
atgaaccggcccgcccccgtggagatcagctacgagaacatgcggttcttgatcacacacaatcccaccaacgctactttaaacaagttcacagaggaattgaagaaatacggtgtgaccaccctcgtcagagtgtgcgacgccacttacgacaaagcccccgtggaaaaagagggaatccacgtgttagactggccctttgacgacggggccccccccccaaatcagatcgtggatgactggctcaacctcttaaagacgaagttccgcgaggagcctggctgctgcgtggccgtgcactgtgtagccggcctgggcagagcccccgtcctggtcgctctggctcttatcgagtgtggcatgaagtacgaggacgctgtgcagttcatccggcaaaagaggcgcggagcatttaatagcaaacagttgctttacctcgagaagtacaggcccaagatgagactgcgattccgagacaccaacgggcactgttgcgtgcaatag

SEQ ID NO: 201646 - DNA, 249 bp, synthetic construct
  misc_feature 1..249: note = Description of Artificial Sequence: Synthetic coding sequence
  source 1..249: mol_type = other DNA
atgaaccggcccgcccccgtggagatcagctacgagaacatgcggtttctcattacccataatcctactaatgccacccttaataagttcacagaagaactaaagaaatatggggtcaccacattagttagggtttgcgacgccacctatgataaggcgcctgtcgaaaaggaaggcatccatgtgttaaaaaagaagggtagtgtccagtttcagacagccgccctttttggagaaatcccgacctag

SEQ ID NO: 201647 - DNA, 411 bp, synthetic construct
  misc_feature 1..411: note = Description of Artificial Sequence: Synthetic coding sequence
  source 1..411: mol_type = other DNA
atgaaccggcccgcccccgtggagatcagctacgagaacatgcggttcctgataacccataatccaaccaatgcaaccctgaacaaattcactgaggattggccgttcgatgacggggcaccccctcctaaccagattgtggatgattggctgaacttgctgaagaccaaatttagagaggaaccagggtgttgtgttgctgtgcactgcgtcgccggcttgggccgcgccccagtgctagtggccctggctttgatagagtgtggtatgaaatacgaggatgctgtgcagtttattcggcagaaacgccggggggcttttaacagcaagcagctgctttacctggaaaaataccggccaaagatgcgcctgcgctttagagacacaaacggccattgttgtgtgcagtag

SEQ ID NO: 201648 - DNA, 192 bp, synthetic construct
  misc_feature 1..192: note = Description of Artificial Sequence: Synthetic coding sequence
  source 1..192: mol_type = other DNA
atgaaccggcccgcccccgtggagatcagctacgagaacatgcggtttctcattacccataaccctacaaacgcgacactcaataagttcaccgaagaacttaagaagtacggcgtgactacattagttcgtgtctgtgacgcaacctacgataaggctccagtagaaaaggagggcatacacgtcctctag

SEQ ID NO: 201649 - DNA, 69 bp, synthetic construct
  misc_feature 1..69: note = Description of Artificial Sequence: Synthetic coding sequence
  source 1..69: mol_type = other DNA
atgaaccggcccgcccccgtggagatcagctacgagaacatgcggttcctgattacccacaatccctag

SEQ ID NO: 201650 - DNA, 522 bp, synthetic construct
  misc_feature 1..522: note = Description of Artificial Sequence: Synthetic coding sequence
  source 1..522: mol_type = other DNA
atggcccggatgaaccggcccgcccccgtggaggtgagctacaagcacatgagattcttgatcactcacaaccctacaaatgccaccctgagcacctttattgaggatctgaaaaaatacggcgctaccacagttgtcagagtttgcgaagtaacctacgacaagacaccactagagaaagacggtataacagtggtagactggccttttgacgatggagccccgccacctgggaaagttgtggaggactggttgtcacttgtgaaagccaagttctgtgaagccccagggtcttgcgttgcggtgcactgcgtcgcggggctaggcagagcccctgtcctcgtggccctggcacttatcgaaagcggaatgaagtacgaagatgcgatccagtttatacggcagaagcgaaggggagccatcaacagcaaacagctgacatacctggaaaagtacaggccaaaacagcgtctcaggttcaaggaccctcacacacacaagacccgatgttgcgtaatgtag

SEQ ID NO: 201651 - DNA, 447 bp, synthetic construct
  misc_feature 1..447: note = Description of Artificial Sequence: Synthetic coding sequence
  source 1..447: mol_type = other DNA
atggcccggatgaaccggcccgcccccgtggaggtgagctacaagcacatgaggttcctgattacccataaccctacgaatgcaactctctccacatttattgaggatctgaagaaatacggtgccacaacagtggtgcgcgtatgtgaagttacttacgacaaaacacccctggagaaagacggaattacggtagtggactggccattcgatgatggcgcgcccccgccgggcaaagtcgtcgaagattggctgtcacttgtgaaggctaagttttgtgaggcacccggctcatgtgtggcagttcactgtgtcgcagggcttggccgaaagcggagaggcgcaatcaattccaaacagttgacatatctcgagaaataccgccctaaacagagactgcgcttcaaagacccccatacccacaagactagatgttgcgtaatgtag

SEQ ID NO: 201652 - DNA, 447 bp, synthetic construct
  misc_feature 1..447: note = Description of Artificial Sequence: Synthetic coding sequence
  source 1..447: mol_type = other DNA
atggcccggatgaaccggcccgcccccgtggaggtgagctacaagcacatgcgtttcctgatcacccataacccgacgaacgcaaccttaagcacctttatcgaagacctcaaaaaatacggagctacaactgtggtgcgcgtgtgtgaagttacttatgataagaccccacttgaaaaagacggcatcactgtggtggattggcccttcgatgatggggcgccccctccaggcaaggtggttgaagactggctgtccctggtgaaagcgaagttttgcgaggcccccggaagttgtgttgccgttcattgcgtggccggtttgggccgcaaaagaaggggcgctattaactccaaacagcttacatatttagaaaagtatagacccaagcagcgtctcagattcaaggaccctcatacacataagactcggtgttgtgtcatgtag

SEQ ID NO: 201653 - DNA, 522 bp, synthetic construct
  misc_feature 1..522: note = Description of Artificial Sequence: Synthetic coding sequence
  source 1..522: mol_type = other DNA
atggcccggatgaaccggcccgcccccgtggaggtgagctacaagcacatgcgattccttatcacccacaatccaactaacgccacactgtcaacatttattgaggatcttaagaaatatggtgcaactacagtcgtgcgcgtttgcgaagtaacctacgataaaaccccactggagaaagacggcatcacagtggtagattggccctttgacgatggtgcccctcctcccggcaaggtggtagaagactggctgagcttagtcaaagccaagttctgtgaggcaccaggatcctgtgttgcggtgcattgcgttgcaggtctaggccgtgcgcctgtactggtggcacttgctctaattgagtctgggatgaagtatgaggatgctatccagtttatcagacagaagcggcggggcgccatcaactccaagcagctgacatacctggagaagtacagacccaagcaaaggctgcgctttaaggacccccacacccacaaaacgaggtgctgcgttatgtag

SEQ ID NO: 201654 - DNA, 213 bp, synthetic construct
  misc_feature 1..213: note = Description of Artificial Sequence: Synthetic coding sequence
  source 1..213: mol_type = other DNA
atggcccggatgaaccggcccgcccccgtggaggtgagctacaagcacatgagattcctgatcacacacaaccccaccaatgccacgctgtccaccttcatcgaagatctgaagaaatatggagctacaaccgtggtgcgtgtgtgtgaagtaacctacgataagacaccgctcgaaaaggacggtattacagtggtggactggccgttctag

SEQ ID NO: 201655 - DNA, 2343 bp, synthetic construct
  misc_feature 1..2343: note = Description of Artificial Sequence: Synthetic coding sequence
  source 1..2343: mol_type = other DNA
atggagcaggtggagatcctgcggaagttcatccagcgggtgcaggcaatgaaaagtcctgaccacaatggggaggataatttcgcaagagacttcatgcggctccgccggctgtccaccaaatataggaccgagaaaatctatcccactgcaaccggcgagaaggaggaaaacgttaaaaaaaaccgttataaggatatcctgcccttcgaccatagcagggtaaagttgacattgaagaccccttcgcaggactctgattacatcaacgcaaacttcatcaaaggcgtatacgggcctaaggcctacgtggcaacccagggcccgcttgctaacaccgtaattgacttttggaggatgatctgggaatacaatgtagtcatcattgtaatggcttgtcgtgagttcgagatgggacggaagaagtgtgaaagatactggcccctctatggggaggacccaattaccttcgctccgtttaaaatcagctgcgaggatgaacaggcacggacagactatttcatccgtaccctcctgctggaatttcagaatgaaagccgcaggctttatcagttccattatgtgaattggcctgaccacgatgtccccagctcttttgacagtatccttgacatgatctcactgatgcggaagtaccaggagcacgaagatgtaccaatttgcatccactgttcagcaggctgcggcaggaccggggcgatttgtgcaatagactatacttggaacctgctcaaggctggaaagattcccgaggaattcaacgttttcaacctgatccaagaaatgagaacacaacgccactcagccgtgcagacgaaggaacagtatgagctggtacacagggccatcgcccagctctttgaaaaacaactgcagctgtatgaaatccatggtgctcagaaaattgctgacggggtgaacgagattaacactgagaacatggtgtcctcaattgagccagagaaacaggatagtccaccaccgaagcctccccgcacgcgatcttgtttggtggagggagatgccaaggaagagatcctgcaaccgccagaacctcatcctgttccgccaatcctgacccctagcccaccgagtgcattcccgacggtgacaaccgtctggcaggacaacgatcggtaccatcctaagccggttctccacatggtttcatcggagcagcattccgccgatttgaaccgtaattattctaaatccaccgaattaccagggaaaaacgaatctactatcgaacagatcgacaaaaagctggagcgtaatctctcatttgaaatcaagaaagtccctcttcaagaggggccgaagagcttcgacggcaacaccctgctgaacaggggccatgccattaagatcaaaagcgcatcgccctgtatcgcagataaaatttctaaaccacaagaactcagttctgacttgaatgtcggtgatacatcccagaactcctgcgtagactgttctgtaacccaaagcaacaaggtgtcagtcaccccccccgaggaatctcagaactccgacacaccgccgagacccgacaggttgccactcgacgagaaaggccatgtgacatggagcttccatgggcctgagaatgccatacccattcccgacctctccgaaggcaattcttctgacataaactaccagacacgtaagactgtatctcttaccccatctccaactacacaggtggagacccctgacctggtggaccatgataatacaagccccctgtttagaacaccactgagtttcactaatcctctacactcagacgatagcgacagcgacgagcgcaatagcgacggagcggtaacccagaacaagaccaatatcagcactgcttcagccacggtgtcggcagcgactagcacggagagtatcagcacaaggaaggttctgcccatgtcgatcgcccgccacaatatagcaggcactactcacagcggcgccgagaaggacgtagatgtgtctgaggacagtcctcctccactccccgagaggacccccgaatcgtttgtgctagcttctgaacacaacacccccgtgagatctgaatggagtgaactccagtcacaggagcggtccgagcaaaaaaaaagtgaaggactgattacatccgagaacgagaaatgcgatcatcccgctggcggaattcactacgaaatgtgtatagaatgtcctccaaccttcagcgacaagagggagcaaatttctgagaatcctacggaggcgacggatattggatttggcaatagatgcggtaagccaaaaggaccccgagatccccctagtgagtggacgtag

SEQ ID NO: 201656 - DNA, 1986 bp, synthetic construct
  misc_feature 1..1986: note = Description of Artificial Sequence: Synthetic coding sequence
  source 1..1986: mol_type = other DNA
atgatctgggagtacaacgtggtgatcatcgtgatggcctgccgggaattcgagatgggacggaaaaagtgcgagcgatactggcccctttacggagaggatccaatcacatttgcccctttcaaaatttcatgtgaggacgaacaagcccggacggactattttattagaacgttactcttggagtttcaaaatgagagccgtaggctgtaccaattccactacgtaaactggccggaccacgatgtgccttcttcttttgactccattctggatatgattagccttatgcggaagtaccaggagcatgaggatgtgcctatatgcatacattgttcggctgggtgtggcaggaccggcgccatctgcgccatcgattacacatggaacctcctgaaggccggcaagattcccgaagaatttaacgtgttcaacctgattcaggaaatgcggacccagaggcactctgcagtccagacaaaggaacaatatgagctggtgcaccgggccatcgcgcagctgtttgagaaacagctgcaactttatgaaatacatggggctcagaaaatcgccgatggagtgaatgaaatcaacacggagaacatggtcagcagcattgaaccagaaaagcaggactctcccccgcctaagcctccaaggacgaggtcatgcctagttgagggagacgctaaagaggagatacttcagccccccgaaccgcaccccgtgccgccgatcctcactccatccccccccagcgccttccctactgtcaccacagtgtggcaggacaatgaccgttaccatccgaagccagtccttcatatggtgtccagcgagcagcatagcgcagatctcaatcgaaattattctaagagtaccgagttgcctggcaaaaatgagtctacgattgaacaaattgacaaaaagcttgagaggaatttatcattcgaaattaaaaaggtgcccctccaggaaggcccgaagtctttcgatggaaataccctgctgaatcgcggccatgcgataaagatcaagagtgcctccccatgcattgccgacaagatatctaaaccacaagagctttcctccgaccttaatgtgggggacaccagtcagaattcctgtgtcgattgctctgtcactcaatcaaacaaagtatccgtgacgcctcccgaggagagccaaaattccgatacccctccacggccggatagactgcccttggacgagaaagggcacgtgacttggtcttttcacggtcccgaaaacgctattccaatcccagacctgtctgagggtaattcatctgacataaactatcagacgagaaagaccgtgagtctgaccccatcacccacaacacaagtggaaacgccggatctggttgaccacgataatacaagtcccctctttcgcactccccttagtttcacaaaccccctacactcggacgattctgattccgatgaaaggaactctgatggcgcagtcacccagaataagactaatatttcaaccgcgtctgccacggtttcagcagcaacgtccactgaaagcatatccaccaggaaagttttgcctatgagcatcgctagacataatattgccggaacaacccacagtggtgctgagaaggacgtagatgtgagcgaagactccccaccaccgctgcccgagaggacacccgagtcctttgtcttggcaagtgagcacaatactcctgtacgcagcgagtggtctgagcttcaaagccaggagaggagcgagcaaaagaagtccgagggcctgattacaagtgaaaatgagaaatgcgatcatccagctgggggcatccactatgaaatgtgcattgagtgccctcccacgttttccgacaagcgggagcagatctccgaaaaccccactgaagcgacagacatcgggtttgggaatcggtgcggcaagcccaagggccccagggatccaccatcggagtggacatag

SEQ ID NO: 201657 - DNA, 1632 bp, synthetic construct
  misc_feature 1..1632: note = Description of Artificial Sequence: Synthetic coding sequence
  source 1..1632: mol_type = other DNA
atgatctgggagtacaacgtggtgatcatcgtgatggcctgccgggaatttgaaatgggtagaaaaaaatgtgagagatactggcctctgtatggagaggacccaataactttcgctcccttcaaaattagttgcgaagatgagcaagcaagaactgactattttattagaacactgttgctggagttccagaatgaatcccgtcggctttaccagttccactacgtcaactggcccgaccatgatgtgccaagttcattcgacagtatcctcgatatgatttctctgatgagaaagtaccaagaacacgaggacgtccctatctgtattcattgctctgccggttgtggcaggaccggagcgatatgcgccatcgattacacatggaatcttctgaaagccggaaagataccggaggaatttaacgtattcaacctgatccaagaaatgcggacccagcggcacagcgccgttcaaactaaggagcagtatgaactggttcaccgcgccatcgctcaactctttgagaagcagcttcagctctatgaaatacatggcgcacaaaaaatcgctgatggtgtcaatgagattaacactgagaacatggtctcatctattgaacctgaaaagcaggattccccaccaccaaagccgccccggacacgttcatgtttggtagaaggggacgctaaagaggagatcctccaacccccagagccccaccccgttcccccaattttgacacccagcccaccttcagcatttcccacagttacaacagtctggcaagacaatgatagatatcaccccaaacccgtgctgcacatggtgtcctcagagcagcactctgctgacttgaatagaaattactccaagtcaaccgagcttccgggcaagaacgaatcaaccattgaacagatagacaaaaagctggagagaaacctgagttttgaaatcaagaaagttccgttgcaggaaggaccgaagagtttcgatggcaataccctgttaaataggggacacgcaatcaagatcaaatctgcatccccatgtattgcagataaaatcagtaaacctcaagaactttcttcagacctcaacgttggagacacatcccaaaattcttgtgtggactgctcagtgactcagagcaataaggtgtccgtaactcctcccgaggagtcacagaacagtgacaccccacccagacccgataggctaccattagatgagaaaggacatgtgacctggagttttcacggacctgaaaacgctattcccatcccagacttaagtgaaggcaattcgtccgacatcaactatcagaccaggaaaactgtgagtctcactccctcacctactacgcaggttgagactcctgacctggttgatcatgataacacatcgccccttttccggacccccctttcattcacaaaccccctgcattctgacgattcggatagcgatgagcgaaattcagatggtgccgtcacacaaaacaaaacaaatatttccacagcgagtgctacagtatccgccgcaacatcaactgaatctatttccacaagaaaagttttaccaatgagcattgcccgtcataactcgcgcaacaatacttttaggtgctag

SEQ ID NO: 201658 - DNA, 6885 bp, synthetic construct
  misc_feature 1..6885: note = Description of Artificial Sequence: Synthetic coding sequence
  source 1..6885: mol_type = other DNA
atgcacgtgagcctggccgaggccctggaggtgcggggcggccccctccaggaggaggagatttgggccgtcctgaaccaatccgctgagagtttacaggaacttttcagaaaggtgtcgctcgcagacccggccgcactaggattcatcatttcgccatggagtcttttgctactccctagcgggtccgtgagtttcaccgacgagaacatctccaaccaggatctcagggccttcactgcccccgaggtgctgcagaatcagtccctcacctccctttctgacgtggaaaagatacatatttattcccttgggatgaccctgtactggggcgctgattacgaggtgcctcaatcccagccgatcaaactgggggatcacctcaactctatcctgcttggaatgtgcgaagacgtcatctatgcaagagttagtgtccgaacggttttggacgcatgttcggcccacattaggaactccaattgcgccccttctttttcctatgtcaaacacctagtgaaactggtcctgggcaatctgtccggtaccgaccagctgtcctgtaattccgaacaaaagcccgaccgaagtcaggcaatacgcgatagactgaggggaaaaggccttcctaccggaaggtcttctacatcggatgtcttggacatccaaaagccccccctatcccaccagacgttcctgaataaaggactgtcaaagtctatggggtttctgtcaattaaagatacccaagacgaaaattatttcaaggatatcctgagtgataatagcgggagggaggattctgagaatactttctcgccatatcagtttaaaacgtcaggtcctgagaagaagcccataccagggatcgatgttctgtccaaaaaaaagatttgggcttcttcaatggatctgttgtgtactgccgaccgcgatttcagctccggcgaaaccgctacttaccgaagatgccatcctgaggcggttactgttaggacctccacaacccctagaaaaaaggaggcgcggtactcagacgggtcgatcgccctggatatttttggcccccagaaaatggatccaatttaccacacaagagaactgcctacctctagcgctatctctagcgccttagatcggatcagagagagacagaagaagctccaagtgctgcgagaagctatgaatgtggaagagcccgtgagacggtataaaacgtatcacggtgatgtattcagcacctctagcgagtctcccagtatcatctcctctgaatctgattttagacaggtcagacgctcagaggcgtccaagcggtttgagagctcatccggactgcccggggtggacgagactctctcccagggccagagccaacgccccagtcgtcagtacgagacgccctttgaggggaatctaatcaaccaggaaattatgctgaagagacaggaagaagaacttatgcagttgcaggcaaaaatggcgttgcgccagagtaggttatcactctaccccggagataccatcaaggcctcaatgctggacataaccagggaccccctcagggaaatagccctggaaactgccatgacgcagcggaagctgcggaacttcttcggtcctgagtttgtgaagatgacaattgagccgtttattagtctggacctccccagatcgatcctaaccaagaagggcaaaaacgaagacaatcggaggaaggtcaatataatgttattaaatggccagcggcttgaattaacctgcgacaccaagaccatttgtaaagatgtctttgacatggtggtagcccatatcggtttggtagaacatcatctcttcgccctcgccaccctcaaggacaacgaatacttttttgtcgaccccgatttaaagctcaccaaggtggccccagaggggtggaaggaggaacccaaaaaaaagactaaggcgaccgtgaatttcactcttttctttagaattaagtttttcatggatgatgtcagcctgatacagcatactctgacttgccatcagtactacttacagctacgaaaagatatcctggaggagcgcatgcactgtgacgatgagacatcgttgcttctggcttctctggctttgcaagccgaatatggtgattatcaacccgaggtgcacggagtcagctacttcagaatggagcactacctccccgctagggtgatggaaaagctggatctctcttacatcaaggaggagttgcctaagcttcataacacatatgtcggggctagtgagaaggagacagagctggaatttctgaaagtgtgccagcgcctgacagagtacggtgtgcactttcaccgggtgcacccagaaaaaaagtcacagacaggcattctgctcggagtctgcagcaagggtgtgctcgtgttcgaagtccacaacggggtgcgtaccctggtgctaagattcccctggagagagacaaaaaaaattagtttttctaaaaagaaaattaccctccaaaataccagtgatggaattaaacacggcttccagactgataattcaaaaatctgtcagtacctccttcacctctgttcctaccagcacaaattccagctacaaatgcgcgcacgacagagcaaccaggacgctcaggacatcgacgtgctacataaacgctggagcatcgtgtcctctcccgaaagggagatcactctggtgaacctcaaaaaggacgctaagtacggacttgggtttcagattattggtggggagaaaatgggcagactcgacttgggaatcttcatttcctctgtggctccgggagggcccgctgatctggacggctgtctgaagccaggtgatcgcttaattagtgtaaacagtgtcagcctggaaggagtatcacatcatgctgcgatcgagatcctccagaatgcaccagaggacgtgacattagtgatcagccagccaaaggaaaagatttcaaaggtgccctctacaccggtgcatttaactaatgaaatgaaaaactacatgaagaagagcagctatatgcaggattcggcaatcgacagcagttccaaagatcaccattggtctaggggcactctgcgccacatctccgaaaactcattcggccccagcggcgggctgagggagggaagcctttcttcccaggactccaggacggagtccgcatcattgtcccaatcccaagttaatggattcttcgccagccacctgggcgaccagacctggcaggagtcccaacacggcagccccagtccatcagtgatctctaaggcaaccgaaaaggagacctttacagacagcaatcagtctaaaacgaaaaagcctggcatcagcgacgttaccgattacagcgacaggggcgattcagatatggacgaagccacttactcatcctctcaggaccatcagacgcctaaacaggagagcagttcttctgtcaacacaagcaataaaatgaacttcaaaactttcagttcgtccccacctaaacccggagacatttttgaagttgagcttgcgaagaacgacaatagcttaggcatttcagtgaccggcggagtgaacacctcagtgcgccatggcggtatttatgtgaaggcagtcattccacagggagccgccgaatctgacgggcgcattcacaaaggcgaccgggttttagctgtgaatggcgtgagcctagaaggagccacccataaacaggccgtcgagacgctgaggaataccggacaggtggtgcatttgttgttagaaaagggccagtccccaacaagcaaagagcacgttcccgtgaccccccagtgcaccctgtcagatcagaacgcccagggccaaggcccagaaaaagtgaaaaaaacaacacaggtgaaagactattcattcgtgactgaggagaacacattcgaagtcaaattgttcaagaattccagcggcctcggcttctcattctcgagagaagataatttaatccctgagcagataaatgcctctatcgtacgtgtcaaaaagctctttcccggccagccagcagccgaatctggtaagattgacgtaggcgacgtcatcctgaaagttaatggagccagccttaaaggtctgagccagcaagaggtgatcagtgctttacgaggcaccgcaccagaggttttcttgcttctgtgtaggcccccccctggggtgctccccgagattgacacggcactgctgaccccactgcagtcacccgcccaggtgttacccaactcgagcaaggactcttcccaacccagctgtgtcgaacaatctacaagctcagacgagaacgagatgtcagataaatccaaaaaacagtgtaaatctccctcacggcgcgacagctacagcgattcttcgggaagcggcgaagatgaccttgtgactgctccagctaacatttccaatagcacctggtcttctgctctgcatcagaccctgagcaatatggtgtctcaggctcaatcccatcacgaagcaccaaagagccaggaagacacaatctgtacgatgttctactatcctcagaagattcccaataaacccgagttcgaggactctaatccatctcctttgccacccgacatggctcctggacagtcttaccaaccacagagtgagagcgcctcgtcaagtagtatggataaataccatatccatcacatttcagaaccaacgcggcaagagaattggactcctctcaagaacgacctggagaatcatcttgaggattttgagttagaggtcgagctcctcatcactctgatcaaaagtgagaaaggctccctgggtttcactgttaccaagggaaaccagcggattgggtgctatgtacatgatgtcatccaagacccggctaaatcagacggacggctcaagcctggcgaccgcctgatcaaggttaacgataccgatgtaacaaacatgacccataccgacgccgtgaatctcctccgcgccgctagtaagaccgtaaggctggtgatcggccgcgttctggaactcccacggattcccatgctgccccatcttttgccggatatcacccttacttgtaataaggaggagctgggcttcagtctgtgcggcgggcatgactctctgtaccaagtcgtttatatcagcgacattaaccctaggagtgtcgccgccatagaggggaacctgcagctcctagatgtgatccactacgtgaacggcgttagcacacaggggatgaccctcgaggaagtcaatagagcccttgacatgagccttccatccctagtcctgaaggcaactaggaatgaccttcctgtggttccatctagcaagcgctccgccgtcagtgccccgaaaagtactaagggaaacggatcatactcagtcgggagttgctcccaaccagccttaacgccaaatgacagcttttcaactgtcgcaggggaagagattaacgaaatcagctaccccaagggaaagtgctctacctatcagatcaagggaagtcccaatctgaccttacccaaggagagctatattcaagaggacgatatctacgacgactctcaggaagccgaggtgatccaatcactgctggacgttgtagatgaagaagcccaaaatctcctgaacgagaataacgctgcaggttatagttgtggacccggtacgttgaaaatgaatgggaaattgtcagaagaacggaccgaagataccgactgtgatgggtctcctctgccggaatacttcacagaagccaccaagatgaacggatgtgaagagtactgcgaggagaaggttaaatcggaatccctgattcaaaagccgcaggaaaaaaagaccgatgacgacgagattacatggggtaacgacgagcttcctatcgagcgcaccaatcatgaggacagtgataaggatcattcattcttgacgaacgatgaattggccgtgcttcccgtggtcaaagttctccctagtggaaagtacaccggagctaacctgaagtccgttattagggtgctgcgggggctgttggaccagggaataccctccaaagaactggaaaacctacaagagctgaagcccctggaccagtgcctaattggacagactaaagaaaacaggagaaaaaacagatataaaaacatcttgccctatgacgccacacgggtgccacttggagacgaaggaggatacattaacgcaagttttatcaagattcccgtggggaaagaagagtttgtctacatagcctgtcaaggccccctgcccactactgtgggagatttttggcagatgatttgggagcagaaatccactgtgatcgccatgatgacccaagaggtggagggagagaagatcaagtgtcagcgctattggccaaacattctaggtaagactactatggtgagcaatcgtctcagattagcactggttagaatgcagcagctcaaagggtttgtagttagggctatgactctagaagatatccagacacgtgaggttagacacatttctcaccttaatttcactgcatggccagaccatgatactccctcacaacccgacgacctgctgacctttatctcgtacatgaggcacattcatagaagtggtcctattatcacgcactgcagtgcggggatcggcaggtccggtactctgatttgcattgacgttgtgctaggcctgatcagtcaggatctggacttcgacatctcagacttagtgcgatgcatgagacttcagcgccatggtatggtccagacagaggatcaatacatattttgctatcaagtgatcctgtacgtcctcactcgcctacaggcagaggaggagcagaagcagcaaccacagctgttaaagtag

SEQ ID NO: 201659 - DNA, 7305 bp, synthetic construct
  misc_feature 1..7305: note = Description of Artificial Sequence: Synthetic coding sequence
  source 1..7305: mol_type = other DNA
cagttcctgttcaccaaggtgagcctggccgaccccgccgccctggggttcattatatccccctggtctctcctgctgctcccctcagggagtgtgtccttcaccgatgaaaatatctctaatcaagatttgagggcttttacggccccagaggtgttacagaatcagtccttgaccagtctgtccgacgttgaaaaaattcatatatatagtctgggcatgacactgtattggggcgccgattacgaagtaccgcagtcccaacccattaagctaggcgatcatctcaacagtatactcctcgggatgtgtgaggatgtgatttatgcaagggtctctgtgcgcaccgtgctggacgcctgctctgcacacattagaaactccaactgcgctccttcgttcagctacgttaagcatctggtcaagctcgtgctaggcaatctgagtgggaccgatcaactctcctgcaattcggagcaaaaacctgaccgctcccaggctattagggataggttacggggcaaaggattacctacagggagaagctccacctccgatgtgctggacattcagaagccccccttaagccatcagacttttcttaataagggtctatctaaatcaatggggttcctctcaataaaggacacacaagatgagaattacttcaaggatattcttagcgacaattcaggtagagaggactcagagaacaccttttcaccttaccagtttaagacgagcgggccagagaaaaagccaatcccgggaatagatgtgctgtcaaaaaagaaaatctgggccagcagcatggacctcctgtgtacagccgatcgcgattttagcagtggcgaaaccgccacctaccgccggtgtcatcccgaggctgttacagtgcgcacgtccaccactcctaggaagaaggaggctcggtactccgacggttctatcgcccttgacatcttcggtccgcagaagatggatccaatctaccatacccgtgagctccctacatcaagtgccataagcagcgccctggaccgaattcgggagcgccagaaaaagcttcaagtattgagggaagcaatgaacgtggaggaacctgtgagacgttataagacctaccacggggacgtgttttccacaagtagtgaatcaccgtccataatctcaagcgagtccgactttagacaggttaggaggagcgaagcctccaagcggttcgagtcttcaagcggcctccccggagttgatgaaactctgagccagggtcagtcacagaggccatcacgacagtacgaaacccctttcgagggaaaccttatcaaccaggagatcatgttgaagcgacaggaggaagagctgatgcagctccaggcaaagatggcactccggcagagtcgcctgtcgctgtatccgggagatactatcaaggcctcaatgctagatataacccgggatcccctgagagaaatcgctctggagacggcgatgacacagcgcaagttaaggaatttctttggacccgagtttgtaaagatgaccattgaaccctttatctccttggatttgcctcgctctatcctgaccaaaaaagggaagaatgaagacaacagacggaaagtaaacatcatgctgctcaacggacaaagactggagctcacctgtgacaccaagaccatttgcaaagatgtgttcgatatggtagtagcccacataggcttggtggaacaccacctcttcgccttagcgaccctcaaggataatgaatatttcttcgtggatcctgacttaaagctgacaaaggttgcaccagaggggtggaaggaagagcctaaaaagaagacaaaggctaccgtcaattttacgttgttttttcgcattaaatttttcatggacgatgtgtccctgattcaacacaccctcacatgccaccagtattaccttcaactgagaaaagacattctcgaggaacggatgcattgcgatgacgaaacatccctgttgttggcctcgctggccctgcaggccgaatatggtgactatcaacctgaggtgcacggcgtctcttatttccggatggagcactatctgcctgccagagtgatggaaaaactggacctgtcctacatcaaagaagaattgcccaaactacacaacacctatgtgggggcatcagaaaaggagaccgagttggagttcttgaaggtttgtcagaggctgaccgaatacggcgttcattttcacagggtgcaccctgaaaaaaagagccagacaggaattctgttgggggtgtgcagcaagggcgtgctggttttcgaagtacataacggtgtgagaaccttggttctgcgctttccttggcgggaaactaagaaaatctccttttctaaaaagaaaattacgctccagaataccagcgatggcataaaacacggcttccagactgacaactcaaagatctgccagtatctactgcatttgtgtagctatcagcataagtttcaactgcaaatgcgtgcacggcagtcgaaccaggacgcacaggacattgagcgcgcaagtttccgtagcttgaacttacaggccgaatctgtccgtgggtttaacatgggaagagccatcagcactgggtcgttggccagttcaaccctgaacaaactggctgtcagacccctcagtgttcaagcggagatactgaagaggttgtcatgctccgaactctctctgtatcagccactacaaaatagcagcaaggagaagaatgacaaagcaagttgggaggagaagcctagagagatgagcaagagctaccatgatctgtcacaagcatccctgtatcctcacagaaagaacgtcatcgtgaacatggagccaccacctcagaccgtggccgaactcgtcgggaagccctctcaccagatgtcccgttcagatgcagaaagtctcgccggggtcactaagctgaacaattccaaatccgtggcttcactgaaccggtcaccggaacgccgcaagcacgagtctgatagctctagtatcgaggaccccgggcaggcctacgtcctggatgtccttcataagcgatggtccattgtttcctcacctgaaagagaaatcaccttggtgaacttgaagaaagatgcaaaatatgggctcggcttccagatcattggcggagagaaaatgggccgcctggatcttggcatttttattagttctgtggctcccggcgggccagcagacctcgatggatgtctgaagcctggcgataggttgatctcagtcaactctgtctcgctggagggtgtatcacaccacgccgccattgagattcttcagaacgcacctgaggacgtaactttggtcatatcccagcctaaggaaaagatttccaaagttccatctactcctgtccacctaacaaacgaaatgaagaactacatgaaaaagtcttcctatatgcaagacagtgcgatagactcctccagtaaggaccaccattggtctagaggcacccttcggcatatctcagagaactccttcggcccttccgggggcctgagggaaggatcactgagctctcaagattctcggaccgaaagcgcctccctttctcagtctcaggtgaatggattctttgcttcgcacctgggagatcagacctggcaagaaagtcagcacggcagtccctctccgtccgtgatctctaaggcaaccgaaaaggaaaccttcaccgacagtaatcaaagcaaaaccaaaaaaccgggcattagcgacgtaacggattactccgatcggggggatagtgacatggacgaggctacatattcttcatcccaggaccatcaaacccctaaacaagagtcttccagcagcgttaatacttctaacaaaatgaattttaagacatttagtagcagtcctcctaagccgggagacattttcgaagtggaactggccaagaacgataactctttgggcatttccgtgaccggtggcgtgaatacctctgtccgacacggcggtatctacgtcaaggccgtgatccctcagggtgccgctgagtctgacggacgaattcacaaaggggatcgcgtgcttgccgtgaatggagtgtcactggaaggggccacccacaagcaggctgtggagactttgaggaatactgggcaggttgttcatttgctgcttgagaaaggacagtcaccaacatcaaaggaacacgtgcccgtgacgccccagtgcaccctgagcgatcagaatgctcagggtcagggacctgagaaggttaaaaaaacaacccaggtgaaggactatagtttcgtaaccgaggagaatacatttgaggtgaagctgttcaagaatagctctggtctaggcttcagcttctcccgggaggacaatctcattccagaacagatcaatgcttcgattgtgcgagttaagaagctgttccccgggcagccggctgccgagagcggcaagattgacgtcggggatgtgattctcaaggttaatggggcaagccttaaggggcttagtcagcaagaagtgatatccgctttgcggggaactgcccccgaggtcttcttattgctctgtaggccccctccaggcgtcctgccagaaatcgatacagcgctgctgacgcccctgcagagtcctgcgcaggtgctgccaaactctagcaaagactcctcgcagccctcatgcgttgagcagtccacatcctccgacgaaaatgagatgagtgacaaatctaaaaagcagtgcaagtccccgtcccgacgggacagctactctgacagctccggatcaggcgaagatgatcttgtcactgccccagccaacatctctaactccacttggtcctcagcgctgcaccagacactgagcaatatggtatctcaggcacagtcccaccatgaggcccctaagtcccaggaagacaccatctgcactatgttttattatcctcagaaaatcccaaacaagcctgagtttgaggacagcaatccatctcccctcccacccgacatggcgcctggtcagtcttaccagcctcagtcagaaagcgcctccagttcttcaatggacaagtaccacatacaccatataagtgagcccacacgtcaagagaactggaccccgttgaagaatgatctggaaaaccatctggaagattttgaactcgaagtcgagttactcatcacactgataaaaagcgaaaagggatccctgggcttcactgtgactaaaggtaatcagcgaattggctgttatgttcacgacgtcatccaggatcccgctaaatcggatggcaggctgaagcctggcgatcggctcatcaaggtcaatgatacggatgttaccaatatgactcacaccgatgctgttaatttgctgagagccgcaagtaaaacagtccgcctggtaattggaagggtcctggaactcccccgcatccccatgctgcctcacctgttgcctgacataacattaacttgtaacaaagaggaactgggcttcagcctgtgcggcggacacgattcactctaccaggttgtgtatatctctgacatcaatcctcgctccgtggcagcaatcgagggcaatctgcagttgctggacgttatacattacgtaaacggggtgtccacccagggcatgacgctggaagaggtgaatcgggccttggatatgtccctaccaagtcttgtcttgaaagctacgcgcaacgacctgccggtggtgcccagttcaaaaaggtctgcagtttcggccccgaaaagtacaaagggtaatggttcttacagcgtcggatcttgctcgcagccagccctcacacctaacgattctttcagcactgtggcgggcgaggagataaacgaaatatcctatcccaagggcaagtgctccacctaccagattaaaggtagtccgaatctcacactgccaaaggagagttatattcaggaggatgatatttatgacgacagccaggaggctgaagtcatacagtctcttcttgacgtggtagatgaagaagctcagaacctccttaacgaaaataatgccgccggctactcttgcggcccaggaactctgaagatgaatggaaagttatcagaagagcggaccgaggacaccgactgcgacggtagtccgctgcccgagtacttcacggaagccaccaaaatgaacggatgcgaagaatactgtgaagagaaggtgaagagcgagagcctcatacagaagccacaagagaagaagaccgacgacgacgagattacctggggaaacgacgagctccccatcgaaagaacgaaccatgaggacagcgataaagaccacagcttcttgactaatgacgagctcgccgtacttccagtcgtaaaggtgcttccaagcggtaaatacactggggcaaacttgaagtctgtgattcgcgtactgagaggtctgctggatcagggaattcccagcaaggaactcgagaatctgcaggagctaaagccactggaccaatgtctgatcggacagaccaaagaaaataggcggaaaaatcgctataagaacatcctgccttacgatgctaccagagtaccattaggcgacgaagggggttatattaatgcaagctttatcaaaattccagtaggcaaggaagagttcgtttacatcgcttgtcaaggacctctgcccactacggtcggagacttctggcagatgatctgggagcagaagtcaacagtgatcgcaatgatgacccaggaggtggagggtgaaaagatcaaatgtcaacgatactggcctaatattctaggcaaaacaactatggtctctaaccggctgagattggccctggttcggatgcagcagctgaagggattcgttgttagggcaatgaccctggaggatatccagaccagagaggtgaggcacatctcgcatctgaattttacagcgtggcctgaccatgataccccaagtcagccggacgatctgctaacttttatctcgtacatgcggcacatccatcgctcagggcccatcatcactcactgtagtgctggcataggccgatctgggactttgatctgcattgacgttgtgttaggcctgattagtcaggacttagactttgacatttccgacctggttcggtgcatgcgcttgcagcgtcacggcatggtccagacagaggaccagtacatcttctgctaccaagtcatcttgtatgtgctcactcggctacaggccgaagaagaacaaaagcagcagccccagttgctcaagtag

SEQ ID NO: 201660 - DNA, 7458 bp, synthetic construct
  misc_feature 1..7458: note = Description of Artificial Sequence: Synthetic coding sequence
  source 1..7458: mol_type = other DNA
atgcacgtgagcctggccgaggccctggaggtgcggggcggccccttgcaggaggaggaaatttgggctgttctcaatcaatccgccgagtccctgcaggagctgtttcgtaaggtgtctctggcagatccggcggccctggggttcatcatcagcccatggagcttactgcttctgccttccggcagtgtgtcttttacagatgaaaatatcagtaatcaagacttgcgcgcctttaccgcccctgaggtcttacagaatcagagtttaacctctctaagcgacgtggagaaaatacatatctacagtctggggatgacactgtactggggagccgactacgaagttcctcaatcccagcctataaagcttggcgaccacctgaattccatcctgctgggtatgtgcgaggacgtgatatatgcccgggtctccgtgcggaccgtgctagatgcctgctcggcccatatcagaaactccaactgtgcacccagtttctcctacgtaaaacacctggtgaagctggtgctaggaaatctaagcggaactgatcagctctcctgtaacagcgagcagaagcctgaccgctcgcaagccattcgtgatcggttgcggggcaaaggtctaccgacgggaaggtcaagtacaagcgatgtgttggacatccagaaaccacctcttagtcaccaaactttcttgaataagggactctcaaagagcatgggcttcctttccatcaaggacacccaggacgaaaactatttcaaggacatcctgagcgataactccgggagagaagattccgaaaataccttctctccttaccagttcaaaacatcaggccctgagaaaaaacccatcccaggtattgacgttctttccaaaaaaaagatttgggcgtccagcatggatctcctgtgcacagcagatcgtgacttctcaagtggggaaacagctacataccgtcggtgccatcctgaggccgtgactgtccggacttccactacccccagaaaaaaagaggctcgctattccgacgggagcatcgcattagacatcttcggaccacagaagatggaccctatttatcacaccagggaattgcctacaagcagcgctatcagtagtgcgcttgacaggattcgggagcgacagaaaaagctgcaagtcttacgcgaagccatgaacgtcgaagagccggtcagaaggtataagacttaccacggggacgtgttttccacaagttccgaatctccctccatcatctccagtgagagtgacttcagacaggttcgacgcagcgaggcttctaagcggtttgagtcgtcttcgggcttgcctggcgtggacgagacccttagtcagggccagtcgcagagaccgagccggcagtacgaaacgccatttgagggcaatctgataaaccaggagatcatgcttaaaaggcaggaggaggaactcatgcagctgcaagctaagatggcactcagacaatcccggctgtccctatacccaggagacactatcaaagcaagtatgcttgatattactcgcgaccctctccgcgaaatcgcgttggaaactgcaatgacccagcgaaaattgagaaactttttcggtcctgagttcgtcaaaatgactatagaaccatttatttcactcgatctgcctaggtctattctgacaaagaagggaaagaacgaggataacagacgcaaggtgaatattatgctgctgaatggccagcgcttggagttgacttgcgataccaaaactatctgtaaggacgtgtttgatatggtggtggctcatattggcttggtagagcaccacctgtttgcactcgccacattgaaagataatgaatatttttttgtagacccagatttgaaactcacgaaggtagccccagaaggttggaaggaagagccgaagaaaaagaccaaagccacagtcaacttcacactgttctttcgaatcaaattctttatggatgacgtgagcctcatccagcataccttgacttgtcaccagtattacttacaactgagaaaagatattcttgaggaaagaatgcactgcgatgatgaaacaagtttgctgcttgcctctttggccctccaggccgagtacggagattaccagccagaagtgcatggggtcagctattttcggatggagcattacctcccagctagagtcatggagaagctcgacctcagctatatcaaggaagagctgccaaagctgcacaacacttatgtgggcgcatccgaaaaggaaactgaactggagttcctgaaagtttgtcagagactcaccgaatacggggtacatttccacagggtgcatcccgaaaagaagtcccagacgggcatcctgctgggcgtctgctcaaaaggggtgttagtttttgaagtccacaacggcgttcgaactctagtgctaaggtttccatggcgagagacaaaaaagatctcatttagtaagaaaaaaatcacgttgcagaacacatctgatggcatcaagcacggattccagacagataatagcaaaatctgccagtatctgctgcacctctgctcttaccaacacaaatttcagctgcagatgcgggcacggcaaagcaaccaggatgcccaggatatagagagggcctcgtttcgatctttaaatctccaggctgagtctgtgagaggattcaatatgggccgtgcgattagcaccggatctctcgctagcagtaccttgaacaaattggccgtgcgacccttgtccgtgcaggccgaaatcctgaaacgattatcatgctccgaactctccctttaccaacccctgcagaattcttctaaagaaaaaaacgataaggccagttgggaagagaagccccgggagatgtcaaagtcttaccacgacttgagccaggcttcgctgtatccccacaggaagaatgtgatcgtcaatatggaaccgcccccacagacagtcgctgaactggtgggaaaacctagccaccagatgagtagaagcgacgcggaatccttagccggagtgacaaagctgaataatagtaaatctgttgcctctctcaacagaagccctgagaggcgaaagcacgagagtgatagctcgtctatagaagaccccgggcaagcctacgtactcggcatgacaatgcactcctctggcaactccagctcgcaggtgcccttgaaagaaaatgacgtgttgcacaaacggtggtcaattgtgtcttcaccggagcgggagattactcttgtcaaccttaagaaagatgccaagtatgggcttggatttcaaattatcggcggcgagaaaatggggcggctagacttgggcatctttatctctagcgtggcccccggaggtcccgcggatctagatgggtgcctcaagcctggcgaccggctgatttctgtaaactctgtctcccttgaaggcgtgtcccatcacgcggccatcgaaatcctgcagaatgcccccgaggacgtaacactggtgattagccagcctaaggaaaaaatttcaaaggtgccttccacacctgtgcatctaaccaatgagatgaagaattacatgaaaaagagcagctatatgcaggactccgccatcgattcctcttcaaaggaccaccactggtcacgcgggactctccggcacatttcagagaactcttttggacctagcgggggactgagagaggggtcgctctcctcacaggactctcgtacagagagtgcaagtctcagtcaaagccaggtcaacggctttttcgcaagtcatctgggagaccagacatggcaggagtctcaacacggaagtccaagcccttcagtcatttctaaggcgacagaaaaggagacatttactgactccaaccagtccaagactaagaagccggggatttcggacgttactgattacagtgaccggggcgactctgatatggacgaggcaacctattcaagttcccaggaccatcagacgcctaagcaggagtccagttccagcgtgaatacctctaataaaatgaattttaaaacattcagctcttcacccccgaagccgggagacatttttgaggttgagctcgctaagaacgacaactccttaggtattagcgtgacaggcggagttaacacaagcgttagacacggcggcatttatgtcaaagccgtgattccacagggggcagcggaatcagacggaaggatccacaagggtgacagggtgctggcggtcaatggcgtatcacttgaaggggccactcacaaacaggcagtcgaaacactgaggaataccggccaggtggtgcacttattattggaaaaagggcagtcgccaaccagcaaagagcacgtgccggtcacgccacaatgcacactgtccgaccagaatgcgcagggacaaggtcccgagaaggtcaagaagacaacacaggtgaaggactattccttcgttactgaagagaacacgtttgaggtgaaactgttcaaaaattccagcggactgggtttctctttttcacgcgaagacaaccttatccctgagcagatcaacgcttctattgtgagggtcaaaaagcttttcccaggccagcctgccgccgagtctggcaaaattgatgttggagacgtgattctgaaggtgaatggtgcctcattgaagggtctgtcccaacaggaggttatctctgcactccggggtactgcccctgaggtgttcctgctgctttgcaggccacctcccggcgtcctcccagaaatagacactgctctactgactccactgcagtctcctgcccaggtcctgcctaactctagcaaggatagctcacagccttcctgtgttgagcagagtacctccagcgatgagaacgaaatgagtgacaagtccaagaaacaatgcaaatctccctctagaagggattcctacagtgacagctccggtagcggcgaagatgatctggtgactgccccggcgaacatctccaatagtacctggtcctccgcactccaccagactctgtctaatatggtcagccaggcccagtctcaccacgaagcacccaaatcacaggaggacactatttgcaccatgttttactacccccagaaaatccctaacaagcccgagtttgaggattccaacccatcccccttgccccccgatatggcgcccggacagagctaccagccacagagcgagtcggcaagcagctctagtatggacaagtatcacattcatcatattagcgagcctacacgccaagaaaactggaccccattgaagaacgatctggagaatcatctggaggacttcgagctcgaagtggaattgctgatcaccctgatcaaatctgaaaaaggatccctgggctttactgtgacgaaaggcaaccagcgcatcggctgctatgtgcacgatgtaatacaggatccagccaagtctgacggccggctaaaacctggcgataggctcatcaaggtcaatgataccgatgtcacaaatatgacgcacaccgacgcagtaaacctcctgcgtgcggcatccaaaactgtcagactggtgattgggcgagtacttgagctcccgaggatccccatgcttccccatctcttaccagacataacgcttacttgcaacaaggaggaactcggattcagcctgtgcggaggccacgatagcctttaccaagtggtctatatctccgacattaacccacgatccgtggcagctatcgaaggcaatttgcagctgctggatgtgatccattacgtaaatggagtaagcacccaagggatgacactggaggaggtaaatagagcattagatatgtctctccccagccttgtccttaaagctacccgcaacgaccttccggtggtccctagttctaagcggtccgctgtgagtgcccctaagagcacaaagggcaacgggagttactccgttggtagctgcagccagcctgctttgacacctaacgattcgttctccactgttgccggtgaagagataaatgaaatcagttatcctaaaggcaagtgcagcacctaccaaatcaagggctcaccaaacctgactctgcccaaggaatcttatattcaggaggacgatatctatgacgactcccaagaggccgaagtcatacaaagcctactcgacgttgttgatgaggaggcccaaaatctgctcaatgaaaataatgcagccggttatagttgcggcccagggactttgaagatgaatgggaagctttctgaagaaaggactgaagatacagactgcgatggctctcctcttcccgagtactttaccgaggctaccaagatgaatggctgcgaagagtactgtgaggagaaggtcaagtctgaaagtctgattcagaagccccaggaaaagaaaacggacgatgacgagattacatgggggaatgacgagctgccaatcgagcggaccaatcacgaggatagtgataaagaccacagctttctgacaaacgatgaactggcagtgctccccgtggttaaggtccttcctagtgggaagtatactggagcaaatttgaagtccgtaatccgggtccttagggggctgctagatcagggtataccctcaaaagaactggaaaacttacaagaactaaagcccctagaccagtgtctcattggtcagacaaaggagaatagacggaagaacagatataaaaatatcttgccctacgatgcaacccgcgttcctctaggagatgagggcggctatatcaatgcgagcttcattaaaattcctgtgggaaaggaggagtttgtgtacatcgcatgtcagggtccgctccccacaaccgtgggggacttttggcagatgatttgggagcagaagtctacggtgatcgctatgatgacgcaagaggtggagggggaaaagatcaagtgtcagcgctactggcccaacatacttggaaaaacaacaatggtgtccaataggctgagactggccctggtgcgaatgcagcagctgaagggctttgtcgtccgcgccatgactctggaagatattcagacgcgggaggtccgacacatctcacacctcaactttaccgcttggcccgatcatgacacccccagtcagccagatgatctgttgactttcatttcttatatgagacatatccatcggtccggacctattatcacccattgctccgctggaatcggccgttctggaactttaatctgtatagacgtggttctcggcctgatcagtcaggacctcgactttgatatctccgacctggttagatgcatgcggcttcagcgccacgggatggttcagaccgaggaccagtacatattctgctatcaggtcatattgtacgtgctcactcgccttcaagcagaggaagagcagaaacagcagccccagctgctgaaatag

SEQ ID NO: 201661 - DNA, 7401 bp, synthetic construct
  misc_feature 1..7401: note = Description of Artificial Sequence: Synthetic coding sequence
  source 1..7401: mol_type = other DNA
atgcacgtgagcctggccgaggccctggaggtgcggggcggccccttgcaggaggaagagatctgggctgttcttaatcaatcggccgagtcactgcaggaactattcaggaaggtgtctctagctgaccctgctgcattggggttcattatcagtccttggagtctcctcttgctccctagcggtagcgtgagcttcaccgacgagaacatttctaaccaggacctgagagcctttactgctccagaagtactccagaaccagagcctaacgtcactatccgatgtagaaaaaatccatatttatagtttgggcatgactctgtactggggcgcggattatgaggtgccacagtcccaaccaatcaagttaggagaccatttgaattcaatccttctgggtatgtgcgaagacgtgatttatgcccgcgtctcagtacgcaccgtcctcgatgcctgctccgcacatattagaaattctaactgcgctcccagtttcagctacgtgaaacacctcgtcaagctggtgctcggaaatcttagtggaacagatcagctcagctgcaacagcgagcagaagccagaccgcagtcaggcaataagggatcgcctgcgcgggaaagggttaccaaccggaagaagctcgacttccgacgtgctcgatattcagaaacctccactaagtcaccagacattcctgaataaaggactcagcaagagcatgggtttcctgtctatcaaagatactcaggacgaaaattacttcaaggatattctcagtgacaatagcggcagagaagactcagagaacacctttagcccctatcaattcaaaacaagcggccccgagaagaagcccattcccggaatcgacgtgttatctaaaaaaaagatctgggccagcagcatggacctcctgtgcactgctgacagagacttttcatcaggggagaccgccacataccggcgttgtcaccccgaggcagtgaccgtgaggacctccaccacaccccgaaagaaagaggctaggtacagcgatggctctatcgcactagacatctttggcccacaaaagatggatccaatctaccacacccgggagttacctacttcttccgctatttctagtgccctggaccgaatccgcgaaagacagaagaaactacaggttcttcgggaggccatgaatgtggaagagcctgttcgtcggtacaaaacctaccatggagacgtattctccacttcgagtgagtctccctctattatctcgagcgagagtgactttagacaagtaagacgctcagaagcctcgaaaaggtttgagagctcctctggtctgcccggggtggatgagacactaagccagggacagagccaaaggccctcaagacagtacgagacccctttcgaaggtaatctcattaatcaggaaatcatgttaaaaaggcaggaagaagagttgatgcaactgcaggcgaagatggctttacggcaatcccggctatctctttacccgggggatacgatcaaggcatccatgcttgacattacgcgggaccctctgcgtgagattgccttggaaactgcgatgacccaacgtaaattacgcaattttttcgggcccgagttcgtaaaaatgactatcgagccctttatctcgctggacctgcccagatctattctgaccaaaaagggtaaaaacgaggacaatcggagaaaggtgaatatcatgctactgaatggacaacgcttagagctgacatgcgataccaaaacaatctgtaaggacgtattcgatatggtggttgcccacattggattagtggaacatcacttgttcgcacttgccacacttaaagataatgaatacttcttcgtggatccagatctgaagctcaccaaggtcgctccagagggctggaaggaagagcctaagaaaaagacgaaggcaacagtcaactttaccttgttcttcaggatcaaattctttatggacgacgtgtccctgattcagcacaccctgacctgtcaccaatactatctgcagttgcggaaggatattttagaggaacgcatgcattgcgatgacgagacttctttgctgctcgcctcactggctctccaagccgagtatggggactaccaaccagaagttcatggtgtctcgtatttcagaatggagcactatctgcctgcacgagtgatggagaaactggacctttcatacatcaaggaggagctacccaaattacataacacatatgtgggtgcttcagaaaaggagacagaactcgagttcctgaaggtttgccaaagattgactgagtacggagttcacttccaccgggttcatccggaaaagaaatcgcaaaccgggatcctgctgggggtctgctcgaaaggcgtgcttgtcttcgaagtgcacaacggagtgaggacattggtcctgaggttcccgtggcgcgagaccaaaaaaatttctttcagtaagaaaaaaatcacactgcaaaacacaagtgatggcattaagcatggcttccagacagataacagtaaaatatgccagtatctcctgcatctctgcagctaccagcataagttccagctccagatgagagctcgccagagtaaccaggacgcccaagatatcgagagagccagttttaggtctctgaatctccaggctgaatccgtgaggggctttaacatgggacgcgccataagcacaggcagcctggccagcagcacattgaacaagcttgccgtgcgtccactctctgtacaagcagaaatacttaagcgccttagctgctccgaactcagcttgtaccagcctctgcagaattcaagtaaggagaagaacgataaagcctcctgggaggagaaaccccgggaaatgtcgaagagctatcacgacctgtcccaagcttcactctatcctcatagaaaaaacgtaatagttaacatggagccaccacctcagaccgtggccgagctggtcggcaagcccagtcatcagatgtccagaagcgatgccgagagtctggccggcgtcaccaagttaaataattcaaaatccgtggcaagtctcaatcggagccctgagagaaggaagcacgagtccgatagctctagtattgaagaccctgggcaggcttacgtgttggatgtgttgcacaaacggtggtccatagtaagcagccctgaaagggagataacactggtaaacctaaagaaggacgccaagtacgggcttggctttcagataattggcggagagaagatggggcgcttggatttaggtattttcatcagctccgtggcccccggtgggccggccgatttggatggctgtctgaaacctggggatcgactgattagtgtaaactcagtgtccctggaaggtgtctctcatcatgctgccatcgagattctccaaaatgctcccgaggacgtgaccctcgtgatatcacagccaaaggagaagatttctaaggtcccatccactccagtgcatctgaccaacgaaatgaagaactacatgaaaaagtcctcctatatgcaggactctgctatcgattcctccagtaaagaccatcactggtcaagggggacactccgccacatatccgaaaacagcttcgggccctccggcggtctgcgtgagggcagcctgtcaagtcaggactcacgcacggaatcggcaagtcttagccagagccaggtgaacggattcttcgcctctcatctcggcgatcagacgtggcaggaaagtcagcacgggtcgcctagtccatcagtgatcagcaaggcaaccgagaaggagacattcacagattccaatcagtctaaaacaaaaaagcctggaatttccgatgtgaccgactacagcgaccggggggactccgacatggatgaggcaacctattcatcatctcaagatcaccagacaccaaagcaagaaagcagttcctcagtgaatacctctaacaaaatgaatttcaagactttttcgtcatccccacctaagcctggagatatatttgaagttgaacttgctaaaaacgataattctctgggtatctctgtaaccgggggcgtgaacacctccgtccgacatggcgggatctacgtgaaggctgtcatcccccagggcgcagctgaatccgatgggcgcatccataaaggggaccgggttttagcggtcaacggagtgtcgctagagggagccacacacaagcaggccgtagaaacccttcgcaacaccggtcaggtggtccacttactccttgagaaagggcagtcccccacctccaaggaacacgtgcctgttacaccgcagtgcacactgagcgatcaaaatgcccagggccaaggtcctgagaaggtgaaaaagactacccaggtgaaagactactcatttgtgaccgaagagaacacatttgaggtgaaactgttcaaaaactcatcaggtctgggcttcagcttttctagagaggacaatctgattcctgagcagattaatgcatcaatcgtgagagtgaagaaactgttcccaggccagccagctgcagaaagtgggaagatagacgtcggcgatgtgatccttaaggtgaatggggcaagccttaagggactcagccagcaggaagtaatttctgcactgcgcggcactgccccagaggtgtttctcctgctgtgcagacctccgcccggcgtcctgcccgaaatcgataccgcactactcacacctctgcagagccccgctcaggtgctgccaaatagtagcaaagatagcagccagccctcttgtgtggagcagtcaacctccagtgacgagaatgaaatgagcgataagtcaaaaaaacagtgcaaaagtccaagccggagggactcttactccgatagctcaggtagtggagaggacgatctcgtgacggcccccgccaacatctcgaattctacgtggagtagcgccctgcatcagacactcagcaatatggtcagccaggcccagagccaccacgaggctcccaagagtcaagaggatacaatttgtactatgttttactatccgcagaagatccccaataaaccggagtttgaagatagtaacccaagcccgcttcctccagacatggctccaggtcagagttatcagccccagtcagagtctgcgagttcatccagtatggacaagtatcacatccatcacatttcagaaccaacacggcaagaaaattggaccccactcaaaaacgatctggagaatcacctagaggatttcgagctggaggtcgagctcctgatcacccttatcaagtccgaaaaaggctccttagggttcacggtgacaaagggcaaccagagaatcggctgttacgtgcacgacgtcattcaggatcccgccaagagcgacggaagactgaaacccggtgaccggttgatcaaagtgaacgacactgacgtcactaacatgactcatactgatgcagtcaatctgctccgagctgccagcaagacagtgcgacttgtcattgggagagtgttggaactgccccgcatccctatgcttccccacttactccctgatataaccctcacatgcaataaggaggaactaggattctctctgtgcgggggtcacgatagtttataccaggtcgtttacatttctgacataaatcccaggagcgtcgctgccatagaaggtaatcttcagctgctcgacgtgatccactatgtgaacggcgtgagcacgcagggaatgacactcgaggaggtgaatagagccctggacatgtctctgccatcactggtgctgaaagccacaaggaacgaccttcccgtcgtaccgtccagcaaacggtccgcagtttcagcacccaagtccacaaagggaaatggcagctattctgttggtagctgttcccagcctgcactgacccccaatgacagtttttcgacggtggctggggaagagatcaatgagatctcttatcccaagggtaagtgttcaacatatcagattaaaggatcaccaaacctgactcttccaaaggagtcctatatacaggaggacgatatatacgacgactctcaggaagcggaggtgatccagtccctgctggacgtagttgatgaggaagcacagaacctgctgaatgaaaacaatgctgcagggtacagttgcggcccaggcaccttaaaaatgaatgggaagctgagcgaggagcgtacagaagacactgattgcgacggatccccactgcctgagtacttcacagaggcgactaaaatgaatggctgcgaagaatattgtgaagagaaggttaagtcagagagcctgatacagaagccacaggagaagaaaacggatgacgacgagattacctgggggaacgacgaactccctatcgaacgaaccaatcatgaggattccgacaaggaccacagctttcttacaaacgatgagctggccgtgctgcctgttgtgaaggttctcccatcaggaaagtatacaggagcaaaccttaagtcagtaattagggtgttgagggggctgcttgaccaaggaattccttcaaaggaactggaaaatttgcaggagcttaagccccttgaccagtgcctgatcgggcagacaaaggaaaaccgtcgaaaaaatcgatacaaaaacatactcccgtacgatgcaacccgggttcctttgggggatgagggtggctacatcaatgcatcatttattaagatacctgtaggcaaggaagagtttgtatatattgcatgccagggtccgctacccacaaccgtcggggacttttggcaaatgatctgggagcagaaatctactgtcatagcaatgatgactcaagaagttgaaggcgagaaaatcaagtgtcagcgctactggcccaatattctgggaaagactacaatggtttcaaatcggctgcggctggcattagtccggatgcagcagctgaagggttttgtggtccgggctatgaccttggaggatattcagacaagagaggtcaggcacatctcccatctaaacttcacagcttggcctgatcatgacaccccatctcagccagatgacctactgacttttattagttacatgaggcacatccatcgctcgggacccattattacccattgcagtgccgggattggtcggagcggcaccctaatctgtattgacgtagttcttggccttatctcccaagacctggacttcgacatttcagatctggtgcggtgcatgcggctccagaggcatggaatggtacagactgaggatcaatacattttttgctaccaggtgattctttatgtcttaacccgtttgcaagcagaggaggaacagaagcaacaaccacaactgctcaagtag

SEQ ID NO: 201662 - DNA, 7473 bp, synthetic construct
  misc_feature 1..7473: note = Description of Artificial Sequence: Synthetic coding sequence
  source 1..7473: mol_type = other DNA
atgcacgtgagcctggccgaggccctggaggtgcggggcggccccttgcaggaggaagagatttgggctgtgctgaaccagtccgcagagtcactgcaggaattgttccgaaaggtgtccctggcagaccctgccgccttgggcttcataattagcccatggagccttttgctgctcccctctggctctgtctcctttaccgatgaaaatatctccaatcaggacttgagagcctttaccgcgccggaggttctgcaaaaccaatcgctaacaagcctttcagatgtggaaaaaatacacatttattctcttggcatgactttatactggggagctgactatgaagtgcctcaatcccaacccatcaaattaggtgaccaccttaactctatcttactgggcatgtgtgaggacgtgatctatgcacgtgtctccgtgcgtaccgttctcgatgcatgtagcgcccatatccgcaatagtaattgcgctcctagcttttcctacgtgaagcatctcgtcaagctggtcctggggaacctgagcggaacggaccagttatcctgcaactctgaacagaaacctgaccgatcgcaggctattcgggaccgcttacggggaaaaggtctgcccacaggcagatccagtacatccgatgttctcgatatacaaaagcccccgctctcacaccagacgttcttgaacaagggacttagcaaatccatgggcttcctctccatcaaggatacgcaggacgaaaactatttcaaagacatactgtcagataattctgggcgcgaggactctgagaatacttttagtccttatcaattcaagacaagtgggcctgaaaaaaagcccattcctggcattgacgtgctgtctaagaaaaagatctgggcctcaagcatggacctgctctgcacggctgatcgggatttcagctctggggaaaccgccacgtaccgtcggtgtcatcccgaggccgtgaccgtccgaactagcactactccccgaaaaaaggaggctcgctattctgacggaagcatagctctggatatctttggcccccaaaaaatggaccctatttaccatactagggagctgccaacctccagcgcgatctcctctgccctagatcggatccgggagcgtcaaaaaaagctgcaggtgctgcgggaagccatgaacgtggaagaaccggtgcggcgctataagacataccacggtgatgtgttttccacttcctcggagtctccatccatcatttcttccgagagcgattttcggcaggtccgcaggtctgaagcatctaaacgttttgaatccagcagcggtttgcccggtgtggatgaaactctcagtcagggacagagccaaagaccctctaggcaatatgaaactcctttcgaaggaaatctcatcaaccaggaaatcatgttgaaaaggcaggaagaggagcttatgcagttacaggcaaaaatggctctgaggcagagccgcctgagcttgtaccccggcgacaccattaaggcttctatgctggatataactagggatcccctgcgcgagatcgcacttgaaaccgctatgacacagaggaaacttcggaacttttttggccctgagtttgtaaagatgacgattgagcctttcatctcattagatctgcccagatctatactcactaagaaggggaagaatgaagacaaccggcggaaggttaacattatgctcctgaatgggcagaggttggagctcacttgtgacactaagactatatgtaaagatgtgtttgacatggtcgtggctcacataggactggtggagcaccacctcttcgcacttgccaccctgaaggataatgagtatttctttgtcgatccagacctgaaacttactaaggtcgcaccggaggggtggaaggaagagccaaagaaaaaaacaaaggccactgtcaatttcaccctgttctttcgaatcaagttcttcatggatgatgtctctctgattcagcacactctgacatgccaccaatattatctgcaactgcgaaaggacatcctagaggaacggatgcactgcgatgacgagacaagcctgttgctggcatcgcttgccttacaggcggagtacggcgattaccagcctgaggtccatggggtgagctacttcaggatggagcactacttgcctgcccgggttatggagaaactcgatttgagctacatcaaggaagaacttcctaagctccacaatacctacgtgggagcctctgagaaggaaacagagctcgagtttctcaaggtttgccagaggctcactgagtatggagtgcatttccatcgggttcaccccgaaaagaagtcgcagacaggcattctgctcggagtttgttccaagggagtgctggtgttcgaggttcacaacggagtgagaaccctggttcttaggtttccctggagagagacaaagaagatctccttctcaaaaaagaagataaccctgcagaacacctccgatggaataaagcacggatttcagaccgataatagcaaaatttgccagtacctcttacatctttgctcttaccagcataagtttcagctgcagatgcgggccagacagtccaaccaggatgctcaagatatagaacgggcctcatttcggtcactgaacctccaggcagagtcagtccgcggatttaacatgggccgagccataagtaccggatctctcgcgtcatcaaccctgaacaaactggctgttaggcctttgagtgtgcaagcggagattcttaagaggctgtcttgctccgagctcagtctgtaccagcctctgcagaacagtagcaaagaaaagaatgacaaggcctcgtgggaagagaaacctcgcgaaatgagcaagtcttaccatgatcttagccaggcctctttgtacccgcatcgcaagaatgtgatcgttaatatggaacctcctccacagactgtggcagagctggtgggaaagccgagccaccaaatgtctcgctccgatgctgaatcactggcaggtgtaaccaagctgaataatagtaagagcgttgcttccctgaacagatctccagaaagaagaaaacatgagtccgattcatcctctattgaggacccggggcaggcctatgttctcgggatgaccatgcactcctcaggtaattctagttctcaggtccctctaaaggagaatgacgtactccacaagcgctggtccatcgttagttctcccgagcgggagattacactggtcaacctgaaaaaggacgccaaatacgggctgggctttcagattatcggaggagagaagatgggacgtttagatcttggcatcttcatatcctctgtggcccctgggggccctgcagatctggatgggtgtctgaagccgggggacagactgataagtgtcaactccgttagcttggagggggtgagccatcacgccgctatcgagatcctacagaatgctcccgaggacgtgacactagtcataagccaaccaaaggagaagatctccaaggtgcctagtacacctgtacacctcaccaatgagatgaaaaattacatgaagaaatcttcgtatatgcaggattcagccatcgactcctcttctaaagaccaccattggagccgaggtacattgagacatatttccgagaactcatttggaccgtctgggggcctgagggaagggtcactttcctctcaggattctcgaaccgagagcgccagcctttcccagagccaagtgaatgggttttttgcatcccacctgggagaccaaacctggcaggagtcacagcacggatcgccctcaccgtctgttatatcaaaggctacagagaaggaaaccttcaccgatagtaatcagagcaaaacaaagaagcccggaatctcggacgttacagactattccgataggggtgattccgatatggacgaagccacatattccagctcccaggaccaccaaacacctaagcaagaatcgtcgtcaagcgtgaacacctccaataaaatgaatttcaagacgttcagctcatcccctccaaaacctggggacatttttgaggtggagttagccaagaacgataactctcttggcatctctgtgacagtgctgttcgataagggcggggttaatacctcggtgcggcacgggggcatctacgtcaaggccgtgatcccacaaggcgccgctgagtccgatgggcggatccataaaggggatcgagtacttgccgtaaacggtgtgtctcttgaaggagccacacacaaacaggccgtcgaaacgctgagaaatactggccaagttgttcacctactgctggaaaagggtcagtcccccaccagtaaagaacatgttcccgtaaccccccagtgtacgcttagcgaccagaacgcccaggggcaaggtccggagaaagtaaagaagacgacccaggtgaaagattacagttttgtgacggaagagaatacctttgaggttaagctcttcaaaaactcgtccgggctgggattctccttctcccgagaggacaacctgatccccgagcagattaacgcctctatcgtgagggttaagaagcttttcccagggcagccagccgcagagtctggtaaaatagacgtgggggacgtgatactaaaagttaatggcgcctcactgaagggattgagccagcaggaggtcatatccgccctgcgcggtacagctccagaagtatttctgttactgtgcaggccaccgcccggggtgctgcccgaaattgatacggcattgcttacacccctgcaatcccctgctcaggtcctcccaaacagttcaaaagactcaagccagcccagttgcgttgaacagtctactagctccgacgaaaacgagatgagcgacaaatccaagaaacagtgcaagagtccaagcaggcgcgacagttactctgattcgtctggaagcggcgaggacgacttagtcactgcccctgcgaacatcagcaattccacgtggagcagtgccctccaccagactctgagtaatatggtgtctcaggcccagagtcatcatgaggcgcctaagagtcaggaagatacaatctgcactatgttttactatccgcaaaaaatcccaaataagcctgagtttgaggacagtaatccaagtcccctcccaccagatatggctcctggacagagctaccagcctcagagtgaatcagcctccagctcatccatggacaagtaccatattcatcatatttcagagcccactcgacaggagaattggacgcccctgaagaacgatctcgagaatcacctggaggactttgagctggaggtggaactgctgattactctaataaaaagtgagaagggatctctgggcttcaccgtgactaaaggaaatcaacgaatcggatgctatgtgcacgatgtaatccaagaccccgccaaatcagatgggcggttaaaacctggcgatagattaattaaagtgaatgacactgacgtgaccaacatgacacacaccgatgcagtcaaccttttgagggctgcatctaaaacggttcgactggtgattggtcgggtgctggagcttccacggattcctatgctgcctcacttgctgcctgatataaccctgacctgtaacaaggaggagttgggattctctttatgcggggggcacgactctctctaccaggtcgtctacatttccgatattaaccctaggagtgtggccgcaatcgaaggtaacttacagcttctcgatgtgatccactatgtcaacggggtctctactcagggtatgaccctggaggaggttaatcgggcgctggacatgtcactaccaagcctcgtcctgaaggcaacgcgcaatgatctccccgtcgtcccaagttctaagcgatcggccgtgtcagcccctaaatccaccaaggggaatggaagctactcagtggggagctgtagccagcctgccctcacccctaatgatagtttttctactgtggcgggggaagaaatcaatgagattagttatcctaaaggaaagtgcagtacataccagataaaagggagtcccaacctgacactgccaaaagaatcttatatacaagaggacgacatatacgatgattcccaggaggcagaggtgatacagagtctgcttgacgtcgtcgacgaagaggcccagaacctcttgaacgaaaacaatgccgccggatacagctgcggaccagggactttaaagatgaatggaaaattgtcagaagagaggactgaagatactgactgtgacgggagtcctctgcctgagtacttcaccgaggccacaaagatgaatggatgtgaggagtactgtgaggagaaagtgaagtccgaatccctgatccagaaaccacaagagaaaaagacagatgatgatgaaattacatggggaaacgacgagctgcctatcgaaaggacgaatcacgaggactctgacaaagaccattcattcttgactaatgacgagctggctgtacttccagtggtgaaagtgctcccttccggaaagtacacaggcgccaatcttaaatcggtgattagggtcttgcgaggcttgttggatcaaggaatcccctccaaggaactggagaatctgcaggaattaaagcctctggaccaatgtttaatcgggcagaccaaggaaaatcggaggaagaatcgatacaaaaacatcctcccatacgacgcaacccgtgttcccctgggtgatgaaggaggatacattaacgcttctttcatcaagattcctgtcggaaaagaagagtttgtctacattgcttgccaggggccactccctacaaccgtcggggatttttggcagatgatctgggaacaaaaaagcacagtgatcgcaatgatgacccaagaagtagagggagagaaaatcaagtgccagcggtactggccaaacatccttggcaagaccacgatggtcagtaaccgtctaagactggcactggtgcggatgcagcagctgaaaggtttcgtggtaagagcaatgactctggaggatatacaaaccagggaggtgcggcacatcagccatcttaatttcacagcttggcccgatcacgacacaccaagtcaacctgacgacttactgacattcatcagctatatgagacacatacacaggtccggaccaatcataacccactgttccgctggcatcggcagaagcggtaccctaatctgtattgacgttgtgttaggattaatctcacaggatctggacttcgatatctctgacttggtgcgctgtatgagacttcagagacacggaatggtccagaccgaagatcagtacattttttgctatcaggtgatcctatacgtcctgacacgcctgcaggccgaagaggagcagaaacaacagcctcagctgctgaaatag

SEQ ID NO: 201663 - DNA, 420 bp, synthetic construct
  misc_feature 1..420: note = Description of Artificial Sequence: Synthetic coding sequence
  source 1..420: mol_type = other DNA
atgcacgtgagcctggccgaggccctggaggtgcggggcggccccctgcaagaggaagagatctgggccgtgctgaaccagtctgcagaaagcctccaagaactgtttcggaaggttagtttggctgatcctgccgccctgggctttatcatttccccctggtccctgttgctccttccgagcgggtcagtgtcttttactgacgaaaacatctctaaccaggatttacgcgcgttcaccgccccagaagtgcttcagaatcaatcgctgacaagcctcagtgatgttgaaaagatccatatctacagtctcggaatgaccctttactggggcgctgactacgaagtgccacagagccaaccaataaagttgggagatcatttaaacagtattctgctcgggatgtgtgaagacgtatag

SEQ ID NO: 201664 - DNA, 7473 bp, synthetic construct
  misc_feature 1..7473: note = Description of Artificial Sequence: Synthetic coding sequence
  source 1..7473: mol_type = other DNA
atgcacgtgagcctggccgaggccctggaggtgcggggcggccccctgcaggaagaagaaatctgggctgttctcaatcagagcgctgagtccctccaggaactttttcgtaaggtctcccttgcagatccagctgcactaggcttcatcataagtccctggagtctcctcttgctgcccagcggtagcgtctcttttacggacgagaatattagtaatcaagacctgcgggcctttacggctcccgaggtgttacaaaatcagtccctcactagtctttctgatgtcgagaaaatacacatctacagtttaggcatgaccctgtactggggggcagactatgaggtcccacagagccagccaataaaacttggggatcatctgaactctatcctgctggggatgtgtgaggacgtcatctatgcgagagtaagcgtgcgaaccgtgctcgacgcatgcagcgcccacattagaaacagtaattgtgctccatctttctcttacgtgaaacacttagttaaactcgtcttgggcaatttaagcggcactgaccagctttcttgtaatagcgaacaaaagcctgatagaagccaggctatcagggaccgcctcaggggaaaaggactaccaacaggcaggagcagcacttccgacgtgcttgacatccaaaaacctcccctgtcccatcagacatttctgaataagggcttgtctaaatcaatgggttttttatccattaaagatacacaggacgagaactattttaaggatatactgagtgataactctggccgggaggatagtgagaatacgttctctccatatcaattcaagaccagtgggcctgagaagaaaccaatccctggcatcgatgtgctgtctaagaaaaagatatgggccagctccatggaccttctgtgcaccgccgatcgtgatttctcttccggggagaccgctacatatcgaaggtgccatcccgaagcagtcactgtgcggacgtccacaacccctcggaagaaggaggccaggtatagcgatggtagcattgccctcgacatctttggaccgcagaagatggatcccatctaccatacgcgggagctgccaacttcctcagctataagctccgcactcgatcgtattagagagaggcaaaagaaattacaggttcttagggaagcgatgaatgtcgaggagccagtccggcgatacaaaacttatcacggcgatgtcttctctacgagtagcgaatcacctagcatcataagttctgagtcggatttcagacaggttcggcggagcgaggcctccaagcgcttcgaatcaagcagcggcctgcctggcgttgacgagacgctgagccaaggccagagtcaaagaccttcccgccagtacgagaccccattcgagggcaacctcatcaaccaggagatcatgctgaagcgccaggaggaagaactgatgcagctccaggcaaaaatggccttgagacagagtcggctgtctctgtaccctggcgatactataaaggccagcatgctggatattaccagggacccactcagggaaattgccttggagacagcaatgacacagagaaagctgcgcaacttcttcgggcccgagttcgtgaaaatgacaattgaacctttcatctcgcttgatctgccgcgctctattcttactaaaaagggcaagaatgaggataacaggcggaaggtaaatataatgctgctcaacggtcaaaggctggaactgacctgtgacaccaagacaatttgcaaggacgtcttcgatatggtggtcgcccatatcggcctggtcgaacaccatctgttcgccctggcaaccctgaaagacaatgagtacttttttgttgatccagacctcaagcttactaaggtcgcgccagaagggtggaaggaggagcctaaaaagaagactaaggccactgtaaactttaccctcttcttccgaatcaagttctttatggacgacgtgtcactgatccaacatacccttacctgccatcagtactacttgcagctccgtaaggacatcctcgaggagagaatgcattgcgatgatgagacttccctgctgcttgccagtcttgccttgcaagccgagtacggggactatcagcccgaagtgcatggggtgagttatttcagaatggagcattatttaccagcaagggtaatggaaaaacttgatcttagctacattaaagaggaactccccaagctgcacaatacatatgtgggagcttctgaaaaggaaaccgaactcgaattcctcaaagtctgccagcgactaacagaatatggtgtgcacttccatcgcgtgcaccccgaaaagaaaagccagacagggatcctgcttggcgtttgttccaagggtgttctggtctttgaggttcacaacggcgttaggactctcgtcctgcgttttccctggagggaaacaaaaaagatcagttttagcaaaaagaaaattacacttcagaataccagtgatggtattaaacacggattccagactgataattctaagatctgccagtacctgctgcatctgtgttcgtatcaacacaaatttcagcttcagatgagggcccgccagagtaatcaggacgctcaagacatcgaacgcgcatcattccgaagtctgaacctccaggcagaatccgtccggggcttcaacatggggagggccatctccacggggtccctcgccagctccactctgaacaagctagcagtgcgccccctgtctgtgcaggcagagatcctgaagcgactgtcctgtagcgagctgtccttgtatcagcccctgcagaattcttcaaaggaaaagaacgataaggccagctgggaggaaaaacctcgtgaaatgtctaagagctaccatgatttgagccaggcctccctgtaccctcaccgtaaaaacgtgatcgtcaatatggagcccccccctcaaaccgtggccgaattagtcggtaagcccagtcaccagatgtcacggagcgatgccgagtctttggcaggagtcacgaaactgaataacagtaagagcgtggcaagcctgaatcgctccccagagagaagaaagcacgaatccgatagttcatctattgaagacccaggccaggcttatgtgctgggcatgacaatgcattcctccgggaactcttcctcacaggtcccactcaaagagaacgatgtgctacacaaaaggtggtcaatagtttcatcccccgagagggaaattaccttagtcaacttgaaaaaagacgcgaaatacgggctgggcttccagataatcggaggggaaaagatgggtagacttgatctcggaatcttcataagctccgttgccccaggaggaccagcggatctggacgggtgcctgaagcctggggacaggcttattagtgttaattctgtgagcctcgagggggtttctcatcatgccgcaattgagattctacagaacgcacccgaggatgtcacactcgttattagccagcctaaagagaagatatctaaggtgccgtctaccccagtgcatttgaccaacgagatgaagaactacatgaaaaaaagtagttatatgcaggattcagccatcgacagctcgtccaaggaccaccactggtctcgaggaactctgcggcacatctccgagaatagcttcggaccttctggtgggctcagggagggatctttaagttcccaggactcacgaaccgagtctgctagcctgtcccagtcacaggtcaatgggtttttcgcttcacacctgggggaccagacatggcaagagtcacagcatggaagtccaagcccatccgtgataagcaaagccacagaaaaagaaacatttacagactccaatcagagcaagacaaagaagccgggaatctctgatgtaactgactatagtgatcgcggggatagcgacatggacgaagcaacatattcgtcgtcacaggatcaccagacaccgaaacaggagagctcttcttctgttaatacctccaacaagatgaactttaaaactttttccagcagcccacctaagccaggtgacatttttgaagtggagctcgccaaaaacgacaactcactgggaatttcggtaactgtgctttttgacaagggcggagtcaacacctcagtgcgccacggggggatatacgtcaaagcagttatcccacagggtgccgctgagagcgatggaaggatccacaagggagatcgagtgcttgcagtcaacggcgtcagtctggaaggtgccactcacaagcaggccgtcgagacacttcgcaatacagggcaagttgtccatttgcttctagaaaaggggcagtcgcctaccagtaaggagcacgtccccgtgactccacagtgtactttgtctgaccagaacgcacagggtcagggaccagaaaaggtgaagaagaccactcaggttaaagactattcattcgttaccgaagagaacacatttgaagtgaagctcttcaagaattcttccggtctggggtttagcttctctagggaggataatctgattcccgaacagatcaatgctagtatcgtgagggtgaagaaactctttccaggacaacccgcagccgaatccgggaaaattgacgtcggagacgtcatactcaaagtcaacggagcgtccctgaaggggctaagtcagcaagaggttatcagcgctctgcgcggaaccgcaccggaggtgtttctgctgctgtgtagacctcctcccggggtcctgccagagattgacaccgccctattgacccctctgcagtcacccgcgcaagttcttcccaactcgtcaaaagattccagccagcctagctgtgtggaacagtcaacgtcctctgacgagaacgagatgagcgacaaatcaaagaagcaatgtaagagcccctcacgaagggactcatattccgattcttctggcagtggggaagatgatctggtgacggcgccggccaacatctcaaatagcacctggagcagcgctcttcatcagactctgtctaatatggttagtcaagcgcagtctcatcatgaagcacctaaaagccaagaagacaccatctgtactatgttttattacccccagaaaattccgaacaagcctgagtttgaagacagcaatcctagccccttgccgccagatatggctccagggcagagttaccaacctcagagtgagagcgcatccagtagctccatggataaataccacatacatcacattagcgagccaacgcggcaggaaaattggactcccctgaagaatgacctagagaaccacctggaggattttgaattagaggtcgaacttcttattaccctgatcaaatccgagaaaggatccctcgggttcacggtgaccaaagggaaccagagaatcgggtgctatgtccatgacgtgatccaagatcccgccaaaagcgacggccgattaaagccaggggatcgtttgattaaagtcaatgacaccgacgtaacaaacatgactcacacggacgccgtgaatctgctccgcgcggcctcaaaaacagttagactggttatcggccgagttcttgaattgccaaggatcccaatgctgccccacctcctcccagacatcaccttgacctgtaataaggaggagctggggttctctctatgtggagggcatgattctctttaccaggtggtttatattagcgatatcaatcctagatcagtagcagctattgaaggaaatcttcaacttctggatgtgatacactacgtcaacggggtctctactcagggaatgacgctagaggaagtaaatcgcgctctcgacatgagcctaccatctctggttctaaaggcaaccaggaacgaccttccggtggtgccctccagcaagaggtctgcagtgtctgccccgaagagcacaaaaggaaatggctcttatagtgtagggtcctgcagtcagcccgcgttgacaccgaatgacagcttttccacagtggcaggcgaagaaatcaacgaaatcagttatccaaagggcaaatgctcgacatatcagatcaagggcagccctaacttgaccttaccgaaggagtcctatatccaggaggacgatatctacgacgacagtcaggaggccgaggttattcagagcctcctggatgtcgtggatgaggaagctcagaatctcctgaacgaaaacaatgcagccgggtacagctgtggtcctggaacactgaagatgaacggtaaactgtccgaggagcgcacagaggataccgattgcgacggaagtcctcttcccgagtatttcactgaagcgacaaagatgaacggttgcgaagaatactgcgaggagaaggtgaagagtgaaagcctgatacagaagcctcaggagaagaaaacagacgacgacgaaataacgtggggcaacgacgaactgcccatcgagcgcactaatcatgaagatagcgacaaggaccatagcttcttaacaaacgatgaattagccgtgctgccggtggtgaaggtcctcccatcgggaaaatacaccggagctaacttgaaaagtgtcatcagggtgttgcgcggcctgttagaccagggcataccaagtaaggaactcgagaacctacaggagttgaaacctcttgaccagtgcctcattggccaaacgaaggaaaacaggaggaaaaaccggtacaaaaatatactgccatacgacgcgaccagggtcccactgggagacgaaggtggatatataaatgcttcctttattaagatacccgtgggcaaggaggaatttgtgtacattgcttgtcagggaccactgcctacgaccgtcggcgatttttggcagatgatctgggagcagaaatctaccgtgattgccatgatgacacaggaggtggaaggcgaaaagatcaaatgccagaggtattggccgaatattctcggaaagacaacaatggtgtccaatagacttcgtttggctctagtcagaatgcagcaattaaaagggtttgtggtgcgggcaatgaccctggaagacatacagacccgagaggtgagacacatcagccatctaaacttcaccgcttggcctgatcacgacaccccctctcaaccggatgatctgctaacattcatcagttacatgcggcatatccaccgttccggacctatcatcacacactgctctgccgggatcggtagatccggcactctgatttgcattgacgtggtgctcggactcatctcccaggatctggacttcgatatttccgatctcgtgcgttgcatgcggctgcaaagacacggcatggtgcagaccgaggatcagtacatattttgctaccaggtgatactgtacgtgctcacgcgcctgcaagcagaagaagagcagaaacaacaaccacaactgctgaagtag

SEQ ID NO: 201665 - DNA, 3564 bp, synthetic construct
  misc_feature 1..3564: note = Description of Artificial Sequence: Synthetic coding sequence
  source 1..3564: mol_type = other DNA
atgcccttcggcctgaagctgcggcggacccggcggtacaacgtgctttcaaaaaactgtttcgtaacccgcataagactactcgatagcaatgttatcgagtgtaccctgtcagtcgagagcacagggcaagagtgcctcgaagccgtagctcagaggctggagttgcgggagacacattactttgggttgtggtttcttagtaagagccagcaggccagatgggttgagttggagaagccactgaagaagcacctcgacaaattcgctaacgagcctctgttgttctttggcgtgatgttctatgtccctaatgtgagctggctacaacaggaagcaactcgctaccagtattacctgcaggtgaagaaagatgttctggaaggccgcttgaggtgtaccctggatcaggttatacggctcgcagggctggccgtgcaggcagattttggcgactacaatcagttcgactcacaagattttctgcgagaatacgtgctgtttcctatggacctggctctggaagaagctgtactagaagagttgacccaaaaggtcgcgcaggaacataaagcccactccgggatattgcctgcggaagccgagctcatgtacattaacgaagtcgaacggctggacggctttggacaagaaatcttccccgtgaaagacaatcatggaaactgcgtgcatctgggtatcttcttcatgggaatatttgtgcgtaaccggatagggcgccaggcagtaatatatcgctggaatgacatgggcaacatcacccacaataaatctacaatcttggttgagttaattaataaggaggagactgccctcttccacaccgacgacatcgaaaacgccaagtatatttccaggttgtttgctacacggcataagttttataaacagaacaagatttgtaccgaacagtcgaactctccgccgccaattcgaaggcaacctacgtggtcacgaagctccttgcctcggcaacagccttatatcctccctcccgttcatgtgcaatgtggagaacattattccgaaacccatacatctcaagacagtatttttcacggcaacgaggaagccctttactgtaactctcataacagcctggacttgaattatctgaacggaaccgtgacaaacggttcagtgtgtagtgtccactccgttaattcccttaactgcagccagagtttcatccaagcctcacccgtgtcttcaaacctctcaattccaggtagcgacattatgcgcgccgactacatcccaagtcaccgccacagcgccatcatcgttccttcctaccggcccacccccgactatgagaccgtcatgaggcagatgaaaagaggcatcctgcatactgattcgcaatcgcagagtctccggaaccttaatattataaatacacacgcctataatcagcccgaagatttggtgtattcacagcctgaaatgcgcgagcgtcacccatatactgtgccgtacggtccacagggagtctattcaaataaactggtcagtccaagtgaccagcgaaacccgaagaacaatgtcgtgccctctaaacccggcgctagcgccatctcacacactgtgtcaacgcctgagttggcaaacatgcaactgcaaggaagtcacaattatagtaccgcccacatgcttaagaactatctgttcaggccccccccaccgtatccccgtccacggcctgctaccagtacacccgatttggctagccatcgccataaatatgtgagcggtagctctcctgaccttgtcacaaggaaagttcagctcagtgtcaaaacatttcaggaggactccagccctgttgtgcaccagtcacttcaggaggtttccgagccattaacggcaaccaagcaccatggaactgtgaataagagacactcacttgaagtaatgaacagcatggtacgagggatggaggctatgaccctgaaaagcctgcacttgccaatggctaggaggaacaccttacgagagcaggggccacctgaggaaggtagtggatctcacgaggtgccccagctcccccagtatcaccacaagaagaccttttccgacgctaccatgttaatccactcttcagaatctgaggaggaggaggaggaagccccagagtcagtgccacagattccaatgttaagggagaagatggaatattctgcccagcttcaggctgctctcgctagaatccccaacaaaccccctcctgagtaccccggaccccgaaaaagcgtctccaacggtgctctgcgtcaggatcaggcatctctcccacccgcaatggcaagggcccgagtactgcgccacgggcccgctaaagcaattagtatgtctagaaccgatccccccgccgtcaacggcgcaagtttgggcccttctatttctgaaccagatttgacttccgtgaaggaacgcgtcaaaaaagagcccgtgaaagagaggccagtcagtgagatgtttagtctcgaagactctatcattgagcgcgagatgatgattagaaatcttgagaagcagaaaatggcaggattagaggcacagaagaggcctttgatgctggcggccctgaacgggttatctgtagcccgagtgtctggcagggaggagaaccgcgtcgacgcaacccgtgtgcctatggatgagagatttcggactctcaaaaaaaaactggaggagggaatggtgttcactgaatatgaacagatccccaagaagaaagcaaacgggatattttctaccgccgcactgcccgagaacgccgaacggagccggattagagaagtcgtgccatacgaggaaaacagagtagagttgattccaacaaaggagaacaacacaggttatattaatgcctctcatattaaggtcgtggtgggaggggccgagtggcattacatagcgacccaggggcccctgccacacacatgccacgacttttggcaaatggtctgggaacaaggagtcaacgtgattgcaatggttaccgcagaagaagaaggcggtagaactaagagtcaccggtactggcccaaactgggcagcaagcactcatctgcaacatacgggaagttcaaggttacaacgaagtttcgcaccgactcggtgtgctatgccaccacaggacttaaagtcaagcatctcctctctgggcaagagcgaaccgtctggcacctccagtatacggattggcccgaccacgggtgtcccgaggacgtgcagggtttcttatcttatctggaggaaattcaatcagtcaggcgacacacgaattcaatgcttgagggcacaaagaatcgtcatcctcctatcgtggtccactgcagcgctggcgtaggccgcaccggtgtcttgattctgagcgaattgatgatttactgtctcgagcacaatgagaaagtggaggtccctatgatgttaaggttattaagggagcagcggatgtttatgattcaaacgatcgctcagtataaatttgtgtatcaggtgctgattcagttcctccagaactcaagactgatctag

SEQ ID NO: 201666 - DNA, 636 bp, synthetic construct
  misc_feature 1..636: note = Description of Artificial Sequence: Synthetic coding sequence
  source 1..636: mol_type = other DNA
atgcccttcggcctgaagctgcggcggacccggcggtacaacgtgttaagcaagaactgtttcgtgacgcgaatacggctacttgactccaatgtgatagagtgcactttgagcgtggaatcaactggacaggagtgtctggaggcagtggctcagaggctcgagctgagagagactcactactttggtctatggtttttgagtaagtctcagcaggcgcgctgggtcgaactggaaaagccactcaagaaacacctggataagtttgctaacgagccactgcttttctttggcgtcatgttctacgtgcccaacgtgtcatggcttcagcaagaagctactaggtaccagtactatttgcaggtgaagaaagatgtgttggaggggagactaaggtgcactctcgatcaggtgataagactcgcaggactggccgtccaggctgactttggggattataatcagtttgactcccaagacttcctcagggagtatgtcctatttcccatggaccttgccctggaggaagccgtattagaggaattgacccagaaagtagcccaagaacacaaggctcatcgtaccatcatggaaacggtctatacactggcgttctccttgtgggggttctcctag

SEQ ID NO: 201667 - DNA, 1383 bp, synthetic construct
  misc_feature 1..1383: note = Description of Artificial Sequence: Synthetic coding sequence
  source 1..1383: mol_type = other DNA
atgagccggagcctggacagcgcccggagcttcctggagcggctggaagcccgaggggggagagaaggcgctgtgttggccggggaatttagtgacatccaggcatgttccgctgcatggaaagcggacggagtgtgctctaccgttgctggctcccgaccagagaacgtccggaaaaacagatacaaggatgtcctgccgtatgatcagactagggtgatcctgagtcttcttcaggaggaaggtcactcagactacattaatggaaattttatcaggggtgtggacggctctctcgcctacatcgcaacacagggacctctgcctcataccttgcttgacttctggaggctggtgtgggagtttggcgtgaaagtcatacttatggcttgccgagagatcgaaaacggacgtaagagatgtgagagatattgggctcaagaacaggaaccattgcagactggcctcttctgtatcaccctcattaaagaaaaatggctgaacgaggacatcatgctgcggactctgaaggtgactttccagaaggagtctcgctccgtttaccagctacagtacatgtcgtggccggatagaggcgtgccaagctccccagatcacatgctggccatggtggaggaggctcggagactgcagggctccggtcccgaaccgttgtgtgtccattgctccgccgggtgcggacgcactggagtgctgtgcaccgtggattatgttcggcaattactcttaacacagatgattccacccgacttcagtttatttgatgttgtgctcaagatgagaaaacagagacctgcagccgtgcagacagaagaacagtatcggttcctgtaccatacggtggctcagatgttttgctccactcttcagaatgcaagcccacactaccagaacatcaaagagaattgcgcacccttgtacgatgacgcactgttcctgcggaccccacaggcccttctggcaatccccagacctcccggtggagtccttagatctatttcggtcccgggctctcctgggcatgcaatggcagacacttacgcggtagtgcagaagcggggagccccagctggcgccggcagcggcactcagacaggcacagggactggcaccggggcccgttctgccgaggaggctcctctgtacagtaaggtgacccccagagcccagcgcccaggggcacacgccgaggacgcccgcggcactctcccaggccgtgtgcctgccgaccagtctccggctggttcgggcgcctacgaggacgtggcggggggggcacaaactggaggacttggatttaatttgcggattggccgtccaaagggcccgagggaccctcccgcagaatggactagagtttag

SEQ ID NO: 201668 - DNA, 1248 bp, synthetic construct
  misc_feature 1..1248: note = Description of Artificial Sequence: Synthetic coding sequence
  source 1..1248: mol_type = other DNA
atgcccaccaccatcgagcgggagttcgaggagctggacacccagagacgctggcagcccctctatcttgagattaggaacgaatcgcatgattacccccatagggtcgccaagtttccagagaataggaaccggaaccgctaccgtgacgtgagcccctacgatcactcccgggtgaaattgcaaaacgcggagaacgactacatcaatgcgtcccttgtggacatcgaggaggctcaaagatcatacatactaacccagggaccattaccaaatacctgctgtcacttttggctgatggtgtggcaacaaaagaccaaagccgttgtgatgctcaaccgcatcgttgagaaggaatctgttaaatgtgcacagtactggcctacagacgatcaggaaatgcttttcaaagagacaggcttctctgtaaaacttttatctgaagatgtgaagagctactacactgtgcacctcctgcaactcgagaacattaatagtggcgagacccggacaatatctcactttcattacaccacctggcccgatttcggagtgccagagtcacccgcctcattcttaaactttctgtttaaggtccgagagtcagggtcgctgaacccagaccatgggcccgccgtgattcactgcagtgcaggaataggaagaagtggcacctttagtctggtggatacttgcctcgtgctgatggaaaaaggcgacgatattaatattaaacaggttctgcttaacatgcggaagtatcgaatgggcttgatacagacacccgaccaattacgattctcttacatggctatcatcgaaggagcaaaatgtatcaaaggcgactccagtattcagaagcgctggaaggagctctccaaggaagatttgtctccagcttttgaccacagccccaacaaaattatgacggaaaaatacaatggcaacaggatcggcctcgaggaggagaaactgaccggagaccgctgcaccggtcttagctccaaaatgcaggataccatggaagaaaatagcgagagcgctctgagaaagcggataagggaggaccgcaaggccaccacagcacagaaggtgcaacagatgaaacagcggttgaacgaaaatgagagaaaacgcaagagatggctctactggcagcccatcctgactaagatgggattcatgtctgtgatccttgtaggagcttttgtcgggtggaccctcttcttccagcaaaacgctctatag

SEQ ID NO: 201669 - DNA, 1164 bp, synthetic construct
  misc_feature 1..1164: note = Description of Artificial Sequence: Synthetic coding sequence
  source 1..1164: mol_type = other DNA
atgcccaccaccatcgagcgggagttcgaggagctggacacccagagacggtggcagccgttgtatctggagatcagaaatgaaagtcacgactacccccacagggtagccaaatttcctgagaaccgcaatagaaataggtacagagacgtgtcaccctatgaccactctcgcgtgaagctccagaacgctgagaacgactacatcaacgcctctttagtggacatcgaggaggcccaaagatcttacattctgactcaggggccactgcctaatacatgctgtcacttctggttaatggtgtggcagcagaagacaaaagcagtggtcatgctcaaccgaatagtggaaaaggaatcggtcaaatgcgcgcagtactggccaaccgatgatcaagagatgttatttaaggagactggcttctccgtcaaactgttgagtgaagacgttaagtcttattacactgtacatctgttgcagcttgaaaatatcaatagcggggaaacccggacaatttcacattttcactataccacgtggcctgattttggcgtcccagagtcacctgcttcattcctcaactttctattcaaggtgagggagtcaggctctctgaatccggatcacggacctgccgttatacattgttccgctggcatcggcaggtccgggactttctctctagtcgatacctgtctggtgttgatggaaaagggggacgacatcaacattaagcaggtgcttctcaatatgcggaaataccgcatgggactgattcagactccggaccagctgagattttcttatatggctatcattgagggggccaagtgcattaagggtgactctagcattcaaaaacgctggaaggagctgagcaaggaggacttatcccccgcattcgatcactctcccaataaaattatgaccgagaagtataacggcaatagaatcggtcttgaggaagagaagttaactggcgatcggtgcaccggactgagttctaaaatgcaggatacgatggaggagaatagcgagagcgccctgcggaagagaatacgggaggatcgtaaagcaactaccgctcagaaggtacagcaaatgaagcaacggctcaacgaaaatgaacgcaagcgcaaacgaccacgtcttacagacacttag

SEQ ID NO: 201670 - DNA, 1179 bp, synthetic construct
  misc_feature 1..1179: note = Description of Artificial Sequence: Synthetic coding sequence
  source 1..1179: mol_type = other DNA
tgccagcaggagttccggatgtacggcaaggacggcaagggcaccaattggatggaccagggcgatatggaatgtcgcatgcaagagatagatgaccatagccgggttaagttgcagaacgccgaaaatgactatataaatgcaagcctcgtcgatatcgaagaagctcagagatcctacatcctgactcagggccctctgccgaacacctgttgccacttctggttaatggtgtggcaacagaaaacaaaagcagtggtcatgctcaataggatcgttgagaaggaatcagttaaatgtgcccagtattggcctacagatgatcaggagatgttgttcaaagaaacaggcttctcagtgaaactgctatccgaggacgtaaagagttactacactgtgcatctgctccaattagagaacatcaatagcggcgagactcgtactattagccactttcattacacaacgtggccagattttggggtgcccgagtctccagcttcttttttgaacttcctattcaaagtaagggaaagcggttctcttaaccctgaccacggcccggcggttatacattgctcagcaggaatcggaagatcgggtacgttcagcctggtggacacatgcctcgtgctgatggagaaaggggatgatatcaacataaaacaggttctcttgaacatgaggaaatacaggatgggcttaatccagaccccagatcagttaaggttttcctacatggccatcatcgaaggagctaaatgtatcaagggcgatagttcaatccaaaaaagatggaaggagctcagcaaggaggacctcagtcccgcatttgaccactccccgaacaagataatgacagaaaagtataacgggaaccgtatcgggctcgaggaagagaaactgaccggtgaccgctgtaccggcttgtcttctaaaatgcaggacaccatggaagagaactctgagtccgccctgaggaaaagaattcgcgaggaccgaaaagccacaacggcacagaaggtgcagcagatgaagcaacgcttgaatgaaaacgaacgcaagcgcaagagatggctgtattggcagcctatcttgacgaaaatgggctttatgtccgtgatcctggtgggagccttcgtcggctggaccctgttctttcagcagaacgcattgtag

SEQ ID NO: 201671 - DNA, 1062 bp, synthetic construct
  misc_feature 1..1062: note = Description of Artificial Sequence: Synthetic coding sequence
  source 1..1062: mol_type = other DNA
atgcccaccaccatcgagcgggagttcgaggagctggacacccagcggagatggcaacctctctacctggaaattaggaacgaatcacacgactacccacaccgcgtcgccaaatttccagaaaaccgcaatagaaatcggtaccgagatgtatccccttatgatcacagccgggtgaaattacagaacgccgagaatgactacatcaacgcctctctggtggatatcgaggaggcacagagaagctacattctgacccaggggccactgccaaatacgtgttgtcacttctggcttatggtgtggcagcagaagaccaaggccgtggttatgctcaaccgtatcgtggaaaaagaatctgttaagtgtgctcagtactggcccaccgacgaccaggaaatgttattcaaagaaaccggcttcagcgtgaagcttctgtccgaagacgtgaaaagctactacacagtccatctgttgcagctggagaatatcaatagcggagagacaagaactatatcccatttccattatacaacatggcccgattttggagtgcctgaatctcccgcctcattcctgaactttttattcaaagttcgagagagcgggtctctgaaccccgatcacgggccagccgtaattcattgctctgcgggtatcgggagatccgggaccttctccctggtagacacttgcttggtgctgatggagaagggcgacgatataaacatcaagcaggttctgcttaatatgcggaagtatcgcatgggcttaatccaaactccagatcagctgcgtttcagttatatggccattatcgaaggtgctaagtgtattaagggtgactccagcatacagaagcggtggaaagagctttcaaaggaggatctgtccccagcgttcgaccactcacctaataagattatgacagaaaagtataacggtaacaggattggactcgaggaggagaagttaacaggagaccggtgcactggcctctcttccaaaatgcaggatactatggaagagaactccgagcggcccaggctgactgatacttag

SEQ ID NO: 201672 - DNA, 2424 bp, synthetic construct
  misc_feature 1..2424: note = Description of Artificial Sequence: Synthetic coding sequence
  source 1..2424: mol_type = other DNA
atggaccagcgggagatcctgcagaagttcctggacgaggcccagagcaagaaaataacaaaagaggagtttgccaacgagtttctgaagctgaagcgccagtcaaccaagtacaaggcagacaagacatatccgactaccgtggcagagaaacctaaaaacattaagaagaacaggtataaggacatcctgccctacgactacagtcgagtagagttatccctgattacatcagatgaggactcttcatacataaacgctaatttcattaagggcgtctatgggcctaaggcatatatcgcgacccagggacctctgtctactacgctccttgacttctggcgcatgatatgggagtattcagtgcttattatcgtgatggcttgcatggagtatgaaatgggcaagaaaaaatgtgagaggtactgggctgagccaggggagatgcagttagaattcggcccattctcggtcagctgcgaggctgaaaagagaaagtcagactacattatcaggaccctgaaagtcaaattcaattctgaaactcgcacaatctatcagttccactacaaaaattggcccgaccacgatgtgccatcatcgatcgaccccatcctcgagctcatctgggacgtccggtgctaccaggaggatgactccgtccccatctgtattcactgctccgccgggtgcgggcgaaccggagttatttgcgccatcgattacacttggatgctcctgaaggatggaatcatcccagaaaactttagcgtattttctctcatccgggaaatgcgaacgcagcgtccaagtttggttcaaacacaagagcagtatgagttggtttacaacgcagtcctggaactattcaagaggcaaatggatgtcattcgtgataagcactccggcactgagagccaggccaagcactgcattcccgagaagaaccatacccttcaggcagacagctatagtcccaatctgcctaaaagcaccacaaaagcggcgaagatgatgaaccagcagagaacaaaaatggagatcaaggagtcaagcagctttgacttccgaacatccgagatctccgccaaggaagagctggttctgcatcccgcgaagtcttccacaagtttcgacttccttgaattaaactacagtttcgataagaacgccgacacaaccatgaagtggcagacaaaggcatttcctatcgtaggtgagcccctgcagaagcaccagtcccttgacttagggtcactgctcttcgaagggtgctctaactctaagccagtaaacgcagcaggccggtactttaactctaaggtgcctatcacccggacaaagtctacgccatttgaactaatccagcagcgcgagaccaaggaagtcgatagcaaggagaacttctcctaccttgagtcccagccccacgactcctgttttgtagagatgcaggcccagaaggtgatgcacgttagcagcgccgaattgaattattctctgccatacgattctaagcaccagatcaggaatgcctctaacgtgaaacaccacgactcctctgccctaggagtctattcctatatacccctggtcgagaatccttatttttccagctggccgccctctggcacttcatccaagatgtccctggaccttcccgagaagcaggacgggaccgtgtttcccagctccttgttaccaacaagctctacctccctcttctcctattacaactcgcacgacagcctgagcttgaactctccaacgaacatttcatccttgctgaaccaggagtctgctgttctggctaccgccccccggattgatgatgagatcccacctccactgccagtctggacacccgaaagcttcatagtggtggaggaggccggggaatttagccctaacgtgcccaaaagcctctcttcagccgttaaagttaagatcgggactagcctcgagtggggcggtactagcgagcccaagaaattcgatgattcggtgatactgaggccaagcaaaagcgttaaacttcggagcccaaaatctgagctccaccaagatcggagtagcccacctcccccattaccagagaggacacttgagagcttcttcctggcggacgaggactgcatgcaggcccagagcatcgagacatactcgacaagttatcccgatactatggaaaacagcacatcaagtaagcaaacattgaaaacacctggaaaatcattcacccgatccaagagcctaaagatcctgcgcaacatgaaaaaatcaatatgtaacagttgcccccccaacaaaccggccgagtccgtacaatccaataattcttcatcatttcttaatttcgggttcgccaaccggttcagtaagccaaaagggcccaggaatccaccaccaacctggaatatctag

SEQ ID NO: 201673 - DNA, 1692 bp, synthetic construct
  misc_feature 1..1692: note = Description of Artificial Sequence: Synthetic coding sequence
  source 1..1692: mol_type = other DNA
atgctgctgaaggacggcatcatccccgagaacttcagcgtgttctcactcatccgcgaaatgagaacacagagacccagcctggtgcaaacccaggagcagtatgaactggtgtataatgccgtgctcgagctgttcaagagacagatggacgttataagagacaagcatagcggcactgaaagtcaggccaagcactgtataccagagaagaatcacaccctgcaggcagactcctacagccctaacttacctaaaagtaccactaaggcagcaaaaatgatgaaccagcagcggacaaagatggagattaaagagtcctcctcctttgacttccgaacatcagagatcagtgcaaaagaggaactggtgctgcatcctgcaaaatctagtaccagctttgatttcttggaactgaattactctttcgacaaaaacgctgacactacaatgaaatggcagactaaagccttccctatcgtgggggaacccctccagaagcatcagtccttagacctaggcagtctccttttcgaaggatgctcaaatagcaagcctgtgaacgccgctggacggtattttaacagcaaagtcccaatcacacgaacaaagtccacccccttcgaattgattcagcaacgggagacaaaagaagtggatagtaaggagaactttagctatcttgaatctcagcctcacgacagctgtttcgtggagatgcaggctcagaaggtgatgcatgtgtcctccgccgaattgaactacagtttgccctatgattccaagcaccagattcgcaatgcttctaacgtgaagcaccacgactcttctgccctgggcgtctacagttacattcccttggtggagaatccttatttcagcagttggcccccttcaggaacttcctccaaaatgtccctcgacctacctgagaagcaggatggcaccgttttcccctcatccctattaccaacatcgtctacaagcctatttagctactataatagccacgatagcctaagcctgaatagtcccacgaacattagttcgctgctcaatcaggagtccgcagtcctggctactgccccaaggattgacgacgagatccctcccccactccctgtgtggactcccgagtctttcattgtcgtagaagaagcaggggaattttccccaaatgtgccgaaatccctctctagtgccgtgaaagtcaagataggtacatctctggagtggggaggaacatccgaaccaaagaaatttgacgactcggtgattctccgcccttcaaagtcagtgaaattgcggtccccaaaatcggaactccatcaggatcggtcaagtcctccacctccacttccggagaggacactggagagcttctttctggcagatgaagactgcatgcaagctcagtccatagagacctacagtacgtcttatcccgacaccatggaaaacagcacaagcagcaagcagaccctcaagacacctggaaagtcctttacaaggtccaaatctttgaagatcctgcgcaacatgaaaaagtcaatctgtaactcgtgccctccgaacaaacccgctgagtcagtgcagtccaacaatagttcatcgttcctgaattttggctttgcaaatcgtttctctaagcccaaggggcccaggaacccaccccccacctggaatatctag

SEQ ID NO: 201674 - DNA, 4911 bp, synthetic construct
  misc_feature 1..4911: note = Description of Artificial Sequence: Synthetic coding sequence
  source 1..4911: mol_type = other DNA
atggaggccgtgccccggatgcccatgatctggctggacctgaaggaggcgggcgacttccactttcagccagccgtcaagaaatttgtgttaaagaactacggcgagaatcccgaggcctacaatgaggagctcaaaaagttggagttgctgcgccagaatgctgtcagagtaccgagggatttcgagggttgtagtgttctcaggaaatacctcggacaactccattacctgcaatcccgggtccctatgggctccggacaggaagcagccgtgcctgtcacgtggacagagattttctctgggaagagcgtagctcacgaagacatcaagtacgaacaggcatgtatcctgtacaacctaggtgcgctccacagcatgctgggcgccatggataagcgcgttagtgaggaaggcatgaaggtcagttgcacgcatttccagtgtgccgccggcgccttcgcttatctgcgagagcactttcctcaggcgtattccgtggatatgagcagacaaatactaacgctcaacgtaaatttgatgctgggacaggcccaggagtgcctgcttgaaaagtcaatgctagacaataggaagagtttcctcgtggctcggatttcagcccaggtggttgactactacaaggaggcctgtcgggcgctcgaaaaccccgacaccgcttctctcctggggaggatccagaaggattggaagaaactggttcagatgaagatatattacttcgccgctgtcgcgcatctccacatgggaaaacaagccgaggagcagcaaaagttcggtgagagagttgcctattttcaaagtgccctggacaagctgaacgaggccatcaagctcgccaagggacagcctgacaccgtgcaggatgcccttcgatttacgatggacgtcattggcggaaagtataatagtgctaagaaggacaatgactttatctaccatgaggctgtacccgcattggacacattgcagcctgtaaaaggcgccccactggtgaagccattgccagtcaatccaactgatccggccgtcaccgggcccgacattttcgctaaactggtgcccatggctgcccacgaagcttcaagcctgtactcggaggagaaagccaaattgctgcgcgaaatgatggccaagatagaggataagaatgaggtgctggatcagtttatggattccatgcagcttgacccagagacagtggataatcttgatgcttactcacatatccccccacaactgatggagaagtgtgcagcacttagtgtgcgtccagacaccgttcgcaatctggtgcagtcaatgcaggtacttagtggcgtgttcaccgacgttgaggcaagtctgaaggatataagagatctgttggaagaagacgagctgttagagcagaagtttcaggaggcagtgggccaggctggggcaatctctatcacttctaaagctgaattagcagaagtccgtagggagtgggcaaagtacatggaagtgcacgagaaagcatcatttacgaattcagaactgcaccgcgcgatgaatcttcatgtaggtaatctgaggctgctgtccggacccttagatcaagtgcgcgctgccctgcctactccggcgctgtctcccgaagacaaggccgtcctgcagaatctaaaaagaatccttgccaaggtgcaagagatgagagaccaacgcgtttccctggagcagcagttgagagagctgattcagaaggacgatatcactgccagtttggtgactaccgaccacagcgaaatgaaaaagttgtttgaggaacagctcaaaaaatatgatcaacttaaggtctaccttgaacagaacctggcggctcaggacagggtcctatgtgctcttaccgaagcgaacgttcagtatgccgcagtgaggagggtcctttcggatctggatcagaaatggaactctactctgcagaccttggtggctagctacgaggcttatgaggatctgatgaagaagagccaggagggtcgagacttttacgctgatctcgaatcaaaagtggccgccctgttagaaagaacccagtcaacctgccaagcaagagaggctgctcgacagcagctgttagacagagaacttaagaaaaaaccaccgcccaggccaacagcacccaagccacttcttccacgccgcgaggaaagtgaagccgtggaggccggggacccacctgaggagctgcgcagcttgcccccagacatggtcgccgggcctcgccttccagatacatttctgggcagcgccactccccttcacttccccccctcacccttccctagttccacggggccgggcccacattatctttcaggacccctgccacccggaacttactcagggcctacccaactgatccagccgagggcccccggtccacacgcaatgcccgtcgcccctggtcccgcactgtatccggctcctgcctacaccccagaattgggacttgtgcctagatcttcgccccagcacggcgtggtgtcaagtccatatgtgggtgtaggacccgccccccctgtggccggtctgcccagcgctcctcctcctcagttttctggcccagaactcgctatggcagtaaggcctgccaccacgacagtggattccatccaggccccaataccctctcacacagcgccacgaccaaacccgaccccagcccccccccccccctgcttcccagtgcctcccccccaaccacttcccactccgtacacctatcccgcgggagccaaacaacccatccccgctcaacatcacttctctagtggcatcccagctggtttcccggcgccccgaattggaccacagccacagcctcatccccaacctcatccttcccaggccttcggacctcagcctccccagcagccactgcctctacagcacccacacctgttccctccccaggctcctgggctgctgcccccccagtcaccttatccctacgccccccagcccggagtgctgggccagcctccccccccgctgcacacccagttatacccaggccctgctcaggaccccttgcccgctcactcgggtgcattgccctttccttcaccaggtcccccccagcctccccatccaccactggcatatggcccagcaccaagcacccgcccgatgggacctcaagccgctccacttacgatcaggggaccgagctctgccggccagtccaccccttccccacatctagtaccttcccccgccccatcaccgggccccggccccgttccgccgagaccgcctgcagccgaacctccaccctgtcttcgccggggcgccgctgccgccgacttgctgtcttcaagccctgaatcacagcacgggggtacccagagcccaggcggcggacagccactcctgcagccaactaaagtcgatgctgctgaaggcagaaggccccaggcgctccgcctcatcgaacgcgacccatatgagcacccagaacgcctcagacaacttcagcaggagttagaggcctttagggggcaacttggggacgtgggggcattggacacggtgtggcgagaattacaggacgctcaggaacatgatgcccgcggacgaagtatcgccattgcacgctgttattcgttgaaaaataggcatcaggacgtgatgccctacgactccaaccgtgttgtgctgaggagcggcaaggatgattatatcaacgcctcgtgcgtggaggggctttcaccctactgcccgcctctcgtggctacacaggcacccctgcctggaaccgccgccgacttctggctgatggttcatgaacaaaaggtttcagtgattgtgatgctagtctcggaggccgagatggaaaaacaaaaggtcgccaggtatttcccaaccgagagaggccagccaatggttcatggggccctgagcctggccctgagtagcgtgcggagtacagaaacccacgtggagcgagtcctgagtctacagtttagggatcagtctctgaagcggtctctggtccatttacacttccccacctggcccgaactcgggctgcccgacagtccttccaatttactcaggtttatccaggaggtccacgcccattaccttcaccagcgccctttacacacccccattattgtccactgcagtagcggtgtgggcagaactggagcttttgcactgctttacgccgctgtgcaggaggtggaagctggaaacggcatacctgaactgccacagctggtcagaaggatgcgacagcaacggaagcacatgctacaggaaaaacttcaccttcggttctgctacgaagccgttgttagacacgtggaacaagtgctccaacgacacggcgtccctcccccatgtaagcctctcgcctcagcctccatttctcagaaaaatcatcttccccaggatagccaagacttagtccttggtggagatgtcccaatctcaagtatccaagccacaattgccaagctgtctattagaccaccagggggcctcgagtctcccgtggcgagcctcccaggaccagctgaacccccaggccttccacccgcttctctcccagagtccactccgatcccatccagttcacccccgcccctgagctctcctttacctgaagcaccacagccgaaggaagagccccccgtgcccgaagctccttcaagtggtcctccctcttcttcactggagcttctggccagtcttacccctgaagccttctcgcttgactcttcccttaggggcaagcaaaggatgagcaagcataattttctgcaagctcacaatggccaggggcttcgcgccacccggcccagtgatgaccccctttctttgctcgacccgttgtggacattgaataagacatag

SEQ ID NO: 201675 - DNA, 2739 bp, synthetic construct
  misc_feature 1..2739: note = Description of Artificial Sequence: Synthetic coding sequence
  source 1..2739: mol_type = other DNA
atggaggccgtgccccggatgcccatgatctggctggacctgaaggaagctggagacttccactttcaacccgccgtaaagaagaatgccgtacgcgttccccgcgattttgaaggctgttccgtgcttcggaagtacctgggacaattacattacctccagtctcgtgttcctatggggtcgggacaggaggcagcagtaccagtgacttggaccgagatatttagtggaaagtcagttgcgcacgaggatatcaagtacgaacaggcttgcattctgtataacctaggcgctttgcactccatgctcggtgcaatggacaaaagggtctctgaagaatgcgctgccggtgcatttgcatacctcagagagcactttccacaggcttattcggtcgacatgagtcgtcagattctgaccctaaacgtgaatcttatgctgggccaggcccaggaatgtttgctcgagaaaagcatgctagataaccgtaaatcattcctggtggcgagaatctctgcgcaggtggtagactactataaagaggcatgtagagccttggaaaatcctgacaccgccagtctgctgggtaggatacagaaagactggaagaaactagtgcaaatgaagatttactactttgccgctgtggcccacctgcacatgggaaaacaagcagaggaacagcaaaaatttggcgagagagtcgcctactttcagtctgctcttgataagttgaatgaagcaataaagctggccaaaggtcaaccggataccgtgcaggacgcacttaggttcacaatggatgtgattggcggcaagtataacagtgctaaaaaagacaacgacttcatatatcacgaggccgtacccgccctggataccctgcaacctgtgaagggggcccctcttgtcaagccccttcctgtgaacccaactgatccggccgtgaccggccctgatatcttcgccaagctggtgcccatggcagctcacgaggcaagttctttatatagcgaggaaaaagcaaaactgctgcgggagatgatggctaagattgaagataagaacgaggttctggaccaattcatggactccatgcagttggatcccgagactgtggacaacttagacgcctacagccatatccccccacagctgatggaaaaatgcgcagccctcagcgtcagacccgacactgtacgaaatttagtgcagagtatgcaagtactgagcggggtgttcactgacgtggaggcgagcctcaaggatattcgagacctcctcgaggaggatgagctcctggagcagaaatttcaggaggccgttggacaggccggggcgatttcaatcacttcaaaggcagaactcgctgaggtgagaagagagtgggccaagtatatggaagtacacgaaaaagcgtccttcaccaactcggagctacaccgagccatgaacttgcacgtcggaaacctgcgtcttctaagtggtcccctcgaccaagtacgagcagctttgcccacacctgcccttagcccagaagataaagccgtgctccagaacctgaagcgcatcctcgccaaggtgcaggaaatgagagaccagagggttagtctcgaacagcagctgcgagagctgatccagaaagacgatataactgcttccctcgtcacgaccgaccatagcgagatgaagaagctgttcgaggaacaactgaagaagtacgaccaactgaaagtttaccttgagcagaatcttgccgcccaagacagggtgctctgtgcgctcaccgaggcgaacgtgcagtacgctgccgttagaagagtactctctgacctcgaccagaagtggaacagcaccctgcagaccctcgtggctagttacgaggcttacgaggatctgatgaagaagtctcaagaagggagggatttttacgcggatttggagtccaaagtggcagccctgctggaacgcacccaaagcacttgccaggcccgcgaagcagcgcgtcagcaacttttggatagagagctcaaaaagaagccacccccgcgcccgactgcccccaagcctctactgccccgcagagaggaaagtgaagctgtggaggccggggatcctcccgaggagcttcgctccctgcctccagatatggtggccggaccaagattgccggatacgtttcttggctctgccacaccactgcacttcccccccagcccgtttcctagttccactgggccaggcccacactacttaagtggcccactgccccccgggacctactcaggtcctacacagttaattcagcctagggcacctggtccccacgctatgcccgttgctccagggcccgctctgtaccccgccccatcctctgcccccagctttacatctgtatgggcttcagctccgaccgccgccccttctacccctgcctccacaagtttaccaacccccggcccacgaacccctacccccactattcccctacctctttgcccttccgcatggggcccaggggctgctgccaccccgccaacgcaccctgcgctgcccaggtccaggtctcgtccttccgcctcccccctgaggggatccgcctttccccagccttgggctccttccgcctcaccttcccctaccggtatctggtcttgtcctttttaccagacacatggcccacctggcagccctagctaccactcccgcgcactcgtgtgttggcccgtccacccctag

SEQ ID NO: 201676 - DNA, 1698 bp, synthetic construct
  misc_feature 1..1698: note = Description of Artificial Sequence: Synthetic coding sequence
  source 1..1698: mol_type = other DNA
atgaactacgagggcgcccggagcgagcgggagaaccacgccgccgacgactcagaggggggcgccctagacatgtgctgttctgagcgacttcctggcctaccacagcctatcgtaatggaggcactcgatgaagccgaaggactccaagattcccaaagggaaatgcctccaccccctcctccaagtcccccgtcagatcctgcacaaaagccgccaccccgaggcgctggcagccattccctaacggtcagaagctccttatgtctgtttgcggcgtcacagtttctcctggcatgtggtgtgttgtggtttagcggatatggccatatctggtcacagaacgctaccaacttggtgagctctcttctgactctcctaaaacagctcgagcctaccgcctggctggacagtggaacctggggcgtcccgagccttctcctggtgttcctgtcagttggtctcgtcctggtaacgacactggtttggcacctcctaagaacccctcccgagcctcctacaccactccctcctgaagaccgtcgccagtccgtctctaggcagccttcctttacctacagcgagtggatggaagagaaaattgaggacgactttttagacctcgaccccgttcccgagacaccggtttttgattgcgttatggacattaagcctgaggccgacccgacgtcgcttaccgtgaagtctatgggtttacaagagagacgcgggtccaacgtgtccctcactctggatatgtgtaccccaggttgcaatgaggagggctttggatatcttatgtcaccccgcgaggaatccgcgagggagtacttgctgagtgccagccgcgttctgcaggccgaggagctccatgagaaggcgcttgatccattcctactccaggccgagttcttcgaaattcctatgaatttcgtcgacccaaaggaatacgacatcccgggtctggtaaggaaaaatagatacaagacgattctgccaaaccctcatagtagggtgtgtctcaccagccccgaccccgacgacccactgtcaagttacattaacgctaactacatcaggggatacgggggtgaagagaaggtttatattgccacacagggacctatcgtgagtacagtggccgatttttggcgcatggtctggcaggagcataccccaatcatagtgatgattaccaatattgaagaaatgaatgaaaagtgtacggagtactggcccgaggagcaggtcgcctacgacggcgtcgagatcaccgtgcagaaggttatccatacagaggactacaggttgagactgatttccctcaagtcagggaccgaggagaggggactcaagcactattggtttacatcttggcccgatcaaaaaactccggacagagctccacctctcctacatctggtgcgcgaagtggaggaagccgcgcagcaggagggaccgcactgtgcgccaatcatcgtgcattgttctgcgggaatcggtagaaccgggtgtttcattgcaacgtccatttgctgtcagcagttacgtcaagaaggtgtggttgacatcctcaagacgacatgtcagctgcgccaggaccgcgggggaatgattcaaacctgcgagcaatatcagttcgtccaccacgtcatgagcctttacgaaaaacagctttctcaccaatctcccgaatag

SEQ ID NO: 201677 - DNA, 1602 bp, synthetic construct
  misc_feature 1..1602: note = Description of Artificial Sequence: Synthetic coding sequence
  source 1..1602: mol_type = other DNA
atgaactacgagggcgcccggagcgagcgggagaaccacgccgccgatgattcagaaggaggggctctcgacatgtgctgttccgagcggctgccagggctcccacagcccattgtcatggaagcactcgatgaagcggagggtctacaggattcccagcgggagatgcctccacctccccccccgtctcctccaagcgatcctgcacagaaaccaccaccacgtggcgccggctcccacagcctcactgtccgctcttcattatgtctgttcgccgcgtcccagttccttttggagcccaccgcatggctggattctggcacttggggagtgccctccttacttttggtttttctgagcgtcggactggttctcgtaactaccctggtttggcatctgctcagaactccacccgaaccaccaacacctctgcctcccgaagataggaggcaatctgtatcccggcagcctagcttcacttatagtgagtggatggaggagaagatcgaagatgatttcctggatttagatcccgtgcccgagacacccgttttcgactgtgtgatggatatcaagcctgaggctgaccccaccagcctgaccgtgaagtctatgggcttgcaggaacgtaggggctcaaacgtctcactgaccctggatatgtgtaccccaggctgcaacgaggagggttttggatatctcatgagtccacgcgaggagtctgcccgcgagtatcttctgtcggcaagccgtgtcctgcaggctgaggaattgcacgagaaggctctggatccttttttgctccaggcagagttttttgagatccccatgaattttgtcgatcctaaagagtacgatatcccaggattagtcagaaagaatcgatacaagacgatcttgccaaacccccacagtcgcgtctgtctgacctccccagaccccgacgaccccctctcaagctacataaacgccaactacataagaggttacggcggtgaggagaaggtgtacattgctactcaggggccaattgtctctaccgttgcagacttctggaggatggtctggcaagagcacacccccattatcgtcatgattactaacatagaggagatgaatgaaaagtgcaccgaatactggcccgaagaacaggtcgcttatgatggcgtggaaatcactgtgcagaaggtgattcacactgaggattatagactgcggctcattagcttgaaatccggcactgaagagcgcggcctaaagcattactggtttacaagctggcctgatcagaagactccggatcgcgcaccccctcttctccatcttgttcgggaagtggaggaagcagcccagcaggagggacctcactgcgccccaattatcgttcattgttcggcaggaatcgggagaaccgggtgctttatagccaccagcatttgttgtcagcagctgcggcaggaaggcgtggtagatatcctgaaaaccacatgccagctgcggcaggaccggggcggcatgatacaaacttgtgagcagtatcagttcgtccatcacgtgatgagcttgtatgagaagcagctctcccaccagtcacccgagtag

SEQ ID NO: 201678 - DNA, 1698 bp, synthetic construct
  misc_feature 1..1698: note = Description of Artificial Sequence: Synthetic coding sequence
  source 1..1698: mol_type = other DNA
atgaactacgagggcgcccggagcgagcgggagaaccacgccgccgatgactccgagggcggagccctggacatgtgttgcagtgagcgcctccccggtctgccccagcccattgtgatggaggcattagacgaggccgaaggcttacaagactcccagcgagagatgccaccaccaccccctcccagcccaccaagcgaccctgcccagaagcccccaccccggggggcaggaagccacagtctgactgtgagaagcagcctgtgtttattcgcggcatcgcagttcctgctagcctgcggagttctctggttttccggatatggacatatttggagccagaacgcaacgaatctggtgtcttccttactgactctgctcaaacagctggaacccacagcttggttggacagcggcacatggggtgtgccgtccttactactggtgttcctctctgtcggcctagtgctggttactacacttgtgtggcacttgcttcgaacccctcccgaaccgcctacgcccctcccaccagaagaccggaggcaaagcgtctccagacagcctagtttcacttattcggagtggatggaagagaaaattgaggatgattttctggacctggatcccgtacctgagacgccggtgtttgattgcgtcatggacataaaaccggaagctgatccaacatcattgaccgtaaaatctatgggactccaagagagacgtgggtcaaatgtgtccctgaccctggacatgtgtacacctggctgcaacgaggaaggatttggatatctgatgtctcctagggaggaatccgccagagagtacctactgtccgccagtagagtgctgcaggcagaggagcttcacgagaaagcccttgaccccttcctcctgcaggccgaattcttcgaaattccaatgaatttcgtcgaccccaaggagtatgatattccaggcttagtgcggaaaaatcgctacaaaaccatccttcctaacccacattctcgcgtgtgtctgacgtctcctgaccctgacgatcccctttcttcatacataaacgcaaattacatcaggggatacggtggtgaggagaaggtgtacatagccacccagggtcccatcgtgagcacagtagcagatttttggagaatggtctggcaggaacatacacctataatcgtgatgatcactaatatcgaagagatgaacgagaagtgcactgaatactggccagaggagcaggttgcttacgatggggtcgagattaccgtccaaaaggtgattcacacggaggattatagactgaggttaatttccttgaagtcaggcactgaggaaagaggtttgaaacactactggtttacatcatggcccgatcaaaagacgccggatcgggctcccccactgctccacctggtccgggaagtggaagaagccgcccagcaggagggtcctcattgcgctcccattatagtgcattgcagcgctggcataggacgcacgggctgttttatcgcaaccagtatatgttgccagcagctgagacaggagggagtggtcgacatattgaaaaccacatgccagctgcggcaggataggggcggtatgatccagacatgtgagcaatatcagttcgttcaccatgtaatgagcctgtatgagaaacaattatcacaccagtccccagaatag

SEQ ID NO: 201679 - DNA, 1788 bp, synthetic construct
  misc_feature 1..1788: note = Description of Artificial Sequence: Synthetic coding sequence
  source 1..1788: mol_type = other DNA
atggtgcggtggttccaccgggacctgagcggcctggacgccgagacacttcttaaggggcgaggcgtccacgggagctttctggcgagaccctcccgcaagaaccagggagattttagcctgagcgtccgggtcggcgaccaggtcacccatattaggatccagaactctggagatttttacgatctttatgggggggagaaatttgcaacacttacagagctcgtcgaatattatacccagcaacaaggggtcctgcaggaccgggacggcactattatccatctgaaatatcctttaaattgttccgatccaaccagtgagcgttggtatcatggtcatatgagcggtgggcaggcggaaaccctgttgcaagcaaagggagaaccgtggacctttctcgtgagggagtctctgagtcagcccggagatttcgtattgtcagtcctgagcgatcagcccaaagccggaccaggatcaccactgcgggtgactcacatcaaagtgatgtgcgaaggagggagatacacagttggaggcctcgagactttcgattcccttactgacctggtggagcatttcaagaagaccgggatcgaagaagcatccggcgctttcgtttatctgcgacagccatattatgccacccgcgtgaacgcagcagatattgagaatagggtgttggaactcaataaaaagcaagagtctgaggacaccgcgaaagccggtttttgggaagagtttgagtcactccaaaagcaggaagtaaagaatctgcatcagaggctggagggacaacgccccgaaaacaaggggaaaaacaggtataaaaatatcttacccttcgatcattctcgggtgatcctccagggcagagattctaacattccgggtagcgactacatcaacgctaattacatcaagaaccagctactggggcccgatgaaaacgctaagacttacattgctagtcaaggctgcctggaggccacggtgaacgacttctggcagatggcctggcaggagaattcacgggtgatcgtcatgacaacccgcgaggtggaaaaggggcggaataaatgtgtgccctactggccagaggtgggcatgcagagagcctatgggccatacagtgtgactaactgcggtgaacacgacaccacagagtataagctgcgtacactgcaggtgtctccgctagacaatggggacctgatccgggagatctggcactatcaatacctttcatggcccgatcacggggttccaagcgaaccgggaggtgtgctgtcttttctggaccagatcaatcagcggcaagagtccctgccccacgcaggaccaattattgtgcactgctccgccggtataggtcgcaccgggacgatcatcgtcatagacatgctgatggaaaacatctccactaagggattggactgcgatatcgatatacagaagaccatccagatggtcagggcacaacggtcaggaatggtccagaccgaggcccagtacaagtttatctatgtcgccatcgctcagttcatcgagaccacaaagaagaagctggaagtgctgcagtcccagaagggccaggaaagtgagtacggcaacattacctatcctccagcaatgaaaaatgctcatgcgaaagcaagtcggacatctagtaaacacaaggaggatgtgtatgagaatttgcatactaaaaacaagagagaggagaaggtcaaaaagcagcgatctgcagacaaagagaagtcaaaaggaagcctgaagcggaagtag

SEQ ID NO: 201680 - DNA, 1794 bp, synthetic construct
  misc_feature 1..1794: note = Description of Artificial Sequence: Synthetic coding sequence
  source 1..1794: mol_type = other DNA
atgctgagccggggctggttccaccgggacctgagcggcctggacgccgagaccctcctgaaaggccgtggagtccatggcagcttcttggcacggcccagccgcaagaatcagggagacttctccctgtccgttagagtgggagatcaggtgacccatataaggatacaaaactctggcgatttttatgacctgtacggaggggagaagtttgccaccctaacggaattagtggaatattatactcagcaacagggagttcttcaggaccgggatggcaccattatccacttaaaatacccgctcaactgtagcgatcccactagcgaacgatggtaccatgggcatatgtctggcgggcaggccgagaccctgctccaggcaaaaggagagccatggaccttcctggtgagggagagcctgtcacaaccaggggatttcgtcctctcggtcctaagtgaccagccgaaagcaggtcctggttccccacttagggttactcatattaaagttatgtgcgaggggggtcggtacactgtggggggtctggagacattcgatagcctcaccgatcttgtagaacatttcaagaaaactggtatcgaagaagcttcaggagcctttgtttatctgcgacaaccttattacgctacacgggtgaatgccgctgatatcgagaaccgggttctggaactgaataagaagcaagagagcgaggatactgccaaggctggattttgggaagagttcgagagtctgcagaaacaagaggtgaagaacctccatcaaagacttgaggggcagagacccgagaacaaaggtaagaataggtacaaaaatattctacctttcgaccattctcgtgttatccttcagggacgagacagcaacatccctggaagtgactatattaacgccaactacattaagaaccaactactggggcctgatgaaaacgccaagacttacattgcaagccagggatgtctggaggcaacggttaatgatttctggcagatggcatggcaagaaaattcccgggtaattgttatgaccactagggaagtggagaaggggcggaataaatgcgtgccttactggcctgaggttggtatgcagcgcgcctacgggccctacagtgtgaccaattgcggagaacatgacaccacggaatacaagctgagaaccctgcaggtgtcaccattggacaacggtgatctcattcgggaaatttggcattatcagtacctctcctggcccgatcacggcgttccctctgaaccgggaggcgtgctttcgttcctagatcaaatcaatcaacgccaggaaagcctaccacacgcaggccccatcatcgtacactgctcggctggaattggacgaaccggaactatcattgtaattgatatgttgatggagaacatctcaactaagggattggactgtgacattgatattcagaagacaatccagatggttagggcccagagatcaggaatggtgcaaacggaagctcaatataagttcatttatgtagcaattgcccagtttatcgagactactaagaaaaagctcgaagtattacagagtcagaaggggcaagaaagcgagtacgggaatatcacctaccctcccgcaatgaagaacgcccacgccaaggcatccaggacttcaagcaagcataaggaagatgtatatgagaacctccatactaagaataagcgggaggagaaggtcaagaagcagaggtctgctgacaaggaaaagtccaagggatccctgaagagaaaatag

SEQ ID NO: 201681 - DNA, 1671 bp, synthetic construct
  misc_feature 1..1671: note = Description of Artificial Sequence: Synthetic coding sequence
  source 1..1671: mol_type = other DNA
atgctgagccggggcgtgggcgaccaggtgacccacatccggatccagaattccggagatttctacgacctgtacggtggtgagaagttcgcaactctgactgagctggtcgaatattatacccagcagcagggtgtactccaggaccgggacggcacaattattcatttgaagtaccccctgaattgtagcgatcccacatcagagcgctggtaccacggtcatatgtctggcgggcaagccgagacgctactgcaggctaagggcgaaccttggacctttctggtgcgggagagcctgagtcagcccggagactttgtcctgtctgtgctctctgaccagcctaaggccggtcctggtagccccctgcgagtcacacatataaaggtgatgtgcgaggggggcagatacacagttggaggcctcgagaccttcgactctctgacagacctcgttgaacatttcaagaagactggcatcgaggaggcaagcggcgcctttgtatatctcagacaaccctactatgccacccgggtgaacgctgccgacatcgagaaccgcgtcctcgagctgaacaagaaacaggaatctgaagacacagccaaggcaggattttgggaagaatttgagagcctgcagaagcaggaggttaaaaatctgcatcagcgcctggaaggtcagcgtcccgaaaacaagggaaagaatagatacaagaatatcctacccttcgatcattcacgtgttattctgcagggacgggactctaacatccctggttctgactacataaacgcaaactacattaaaaaccagctgctgggcccagacgagaacgcaaaaacttatatagcatcccaagggtgtctcgaggccactgttaatgacttctggcaaatggcctggcaggagaatagtcgggtgattgttatgactaccagagaggttgagaagggccggaataaatgtgtaccgtattggccagaagtggggatgcaacgggcatatggtccatactctgtgaccaattgcggcgagcacgacacgacagaatacaagttgagaactctccaggtgtccccgctcgataacggagacctgattagggagatctggcactatcagtatctcagctggcctgaccatggcgtcccaagcgagcccggcggggtgctgtctttcctggatcagattaaccagcgtcaggaaagtctgccccatgctgggccaataatcgtacactgcagcgcagggatcggaagaaccgggacgattattgtgatcgatatgctcatggagaacatctccaccaaaggactggactgcgatatagacattcagaagacaatccagatggtcagggcacagcgctctggaatggttcagaccgaagcacaatataaattcatctatgtcgcaatcgctcagttcattgaaaccaccaaaaaaaaactagaggtattgcagtctcagaaaggccaggaaagtgaatatggaaacatcacatacccacccgccatgaagaacgctcacgctaaggcgagtcggacatccagcaaacacaaagaagacgtgtacgagaatcttcatactaaaaacaaacgtgaggaaaaagtcaagaaacagcgctctgccgataaggaaaagtccaagggtagtcttaagaggaagtag

SEQ ID NO: 201682 - DNA, 1875 bp, synthetic construct
  misc_feature 1..1875: note = Description of Artificial Sequence: Synthetic coding sequence
  source 1..1875: mol_type = other DNA
atggtgcggtggttccaccgggacctgagcggcctggacgccgagactttgctgaaggggcgtggcgtgcacggtagcttcctcgccagaccgtccagaaagaatcagggcgacttttcactctccgtccgggtgggggaccaggttacacacattcggatccagaacagcggcgatttctatgacctctacggcggagaaaagtttgctacactgacggaactagtggaatactacacacagcagcagggggtgttacaggatcgtgacggaaccatcattcatttaaagtatccgctcaattgcagcgatcctactagcgagcggtggtatcatggccacatgagcggtggtcaggctgaaactctgttgcaggccaaaggcgaaccttggacgtttctggtacgcgaaagcttgtcccaacccggtgactttgtgcttagtgtgctgtccgatcagcccaaggccggtccaggcagccctctgagggtcactcatatcaaggtaatgtgtgaaggcggcaggtacaccgtggggggcctagagactttcgactctctgaccgatctggtcgagcacttcaagaaaaccggtatcgaagaagcatcgggcgctttcgtgtacttgaggcagccatattacgcaacacgcgtaaatgccgcagatattgaaaatcgcgtgcttgaactcaacaagaagcaggagagtgaagataccgcaaaagccggattctgggaggagtttgagagcctgcaaaaacaagaggttaagaacctgcaccagcggttagaagggcagaggccagagaacaagggcaaaaacagatacaagaatatactgccttttgaccactctcgggtaattctacagggccgtgactccaacattcccggcagcgactatatcaatgcaaactacataaaaaaccagcttctgggacctgatgaaaatgcaaaaacatatatcgcctcccaaggatgcctcgaggcgacggttaatgacttctggcagatggcttggcaggaaaactcccgtgtgattgtaatgaccacccgagaagttgaaaagggcaggaataaatgcgtcccctattggcctgaggtaggaatgcagcgggcctacggcccatacagcgtgactaattgcggagaacacgataccacggagtataagcttaggactttgcaagtaagtcccttagacaacggcgacttaatcagggagatttggcattatcagtacctctcttggccagaccacggggtgcctagcgaacctgggggggtactcagctttctcgatcaaatcaaccaacgccaggagtccctgccccatgccggtccgataatcgtgcattgttctgccggtattgggagaactgggacgataatcgttattgatatgttgatggaaaacatctcaaccaaaggcctggactgtgatatcgatatacagaagacaatccagatggtgcgagcgcagaggtcgggaatggttcagaccgaagcccaatacaaatttatctatgttgctattgcccagtttatagagaccaccaaaaaaaaactcgaggtcttgcagtctcagaaagggcaggagtccgagtacggcaacatcacttatccccctgccatgaagaatgcccacgcaaaggcctcacggacgtcttctaaatcactggagagctctgctggcaccgtcgcagcgtctcctgtgcgaagaggaggacagcgcggactccccgtacctgggcctccagtcctgagcccagacctgcatcagctgccagtgctcgcccccctccaccctgcagcagacacgcgtcgcatgtgcatgagaacgtgcaccttgcggactcgcggtcggcggaagtag

SEQ ID NO: 201683 - DNA, 1083 bp, synthetic construct
  misc_feature 1..1083: note = Description of Artificial Sequence: Synthetic coding sequence
  source 1..1083: mol_type = other DNA
atggtgcaggcccacggcggccggagccgggcccagcccctgaccttgtctttaggggcggcaatgactcaacccccaccagagaagactcccgccaagaaacacgttcggttacaagagaggcgcggaagcaacgtagcgctgatgctagacgtacgctctctgggcgccgttgagcctatctgttccgtgaacacaccgagagaagttaccctgcattttctgcgcaccgccggccaccctcttactcgctgggccctgcaaaggcagccgccatcccctaaacagttggaggaggagtttctaaagattccatcaaatttcgtgtcacccgaagatctggatatacccgggcatgcaagcaaggatcgctacaagacgattttacccaatccccagtcaagggtatgtcttggccgggctcaatcccaggaggatggagactatataaacgccaactacattaggggatacgatgggaaggagaaggtgtacatcgctacgcaggggcctatgcctaacacagtttctgatttctgggagatggtgtggcaagaggaagttagtctcatcgtgatgctcacccagctaagagaaggtaaggaaaagtgtgtgcactattggccaaccgaggaggaaacctacggcccctttcaaattagaatccaagacatgaaggagtgccctgagtacaccgtgcggcagttgacaatccaataccaggaagagcgaagaagcgtaaagcacattttattctctgcctggcccgatcatcaaaccccagaaagcgccggcccactgctcagactagtcgccgaagttgaggagtcccctgaaactgccgcccacccaggccccatcgtagtgcattgttctgccggcattggtcggacaggatgttttatcgccacaagaatcggctgtcagcaacttaaggccaggggagaggtggacatactcggaattgtctgccagctgaggctcgacagaggagggatgattcaaacggcggagcagtatcagttcttgcaccacaccctggcactatatgctggccagcttcctgaggagccatctccgtag

SEQ ID NO: 201684 - DNA, 1398 bp, synthetic construct
  misc_feature 1..1398: note = Description of Artificial Sequence: Synthetic coding sequence
  source 1..1398: mol_type = other DNA
atggtgggcaaggcctggcccctgacccacagccagggcaccggcccgtgggccccagaaggccatcggcgagaagccgcggatccatggtggcagaggcaacaggcacaagagggccgtatgcaattgggctgcgcctgggtggctgcaagacgggggggaggacggaaactggcatcctggtcactattatccccccagaggcagaccgaccgacagaccgatagttggcaggaggctgcttggggcccacagcttctccagcagacatcctggctcagtgagcccccattggggcccgcaccgcatctcagcatggtgcaggcccatggtgggcgtagcagagctcaaccgctcactctttccctcggagctgctatgacacaaccccctcccgagaagacaccggccaagaagcacgtaaggctgcaggagcggcggggctcaaatgtggcccttatgctggacgttagaagcttaggcgcagtagaaccaatatgctcagtgaatacacctagggaagtcaccttgcactttctgagaacagccggtcacccccttacgcgctgggcactacaacggcagcctcccagccctaagcagctggaggaggaattcctgaagattccttctaacttcgtgtctcctgaggacctcgatatccccggtcatgctagcaaggatagatataaaaccattctgcccaatccgcagtcacgtgtttgcctggggagagcccaatcccaggaagacggggattacattaatgcgaactatatccggggctatgatggcaaagaaaaggtctacatcgctactcaaggtccgatgccaaataccgtatcggacttctgggagatggtttggcaggaagaggtgagcctgatcgtgatgctgacacagctgagggagggaaaagagaagtgcgtgcattactggcccaccgaagaagaaacttacggaccattccagataagaattcaagacatgaaagagtgcccagagtacacagtccgtcaactgaccatccagtatcaggaagagagacggagcgtgaagcatatcttgttcagtgcatggccagaccaccagacaccagaaagtgcaggccctctgcttcgcctggtcgccgaggttgaggagtcacccgagaccgccgcccaccccggcccaattgtcgtccattgtagtgctggcatcggacgaactggatgctttatagccacaaggatcggatgccagcaactgaaggcccggggggaggtcgacatattaggaatcgtgtgccaactccgcctcgatcgtggcggcatgattcaaacagctgagcaatatcagttcctgcaccacaccctggctctgtacgccggccagctccccgaagagccctcaccctag

SEQ ID NO: 201685 - DNA, 1200 bp, synthetic construct
  misc_feature 1..1200: note = Description of Artificial Sequence: Synthetic coding sequence
  source 1..1200: mol_type = other DNA
atgggcgccagcttctggcccatccggcaggcccgggagcagcagcggagggccttgagtttccggcagaccagctggctgtccgagcccccccttggccctgctccacatctgtccatggtgcaggcgcacggcggtaggtcccgcgcgcagcctctgacactgagcctgggagcggccatgactcaaccaccacccgaaaaaacccctgcaaagaagcatgtgagattgcaggagcgtcggggcagtaatgttgccctgatgctggacgtgagaagccttggtgctgtcgagcctatttgcagcgtgaacacaccgagggaagtgacactgcattttctgcgtaccgcaggtcaccccctgacacgctgggccctgcagcgtcaaccacctagtccaaaacagctcgaagaggagtttttgaagatcccaagcaactttgtgagccccgaggatttggacattccaggacacgccagcaaggatcgctacaaaactatactccctaacccccagagtcgcgtctgcctgggaagggctcaatcacaggaagatggcgactacatcaatgccaactatatccgcgggtacgacggtaaagaaaaagtttatatcgctacccagggccctatgcccaacaccgtgtcagatttttgggagatggtgtggcaggaagaagtgtcacttattgtcatgttgactcagttaagagagggcaaggagaagtgcgttcactattggcctacagaggaggagacttacgggccattccagatccgaattcaagacatgaaggagtgccctgagtatacggtcagacagctcacaatccagtaccaagaagagagacgcagcgttaaacacattctgttctccgcttggccagaccaccagacgccggagtccgcgggtccactactcaggttagtggccgaagtggaagagtcacctgaaacagccgctcacccaggtcccatcgttgtacactgcagcgccgggataggtcgcacaggctgttttatcgctacacgcattggatgtcagcaactcaaagctcggggggaggtggatattttgggcatcgtatgccagctgcgtctcgatagaggaggcatgatccagactgctgaacaataccaattccttcatcatactctggccctgtatgcggggcagcttccagaggagcccagcccttag

SEQ ID NO: 201686 - DNA, 465 bp, synthetic construct
  misc_feature 1..465: note = Description of Artificial Sequence: Synthetic coding sequence
  source 1..465: mol_type = other DNA
atggtgcaggcccacggcggccggagccgggcccagcccctgaccctctcactcggtgccgccatgacccagccaccacctgaaaagacacccgctaaaaaacatgtgaggctacaggaaagacgaggcagtaacgtggctctgatgctggatgtgcggagcctcggtgcggtagaacctatatgcagcgtgaacacacccagggaagtgacactccattttcttagaacagccggccaccccctgactaggtgggctctacagaggcagcccccatctcctaagcagcttgaggaggagttcttgaagatcccttctaatttcgtgtcacccgaggacctagatattccgggtcacgctagtaaagaccgctacaagacaatcctgccaaacccccagtccagggtgtgtctggggagggcccagtcccaggaggacggtgactacatcaatgctaactactag

SEQ ID NO: 201687 - DNA, 1326 bp, synthetic construct
  misc_feature 1..1326: note = Description of Artificial Sequence: Synthetic coding sequence
  source 1..1326: mol_type = other DNA
aagcggcggcgggccgccagcatgaaccggctgggctgctggcccgccagatcacttccccgaagcggcagaggtagcgggcagcgctctctgggtttaggtggccatccgtctggacctcgacacccaggcacacccgctgcaaaacggacatgggagagcccaggcgtgcgcgctcgagactgcccactgtctacttcatggctgtctgagccccccctcgggccggccccccacctgtccatggtccaagcacacggtggccgcagtagagcccaacccctcaccctgtctctgggcgccgccatgactcaaccaccccccgaaaagaccccagcaaagaaacatgtccggctgcaggagcggagagggtccaatgtggcgttgatgttggatgtacgaagtttaggtgctgtggagcccatctgttccgtgaatacccctcgagaggtgaccctgcactttctgcgcacagctgggcaccctctgacaagatgggccctgcagcgacagccaccaagcccgaaacagttggaagaggaatttctaaaaatcccctctaattttgtgtcccccgaagatttagacatcccaggtcacgcaagtaaggaccggtacaaaacgattctgccaaacccacagagccgtgtgtgcctgggcagggcccagtcccaggaggacggcgattacattaacgccaattacatccgcgggtacgacggcaaagagaaggtgtacatcgccacgcaagggcccatgcccaataccgtgtcggatttttgggagatggtatggcaagaggaggtttcattaattgttatgttgacacaacttcgagagggtaaggagaaatgcgtgcactactggcctacagaggaggagacttacgggcccttccagatccgcatccaggatatgaaagagtgcccagagtacacagtgaggcagttgacaatccagtatcaggaggagagaaggtcagtgaaacacatcctcttcagtgcgtggccagatcaccagaccccagaatccgccggccccctcttgcggcttgttgctgaggtggaggagtcaccagagacagctgcccatcctggccccattgttgtgcactgctcagccggaataggccgaacaggatgttttattgctacgaggatcggatgtcaacagcttaaagcccgcggagaagtcgacatcctggggatcgtgtgtcagctgcgcctggatcggggcgggatgattcagacggcggagcagtaccagttccttcatcacaccctcgccttgtatgccggccagcttcccgaagaaccttccccttag

SEQ ID NO: 201688 - DNA, 423 bp, synthetic construct
  misc_feature 1..423: note = Description of Artificial Sequence: Synthetic coding sequence
  source 1..423: mol_type = other DNA
atggtgcaggcccacggcggccggagccgggcccagcccctgaccttgtcactgggagcagcgatgacccagcctccgcccgaaaaaacgcccgccaagaagcatgtcagactgcaagagcgccgtgggtctaacgtagctttaatgctggatgtacgctccctgggggcagtcgaaccaatctgcagtgtgaacacgcctcgcgaagtcacactccacttcctgcgtaccgctggccaccccctaacaaggtgggccctacaacgacaacccccttccccaaagcagctggaggaggagtttctcaagataccctccaatttcgtaagtccggaagacctcgatatccctggccacgcctctaaagatcgatacaagactatcctgccaaatccccagtcacgggtctgtctggggcgatag

SEQ ID NO: 201689 - DNA, 1083 bp, synthetic construct
  misc_feature 1..1083: note = Description of Artificial Sequence: Synthetic coding sequence
  source 1..1083: mol_type = other DNA
atggtgcaggcccacggcggccggagccgggcccagcccctgaccctcagtctcggcgcagccatgacacagcccccacccgagaagacaccagccaaaaaacacgtgagacttcaggagcggaggggctctaatgtggctttgatgctggatgtgcggtcattgggtgctgtggaaccgatttgttcggtgaacactcctcgtgaagtgaccttgcattttcttagaaccgctggccatcccctgacacggtgggctcttcagagacaacccccctcccccaagcagctggaagaagaatttctcaaaatcccaagcaacttcgtgtctccggaagacctggacatcccggggcacgcgtcaaaagaccggtacaagactatattgcctaaccctcagagtcgcgtctgcctgggaagggctcagtcccaagaagatggtgattatattaacgcaaactatatcagaggctatgacggtaaagaaaaagtgtacatcgctacacaggggcctatgccgaacaccgtaagcgacttttgggagatggtgtggcaggaagaggtcagcctcatagtgatgctgacacagctccgcgaaggaaaggaaaaatgtgtacactattggcctacagaagaggaaacatatggcccattccaaatccggattcaagatatgaaggagtgccctgagtataccgtgcggcagctgacaattcaatatcaggaggaaagacgctccgtgaaacatatacttttttccgcctggccagatcaccagactccagagagcgcagggcccttactgcgtctagtggcggaggtcgaagagtctccggaaactgcagcccatcccggccctatcgtagtgcactgtagcgccggaataggacgcactgggtgtttcattgctacccgcatcggatgccagcagttgaaggcccgcggagaggtggacattctgggaatagtttgtcagttgcgactggatcggggcggcatgatccaaaccgcagagcagtaccagtttctccaccatacgttggccctctacgctggacagcttccagaagagccttcaccgtag

SEQ ID NO: 201690 - DNA, 570 bp, synthetic construct
  misc_feature 1..570: note = Description of Artificial Sequence: Synthetic coding sequence
  source 1..570: mol_type = other DNA
atgcccaacaccgtgagcgacttctgggagatggtgtggcaggaggaagtgtcgctcatcgtcatgttgacccaactgagagaaggcaaggaaaagtgtgtacattattggccaaccgaggaggagacctacggtccgttccagattcgcattcaggatatgaaggaatgtcctgaatacacagtcaggcagttgacgattcaatatcaggaggaacgcagaagcgtaaagcacatactcttctctgcctggccggaccaccagactccagaatcagcagggccattactcaggctcgtggctgaggtggaggaatcacccgagactgcggcgcacccaggccccattgtagttcactgtagtgcaggaataggccggactggctgttttattgccacccggataggctgtcagcagcttaaagctcggggcgaggtggacattctcggcattgtttgccagcttcggctagaccgaggtgggatgattcaaactgcagagcagtaccagttcctacatcataccttagcgctctatgccggacaactgcccgaggagccatcaccttag

SEQ ID NO: 201691 - DNA, 411 bp, synthetic construct
  misc_feature 1..411: note = Description of Artificial Sequence: Synthetic coding sequence
  source 1..411: mol_type = other DNA
atgaaggagtgccccgagtacaccgtgcggcagctgaccatccagtatcaggaagaacgccgcagtgtgaaacacatactattcagcgcctggccagaccatcagactcccgagtctgctggacccctgctacggctcgtggccgaggtggaggaaagcccggagactgccgctcacccggggcctatcgtggtgcattgctctgccgggatcgggaggacagggtgcttcatcgctaccagaattgggtgtcaacagctgaaggcccgcggagaagtggacatcctgggcatcgtctgccagttgaggctggatcgtggaggcatgattcagaccgcagagcagtaccaatttctccatcacacattggctttgtatgccggccagctgcccgaagaaccatcaccatag

SEQ ID NO: 201692 - DNA, 1545 bp, synthetic construct
  misc_feature 1..1545: note = Description of Artificial Sequence: Synthetic coding sequence
  source 1..1545: mol_type = other DNA
atgagcagccccatcagcaagagccggagcctggccgccttcctgcagcagttacgctcacctcgccaacctccccggttggtcacatccacggcctacaccagtccacagccacgggaggtccctgtgtgccctcttaccgctggaggtgagactcaaaacgccgccgccttgccgggccctacttcctggccgctgctcggctccctattgcaaatcctgtggaaaggtggactgaaaaaacaacatgacaccttagtcgagtatcacaagaaatacggcaaaatcttccgtatgaaactcgggagttttgagtctgtgcacctcgggtctccctgcctgctcgaggccctttatcgaaccgaatcagcctatccacagcgtctcgaaataaaaccttggaaggcttatcgcgactaccgaaaagagggctatggccttctcattttggagggcgaagattggcaaagagtgcggtcagcctttcagaagaagctcatgaagcccggcgaggtaatgaaactggataacaagattaatgaggttcttgctgatttcatgggacggatcgacgaactatgcgacgagagagggcacgttgaggacttatacagtgaactgaacaagtggtccttcgagtccatctgcctagttttgtacgagaagcggtttggcctgctgcagaaaaacgcgggcgatgaagcagtgaactttatcatggcaattaagacaatgatgagtactttcggacgcatgatggtgacacccgtggaattacacaagtcattgaacactaaggtttggcaggaccacacactcgcctgggacactatcttcaagagcgtaaaagcctgcatcgataacagactggaaaaatactcccaacaacctagcgctgactttctgtgcgacatctaccaccagaatcgcctttccaaaaaggagctttatgcagctgtcaccgagttacagttggctgctgttgaaaccaccgcgaactctctcatgtggatcctctacaatcttagtaggaacccgcaagtccagcagaagctgctgaaagaaatacaaagtgtgttgccagagaatcaggtccccagggccgaagacctcaggaacatgccctacctaaaagcgtgtctgaaagagtctatgagattgaccccttcggtgccctttactacgcggaccctcgacaaagccactgttctgggcgagtacgcactgccgaagggtacagttctcatgcttaacacacaagtgctggggagctctgaagataattttgaggattccagtcagtttaggcccgagcggtggctgcaggagaaagaaaagatcaacccttttgctcacttaccctttggcgtgggcaaaagaatgtgcatcgggagacggctcgccgaactgcagctccacctggctctctgctggattgtgagaaaatacgatattcaggcaactgacaacgaacccgtggagatgttgcacagtgggactctggttccctcacgggagctgcccatcgccttctgccaaaggtag

SEQ ID NO: 201693 - DNA, 2382 bp, synthetic construct
  misc_feature 1..2382: note = Description of Artificial Sequence: Synthetic coding sequence
  source 1..2382: mol_type = other DNA
atggacagctggttcatcctggtgctgctgggcagcggcctgatctgtgtgtcagcaaacaacgccacgactgtagcgccatccgtgggcatcacacgcctaatcaactcatctaccgctgaacccgtgaaggaagaggcaaaaacatccaatcccacctctagtctaaccagcctgtcagtggctccgacattctcaccaaacatcactctgggccctacgtacctgacaaccgtgaatagttcagacagcgataatgggacgacccggaccgcatccacgaatagtattggtattacgattagccctaatggaacatggttgccagataatcaattcacagatgcccggacggagccatgggaaggcaactcctccaccgccgccacaacgcctgagaccttccctccttctgatgagacccccattattgcagtcatggtcgcgttgagttctcttcttgtgatcgttttcattatcattgtgttatacatgctcaggttcaagaaatataagcaagctggatcgcactctaattctttccgtttgtcgaatggacgcacagaggatgttgagcctcagtccgtgcctcttttagccaggtcccccagtacaaaccgcaaatacccaccactcccagttgacaagcttgaggaggagattaacagacgcatggcggacgataacaagctctttcgagaggagttcaatgcactgcctgcatgtccaatccaggcgacctgcgaggctgcctccaaggaagaaaataaggagaagaaccgatacgttaatatcctgccatacgaccacagcagagttcaccttaccccagttgagggggtgcctgacagcgactacatcaacgcttcctttataaacgggtatcaggagaagaataaattcatcgccgcacaggggcctaaagaggaaactgtgaacgatttttggcgtatgatttgggagcagaacacggcaacaattgtcatggtcacaaacttgaaggagcggaaagagtgtaagtgcgcccaatactggcctgaccaaggatgctggacctatggcaatattcgggttagcgtggaagatgtgactgtactggtggattatactgtaaggaagttctgtattcaacaggtgggtgatatgacgaaccgtaaaccgcagcggcttattacccagttccattttacaagctggcctgacttcggagtacccttcacaccgatcggcatgctaaagttccttaaaaaggtaaaagcctgcaatccccagtacgccggagccatagtcgtgcactgcagtgcgggcgttggccggaccggaacatttgtagtaatcgacgctatgctggacatgatgcataccgagcgtaaggtggacgtatacggattcgtgtcccgtatccgggcccagcggtgtcagatggtgcagaccgatatgcagtacgtcttcatttatcaggctttgctggaacactatctgtacggcgatacagaactcgaagtcacaagcttggagacacacttgcagaagatttacaacaaaataccagggacatccaataatgggctggaggaggaattcaaaaagctgacctctattaagatccaaaatgataagatgcgaactgggaacctgcccgccaatatgaagaagaacagggtgctgcagattataccttacgaatttaacagagtcatcatcccagttaaacgaggcgaggagaacactgactacgtgaatgcctcgtttatcgacggctaccgccagaaagactcctatatagcgagccagggtcccttgttacacaccattgaagacttttggcgcatgatctgggagtggaagtcctgctcaatcgtgatgctgaccgagctagaggagagaggacaggagaagtgcgctcagtattggccaagcgacggattggtttcctatggcgacatcaccgtggaactgaaaaaagaagaggagtgtgagagctacactgtgcgtgatctcttagttacaaataccagggagaataaatcaaggcagatcaggcaatttcatttccacggttggcctgaggttggaattccatccgatggtaaaggtatgatatccattattgcagccgtgcaaaagcagcagcagcagtcaggaaaccatcccatcaccgttcattgttccgccggagccggacgcaccggaacattttgtgccctttccaccgtccttgagcgagtgaaagcagagggcatcctagatgttttccagacggtgaaatccctgcgtctacagaggccccacatggtgcagacactggaacagtatgaattttgctacaaagtggtacaggaatatattgacgccttcagtgactatgcaaacttcaaatag

SEQ ID NO: 201694 - DNA, 2382 bp, synthetic construct
  misc_feature 1..2382: note = Description of Artificial Sequence: Synthetic coding sequence
  source 1..2382: mol_type = other DNA
atggacagctggttcatcctggtgctgctgggcagcggcctgatctgtgtgagtgcaaataatgcaaccactgttgcaccctccgtgggcattactcgtcttattaacagttctacggctgaacccgtcaaggaagaggctaagaccagcaatccaacctcatcccttacttcactgagcgtggcccccactttctccccaaacatcacgctgggtcctacatacttgaccaccgttaattcctccgatagtgacaacgggacaacaaggacggcttctacaaatagcatcggtatcacaatcagccctaacggcacctggctgcccgataaccagtttactgacgcccggacagagccctgggagggaaactcttctactgccgcgacaacgccggagaccttcccccctagcgacgaaacgcccatcattgctgtcatggtggctctaagttcccttctagtaatagtgtttattattattgtgctgtacatgttgcgatttaagaagtataagcaagcagggtcacatagtaattccttccggctgtcgaacggaaggactgaggacgtcgagcctcagagtgttcccttactggcccgaagtccgtctacaaatcggaaatacccacccttgccggtcgataaactggaggaagagatcaataggagaatggcggacgataataaactattccgtgaggagttcaacgctctgcccgcatgtccgatccaggcaacttgtgaggccgccagcaaggaggaaaacaaagagaaaaacagatatgtcaacatcctgccgtatgaccactctcgggtgcacttgactccagtggaaggcgttcccgactctgattatataaacgcctccttcattaatggataccaggagaaaaacaagtttatcgccgcccagggcccaaaagaagagaccgtgaacgacttttggcgaatgatctgggagcagaacaccgctactatcgtgatggtaaccaatttgaaggaaaggaaggaatgtaagtgcgcccagtactggcccgatcagggatgttggacttacggcaacattcgggtgtccgtggaagatgtcacggttctcgtcgattataccgtccggaaattctgtattcagcaggtgggcgacatgactaaccgcaaaccccagcgcttgatcacgcagttccactttacttcctggcctgatttcggcgttccatttacacccattggcatgctgaaattcttgaagaaagtgaaagcttgcaaccctcagtacgcgggcgcaattgtcgtgcactgtagtgccggcgtgggacgcactggtacatttgttgtcatagatgccatgttagatatgatgcacacagagcggaaggttgacgtgtatgggttcgtgtctcgcatccgggctcagcgatgtcagatggtccagaccgacatgcagtacgtgtttatttatcaagcccttcttgagcattatttgtatggggatacagagttggaagtcacatctctcgaaacacatctgcagaaaatctacaataagatccctgggaccagcaacaacggactggaggaggaattcaaaaagctaacatcaatcaaaattcagaacgacaagatgcgcacagggaacctacccgctaatatgaagaaaaaccgtgttctgcagatcattccatacgaattcaatcgggttataatacccgtcaagcgcggcgaggagaacaccgattatgtaaacgccagtttcatcgacggctacagacagaaggacagctatattgcttctcagggccccctgctgcacaccatcgaggacttttggagaatgatatgggagtggaagtcttgctctattgtaatgctaaccgaactggaggaacgcggacaggaaaagtgcgcccaatattggccttcggatggcctagtctcctatggcgatatcaccgtagagcttaagaaagaggaagaatgtgagtcttataccgtaagggatctgctggtaactaatactagggaaaacaaaagcagacagatccggcagttccactttcacggttggcccgaggtggggatccctagcgacggaaagggtatgattagtatcatcgctgctgtgcagaaacaacagcagcagtcagggaatcatccaattacggtccattgtagtgcgggtgctggtcgcacaggaacattctgcgcactctccactgtcttggagagagttaaggcagagggaatactggatgtattccagacagtgaagtcactgcgtcttcagcggcctcatatggttcagaccctagaacaatacgaattctgctacaaggttgtgcaggagtacattgatgcgttctcagactacgcaaatttcaaatag

SEQ ID NO: 201695 - DNA, 1977 bp, synthetic construct
  misc_feature 1..1977: note = Description of Artificial Sequence: Synthetic coding sequence
  source 1..1977: mol_type = other DNA
atggtggccctgagcagcctgctggtgatcgtgttcatcatcatcgtgctatacatgctccgcagatttcggaaggcagagcttatgtccaggaatactgaaaagtacaaacaggccggctcgcactccaacagcttccggctgagcaatgggcgcactgaggatgtcgaaccacaatccgtgcctctgctggccagatccccgagtaccaaccggaaatatccccccttgccagtggataagttggaggaggagattaatcgaagaatggctgacgacaataaattgtttagagaagaattcaacgctcttcccgcctgtcccattcaggcaacctgcgaggccgcctccaaagaggaaaacaaagagaagaatcgctacgtaaatatcctgccatacgatcattcccgcgtgcatctcactcccgtggagggggtcccagattcagactacattaacgcatctttcatcaacggctaccaggagaaaaacaagttcatcgccgcccagggtcccaaagaggagacagttaatgacttttggcgaatgatttgggaacaaaacaccgctacaatagttatggtgacaaacctgaaggagaggaaggaatgtaagtgtgcccagtactggccagaccaaggctgctggacttatggcaatatccgggttagtgtagaagacgtgaccgtgctggtggactacacggtgcgcaagttctgcattcagcaggtgggcgacatgacaaataggaaaccccagcgccttattacacagtttcactttacttcctggccggattttggcgtccccttcacccccataggtatgctcaaattcctcaagaaggttaaagcatgtaacccccaatatgccggggcaatcgtagttcattgttccgctggagtcggccggaccggcaccttcgtcgtgatcgatgcaatgcttgatatgatgcatacagagcgcaaagtggacgtctatggctttgtatctaggatccgagcacagcgttgccaaatggttcagactgatatgcaatatgtcttcatttaccaggcgctgcttgaacactacctgtacggcgacactgaactggaagttactagtttagagacacacttgcagaagatttataacaaaattccaggcacttcaaataacggactggaagaggagttcaagaaactgacctccatcaagatccagaatgacaaaatgcgcaccgggaacttaccggccaacatgaaaaagaatagagtactgcagattatcccctacgagtttaatagagtcattatccccgtgaaacggggcgaggaaaatactgactacgttaacgctagcttcattgacgggtatagacagaaggactcttacatcgcctcacagggcccgttgcttcacaccatcgaggacttttggcgcatgatatgggagtggaagtcttgttctattgttatgctgaccgaacttgaggagagaggccaagaaaaatgcgcccaatattggccctccgatggacttgtaagttacggggacatcactgtggagctgaagaaggaggaagagtgcgagtcatacactgttcgcgacctgctggtgaccaatacaagagaaaataaatcaagacaaatccgccaattccacttccatggatggcccgaagtgggcatccccagtgatggtaaggggatgattagtattattgccgccgtccaaaagcaacagcaacaaagtggaaaccacccgatcactgtgcattgtagcgctggagccggacgcactggaactttttgcgctctgtcaacggtcctcgaacgcgtcaaagctgagggcatcttggacgtttttcagactgtgaagtcactccgcttacagcgcccgcacatggtgcagaccctcgagcagtacgaattctgctacaaggttgttcaggaatatatagacgctttctcagattacgcgaacttcaagtag

SEQ ID NO: 201696 - DNA, 2409 bp, synthetic construct
  misc_feature 1..2409: note = Description of Artificial Sequence: Synthetic coding sequence
  source 1..2409: mol_type = other DNA
atggacagctggttcatcctggtgctgctgggcagcggcctgatctgcgtgtccgccaataatgctactacagttgccccaagtgtgggcattactagattgatcaattcaagtaccgccgagccagtcaaggaagaagcaaagacctctaacccaactagctcgctgaccagcctgtccgtggcacccacattcagccctaatattacactgggccccacctatctgactacggtgaactcatctgatagtgataatgggacgacgcgaaccgcctccaccaactccatcggaatcaccatctctcccaatggaacttggttgcctgacaatcaatttaccgacgcgcgcactgaaccttgggaggggaactcctctaccgcagctaccacccccgaaaccttcccgccaagtggcaatagcgactcgaaggatcgtagggatgagactcctattatcgccgtgatggtggctctatcaagcctgctagtgatcgtattcataattatcgtgttgtacatgctgcggttcaaaaagtacaaacaagctggatctcacagcaattccttccgtctcagtaatggtaggaccgaggatgtagaaccacagagcgtccctctcttggcccggtcacctagcaccaatcgaaaatacccccccctgccggtcgataaactcgaggaggagattaaccgcagaatggccgatgataacaaactttttcgagaagagttcaatgctctgccagcatgtccaatccaggccacttgcgaggctgctagtaaagaggagaataaggaaaaaaatagatacgtgaatattctaccatatgaccattctagagtacacctgacacctgtcgagggagtccctgattctgattacatcaatgcgtcattcatcaatggctatcaggagaaaaataagttcatcgccgcacagggacctaaagaagagacagttaacgacttctggaggatgatttgggagcagaataccgcgacaatcgtgatggtaaccaatttaaaagagaggaaggagtgtaagtgtgcacagtactggcctgaccaaggttgctggacatacgggaatatccgcgtcagcgtggaggacgtcacagtcctggtggattataccgtaagaaaattctgcatccagcaggtcggcgatatgactaatcgcaagccgcagcggcttataacacaatttcacttcacctcttggccagatttcggcgtcccgtttactcctataggaatgctaaagttcctgaagaaagttaaggcttgtaatcctcagtacgccggagctattgtggtgcattgtagtgccggggtgggtcgcacggggaccttcgttgttatcgacgccatgctggacatgatgcacaccgagcgcaaggtcgacgtctatggcttcgtctcccgaatccgtgcccaaagatgccagatggtgcagacagacatgcaatatgtttttatttatcaggctctgctggagcactacctgtacggagacacagagctggaggttactagcctggagacccacctacagaagatctacaacaaaatcccaggaacaagtaacaatggcctagaggaagaattcaaaaaactcacttcgattaaaatccagaatgacaaaatgcggacgggaaatttacccgctaacatgaagaagaatagggtcctgcagatcatcccctatgaattcaaccgcgtgatcatccctgttaaaaggggcgaggaaaatacggactatgtgaatgcatccttcatagacgggtatcgccagaaggattcttacatcgcctcccagggacctctccttcacaccattgaagacttctggcggatgatctgggaatggaaatcttgcagcattgttatgctgactgaactggaggagcgcgggcaagagaaatgtgcacagtactggcccagtgacggccttgtgagctacggtgatatcacagtggaattgaaaaaagaagaggaatgcgagagttataccgtgagagacctcctggttactaatacacgggaaaataagagccggcaaatccggcagttccatttccacggttggcctgaagttggcatcccttctgacggtaagggcatgatttcaataattgccgccgttcagaagcagcagcaacaatcaggcaaccatccaatcaccgtgcattgtagcgcaggagctggtcggacaggaacgttctgtgcgctgagtactgtcctcgagcgggtcaaagcggaaggaatactcgatgtcttccagaccgtcaagtctttgagactgcaacgaccccacatggtccaaacccttgagcagtatgagttctgctacaaggtggtacaggagtatatcgatgctttctctgattacgcaaatttcaagtag

SEQ ID NO: 201697 - DNA, 2409 bp, synthetic construct
  misc_feature 1..2409: note = Description of Artificial Sequence: Synthetic coding sequence
  source 1..2409: mol_type = other DNA
atggacagctggttcatcctggtgctgctgggcagcggcctgatctgtgtgtccgctaacaacgctacaactgtcgccccgagtgttgggattacccgcttgatcaatagtagcaccgctgagcccgtcaaagaggaagccaaaacatctaatccgaccagtagcctcactagcctaagtgtcgcgccgaccttctcccctaatatcacccttggacctacctacctgaccacagtcaattcgagcgatagtgacaatggaaccaccagaacagccagcacaaactccattgggattaccatctcaccaaacggcacctggctgcccgacaatcagtttaccgacgcccgcaccgaaccttgggagggcaactcatccaccgctgctaccacccctgagacattccccccatcgggcaatagcgactccaaggaccggagagacgagacaccaatcattgcggtgatggtagctttgtcttccttactggttattgtgtttatcatcatcgttctctacatgttgagatttaagaagtataaacaggcgggaagtcactcaaacagctttcgcctgtctaacggacgcactgaggatgtagagccgcagtccgtgcctctgctggctcgctcaccgtcaactaacagaaaatacccgccactcccagttgataaacttgaagaggaaatcaacagaaggatggctgacgacaacaaactctttagagaagagtttaacgccttacccgcctgtcctatccaagccacctgcgaggcagccagcaaggaagaaaacaaggaaaaaaacaggtacgtgaatatacttccttatgaccattctagagttcatttgacgccggtcgaaggtgtgcctgactccgattacattaatgccagtttcataaatggctaccaggagaagaataagtttatcgcagcccagggtccaaaggaagagacagttaacgacttttggcgaatgatctgggaacagaatactgccacaatagttatggttactaatttgaaagagcgcaaggagtgtaaatgcgctcagtattggcccgatcagggctgctggacatatggcaatatccgagtaagcgttgaggatgtgaccgtccttgtggactatactgtgagaaaattttgcatccaacaggtgggagatatgaccaatcggaagccccagcgcctgatcacacagttccacttcactagctggccagattttggcgtgcctttcaccccaattggaatgttgaaattcttaaagaaagtgaaggcatgtaacccacagtacgccggggcaattgtagtccattgctccgcaggcgtgggccgcacaggcactttcgtcgtgatcgacgccatgctggatatgatgcatactgagaggaaagtcgacgtctatgggttcgtgtcacgtattcgtgcccaaaggtgccagatggtacagactgatatgcagtacgtgtttatctaccaggctctgctcgaacactacttgtacggcgacacagaacttgaggttacatctctggagacccatctacagaaaatctataataagattcccgggacatccaacaatgggctggaggaggagttcaagaaactgacatcaatcaagatccagaatgacaaaatgagaacgggaaacctacctgccaatatgaaaaaaaatcgggtgttgcagatcatcccatacgaattcaatcgagtgatcattccagtcaagcggggggaagaaaacaccgattatgtgaacgcctccttcatcgacggctacaggcagaaggacagctacatcgcatcccaggggccactgctgcacaccatagaggatttttggaggatgatttgggagtggaagtcttgttccatcgtaatgctaacagagctcgaagagaggggtcaggaaaagtgcgctcagtattggccctccgacggtcttgtgtcttacggcgacattactgtggaacttaagaaggaggaggaatgtgagtcgtacacagtaagagacctgttggtgactaatacgagagagaataaatcacgccagatccgacaatttcatttccatgggtggcccgaggtgggcattccctccgacggcaagggaatgatctctataatcgcggcagtgcagaaacagcagcagcagtctgggaaccacccaatcactgtgcattgtagcgccggtgccggaagaacagggacattctgcgccctgtctaccgtgttagagcgcgttaaggcagaggggatcctggatgtgttccaaacagtgaagtcccttagactccagcggccacatatggtacagactctcgaacagtatgagttttgctacaaggtagtgcaggagtatatcgacgcctttagcgattatgcaaactttaaatag

SEQ ID NO: 201698 - DNA, 603 bp, synthetic construct
  misc_feature 1..603: note = Description of Artificial Sequence: Synthetic coding sequence
  source 1..603: mol_type = other DNA
atggacagctggttcatcctggtgctgctgggcagcggcctgatctgcgtgagcgccaacaatgcaaccactgtcgccccctctgtgggcataacaagactgattaactcttccaccgcggaacctgtgaaagaggaagccaagacatcaaatccaacttcatcattaacttcattatctgtcgcaccgaccttcagccccaacatcacactgggccccacatatctgaccaccgtgaattcatcagattctgataatggcaccacccgtacagccagcaccaacagcatcggtattactatttctcccaatggtacttggctgcccgataatcagttcaccgacgcaaggacggaaccatgggaaggcaatagctctactgccgctacaaccccagaaacgtttccacccagtgggaattccgacagcaaggaccggagagacgagacccctattatcgctgtgatggttgctctgtcgtctcttcttgtgatcgtgttcataattatagtgttgtatatgctgcgtttcaaaaagtataagcaggccgggtctcattcaaacagtttcagacttagcaacggccgaaccgaggatgtctag

SEQ ID NO: 201699 - DNA, 2442 bp, synthetic construct
  misc_feature 1..2442: note = Description of Artificial Sequence: Synthetic coding sequence
  source 1..2442: mol_type = other DNA
atggacgacgccgtgcagatcaccaagatcagcatggacagctggttcattctggtattattggggtccggcttgatttgcgtgagcgccaacaatgccacaaccgtagctcccagcgtaggcatcacaaggctgatcaatagcagcactgccgaacctgtcaaggaagaggctaagacatccaacccgacctcatctctgacatctcttagcgtagctcctactttttcccccaatatcacactcggacccacatatttaacaactgttaacagctctgactccgacaacggcactacacgcactgcttccaccaattcgattggtatcacaataagcccaaatggaacctggctcccagataaccagttcaccgacgcacggaccgagccctgggaggggaactccagtacagccgcgaccacgcctgagacattccctcctagcggtaatagcgattctaaagaccgcagggacgaaactccgattatcgccgtaatggtggccttatcgtctctgctggtgattgtgtttattattatcgtgctctatatgctccggttcaagaaatataagcaggccggatctcattcaaacagcttccgcctatctaatggccggacggaggatgtcgagcctcagagcgtgccactgttggctaggagtccatccacaaataggaaatacccgccacttccagtggacaaactggaggaggagattaatcgccggatggccgacgataataaattattcagagaggagttcaacgctctgccagcatgcccgattcaggctacatgcgaggcagcctcgaaggaagagaacaaggagaaaaacaggtacgttaacatactgccttatgaccattccagggtacatctcaccccagtggaaggtgttccagattctgattatattaacgctagcttcataaacggatatcaagaaaaaaataaattcatcgccgcccagggaccgaaggaggaaaccgttaatgacttctggagaatgatttgggagcaaaataccgcaacaatcgttatggttaccaacctgaaggaacgcaaagaatgcaaatgtgctcagtactggccggaccagggatgttggacttacggcaacatacgcgtttcggtcgaggacgtgactgttctggtcgactacaccgtgcgcaaattctgcattcagcaggtgggggatatgacaaaccgaaaaccccaacggctgatcacccaattccacttcacgtcctggccggattttggtgtgcccttcacccctatcgggatgcttaagttcctgaagaaagtgaaggcctgtaatccacagtatgcgggggccatcgtagtccactgcagtgccggggtggggagaaccggcaccttcgtggtcatcgatgcaatgctggatatgatgcacaccgagcgcaaggtggacgtatatggattcgtttctcgaatccgtgctcaaagatgtcagatggtgcagactgatatgcagtatgtttttatatatcaagctttactggaacactatctgtatggagacacagagttggaagtgacttccctggagacccatcttcagaaaatctataacaaaattccagggaccagcaacaatggtttggaggaggagttcaagaaactgacctccatcaaaatccagaatgacaagatgcggacagggaatttgcccgcaaatatgaagaaaaaccgcgtgctccagattataccatatgagtttaacagggtcatcatcccagtgaagaggggtgaggaaaatactgattatgtgaatgcatcattcatagatggctaccgacagaaagattcttacattgcctctcaagggccgctcctgcacacgatcgaggatttctggagaatgatttgggagtggaagtcatgctccatcgtcatgcttactgaattggaagagagaggccaggaaaaatgcgcccagtattggccgtctgacggcttggtctcctatggagatatcaccgtagaattgaaaaaagaagaggagtgtgagtcgtatacagtgcgtgatttgctcgtgactaataccagagaaaacaagtcccgccagattcggcagtttcatttccatggatggcccgaagtgggcatcccttcagatgggaagggcatgatcagtatcatcgcggccgtgcagaagcagcagcagcaaagcgggaaccatcccatcacagtgcactgttccgcaggcgcagggagaacggggacattctgcgccttatccaccgtactcgagcgggtaaaagcagagggaattctggatgtctttcagaccgtaaagtctctccgcctgcagcgacctcacatggtgcagaccctcgagcagtatgaattttgctacaaagtagtgcaggaatatatcgatgccttcagcgactacgccaactttaagtag

SEQ ID NO: 201700 - DNA, 528 bp, synthetic construct
  misc_feature 1..528: note = Description of Artificial Sequence: Synthetic coding sequence
  source 1..528: mol_type = other DNA
atggacagctggttcatcctggtgctgctgggcagcggcctgatctgcgtctcagccaataatgccaccacggtggccccatccgtcgggataacgcgcctgataaacagctccactgccgagccggtgaaggaagaggcaaagacttctaatcctacaagttcactgacatctctctctgtggcacccacattcagtcctaacattacactaggtccaacttacctgacgacagtcaactcaagcgactctgacaatgggacgactagaacagccagcacgaacagcatcgggattaccatttcccctaatggaacctggctgcccgataatcaatttacggatgcccgaaccgagccctgggaaggtaactcgtccactgccgcgactaccccagaaaccttccccccatctggcaattctgacagtaaggatcgtagagatgagactcctatcattgcagtcatggttgctctgagcagcctgttggtgatcgtgtttattattatcgtgttgtacatgctctag

SEQ ID NO: 201701 - DNA, 417 bp, synthetic construct
  misc_feature 1..417: note = Description of Artificial Sequence: Synthetic coding sequence
  source 1..417: mol_type = other DNA
atggacagctggttcatcctggtgctgctgggcagcggcctgatctgcgtgtctgccaacaatgccacaaccgtggccccatctgtgggcataactcgactaatcaatagctccaccgcagaaccggtgaaagaggaagcaaaaacatctaaccccacttcgtccctgacttcactctcagtagcccccacattttcaccaaacatcacattggggccaacctaccttaccactgtgaactctagcgacagcgacaacggaaccaccaggaccgcatcaacaaattcaatcggcattaccatctcccctaacggtacatggttacctgacaaccaattcactgacgctaggacagagccttgggagggaaattcttcgacggccgctactacacctgagacgttcccccccagctag

SEQ ID NO: 201702 - DNA, 762 bp, synthetic construct
  misc_feature 1..762: note = Description of Artificial Sequence: Synthetic coding sequence
  source 1..762: mol_type = other DNA
atggacagctggttcatcctggtgctgctgggcagcggcctgatctgcgttagtgcgaataacgcaactacagttgcgccaagtgttgggatcaccaggctaatcaattcatctaccgcggaaccagtcaaagaagaagccaagacctccaaccctacctcatcactaacctcactgagtgttgcacccacgttttctcccaatatcaccctgggccctacttatctaaccacggtcaattcgagtgacagcgataatggtacaacccggaccgcgagtactaactccataggaataaccatatcaccaaatggcacctggctgcctgataaccaatttaccgacgcaaggacggagccttgggaaggaaactcaagtacagcagcgaccacaccagagacatttcctccctcagacgagactcctataattgctgtgatggtggccctgtcttcactcttggtcatcgtgttcatcattatcgtcctctacatgttaagatttaaaaaatacaaacaggccgggagccatagcaactccttcaggctcagcaatggaagaaccgaagacgtggagccacaatcagttcctctgcttgcccgtagcccatcaaccaatcggaaatatccaccattgcctgtagacaagctggaggaagagattaaccgaaggatggctgatgacaacaaattgttccgggaggaattcaatgccctccctgcctgtcctatccaggcaacctgcgaagctgccagtaagtag

SEQ ID NO: 201703 - DNA, 1239 bp, synthetic construct
  misc_feature 1..1239: note = Description of Artificial Sequence: Synthetic coding sequence
  source 1..1239: mol_type = other DNA
atgaccaaccggaagccccagcggctgatcacccagttccacttcactagctggccagattttggcgtgcccttcactccgatcggaatgctgaagtttctcaaaaaagtcaaagcatgcaacccgcagtacgcaggggccatcgttgtccactgctctgccggggtgggtcgcactggaacgttcgtggttattgacgcaatgctggacatgatgcatactgaacggaaagttgatgtatacggcttcgtgtcacgtattagggcccagcgctgccagatggtgcaaaccgatatgcagtacgtgtttatctatcaggctcttctggaacactacctttacggggatactgaactggaggtgacaagcctggaaacacacttacagaaaatctataataagattcctggcacgtccaacaacgggctggaggaagagtttaagaagttgaccagcataaaaattcagaatgataaaatgcgcacaggcaacctgcccgcaaacatgaaaaagaacagggtgcttcagatcataccctacgagttcaaccgtgtgattatccccgtgaagagaggtgaggagaacacagactacgtcaacgcctcgttcattgacggatacagacagaaggacagctatatcgcttcccaaggcccccttctgcatacgatagaggatttttggaggatgatttgggagtggaagtcttgttccatagtgatgctcaccgagctggaggaaaggggccaagaaaaatgcgcccagtattggcctagtgatgggttggtctcatacggcgatatcacagtggaacttaagaaggaagaagagtgcgagtcgtacaccgtgcgggacctgttagtcacaaacacaagggaaaacaaaagcaggcagatccgccaattccacttccatggatggcctgaagttggcatcccaagtgatggaaaaggcatgataagcattattgctgccgtacaaaagcagcaacagcagtccggcaatcaccctatcacagtgcattgtagcgctggcgccggacgcaccgggacattctgcgccctgtcaactgtcctggagcgggtgaaggctgaaggaattctggacgtgttccaaacagtgaagtccctgaggctgcagagacctcatatggtgcaaacactcgagcaatacgaattttgttataaggtcgtacaagagtacatcgatgcttttagcgattatgccaatttcaagtag

SEQ ID NO: 201704 - DNA, 5994 bp, synthetic construct
  misc_feature 1..5994: note = Description of Artificial Sequence: Synthetic coding sequence
  source 1..5994: mol_type = other DNA
atgctgagccacggcgccggcctggccctgtggatcaccctgagcctgttgcagaccgggctcgccgagcccgagcgctgcaattttactctcgccgagagcaaagcctcgtcacactcagtgtccatacaatggcgcatcttgggaagcccttgcaacttttcgcttatatactcttctgacaccctgggggctgcgctctgcccaacgtttcgcattgataacactacttacggctgtaatctccaagacctacaggctggcactatctataacttcagaattatcagcctcgatgaagaacgcacggtagtgctgcagactgaccctctgcctccggcacgctttggcgtgtcgaaggagaagaccacgagtacctctcttcacgtctggtggacaccaagcagcggaaaggtaacaagttatgaggtccagctgttcgatgaaaacaaccaaaagatccagggcgtgcaaattcaggagagcaccagctggaatgagtatacattttttaacctgacggccggctccaaatacaacatcgccataacagctgtaagtggtgggaaaagatccttcagcgtctacacaaatggtagcaccgttccatctccagtgaaggacataggaatttctacaaaagctaactctctgctcatttcgtggagccacggaagcgggaacgtggagcgctaccgacttatgctgatggataaagggatcctagtccacggcggcgtcgtggataagcatgctaccagctacgcctttcacggtctcactcccgggtacctatataacctgaccgtaatgaccgaggcagctggattacagaattatagatggaagctcgtgcggacagcgcctatggaagtctcaaatttgaaggtcacaaacgacggttcacttacaagcttaaaagtgaaatggcagcgaccgccagggaacgtggactcttataatataaccttatctcataagggtaccatcaaggagagcagggttttggcaccatggattacagagacacattttaaagagttggtgcccggacggctctaccaagtaacagtgagctgtgtcagtggggaactcagcgctcagaagatggctgttggacggacatttccagataaggtcgctaatctcgaggccaataataacgggcggatgcgatcattagtggtcagctggagcccccctgcgggggattgggaacagtaccggatcctgctgtttaacgacagcgttgtgctgttgaacattacggtgggcaaagaggagacacaatacgtaatggatgatactggccttgttcccggccgacagtatgaggtggaggttatcgtggaaagcgggaacttaaaaaactcagaacgttgccagggaagaacagttccgctcgcagtgcttcaattgcgggtgaaacacgccaatgagacttctttgtctattatgtggcaaacccctgttgcagaatgggagaaatatatcatttccctggccgatagggacctgttgctcatccacaagtccctctccaaagacgccaaagaattcacttttacagacctggtgccgggacggaagtacatggctaccgtgaccagtatatccggcgatcttaagaattccagttccgtaaaaggccggacagtgccagcccaggtgacagatctgcacgtagctaatcaaggaatgacttccagtctcttcactaattggactcaagcccagggggacgtggagttttaccaggtgctcctcatccacgaaaacgtggtcattaagaatgagtcaatttcctctgaaacatccaggtactcattccattctctcaagagtgggtccctttactccgtcgtggtgactacagtatctgggggcatcagctcgcgtcaggttgtcgtggaggggcgcacagtgcctagctcggtgagcggcgtaactgtgaataatagtggcagaaatgactatctgagtgtgtcctggctgctcgcccctggcgatgtggataactatgaagtcaccttgagccatgacggaaaagtggtccagtcgctggtgatagcgaagtctgtccgagagtgctccttttcatcactcacgcccggccgattgtatacagttaccataaccactcggagtggcaagtacgagaaccacagcttctctcaggagagaactgtacctgacaaggtgcaaggagttagcgtctcgaactccgcacgcagtgactacttgcgcgtttcctgggtccatgccactggcgatttcgatcactacgaggtgaccattaaaaataaaaataactttatacagaccaaatccatacccaaaagcgagaatgaatgcgtgttcgttcagcttgtgcctggtagactgtacagcgtcacagtcaccacaaagtctgggcagtacgaagctaacgaacaaggaaacggcagaaccataccggaacccgtgaaagaccttacactcagaaatcgaagcacagaggacctgcacgtgacttggtctggcgctaacggcgacgtggaccagtatgaaattcagttactcttcaacgacatgaaggtcttccctccgttccatctcgttaatacagcaactgagtaccgcttcacgtctcttactcccggacggcagtataaaattcttgtcctgactatctccggtgatgtgcagcaatcagcattcatcgaaggcttcaccgtcccgtccgccgtgaaaaatatccacatttcacctaacggagcaacggactctttaaccgttaattggacacccggggggggggatgtcgattcttacaccgtgtctgctttccgacactcacaaaaggtggattctcagacaattccaaagcatgtgttcgaacataccttccatcgcctcgaggccggcgaacagtatcagattatgatagcctctgtatccggtagcctaaaaaaccaaatcaatgtagtcggacgtaccgtgcctgcttccgtgcagggggtgatcgctgacaatgcctattccagctactccttaattgtgagttggcagaaggcagcaggagttgccgaacgctacgatattcttcttctcactgaaaacggcatcctactgagaaacaccagcgagcccgcgacaactaagcagcacaagtttgaggatctcacgcccggtaaaaagtataagatacaaattctgacggtaagtggcggcctattttcaaaggaagcccagacagaaggtcgaacagtgccggcagctgtcaccgacctgaggatcaccgaaaattcaacaagacatttatcttttcggtggacagcatccgagggggaactgtcctggtacaatatctttctgtacaatcccgacggaaatttgcaagagcgcgctcaagtggaccctttggtccagagttttagctttcaaaacctcctgcaaggtaggatgtataagatggtcatcgttactcattcgggcgagttgagcaatgagagcttcattttcggcagaactgtgcctgctagtgtttctcatctccgggggagtaaccgcaatacaacggattcactgtggtttaactggagtcctgcttcaggggactttgacttctatgaactgatcctgtacaaccccaatggtacgaagaaggagaactggaaggacaaggacctcactgagtggcggttccaaggtctggtgcctgggagaaaatatgtgctttgggtggtcacccacagtggcgatctcagtaacaaagtgaccgctgaatctcgcactgctccgtcaccaccgtcccttatgtccttcgccgatattgccaatacttcgctggccatcacatggaaaggcccgcctgattggaccgactacaacgattttgaactacagtggctgccccgagatgcactgacagttttcaatccttataataaccgaaagagcgagggccggattgtctacggattaagaccagggagaagttatcagtttaatgtcaaaacggtctcaggagattcatggaagacctattccaaacccatctttggctccgtcagaaccaaacctgataagatccagaaccttcactgccgcccgcagaattccaccgcaatcgcttgtagctggataccccccgactcggatttcgatggatactcaattgagtgtcgcaagatggacactcaagaggtggaattcagcagaaaattagaaaaggagaagagtctgctcaacatcatgatgctggtgccccataaaaggtacctggtatcaattaaagttcagagtgcaggcatgacatctgaggtcgtcgaagacagtaccatcactatgatcgatagaccgccccccccacctccccatatccgagttaacgagaaggacgtgctcattagcaagtcgtccatcaacttcaccgtgaattgctcctggttttctgatacaaatggcgctgtgaagtatttcaccgtcgtagtgcgggaggccgacgggtctgacgagctgaagcctgagcagcagcacccgctgcccagctacctggagtatcgccacaacgcttccattcgggtttaccaaactaactattttgcctcaaaatgtgcggaaaatcctaatagtaacagtaagagctttaacatcaagctcggggcagaaatggaatctctgggtggcaaatgcgatccaactcagcagaagttttgtgatgggcctctaaagccccataccgcatacagaattagtatccgtgccttcactcagctctttgacgaagacctgaaggaattcacaaagcccctctattccgacacttttttttccctgcccatcaccaccgaatccgaacccttattcggagcaatcgagggggttagtgctgggttattcctgatcggaatgcttgtcgcagttgtggctctgcttatatgcaggcagaaggtttcacatgggcgcgagagaccatctgccaggctgtccatccggcgggataggccactgtcggtacatctcaacctgggacaaaaggggaatcgaaagaccagctgtcccatcaaaatcaaccagttcgagggccactttatgaagctgcaggctgactccaactatctgttgtcaaaggagtatgaggaactcaaggacgtgggacgtaatcagagctgcgacatcgctctactgcccgagaaccggggcaaaaatcgatataacaacattctgccctacgatgcgacccgcgtgaaattatcaaacgtagacgatgatccatgcagcgactatattaatgcctcgtacattccaggcaataactttcgacgagaatacattgtgacgcaggggccactaccaggaacaaaggacgatttttggaaaatggtctgggaacagaatgtacacaatattgtgatggtcacccagtgcgtcgagaagggaagagtgaaatgcgaccactactggcccgctgaccaggacagcctctactatggggacttgatcctgcaaatgctatccgagtcagtcctcccagagtggaccatccgtgagtttaaaatctgtggggaggagcaattagacgctcaccgactgattcggcactttcactataccgtctggcccgaccacggggtcccggagacaactcaatcactcattcagttcgtgcgaacggtccgagattatattaatcgctctcccggagccggcccgacagtggtgcattgctctgcaggcgtgggacgtacaggcacttttattgccctcgacagaatattgcagcagcttgattccaaagattctgtcgatatctacggtgcagtgcacgatctgaggcttcacagggtacacatggtgcagactgagtgccagtatgtctatctacaccaatgtgtacgggacgtgctgagagcgagaaagttaaggagcgagcaagagaatcctctgtttcctatttacgagaatgtcaatccagagtatcaccgggatccagtctattcccggcattag

SEQ ID NO: 201705 - DNA, 6648 bp, synthetic construct
  misc_feature 1..6648: note = Description of Artificial Sequence: Synthetic coding sequence
  source 1..6648: mol_type = other DNA
atggaggccgagttctacatggtgatcctgacctgcctgatcttccgcaacagtgagggcttccagatcgtgcacgttcagaagcagcagtgcttgtttaagaatgaaaaggtggtggtgggctcttgcaataggacaattcaaaatcagcagtggatgtggacagaggatgaaaagctgttacacgttaagtcagccctttgtctcgccatctctaactcatcgcgaggcccgtctcgctcagcgatccttgacagatgcagtcaggctccgaggtggacttgctatgatcaggaggggttcctggaagtcgaaaatgcctcactgttcctgcagaagcagggatcgcgtgtcgttgtaaaaaaagcacgaaaatatttacactcctggatgaaaatagacgtaaataaggaaggaaagttagtgaacgaatccctgtgcctgcaaaaggcaggtttgggagctgaagtttcagtgcggagcacacggaatacagctcctccgcagatccttacaacttttaatgcggtgccggacggcctggtcttcctgatccggaataccacagaagcttttatccggaatgccgccgagaattactcacagaactcctctgagcgacagcaccccaacttacatatgactggaattaccgatacctcttgggtccttagtaccactcagccattttctagcacgacagaggaaacaggtcttgctgaacccgagcggtgtaatttcactctcgccgagtccaaagcaagtagtcacagcgtatctatccaatggaggatattgggctctccatgcaattttagtttgatctactccagcgatacattgggtgccgctctttgccctactttcagaattgacaacacaacttatggctgcaatctccaagatctgcaagctggaacaatatacaattttcggataatttccctggatgaagaacgtacagtcgtactgcaaactgatcctctgccgcccgccagatttggagtgtcaaaagagaaaacaactagcaccagcctacacgtgtggtggacgccctcgtcagggaaggttacttcatacgaggttcagctgttcgatgagaataaccaaaaaatccagggagtgcaaattcaggaaagtaccagctggaacgaatacacgttcttcaacttgacagcaggcagtaagtacaatatcgcaattacagctgtgagtggtgggaaacgctcattcagcgtctacactaatgggtctaccgtaccctcacctgtcaaagatattgggatttccacaaaggccaatagcttgctgattagctggtcgcacggcagcgggaacgttgagagatatcgcctaatgttgatggataaagggatcctggttcacggcggagtcgtggacaagcatgcaacttcatatgccttccacggccttactccgggctacctctacaacctgactgtcatgacagaggctgctggtctgcagaactaccgttggaagctcgtccggactgcccctatggaggtgtcgaacctgaaggtcactaatgatgggtccttgacaagtctcaaggtgaaatggcaacggccccctggcaatgtcgacagctacaacattaccctttctcataaggggaccatcaaagaatctcgtgtgctggcaccatggattacagagactcactttaaggaactggtcccaggacgcctctatcaggtgacagtgtcatgtgtctctggagaattatcggctcagaagatggcagtggggagaaccttccctgacaaggtcgcaaacttggaggcaaacaataatgggcgtatgcggtcactcgtggtcagctggtcccctcccgctggggactgggaacagtatagaatcctgttgtttaacgatagcgtagttttgctgaatattactgtcggaaaggaggagactcagtatgtgatggacgatacggggctggttcctggacggcagtatgaagtagaggtgattgtcgaatccgggaatttaaagaattctgagcgttgccagggccgcaccgttcccctggccgtgctccagcttcgggtgaagcacgccaacgaaacctccctctctattatgtggcagactcctgtggctgaatgggaaaaatacattattagtttggctgaccgcgacctgctgttgattcacaagtcactttccaaggacgccaaagaattcactttcacggacctggtgcccggtagaaaatatatggcaactgtgacaagcatctctggcgatctgaaaaatagtagttccgtcaagggtcggaccgtaccagcacaagtaacagacctgcacgtagccaaccagggcatgacgtccagcctgtttactaactggacgcaggcccaaggtgacgtcgagttctaccaggttcttcttattcatgaaaacgtggtaattaaaaatgaatcaattagttcggaaacgtcgagatacagtttccattccctgaagagcggctcactttactccgtcgtggtcactaccgtctcagggggtatcagttcacgacaggtggttgtagaagggaggactgtgccttctagtgtatctggggtcacagtgaataactccggccgaaacgattacttgtctgtgagctggcttctggcccccggcgatgtggataattacgaagtcacactttcgcatgatggcaaagtggtgcaatcactggtgattgctaagtctgtgagagagtgcagtttttccagcctgacgccaggccgattgtacacagtcacgattaccactcggtctggaaagtacgaaaaccactccttctctcaggaaaggaccgtgcccgacaaggtgcagggtgttagcgttagtaattccgcaaggtccgattatctgagggtttcctgggttcacgctaccggggactttgaccactatgaagtgacaattaaaaacaagaacaattttatccaaaccaaatctatccctaagagcgagaacgaatgcgttttcgtgcagctggtgcctggtaggctgtactcagtaaccgtcacgacgaagtcagggcagtacgaggccaatgaacaggggaatgggaggacaatcccagagccagtgaaagacctgaccctgagaaaccgctcgactgaagacctgcatgtgacgtggtcaggggctaacggggacgtagatcagtacgagatccagcttcttttcaatgacatgaaggtcttccctccgtttcacctcgttaataccgccactgagtaccggttcacatccttgaccccaggcaggcaatataagatactggtcctcactatctcaggcgatgtgcagcaatctgccttcatcgagggctttaccgtaccctccgccgtgaaaaacatccacatttcaccgaatggagcaaccgattccttgaccgtgaattggacccctggcggtggggacgttgattcttacaccgtaagcgcttttagacactcacaaaaagtagacagtcagactatccctaagcatgtcttcgagcacaccttccataggctagaagccggcgaacagtatcagattatgattgcatccgtcagtggctccctcaagaatcaaattaatgtggtcgggcggacagtccccgcctcagtccagggagtcatcgccgataatgcctattcgagttactccctgatagtaagctggcaaaaggctgctggggttgctgaacgttatgacatactcctgctcaccgagaacggaatactactacggaataccagtgaaccagcgaccactaagcagcacaagttcgaggatctgacacctggtaaaaagtacaagattcaaatcctgacggtgagcgggggcctattctctaaagaggcacaaacagagggcaggactgttcccgctgccgtgacggacctccggattactgaaaattccactagacatcttagtttcagatggaccgctagcgaaggagagctctcctggtacaatatcttcttgtataaccctgacgggaatcttcaggagagggcacaggtggatcccttagttcaatcgttttcctttcagaatctgctccagggaagaatgtacaagatggtgatcgttacacattctggtgagctctccaatgagagctttattttcggcaggaccgtacccgcctctgtgtcccatctccggggctcgaacagaaacactacggactccctctggtttaactggtctccggcgagcggcgactttgacttctacgagctcatcttgtataaccctaatggcaccaagaaggagaactggaaagacaaagatcttaccgaatggaggtttcaaggtctggtgcctggaaggaaatacgtgctatgggtagttactcatagcggggatctctccaacaaggtgaccgccgagagcagaacggccccatctccaccaagcctgatgtccttcgcagatatcgctaatacgagcctcgcaatcacgtggaaaggcccaccagactggacagactataacgatttcgagctgcagtggctgccacgtgatgctctgacggtgtttaatccatacaacaatcgaaagtcggaaggccggattgtgtatggactgcggccaggtcgatcttaccaattcaacgttaaaactgtctctggcgacagctggaaaacatattcaaaaccgatttttgggagtgtcagaactaagcccgataaaattcagaacttacactgccggccgcagaacagcacggcaatagcctgctcatggattccccccgactcagactttgacgggtatagcatagaatgtcgcaaaatggacactcaggaggtagagttctcgcgtaaacttgaaaaggaaaagagcttattgaacatcatgatgctggtgccccacaagagatatctcgttagtataaaggtgcagagcgcaggaatgacttccgaagtggtggaggactcgactatcacgatgatcgaccggcccccaccaccccccccgcacattagagtgaacgaaaaagacgtgttgataagtaaatcttcaataaattttacagtcaactgtagctggttctctgatacaaacggagccgtgaagtactttaccgtggtagtaagggaggctgatggttccgatgaactgaagcctgaacagcagcacccgctccctagctacctggagtacagacataacgcctccatccgtgtgtatcagactaattattttgctagtaaatgcgccgagaacccaaactccaactctaagtcttttaatatcaaactaggagccgagatggagagtctaggcggcaaatgtgatcccacccaacagaaattctgtgacgggcccctgaaacctcacactgcataccgtattagtatccgcgcattcactcagctgttcgatgaagatctgaaggaatttacgaaaccgctctattcggatacttttttcagcctcccgataacgacagagtcagaacctctttttggagctattgaaggagttagtgcaggtctgtttcttatcggcatgctggtggccgtcgtagcccttctcatatgccgccagaaggtttcgcacggccgagagaggccatccgcccgactgtctattcggcgcgaccgtcccttaagcgttcatctgaatttgggtcagaaggggaatcggaagacctcttgccccatcaagatcaaccaattcgagggacacttcatgaaactgcaggccgattcaaattaccttttatcgaaggagtatgaggagctcaaggacgtgggacgtaatcagtcctgcgatatcgcacttctgccagagaatcgtggaaaaaatcgctataacaacatcctgccttacgatgctactagggtgaagctgagcaacgtggacgatgacccctgcagtgattatattaatgcgtcttacattccaggtaataacttccggagggaatacattgtcactcaaggcccacttccaggtacaaaggatgacttctggaagatggtttgggaacagaacgtgcataatatcgtaatggtgactcaatgcgtggagaagggacgcgttaagtgtgatcactattggcccgccgatcaggacagtttgtactatggggatctgatactgcagatgttgtccgaaagcgtcttaccagagtggaccatccgggagtttaaaatctgtggtgaagaacagcttgacgctcacagactgattcggcacttccattacaccgtctggcctgatcatggggttcccgaaacaacacaaagccttattcaatttgtcagaacagtacgcgactacattaaccgctcccccggtgcagggccaaccgtggtccactgcagcgccggtgttggtaggactggtacattcatcgcccttgatcgcatcctccagcagctggacagcaaagactcggtggatatttacggcgccgtgcacgaccttcgactccacagggttcacatggtgcagacggaatgtcagtacgtgtacttgcatcagtgtgttcgagacgtgctgcgggccaggaaacttcggtcagagcaagagaaccccctatttccaatttacgaaaatgttaacccggaataccaccgggacccagtatatagtcggcactag

SEQ ID NO: 201706 - DNA, 5724 bp, synthetic construct
  misc_feature 1..5724: note = Description of Artificial Sequence: Synthetic coding sequence
  source 1..5724: mol_type = other DNA
atgctgagccacggcgccggcctggccctgtggatcaccctgagccttctccagactggattggcggagccggagcgttgtaacttcacattagccgagagcaaagccagctctcattccgtctccatacagtggcgaatcctggggagcccatgcaatttcagtctaatctactcatctgacacactaggggcagctctgtgtccgacatttcgaattgacaacaccacttacggttgcaacttgcaggacttgcaagctggaaccatctacaacttccgcattatttcgcttgatgaggaaaggactgtggtcttgcagactgacccccttccccctgcgcggtttggggttagcaaagagaagaccacatctacatctctgcatgtgtggtggactccaagcagcggtaaagttacttcctacgaagtgcagctgttcgacgagaataaccagaagatccagggcgttcagatccaggaaagcacatcatggaacgaatatactttcttcaacctgacagcaggctctaaatataatattgcgataactgccgtgagcggtggtaaaagatctttctcagtgtacaccaacggctctacagtgccttcacccgtgaaagacatcggaattagtaccaaggccaacagcctgctgatatcatggagtcatggctcaggtaatgtggagcggtatagactcatgttaatggacaaagggatactcgtccacggcggggtggtggataaacacgccactagctacgcttttcatggactcacccccggctacctctacaatctgactgtgatgaccgaagctgcagggctgcagaactaccgttggaagttggtgcgcaccgctcctatggaggtatcaaacctgaaagtgacaaacgacggctctctgaccagtcttaaggttaagtggcagaggcctccaggaaatgtcgactcttacaatataactttatcccataagggcaccatcaaggagagtagagtcctcgcaccctggatcacagagacccatttcaaggagcttgtgcctggacgcctgtatcaggtgaccgtttcttgtgttagtggggagctgtccgctcagaagatggccgttgggcgaacctttccgctcgctgttctgcagctacgggtcaagcatgccaacgaaactagcttgagcataatgtggcaaacccctgtagctgagtgggaaaaatatatcatttcattggccgaccgcgaccttctgctgattcataagagcttatcaaaggacgcaaaggagtttacatttacagacctcgtgcctggacggaagtacatggctacggtgaccagtatcagtggcgatttgaagaactcaagcagcgttaagggccggacagtaccagctcaggtgacagatcttcatgtagcgaatcagggcatgacctcttctctgtttactaactggacccaagcccagggcgacgtagagttctatcaagtgctccttatccatgagaacgttgtcataaaaaatgaatcaatttccagtgagacaagcagatacagctttcattccctcaagtccggatcgctttactccgtcgtggtcactacagtctctgggggaatctcgtcccggcaggtggtggtggaggggcggacggttccaagcagcgtatcaggagtaacggtcaataatagcgggagaaacgactacttgagtgtgtcttggcttctggctcccggggacgtcgataattacgaagttaccctgagccacgacggcaaggtagtgcagtcgttagtaatcgccaagagcgttcgtgaatgtagcttcagctccctgacccccggacggctttacactgttaccataactacaaggagcggcaagtatgagaatcatagcttctcccaggagcgtaccgtgccagataaagtccaaggggttagtgtaagtaatagtgccagatctgattacctgcgggtgtcttgggttcatgccactggggattttgaccattacgaagtgaccattaaaaataaaaacaacttcattcagactaagtcaattcccaagagcgagaatgaatgtgtgtttgtccagttagtaccaggacgcctctatagtgtcaccgtgactaccaagtcaggccagtatgaggcaaatgagcaggggaacggacggactatccccgaacccgtcaaggatctgaccctgcggaaccggagcacagaggatctgcacgtcacctggtcgggagctaatggagatgttgaccagtacgaaattcagttgctattcaatgatatgaaggtcttccccccatttcacctggtgaacaccgcaaccgaataccgattcaccagtctgacgccgggccgccagtacaagatcctggtgctgacaatatcaggcgatgtgcaacagtcagcgtttatcgaaggattcaccgttccctccgctgtgaaaaacatacacatctctcccaatggggccactgactctctcacggtgaattggacaccaggcggaggcgacgttgattcatatacagtgtctgcgttcaggcactcccagaaggtggattcacagaccatccccaagcatgtctttgagcatacattccatagactcgaagccggggaacagtatcaaataatgatagcctctgtaagcggttcactgaaaaaccagattaatgtcgtcggaaggactgtccccgcctcagtgcaaggcgtgattgcagataacgcatactcttcttatagcctgatcgtgagctggcagaaagcagcaggtgttgcagaaagatacgatatcctgttgctgaccgagaacggaattctgctcagaaatactagcgaacctgcgaccacaaagcagcataaatttgaggacctcacccccgggaaaaagtacaagattcagattctgacagtgtcagggggtctattcagcaaagaagctcagaccgagggtaggacggtccccgcagccgtcaccgatttgagaattacagaaaacagcacgagacacctaagttttcgttggaccgcctctgaaggtgagttgagctggtacaacatcttcctgtataatcccgatggaaacttgcaggagagagctcaggttgatccactggttcagtcctttagtttccagaacctgctgcagggcagaatgtacaaaatggtgattgttacgcactccggcgagcttagtaacgaaagtttcatatttggccgcactgtgcccgcctctgtgagtcatctcaggggatccaatcgaaacaccacagacagtctgtggttcaactggtccccagcgagtggcgactttgatttctacgaacttatcctttataaccccaacggcactaaaaaggaaaactggaaggataaggatctgaccgagtggcgctttcaggggttagtgccaggccggaagtacgtcctgtgggttgtcactcattccggcgacttaagtaacaaagttactgccgagtcccggacagcgccgagtcccccttccctgatgtctttcgccgatatagccaacacgtcactggccattacttggaaggggccccctgactggacagattacaacgacttcgagttacagtggctacctagagatgcactaacagtgtttaatccctacaacaaccgaaagtcagaagggcggattgtatacggactccgtccaggaagaagttaccagttcaacgtcaaaaccgtttctggtgacagttggaagacttattccaaacccattttcgggagcgtacgaacgaaaccagataagattcagaacctgcactgccgtccccagaacagcactgccattgcatgctcctggatccctccagactcagactttgatggatatagcatagagtgtagaaagatggatacccaagaggtagaattcagtagaaaactggagaaagagaaaagtctcctcaacatcatgatgttagttccccataagcgatacctcgtgtctatcaaggtccagtctgccgggatgacatccgaggtggtggaggactccacaatcactatgatcgatcggcctccaccccccccaccacacattcgagtgaatgagaaggatgtattgatttcaaagagttccatcaactttacagtgaattgcagttggttcagcgacaccaacggagccgtgaagtactttacagtggttgtgcgcgaagccgatggcaatgatgaactaaaacctgaacagcagcatccacttcctagctacctggagtatcgccacaatgcgtctataagagtctatcagacaaattactttgccagcaagtgtgccgaaaatcccaactccaactctaagagctttaacataaagttaggagccgagatggagtctctgggaggaaaatgtgaccctacgcagcagaagttctgcgatggaccattgaaacctcatactgcctacagaatctccatcagagccttcacccagctgttcgacgaagaccttaaggaattcacgaagccactgtacagcgacaccttcttttcactgccaattaccaccgagtctgagccattgtttggcgccatcgagggagttagcgcgggactctttctcatcggaatgctggtcgcagtggtcgctctcctcatctgtagacagaaagtctctcacggtagagagaggccaagcgcccggctctccattcggagagatcggcctttgtcagtccatctcaatttaggccagaagggaaaccgcaagacaagctgtcccataaagatcaatcagttcgagggccattttatgaaattgcaggctgattctaactacttgctgtctaaggagtacgaagagctgaaggatgtgggacgaaaccagagctgcgatattgccctgctccccgaaaatcgaggcaagaataggtataacaacatcctcccatatgacgccaccagagtgaaactgagcaatgtagatgacgatccctgttccgactatattaacgcctcctatatacccgggaataactttaggcgagagtacattgtaacacagggacccctccccgggacaaaagacgacttttggaaaatggtgtgggagcagaacgtccataatatcgtgatggttacccagtgcgtcgagaagggcagggtgaagtgcgaccactattggcctgcggatcaggacagcctgtactacggagatctcattttgcaaatgttgtccgagagcgttcttcctgagtggacaatccgcgagtttaagatttgtggtgaggagcagttggacgcccatagattgattcggcactttcattacaccgtgtggcctgatcacggggttccagagacgactcagtccctgatccagtttgttagaaccgtcagagattatatcaatcggtctcccggcgccggccctacagtggtacactgctctgcaggagtggggcggactggcacattcattgcactcgataggattcttcagcagctggactctaaagactccgtcgatatttatggcgccgttcacgatcttaggctgcatcgggtccatatggtgcagaccgaatgtcagtacgtgtatctacatcaatgtgtccgggatgtgctccgagccagaaaattgaggtcggaacaagaaaatccactgttcccaatttatgagaacgttaatccagaatatcacagagatccagtttatagtagacattag

SEQ ID NO: 201707 - DNA, 2760 bp, synthetic construct
  misc_feature 1..2760: note = Description of Artificial Sequence: Synthetic coding sequence
  source 1..2760: mol_type = other DNA
atggaggccgagttctacatggtgatcctgacctgcctgatcttccgcaacagcgagggatttcaaattgtgcacgtgcaaaaacaacagtgcctgtttaagaatgagaaggtcgttgtgggcagctgcaacagaacaatccagaaccagcaatggatgtggacagaggatgagaagttgctgcacgtgaaatccgcactatgtttagcgatttcgaatagtagcagaggccccagccgcagcgcgattttggataggtgcagccaggcgcctcggtggacctgttatgatcaggagggattcctcgaagttgagaatgccagcttgtttctccagaagcaggggtctcgcgtggtggtcaaaaaagctcggaaatacctgcattcttggatgaagattgatgttaacaaagagggcaaactggtgaacgagagtctgtgtttgcagaaagccggactgggggcggaggtgtccgtgcgctcaacccgcaataccgcgccaccgcagatcctcacaacttttaatgctgtacctgacggcctggtattcctgatacgcaacaccactgaggcttttattcggaacgccgccgagaactactcccagaatagttctgagcggcagcaccctaatctgcacatgaccggaattaccgatacatcttgggtgctgtcaactacacaacccttcagttcaacaacagaggaaaccggcctggccgaaccggaaagatgcaacttcacgctggccgaatctaaagcctccagccactcagtctctatacaatggcgcatcttgggatccccatgcaatttctccttaatttatagtagcgatacattgggagcggctctatgtcctacttttcgaattgacaatactacctacggatgcaaccttcaagacttgcaggctggcacaatttacaattttagaattatcagtctcgatgaagagcgcactgtagtgctgcagaccgatccattgccccccgcacgattcggcgtctccaaagagaaaaccacttccacatccctgcacgtgtggtggacccccagctcaggcaaagtgacctcgtacgaagtacagttgtttgatgagaataatcagaagattcagggggtccagatccaggaatcaaccagctggaacgaatataccttcttcaatttgacagcaggttcgaaatataatatagcgataacggctgtttctggagggaagagatccttttctgtctataccaacggcagcacggtcccctctcccgtgaaagacatcggcatcagtaccaaggctaactcacttctcatttcctggtcccacggaagcgggaatgtggaacgctataggctcatgttaatggataaaggaatcttggttcacggtggcgtggtggacaaacatgcaacctcctatgctttccatgggctgaccccaggctacctctataatctaaccgtgatgacagaagccgctgggctgcaaaattaccgatggaaattggtgcggacggcgcccatggaggtctcaaacctgaaggtcactaatgatggttcacttacaagcctgaaggtcaagtggcagcgacctcccggaaacgttgattcctacaatatcactctcagtcacaaagggaccattaaggagagcagagtactcgccccttggattaccgaaacacacttcaaagagctcgtgcccggccgcctctaccaggtcaccgtgagttgcgtgtccggagagttgtcagcccaaaaaatggcggtagggcgtaccttccctgacaaggtcgctaacctcgaggcaaataacaacggacggatgaggtccctggttgtttcctggtccccgccagctggcgactgggaacagtacaggatcctcctattcaacgactcagtggtgctgctcaacatcacagtgggaaaagaagaaactcaatacgttatggacgataccggactagtgcccggcagacaatatgaagtggaggtgatcgtcgaatcaggcaatctcaagaattccgaaagatgtcagggtcgtaccgtgccgctggcagttctccagctgagggtgaaacacgccaacgaaactagcttgagcattatgtggcagacgcccgtggctgaatgggaaaaatatatcattagcttagcagatcgtgacctgctccttatccataagagtttgtccaaggacgccaaagaatttacatttaccgatctggtaccaggaagaaagtacatggccactgtcacttcaatttccggcgacttaaagaatagctcaagcgtaaaaggacggacggtacccgcacaggtaacagatctgcatgtagcaaaccaagggatgacctccagtctttttacgaactggacccaggcccagggagatgtggagttttatcaggttctgcttatacacgaaaatgtggtgattaagaacgagtcaatctcatcagaaacatccagatactcatttcactccttaaaatcaggttcactgtattctgtggttgtcaccacagtatccggaggcatttcctccagacaagtggtcgtggagggaaggaccgttcccgacaaggtacaaggggtgagcgtttctaactccgcgagaagcgattacttacgggtgtcctgggttcatgccactggcgacttcgatcactatgaagtgacaattaagaataaaaacaatttcatccagactaaagctttccccagccagaaaactaatgtctatctgtttagctag

SEQ ID NO: 201708 - DNA, 5724 bp, synthetic construct
  misc_feature 1..5724: note = Description of Artificial Sequence: Synthetic coding sequence
  source 1..5724: mol_type = other DNA
atgctgagccacggcgccggcctggccctgtggatcaccctgagcctgctccagactgggctagccgagccagaacggtgcaacttcacactggcagaaagcaaagccagctctcattcggtttcaattcagtggcgcattctcggctccccatgcaatttcagtttaatctacagctcagatacactgggggcagcgttatgtcctacctttcgcatcgacaacacaacgtacggttgtaatctgcaggacctacaagccgggacaatctataacttccgcattatttcccttgacgaggagcgcactgtagtgctacagaccgatcctctgccaccagcgcggttcggtgttagcaaagagaagacaacgtctactagccttcatgtgtggtggacaccctcctctggcaaggtaacgtcctatgaggtgcagctgtttgatgaaaacaaccagaaaattcagggtgtgcagatccaagagtccacaagctggaacgagtataccttttttaacttgacggctgggagcaaatacaacatcgctattacggccgttagcggtgggaaaagatcctttagtgtgtataccaacggatccaccgtcccttctcctgttaaagatataggtatctcaactaaggcgaattccctactcatcagttggtcccacgggagcggtaatgtggagagatataggctgatgcttatggacaagggcattctcgttcacggaggggtggtagataaacacgccacttcctacgcatttcacggtcttacgccagggtatctttacaatctgaccgtcatgacagaggctgccgggctgcagaattacaggtggaaactcgtccgtacagctccaatggaagttagtaacctcaaggttacaaacgatggcagtctgaccagcctaaaagtcaaatggcagcgaccgcccggcaatgtggactcttacaacatcaccctttcccataagggtaccattaaagaatctagggtcctggctccatggatcacggagactcattttaaggaacttgtgcccggaagactctaccaggtaaccgtgagttgtgtgtccggggagctctccgctcagaaaatggcagttgggagaactttcccccttgctgttttacagttaagagtcaaacatgctaatgaaaccagcctttcgataatgtggcagactcccgtagcagagtgggagaagtacatcataagcctggccgaccgagacctgctgctgatacacaaaagcttgagtaaggatgctaaagagttcacatttacggatctggttccggggaggaagtatatggccaccgtcaccagtataagcggcgatcttaagaacagcagtagtgttaaagggagaacggtcccggcgcaagtgactgacctgcacgtggctaatcaggggatgacttcgtctttgtttaccaactggacacaggcgcaaggtgacgtggagttttatcaagtgcttcttatacatgaaaacgtggtcatcaagaacgaatccatcagcagcgaaacctctcgttattccttccatagcttgaagtcaggaagtctctacagcgtcgtagtaacaactgttagcgggggaatctccagtcggcaggtggtagtggagggaagaactgtcccaagctctgtgagcggcgtgacggtgaacaatagcggccgcaatgactacctctcagtctcatggctgctggctccgggggacgtggacaactatgaagtgactctgagccacgatggcaaagtagtgcaatcactcgtcattgctaagagtgtcagagagtgcagctttagttcattgaccccagggcggctgtatacggtgaccattacgacaagaagcggtaaatacgagaaccattcctttagccaagagagaacagtgccggacaaagtacagggagtgtcagtgtccaacagcgccaggagtgattatctgcgggtcagctgggtacatgcgaccggcgatttcgaccactacgaagtgacaattaagaataagaataacttcatacagaccaagagtattcctaagtcagagaatgaatgcgtattcgtgcaactcgtcccaggaagactttattcagtcacagtgaccacaaaatctggacagtatgaggccaatgagcagggcaacgggagaactattccggaacctgtcaaagatctcaccctgcgcaaccggtccaccgaggacctccatgtgacttggtccggggcgaacggagatgtggaccaatacgagattcaactcctgttcaacgatatgaaagtgtttcctcctttccatttggtaaacacggctacagaataccggttcacttctcttacccctgggagacagtataaaatactggtcctcaccataagcggggacgtacaacagagcgcttttattgaagggttcaccgttcccagcgccgtgaagaatatacacatctcgccaaacggagccacggacagcctcacggtgaactggacgcccggcggtggggacgtggactcatatacagtcagcgcttttagacacagccaaaaagttgatagtcagactattcccaagcacgtcttcgaacataccttccataggctggaagccggtgaacagtatcagatcatgatcgctagtgtgtctggctctttgaagaatcagattaacgtcgtgggccgcacagtgcccgctagcgtgcagggtgtcattgctgacaatgcctactcgtcctactccctgatcgtctcttggcaaaaggcagccggggtagccgaaaggtatgatatcttgctgcttactgaaaacgggatcctgctgaggaacacttcagagccagctacaaccaagcagcacaagttcgaggacctgactcccggaaaaaagtataagatacaaattctcactgttagcggaggactcttttccaaagaggcccagactgaagggagaaccgtcccagcagctgtaactgatctgcgcatcaccgagaactccacgcgtcacctgagcttcaggtggactgccagcgaaggtgagctgtcgtggtacaacatctttctatataatccagacggcaacctgcaggagcgggctcaggttgatcccctggtccaatcatttagctttcagaatcttttacaggggagaatgtataaaatggttattgttacacactccggtgagctgagcaacgaatcgtttatctttggtagaacagtgcccgccagtgtcagccacctccggggaagtaatcggaacacaactgactccctttggttcaactggtcaccagccagtggtgacttcgatttctacgagctgatcctctacaatcccaacggtaccaaaaaggagaactggaaggataaagatctgactgaatggcgatttcagggccttgtgcccgggcgcaagtatgtgttgtgggtggttacacattcaggcgacctgagcaacaaagtaacggcagagtctaggaccgctccgtccccacctagcctcatgtcatttgccgacatagccaatacttctctcgctatcacctggaagggcccaccggattggaccgattataacgactttgagttacagtggcttcctagagacgcccttaccgtctttaacccctataataaccgaaagagtgagggccgcatcgtgtatggtcttcgtccaggtcgaagctaccagttcaatgtgaagacagtgagcggtgatagctggaaaacttactctaaaccgatctttggtagcgtgcgtaccaagccagacaagattcaaaacctgcattgtagaccacagaacagcactgcaatcgcctgctcctggataccaccagacagcgattttgacgggtacagcattgaatgtagaaagatggatacacaggaggttgaattctcaagaaaactggaaaaggaaaaatccttgctgaacataatgatgctcgtgcctcacaagcgatatctggtttcaatcaaagtgcagtccgcagggatgacttccgaggttgtcgaggacagtaccatcaccatgatcgaccgccctcccccacccccaccgcatatccgcgttaacgaaaaagacgttcttataagcaaaagctctattaacttcaccgtgaattgttcttggttctcggacactaacggtgccgtgaagtattttactgtagttgtccgtgaggcggatggctccgacgaactgaagcctgaacagcagcacccactgccctcataccttgagtaccggcacaatgcctctatcagggtgtaccagacaaactacttcgcctcaaaatgtgctgagaaccccaactctaatagtaagagcttcaacattaaattgggagccgaaatggagagtctgggagggaaatgcgatcctacacagcaaaagttctgtgatggaccattgaagccacacaccgcttatcgcatttcaatcagagccttcacccagctgtttgacgaggacctgaaagaatttaccaaacccttgtatagtgatacattcttttcgctgcccattaccacagagtccgagcccttgttcggcgcaattgaaggagtcagcgccggattgtttcttattggtatgctcgtggcagttgtggccttgttaatatgcagacagaaggtgagccacggcagggagcggccttccgcgagactctctatccgacgcgataggcctctgagcgtccacctcaacctggggcaaaagggtaatcggaaaactagctgccccattaagataaaccaattcgaaggtcatttcatgaaactgcaggcagatagtaactacctactcagtaaggaatacgaggaattgaaagatgtgggccgcaatcagtcttgcgacattgctcttctgcccgaaaaccgtggcaagaaccgatataataatatactgccatatgacgccacacgcgtaaagctgagcaacgtggatgatgatccatgtagcgattacatcaacgcctcgtatatcccaggcaacaatttccgtagggagtacatcgtcacccaggggccccttcctgggacaaaggatgatttctggaaaatggtctgggaacagaacgtgcacaatatagtcatggtaactcagtgtgtggagaagggtcgagtcaaatgcgaccattactggccagctgaccaggactctctctattatggcgacctcattttacagatgctatccgagagcgtgctcccagagtggaccattagggagttcaaaatttgcggagaggagcagctggacgcccatcgcctcatcagacattttcactacacagtgtggcccgatcatggtgtgcccgaaaccacccagtccctgatccagtttgtcagaacagtgagggactatatcaatagatctccgggagctggcccgacagtcgtgcattgcagcgccggagtgggtagaacaggtacgtttatcgctttagaccggatattgcaacagctcgattccaaggactccgtggatatttacggggccgtgcatgatctgaggcttcacagggtgcacatggtacagaccgagtgccagtacgtctacctccatcagtgcgtaagagacgtcctaagggcaagaaaactccgctccgagcaagaaaaccccctcttccctatatacgaaaatgttaaccccgagtaccacagggaccccgtgtactctagacattag

SEQ ID NO: 201709 - DNA, 621 bp, synthetic construct
  misc_feature 1..621: note = Description of Artificial Sequence: Synthetic coding sequence
  source 1..621: mol_type = other DNA
atggccctgccctgcaccctgggcctgggcatgctgctggccctgcctggggccctaggctctgggggtagcgcggaggactctgtgggttcctccagcgtgactgtagtcctcctccttttactgttactcctcctggctaccggcttggctttggcctggaggaggctctcaagggactccgggggatactaccatcctgcacgcctgggggccgccctatggggaaggacaaggcggttgctgtgggcttctcctcccggaaggtggctgcaggccagggctgaactgggcagcacagacaacgatctcgaacgtcaggaagacgagcaggatacggactacgatcatgttgcggacggtggtctgcaagccgacccgggtgaaggagagcagcaatgcggcgaggcgagctcccccgagcaggtacccgtcagggccgaggaggccagagactctgacactgagggcgatttagttctgggttccccaggacccgccagtgctgggggatctgccgaggctctgctgtccgacctgcacgcctttgccggttccgctgcctgggacgacagtgcaagggctgccgggggccaaggccttcacgtcaccgccctgtag

SEQ ID NO: 201710 - DNA, 4152 bp, synthetic construct
  misc_feature 1..4152: note = Description of Artificial Sequence: Synthetic coding sequence
  source 1..4152: mol_type = other DNA
atggtgcacgtggcccggctgctgctgctgctgctgaccttcttcctgcggacggacgctgagacccccccccgcttcaccaggaccccagttgaccagactggagtgagtggaggcgtggcttcattcatctgccaggctacaggtgacccgaggccgaaaatcgtatggaacaagaagggcaagaaggttagcaaccagaggttcgaagtgattgagttcgatgacggctctgggtccgtgctgcggattcagcccctccgcactcctagggatgaagccatctatgagtgcgttgctagcaacaatgtcggcgaaatctccgtctccaccaggttaaccgtcctgcgagaagatcagattccacgggggttccctaccatcgacatgggtccacaattaaaagtagttgagaggacacggacagcaacgatgttgtgcgctgcatccgggaacccagatcctgaaatcacatggttcaaggacttcttacccgtggacacatctaataacaatggaaggatcaaacagctgaggtccgtgtccgtgtgcgccacctaccacaccggggctctccaaatcgagcagtcagaggaatctgatcagggaaaatatgagtgcgtggcaactaactccgcgggtacgagatattccgccccagccaatctctatgtccgagtgaacaggaaggttagacgcgtgcctccgcgattctcaatcccgcctaccaaccacgaaattatgccaggtggtagcgtgaatattacctgtgtcgctgttggcagtccaatgccttatgtaaagtggatgctgggggctgaagatctgacccccgaggacgatatgccgattggtcggaacgtcttggagctgaacgatgtgcggcagtctgccaactatacatgtgttgctatgagcacactcggagtcatcgaggccattgcacagattaccgtcaaagcactccccaagccacctgggactcctgtagttactgaatctacagctaccagcatcaccctcacctgggacagtgggaatccagaacctgtgtcatattacattatccagcacaaaccgaagaacagtgaagagctgtacaaagagattgacggcgtcgctaccacccggtattctgttgccggcctgtcgccatactccgactacgaattccgtgtcgtggctgtcaacaacattggccgcggtcctcctagtgaacccgtgctgacccagacatctgaacaggcaccctcctctgccccccgcgatgtgcaagcccggatgctttcctccaccactattctcgtccagtggaaggagcccgaagagccaaatgggcaaattcaaggatatcgggtctattacacaatggatcctacccagcacgtaaataattggatgaagcataatgtcgcggattcccagattactaccatcggaaacctggtgccccagaaaacttacagtgtcaaggtgctggcatttacgagtattggtgacggacccctaagcagcgatatccaggtcatcacccagacaggggtacctggtcagccgcttaactttaaagccgagccagaatcagagacctctatactgctctcctggactcccccgcggtctgacacaattgcaaattacgagttggtctataaggacggtgagcacggagaagaacagcgcatcacgattgagcccgggacgtcgtatagactacaaggccttaagccaaactcactctactattttcggctggccgcccgttccccccagggcctcggggccagcacggccgaaatatcggcacgcacaatgcagtcctctaaagggtactacatcatcatcgtccccctgaagaaaagccgcgggaaatttattaagccttgggaaagcccagacgagatggaactagatgaactgttaaaagaaattagtcggaaaaggaggtccatccggtatggtcgggaagttgaactgaagccctacattgctgctcacttcgatgttcttcctacggagttcaccttgggcgatgacaagcactacgggggcttcacaaacaaacagctgcagagcgggcaggagtacgtgttttttgtccttgctgtgatggagcacgcagaatcaaaaatgtacgctacttccccctacagtgatccagttgtatccatggatctcgatccacagccaataactgatgaggaggagggtctgatatgggttgtcggccctgtattagcggtggtgtttataatttgcattgtgatcgccatcctcctgtataaaaggaaaagggcagaaagcgattccagaaagtccagtattccaaacaataaggaaattccaagtcatcatcctacagaccctgttgagttacgcagactgaattttcagactcccgggatggccagtcacccccccatccctatccttgaactggctgatcacattgagagactgaaagcaaatgataaccttaagttctctcaagagtatgaaagtattgaccctggtcaacagtttacatgggagcacagtaatctggaggtgaataagcccaagaatcgatatgctaacgtgattgcatacgaccatagtagagtgcttctaagcgccattgagggaataccaggctctgattatgtgaatgctaattacatcgacggttaccggaagcagaacgcatatatcgcaacacaaggttctctaccggagaccttcggcgacttctggaggatgatttgggaacagcgctccgctactgtggtcatgatgacaaagctggaggaacgcagtcgcgtgaaatgtgatcagtactggccaagccggggtaccgagactcatggtctggttcaagttactctactagacaccgtggaactagcgacttactgcgtgcgcacgttcgcactgtataagaacgggagctctgaaaagcgcgaagttagacaattccagtttaccgcttggcccgaccacggggttcccgaacaccctaccccttttctcgccttcctgcggagggtcaaaacgtgtaacccccccgatgcagggcccatggtggtgcactgttctgccggggtgggacgcaccggctgttttattgttatcgatgcaatgttggagcggatcaaacatgagaagacagtggatatatatggccacgtcacactgatgcgagcccagcggaattatatggtgcagactgaggaccagtacatttttatccatgatgccctcctggaggctgttacatgtggcaacaccgaggtcccagcccgcaatctgtatgcctatattcagaagctcacccagatcgaaacgggggagaacgtcaccgggatggagctagagtttaagaggctcgcctcctccaaggctcataccagccgttttatctcagccaatcttccctgcaataagttcaagaacaggttagtcaatattatgccttatgagagcacaagagtgtgtctgcagccaatcagaggggtggagggcagtgattacattaacgcttcctttatcgacggctatcggcaacaaaaggcctacatagccactcagggcccactggcagagaccacagaggacttctggcgtatgctatgggagcacaattcaacaattgtagttatgttgaccaagctcagagaaatggggcgggaaaagtgccaccaatattggccagccgagcgcagtgctagataccagtatttcgtggttgaccccatggccgagtacaacatgccccaatacatcctcagggagttcaaagttaccgatgcccgagatggtcagagtcgaactgttcgccagttccaattcacggattggccagagcaaggagtcccgaagtccggcgagggatttatagacttcatcgggcaggtgcataagaccaaagagcaattcggtcaagatggaccaattagtgttcattgctcagccggagtcggaaggactggagtctttatcacgttgtccatcgttctggaacgaatgcgctatgaaggcgtcgtcgatattttccagacggttaagatgctgcgcacgcaacgcccagctatggtccagacggaagatcagtatcagtttagctatcgggctgcccttgaatatctgggcagcttcgaccactatgccacctag

SEQ ID NO: 201711 - DNA, 4521 bp, synthetic construct
  misc_feature 1..4521: note = Description of Artificial Sequence: Synthetic coding sequence
  source 1..4521: mol_type = other DNA
atggtgcacgtggcccggctgctgctgctgctgctgaccttcttccttcggacggacgccgaaacaccccccagattcacccgtacaccagtggatcaaaccggggtgtctggcggcgttgcatcattcatatgccaggccacaggagatcccaggcctaagatcgtgtggaacaagaagggtaaaaaagtgtctaatcagcggttcgaagtcattgaatttgatgacgggtctggctctgtgctgagaattcagccccttagaaccccacgcgacgaggctatctacgagtgcgtggctagtaataatgtgggtgaaataagcgtcagtacaagactgaccgttctgcgagaggatcagattccgagagggtttccgacaattgatatgggtcctcagcttaaagttgtggaaaggacgcgaacagcaacaatgctttgtgccgcttccggcaatccagatcctgagattacttggtttaaagatttcctgcctgtagataccagcaacaacaacggcagaattaaacagctgcgaagcgaaagtataggtggtacgccaatcagaggtgccctgcagatcgagcagagcgaggagtccgatcaggggaagtatgagtgtgtggccaccaactctgcaggaacaagatacagcgccccggcaaacctgtacgttagggaattacgagaggttagaagagttcctcccaggtttagcatccctccaacgaaccatgaaataatgccgggcggtagcgtcaacatcacctgtgtcgccgtgggctcccctatgccttacgtcaagtggatgctgggtgcagaagatctgacaccggaagatgatatgccaattggaagaaatgttcttgaacttaacgatgttagacaaagcgccaactatacctgtgtcgcaatgtccactttgggggtgattgaggcgatcgcacagattacagtgaaagcactacctaaaccccctggcacccccgtcgttactgagtccactgctacatctataacacttacatgggactctgggaatcccgagccagtgagttactacataattcaacacaaacctaaaaatagcgaggagctgtacaaggagatcgacggtgtagcaaccacaaggtacagtgtggccggcctgtctccatatagcgattatgagttcagggtggtggccgttaacaacatcggtcgaggccccccctctgaacctgtactgacccagacatctgaacaggccccgtcatctgcgcctcgggatgtgcaagctcggatgctctcctcaactaccatcctggtgcaatggaaagaacccgaggagccaaatgggcagatccagggataccgagtatactataccatggaccccacacagcacgtcaacaactggatgaaacacaacgttgctgacagccaaattacaacaatcggcaacttggtgccccaaaaaacctattctgtcaaagtcttggctttcacatctatcggcgacgggcctttgtcttctgacatacaggtaataacacagactggcgtacccggacaaccactgaattttaaagcagagccagagtcagaaacatccattttactgagctggaccccaccaaggtccgataccattgcaaactatgagctagtttataaggacggggagcacggggaagagcaacgaatcaccatagagcctgggacttcttaccggcttcagggtctcaaacctaattcactatactattttcgcttggcggcccgctcaccacagggcttaggcgcttctactgctgaaatatctgctagaactatgcagagcatgttcgccaagaacttccacgtcaaagcagtaatgaagacatccgttctcctttcatgggagattccggagaactataattcagccatgcccttcaaaatactgtatgatgatggaaagatggttgaagaggttgatggacgtgctactcaaaagctgattgttaatctgaagcccgaaaaaagctacagtttcgtacttacaaaccgaggcaactcagccgggggattgcagcatcgggtgacagccaagaccgcccctgatgtgttgcggactaaacccgccttcatcggaaaaaccaatctggacgggatgatcacagttcaacttccagaggtgcctgctaacgagaatatcaaagggtactatatcatcattgtcccacttaagaaatcacgaggtaaatttatcaaaccatgggagtcccctgacgagatggagctggatgaacttttgaaagaaatcagcaggaaacgcagatccattagatacgggcgcgaggtggagcttaagccctacattgccgcgcattttgacgttcttccaacagagtttactttaggagatgacaaacattacggcggtttcaccaacaaacagttgcagagcggccaagaatacgttttttttgtgctggccgtcatggagcacgccgaatccaaaatgtatgctacaagcccttacagcgaccctgtcgtgtccatggacttagacccccagcctattacagacgaagaggagggactgatctgggtggttggacctgtgttggcagttgtgttcattatctgcattgttatcgcaattttgctttacaagtcatctaaacccgatagaaaaagagctgaatcggacagcaggaagtcctcaatcccgaacaataaggagatcccaagccatcacccaacggacccagttgaactgcgcaggctcaacttccaaaccccaggaatggcttctcatccgccgattcccattctcgagttggccgatcacatcgagcggctgaaggctaatgacaatttaaagttttcccaggagtacgaatcgatcgacccaggacagcaattcacatgggaacattctaacctcgaagtgaataagcccaaaaatcgatatgcgaacgtgatagcatacgatcactcacgagtgctgctcagcgccatcgagggcatcccaggatcagattacgtgaatgccaattatatcgacggatatagaaagcagaatgcttatatcgctacacagggctccctgccagagaccttcggcgatttctggcgcatgatatgggaacagcggtccgcaacggtcgttatgatgacaaagctcgaagaacgatccagagtgaagtgcgatcagtactggccgagccggggcacagaaacccatggcctggtgcaggtcacacttctggatacagtagaattggcaacctattgtgtccgtaccttcgctctgtataagaatgggtcctcagaaaaacgggaagtccgacagtttcagtttaccgcatggccggatcacggagtcccagagcaccccactccgtttttggcatttttgcgaagggtgaagacttgtaaccccccagatgcggggcccatggttgtgcattgctctgcaggagttgggaggacaggctgtttcatcgtgatcgatgctatgctggaacgtataaagcacgagaaaaccgttgacatttatggccatgtcacgctgatgcgggcgcagcgcaactacatggtgcagacagaagatcagtacatctttatacatgatgccctgttggaagccgttacgtgtgggaatactgaggttcccgctagaaatctgtatgcatacatacagaagctgacccagattgaaacaggggaaaacgtcactggcatggagctcgagtttaaacgcttagcctcatcaaaagcccacacttcgaggtttatttccgctaatctgccctgtaacaagtttaaaaatcgtctagtcaacatcatgccctacgaatcaacacgggtttgtctgcagcccatacgcggggtggaaggatcagattacattaatgcttcttttatcgacggctatagacaacagaaagcctatatcgcaacccaggggccattagctgagacgactgaggatttctggcgaatgttatgggaacataattcaactatagtggtgatgctgaccaagctgagagagatgggacgggaaaaatgccatcagtactggcccgccgagcgctcagcccgttaccagtattttgtggtcgaccccatggcagaatacaacatgccacagtacattctgcgcgagtttaaggtgactgacgcacgagatggccagtcccggacagtccggcagtttcagttcaccgactggccggaacagggagtacctaaaagtggggaagggtttatcgactttatcggccaggtgcacaagactaaggagcagttcggtcaggatggccccatcagtgtgcactgcagcgctggggtaggaagaaccggcgtttttattaccctttccatcgtgctggaacggatgaggtacgagggtgttgtggacatattccagacagttaagatgcttagaacccagcgacccgccatggttcagaccgaagatcaatatcaattttcatatcgcgctgccctcgagtacttgggttcatttgatcattatgccacctag

SEQ ID NO: 201712 - DNA, 5739 bp, synthetic construct
  misc_feature 1..5739: note = Description of Artificial Sequence: Synthetic coding sequence
  source 1..5739: mol_type = other DNA
atggtgcacgtggcccggctgctgctgctgctgctgaccttcttcctacgaaccgatgcggagactccacctcggttcaccagaacacccgtcgaccagaccggagtgtccgggggggttgcaagctttatttgccaggcaacaggggatccaagacctaagattgtgtggaataagaaagggaaaaaggtttccaatcagcggttcgaggtaatcgagtttgacgacggaagcgggtccgtactccggattcagcctctgaggaccccacgggacgaggctatttatgagtgcgtggccagtaataacgtcggggagatctctgtgagcaccaggcttaccgtgctgagggaggaccagatacctagagggtttcctaccattgacatgggccctcaactgaaagttgttgaacgtaccagaacagccactatgctgtgtgccgcatccggcaaccccgaccctgagataacttggtttaaagactttctgccagtggatacttctaataataatggacgaataaagcagttgagatccgaatcgatcggtggcacccctattcgcggagcactgcagatcgaacaatccgaagaaagtgatcaaggtaagtatgaatgtgttgccactaatagcgccggaacaagatacagcgcaccagcgaatttgtatgtgcgtgaactgcgcgaggttcgtagagtgcctccccgcttctcaatcccccccacaaaccacgaaatcatgccgggaggcagcgtcaacataacgtgcgtggccgtcgggagtccaatgccatatgttaagtggatgttgggggctgaagatctgacgccagaggacgacatgccgattgggcgcaatgttctcgagcttaacgacgtgaggcagtcagcaaactatacatgcgtcgctatgagcaccttgggtgtcatcgaagctatcgcccaaataacagtgaaagctctgccaaagccacccggcacccccgtcgttaccgagagtactgcaacctccataacacttacctgggacagtggaaaccccgaaccagtgtcatactatatcatacagcacaagcccaaaaattccgaagagctgtataaggagatcgatggagtcgcaactacccgttatagcgtggcaggattatctccttactccgattacgagtttagggtcgtggcggtgaacaacattggccgcgggcccccgagtgagcccgtgctgacccaaaccagtgaacaggcaccgagctccgccccgagagacgtgcaggccaggatgctctcttccactaccattctggtgcaatggaaggagcccgaagaaccgaacggtcagattcaaggctatcgggtatattacaccatggaccctactcagcatgtgaataattggatgaagcataacgtagccgactctcaaataaccactatcggaaacctggttcctcagaaaacatatagtgtgaaggtactagcctttacatcaataggggatggacccctcagctctgatatccaggttattacccagacaggggtaccaggacagcctcttaatttcaaggccgagcccgagagcgaaacatctatacttttatcctggaccccccctcggtctgatactatcgcaaactacgaactcgtgtacaaagacggcgagcacggggaggaacagcggatcaccatagagccgggaacatcctacaggctgcagggacttaagcctaattccctttattactttcggcttgcagcacggagtccacagggattgggtgcaagcacagccgagatttctgctaggaccatgcagtccaagcctagcgctccaccccaggacatatcctgcaccagtccgtcatcaaccagcattttagtatcgtggcaacctcctccagtcgaaaagcagaatggtatcatcactgagtacagcatcaaatacactgccgttgacggcgaagacgacaaacctcacgaaatcctgggaatcccctcggatacaactaagtacctgctggaacagctggagaaatggaccgagtaccgaattacagtgacagcccacaccgatgtgggccccggccccgaatcattatccgtcctcattcgaacgaacgaagacgtgcctagtggacctccccggaaggtggaggtggaagccgttaacagcacctcagttaaagtgtcgtggcgctcccccgttccaaataaacagcacggccagattcgcgggtatcaggtccattacgtacggatggagaatggcgaacccaagggtcagccaatgctgaaggatgtgatgctagcagacgctcagtgggagtttgacgatacaacagaacacgacatgataatctccggcttgcagccagaaacgtcctactccctgacagtgacagcatacaccacgaagggcgacggcgcaaggagtaaacccaagctcgtttctacaaccggggccgtcccagggaagccccgcctggtaattaatcatactcagatgaacactgccttgattcaatggcatccacctgtagacacctttgggccactccagggttatcgcctgaagttcggccggaaggacatggaaccgttaacaacattggaattttccgagaaggaagatcatttcaccgcaaccgatattcataagggggctagctacgtgtttaggctgtctgcaaggaacaaagtggggtttggtgaagagatggtgaaagaaattagtatccccgaggaagtcccaacaggatttccacaaaatctgcactcagagggaaccactagcacctcagttcagttgagctggcagcctcctgtcctcgccgaacggaatggtatcataacaaaatacaccctgctgtacagagatataaacataccactcctgcccatggagcagcttattgtgccagcggacacaactatgactctgaccggactgaaacccgataccacttatgacgtgaaggtccgtgcccataccagcaaggggcccggcccttatagccccagcgtccagttccgcaccttgcctgttgaccaagtgttcgccaaaaatttccacgtgaaggccgtgatgaagacctccgtcttattgtcgtgggaaatccctgagaactacaattccgccatgcctttcaaaatcctgtacgatgacggaaaaatggttgaagaagtggatggtagagctactcagaagttgattgttaacctgaaaccggagaagtcctactcttttgtgttaacgaacagagggaactctgcaggagggcttcagcaccgggtgaccgcgaagaccgcaccggacgtactaagaaccaagcccgctttcataggcaagacaaatcttgatgggatgattacagtgcaactcccagaagtgccggccaacgagaatattaaaggatattatatcatcattgtcccacttaagaagagccgcggcaagttcataaagccgtgggagtcccccgatgagatggagctcgatgaactcctaaaggagatctcacggaaacgcaggtctatccggtacgggagagaggtagaactgaaaccatacattgccgcccactttgatgttttgccaacggagtttactttgggtgacgacaagcactatggaggattcactaataagcagctccagagcggccaagaatacgtttttttcgtcttggctgtcatggagcatgctgagtcaaaaatgtacgctacatcaccttattccgacccggtggtgtcaatggatctcgatcctcaacccattacagatgaagaggagggcttgatttgggtggtgggtccagtgttagccgttgtgtttattatttgtatcgtgattgccatcctgctttataagcgcaagagggccgagtctgactctaggaagagtagcatcccaaataataaggagattcccagtcatcatccaactgaccctgtcgaactgcgcaggctgaactttcagacacctggaatggcctcgcatcctccgattccaatcctagagttggcagaccacattgagcgtctcaaagccaatgataacttaaagttctcacaggaatacgagtcgatcgatcctggccagcagtttacatgggagcacagcaatttggaggtcaacaaaccaaagaaccggtacgcaaacgtaattgcttatgatcactctcgcgtcctactgagcgccatcgaaggtataccgggatctgactacgtcaacgccaactacatcgacggctaccgcaagcaaaatgcatacatcgccacccagggatcactcccggagacatttggcgacttctggaggatgatctgggagcaacgctctgctaccgtggtgatgatgacaaagctggaggagcggtcccgggtgaaatgcgaccagtactggccctcgcgaggaacagagacgcacggcctcgttcaggttaccctcctggatactgtggagctggccacatattgcgtcaggaccttcgcgctctacaagaatggaagttctgagaaaagggaggtgcgccagtttcagttcaccgcttggcccgatcacggagtgcccgagcaccccacgcccttcttggctttcctgagaagagtcaaaacatgcaatcctccagatgctggcccgatggtcgtccactgcagcgcaggcgtgggcagaactggctgctttatagtgatagatgccatgctggagaggattaaacatgaaaaaactgttgacatttatggacatgtaaccctgatgagggctcagaggaattatatggtacaaactgaagaccagtatatttttatacatgatgctctccttgaagccgttacctgtgggaataccgaggttccagctaggaacctgtatgcctatatccaaaagttaacccaaatcgagacgggcgagaacgttacaggtatggagctggaatttaagcggctggccagtagtaaagcccatacctcgcggtttatctcagccaacctgccgtgtaacaagtttaaaaatagactcgtcaacataatgccatatgaatccaccagggtttgccttcagcccatcaggggagtcgaagggtctgattacattaatgcctccttcattgacggctaccgacagcagaaggcctacattgccacccagggacccctggctgaaactacagaggatttctggaggatgctttgggagcataactcgactattgtcgtcatgttgaccaaactgcgcgagatgggacgtgaaaagtgccaccagtactggcccgccgagaggtccgcgaggtaccagtacttcgtggtggaccccatggcggagtacaatatgcctcagtacattctgcgcgaatttaaggttactgacgctcgagacggacagagtaggacagtgcgccagtttcagtttacagattggcctgagcagggcgtccctaaatctggggagggcttcatcgactttattgggcaggttcacaaaaccaaggagcagttcggccaggacggccccatatccgttcattgttccgccggggtcgggcgaacaggagtctttattacactgtctatcgtactcgagcgcatgcggtatgagggagtggtggatatcttccagacagttaaaatgctgcgaacccaaaggccagctatggtgcaaaccgaggatcaatatcagttttcgtaccgcgccgcccttgaatatctgggcagtttcgaccactacgctacttag

SEQ ID NO: 201713 - DNA, 5673 bp, synthetic construct
  misc_feature 1..5673: note = Description of Artificial Sequence: Synthetic coding sequence
  source 1..5673: mol_type = other DNA
atggtgcacgtggcccggctgctgctgctgctgctgaccttcttcttacgaactgacgctgaaacccctcctagatttacacggacacccgtggaccaaaccggtgtgtctggcggggtagcctcctttatttgccaggctactggggatccaaggcctaagattgtgtggaataaaaagggaaaaaaagtcagcaaccaacgattcgaggtgattgagtttgacgacgggagtgggagcgttttgaggattcagccgctgcggactccaagggacgaagcgatttacgagtgcgtcgccagcaacaatgtgggggagatatccgtgtctactcggcttaccgttctgcgggaagaccagataccacgaggatttcccactatcgacatgggccctcagctgaaagtggttgagagaacccgcactgcaactatgttgtgcgctgcatctggaaaccccgaccccgagatcacttggtttaaagactttctgccggtggacacttcaaataacaatggcaggataaagcagctgaggtcaggagctttacagatagagcagtcagaggagagcgatcaaggcaagtatgaatgtgtggccacaaatagcgctggcactcgctacagcgcccccgctaatctgtacgtgcgtgttcgacgagtgccgccacggttctcaatacctccgactaatcatgagatcatgccaggagggagtgtcaacattacgtgcgtcgctgtcgggtctccgatgccatatgtgaagtggatgctgggcgcggaagacctcacacctgaggacgatatgccgattgggaggaacgttctggaactaaatgacgttcgacagtccgccaattacacttgtgtcgcaatgagcactctcggagtcatagaagctatagcacagatcaccgtcaaggccctacctaagccccctggtactccggtcgtgaccgagtcaacggcaacatccattacccttacttgggactctgggaacccagagcccgtcagctattacatcatccagcataagccgaagaattcagaggaactgtacaaagaaatcgacggagtggccaccaccagatactcagtagctgggctctcgccatattccgactatgagtttcgagtggtcgccgtaaataatatagggaggggccctcctagtgagccggtactgactcagacgtctgagcaagctccctccagcgcgcccagagacgtgcaggcccggatgctttcctctacgaccattctggtacaatggaaggagccggaagaaccaaatggccagatccaggggtacagggtgtactataccatggacccaactcagcacgtcaataactggatgaagcataatgttgccgactcccagatcaccaccatcggcaatctcgttcctcaaaagacttattcagttaaggttcttgcttttaccagcattggagatggacccttatcctcagacatccaggtgataacacagactggggttcccgggcagccactcaatttcaaagctgagccagagtccgagaccagtatacttctgtcgtggaccccacccagatctgatacaatagccaattacgagctggtctataaggacggagagcatggcgaggaacagcggatcacaatcgagccgggcacctcttatcgcctacaaggactcaaacccaattctctttattatttcaggctagccgcccgctctccacaaggcctcggcgcctcaacagccgaaatctcagcgagaacgatgcagagcaaaccgagtgccccgccgcaagacatcagttgtacaagcccttcatctacaagcattctggtctcttggcagcctccaccagttgaaaagcagaacgggatcattaccgaatacagcatcaaatataccgctgtggatggagaggacgacaagccgcacgaaatactgggcattccctctgacacgactaagtatttgctggagcagttagagaaatggaccgagtacaggataacagtcaccgcacataccgacgtgggaccaggccctgagagcctttctgtcctgattcgtacaaatgaggacgtcccaagcggccctcccaggaaagtggaagtggaggccgttaactctacatctgtgaaagtaagctggcgcagtcccgtccccaacaaacagcatggccagatccgagggtaccaagtgcactacgttcgaatggagaacggcgaacctaaggggcaaccaatgctcaaagatgtcatgcttgctgatgctcaggacatgataatcagcggactgcagcccgagactagttattccctaaccgtgaccgcctacactacgaaaggagatggagcccggagtaaacctaagctggtgagtacgactggggcagtacctggaaagccccggctcgttatcaatcatacccagatgaatacggctttaatacagtggcatcccccagttgacacatttggacccctgcagggctacagactgaaattcggccggaaggatatggaacctctcacgactctggaattcagtgagaaggaagaccactttactgctacggatatccataagggggcgtcatacgtgtttcgactcagtgccaggaacaaggtcgggttcggagaagagatggttaaggaaatttctatccccgaagaagtgcctactggtttcccacagaatctccattcagaggggactacaagcacctcagtgcagttgagttggcagccaccagtgctggcagaaaggaatggcatcattactaagtacaccttgctatatcgggacattaacatcccgcttctacccatggagcaattgatcgtccctgcagacacaactatgaccctgaccggcctaaaacccgacactacatatgatgtgaaagtcagggctcatacgtcaaaaggccccggcccgtattctcccagcgtgcagttccgaactctgcccgtggatcaggtctttgccaagaatttccatgtaaaagctgtgatgaagacgtcagtacttctgagctgggaaatccccgagaactataactcagccatgccgtttaaaatactgtacgatgacggaaagatggtggaggaggtcgatggccgggcgacgcagaaattaatagttaatctgaagcctgaaaagtcttactcgtttgtcctgaccaacagggggaacagtgccggtggactgcaacacagggtgacagccaagacagcccctgacgtactgcgaaccaagccagccttcataggcaagacgaatttggatggaatgattacggtccaactgccagaagttccagcgaacgagaacataaaggggtattacataatcatcgttccactgaagaagagtagaggcaaatttatcaaaccctgggaatctccagacgagatggagcttgacgagctcctgaaggagataagtagaaagagacgtagcatccgctatggccgagaggttgagctgaagccctacatagcagcccattttgacgtgctgcccaccgaattcaccctgggagacgataaacattacggcgggttcacaaataaacagttgcaatctgggcaggaatacgttttcttcgtgctggcagtgatggaacacgcagagtccaaaatgtatgcaacctctccgtattctgatcctgtggtgagcatggacctggacccacagcctattaccgatgaagaggaaggtctgatttgggttgtggggcccgtgctcgccgtcgtgtttatcatttgcattgtgatcgctatactactgtacaaacgtaagagggcagaatcggattcaagaaagagtagcatccccaacaataaggagattccatcacatcatcccacagaccctgtagagctccggaggttgaatttccagactccaggaatggcgtcccaccctcctattccaatactcgaactggcagaccacattgaacggcttaaggccaatgacaatctcaaattttcccaggagtatgagtccatcgaccctggtcagcagttcacatgggaacatagcaaccttgaggtgaacaaacctaaaaataggtatgcgaacgtcatcgcctatgatcactcacgtgtattgttatccgcaattgaaggtatcccagggagcgattatgtgaacgccaattacatcgacggataccgcaaacagaatgcgtatatcgcaactcagggtagcctccccgagactttcggcgacttttggagaatgatatgggagcagaggtcagcaacagtggtcatgatgaccaaactggaagaacgttcaagggttaagtgtgaccagtactggccctctaggggcaccgagacgcatggcctagtgcaggttacccttctggacactgttgagcttgctacctactgtgtgcgtacattcgcactttataaaaatggatcgtctgaaaagcgagaggtccgtcaatttcagttcaccgcctggcccgatcacggagtgccagagcacccaacaccttttctggccttcctacgaagagtcaagacctgtaaccctcctgacgccggccccatggtcgtccactgctccgctggggtcgggcgaactgggtgctttatcgtcatagacgctatgctggagagaataaagcacgagaagaccgtggatatctacggtcatgtgacactcatgcgggctcaaagaaattacatggtgcagaccgaggaccagtacatcttcatccacgacgcactgcttgaggcagtgacctgtggaaacaccgaagtgccagcgcgaaacctgtacgcttacattcaaaaactcacacagattgaaacaggagaaaacgtgacaggaatggaattagaattcaaaagactggcctccagcaaggcacataccagcagatttatctccgctaacctgccttgcaacaagtttaagaatcggctggttaatatcatgccttacgaaagtacccgggtctgtctccagccgatcaggggagtggagggatcagattacattaacgcaagcttcattgatggataccgccagcagaaggcatacatcgctactcaagggccattggccgagacaacagaagatttttggcgaatgctgtgggagcacaacagtacaatagtggttatgttgacgaaactgagagagatgggccgggaaaaatgtcatcaatactggcctgccgagagaagcgcgaggtatcaatactttgtggtcgaccccatggcagagtacaatatgccacagtatatcctgagggagttcaaggtgaccgatgccagggatggtcagtcaagaacagtcaggcagttccagttcactgactggccggagcaaggagttccgaaatccggcgaagggttcatcgactttattggtcaggtccacaagaccaaagagcagtttggccaagacggtcctatctctgtgcattgttcagcaggcgttgggcgtacaggcgtctttattacattgtcaattgtccttgaaaggatgaggtacgaaggggtagtggacatcttccaaaccgtcaagatgctgcgcacccagcgccctgccatggtccaaaccgaggaccagtaccagttcagctaccgggccgcccttgaatacctcgggagtttcgaccactatgccacttag

SEQ ID NO: 201714 - DNA, 5700 bp, synthetic construct
  misc_feature 1..5700: note = Description of Artificial Sequence: Synthetic coding sequence
  source 1..5700: mol_type = other DNA
atggtgcacgtggcccggctgctgctgctgctgctgaccttcttcctgcgaacagacgccgagactccaccccgatttacacgcacccccgtagatcagactggggttagcggtggcgtggctagcttcatatgtcaggcaacgggcgaccctagaccaaaaatcgtgtggaacaagaaaggcaaaaaagtttctaatcaaaggttcgaggtaattgagttcgatgatgggagcgggagcgtactccgcatccaaccactgagaaccccacgagatgaagccatttacgaatgcgtggcaagtaacaatgtgggggaaatcagtgtgtcaacgaggctaactgtgctgagggaggatcaaatcccaagaggctttccgactatcgatatggggcctcaactgaaagtagtcgaaagaacccggactgcaaccatgctgtgcgctgccagcgggaatccagaccccgagatcacttggttcaaggattttcttcccgtggatacgagcaacaacaatggaaggatcaagcagcttaggagtggcgcgcttcaaattgagcagagcgaagaaagcgatcagggtaagtacgagtgcgtggcgacaaacagcgcaggcacccggtattctgctcccgccaacctctatgtcagggtgaggcgagtgccacctagatttagtatacctccgacaaatcacgaaattatgcccggtgggtccgtaaatattacctgtgtggcagtcggctctccaatgccctacgtgaaatggatgctgggcgcggaggacctcaccccagaggatgatatgcctatcggacggaatgttctcgaattaaacgacgtgcgacagtccgccaactacacttgcgtggcaatgagcactctgggggtcatcgaggcgatagctcagattacggttaaagctctccccaagcctccaggcacaccggtggtgacagagagcactgccacctcaattacactgacatgggactcaggcaatcccgagcccgtgtcgtattacattatccagcataagcccaagaacagcgaagagctgtataaggaaatcgatggcgttgccaccacgcgctactccgtggccgggctctccccctactccgattacgaattcagagtcgtagccgtgaacaatattggtcgcggcccaccaagtgagcctgtgcttacccaaacgtcggagcaggccccctcttccgccccccgcgacgtgcaggcccggatgctgtcttcaacaacaatcctggtgcagtggaaagaaccagaggagcctaacggccagattcaaggctaccgcgtctactacactatggatccaacgcagcatgtaaacaactggatgaaacacaatgtcgcagattctcagatcacaactataggcaaccttgtgccgcagaaaacttacagcgtgaaagtcctggcctttacctcaattggggacggtcctctgtcttccgatatccaggtaatcactcagacaggggtgcctggacagcctctcaacttcaaagctgaacccgagagtgaaacttctattctgctgtcatggacacccccacgctctgacacaatcgcaaactacgagctcgtgtacaaggatggcgaacacggagaggagcagagaatcacaattgaaccaggcacgtcatataggctccagggcctgaagcctaacagcctgtactactttaggttagcggcccggtccccacaaggcctgggcgcttccacagccgaaatcagtgctcgtaccatgcaaagcaagccttctgcccctccccaggatatcagttgcacgagtcctagcagcacctctattttggtgtcatggcaacctccgccagttgaaaagcagaacggcatcataacagagtatagcatcaaatacactgctgtggacggcgaggacgacaagccacacgaaatcctcgggatcccatctgatactacgaagtaccttcttgaacagcttgagaagtggaccgaatataggattacagtgactgcccacactgatgtgggtcctggccccgagtccctgtcagtgctgatccgaacaaatgaagacgttcctagcgggccaccccgcaaggtggaggtggaagccgtcaattctaccagcgtgaaggtatcctggcgctcgcccgtccctaataagcagcacggccagattagaggttatcaggtgcattatgtgagaatggaaaacggggaaccgaagggacagcctatgttaaaagacgttatgttggctgatgcacagtgggagttcgacgacaccacagaacatgatatgatcattagcggactgcagcccgagacttcttatagtctcacagtgaccgcgtataccacaaaaggcgatggcgcaagatctaagccaaagctcgtgtccacaactggagctgtccctgggaaaccccggcttgttattaaccatacacagatgaataccgcccttatccagtggcatccccccgtggatacattcggccccctgcagggttatagattgaaattcggcaggaaagatatggagcccctgacaaccctcgagtttagcgaaaaggaggaccatttcactgctaccgacatccacaagggtgccagctacgtgttcaggttgagtgctcggaataaagtaggattcggggaggagatggtcaaggagatttccattcctgaagaagtgccgactggtttccctcagaatctgcactccgagggaaccaccagcacttctgtccagctgagctggcagcctcctgttctggcagagcggaacggaatcattaccaagtacacccttttataccgggacattaatatccctttgttgcccatggaacaactgatcgtgccggcagataccactatgaccctgacagggttgaagcccgatacaacttacgatgtaaaagtcagagcccatacaagcaaaggccccggaccatacagcccctctgtccaatttcgaacactgccagtggatcaagtgtttgctaagaatttccacgttaaggccgtcatgaaaacttcggtcctcctgtcatgggaaatacccgaaaattacaactccgcgatgcccttcaaaatactgtatgatgacggtaaaatggtcgaggaggtggacggcagggctacacagaagctcattgtcaatctaaaacctgagaaatcttacagtttcgttcttactaaccgggggaactccgccggtgggctgcagcatagagtcacggccaaaaccgcgcccgacgtgcttcggacgaaaccagctttcatcggaaaaaccaatctggatgggatgattacggtacagctgcccgaggtcccagctaatgaaaacataaaaggatattatattataatcgtacctctcaaaaagtcaagaggaaagtttatcaagccctgggagagccctgacgaaatggaactggacgagttgctaaaggagatttcccgaaagaggcgaagcattcggtacggtagagaggttgagttgaagccttacattgcagctcactttgatgtgttgcccacagaattcacgttaggagatgacaagcattacggtggatttactaataaacagctccagagtggtcaggagtacgtgttctttgtgttagccgtgatggagcatgcggaatcgaagatgtacgccacttccccctacagcgatcctgtggtgagcatggatttagacccacaaccaatcaccgacgaagaggagggattgatttgggtggtgggccccgtcctggccgtcgtgttcatcatctgtatcgttattgccattcttctgtacaaacgtaaaagagccgagtcagacagtcggaaatcctctattcctaataacaaggagattcctagccaccaccctacggatccggtggagctgcgccgtctcaacttccaaacacctggcatggctagccaccctcccattcctattctagaactggctgaccacatagagcggctcaaggcgaatgacaatctcaaattttcacaagaatacgaatccatagatccaggccagcagttcacctgggaacactctaatctcgaggtgaacaaaccaaaaaacaggtacgccaatgttatcgcatatgatcattctcgcgttctcttgtctgctattgaggggattccaggctcggattacgtgaatgcaaactacattgacggttatcggaaacagaacgcatacatcgccacccaaggatctttgccggagacctttggtgatttctggcggatgatttgggaacagcggtcagccaccgtggtcatgatgaccaagctcgaggaacgatccagagttaagtgtgatcagtactggccgtctaggggcaccgagacacatgggctggttcaggttaccctgctggatacagtggaactggccacctattgcgtgcggacgtttgcattgtacaagaacggatcctccgagaagagggaagtgcggcaattccagtttactgcttggccggatcacggggtgcctgaacaccccaccccgttcctggctttcctgcggagggtgaaaacctgcaatccaccagacgcaggcccaatggtggtgcactgctccgccggtgtgggaagaactggctgctttattgtgattgatgctatgcttgagaggatcaaacacgagaagacggttgacatttacggtcatgtgactctcatgcgagcgcagagaaattacatggttcagactgaggaccagtatatcttcatccacgatgctctgttggaagcagtgacctgtggtaacaccgaagtgcccgcacggaacctctatgcctatatacaaaaacttacacagattgagactggcgaaaacgtaactggcatggaattggagttcaagcgacttgcaagctcaaaggctcatacatccagatttatctccgccaacctcccttgcaacaaatttaaaaataggctggtaaacataatgccgtatgagtccacgcgagtctgtctccagcctatccggggagtcgaggggagtgactacatcaacgcgtccttcatcgatggctataggcaacagaaagcgtacatcgcaacgcaaggccctttggccgaaaccacggaggatttttggagaatgctctgggaacacaactccaccattgtggttatgctcactaaactgcgtgagatgggcagggaaaagtgccatcaatactggccagccgaacgatcagcccgctaccagtacttcgtcgtggacccaatggctgagtataatatgccccaatacatcctccgggagttcaaggtgaccgatgcccgggacggtcaaagtaggaccgtacgccaatttcaatttacggattggcccgaacagggggtccctaagtccggagagggttttatcgattttatcggacaggtgcacaagactaaggaacaattcggacaggacgggcccatcagcgtccactgcagcgcaggtgtcggccggaccggtgtcttcattaccctgagcattgtactcgagagaatgcgctatgagggggtcgttgacatttttcaaaccgtgaagatgttacgcacgcagagacccgctatggttcaaactgaagatcaataccaattttcttaccgggctgccctggagtatctgggatcctttgaccattatgccacttag

SEQ ID NO: 201715 - DNA, 5739 bp, synthetic construct
  misc_feature 1..5739: note = Description of Artificial Sequence: Synthetic coding sequence
  source 1..5739: mol_type = other DNA
atggtgcacgtggcccggctgctgctgctgctgctgaccttcttcctgagaaccgacgccgagacaccccctagattcacccgcacaccagtggaccagacgggcgtcagtgggggtgtggcctctttcatctgtcaagcaacgggcgaccctcggcctaagatcgtgtggaacaaaaaaggaaagaaggtgtcgaatcagaggtttgaggtcatcgagtttgatgacggaagtggctcagttctgcgtatccagcccctgaggaccccacgcgacgaagccatatacgagtgtgtggcctccaataacgtgggggaaattagtgtgtctacccgcctgacagtgttgcgcgaagaccagataccaaggggtttccctacaattgacatgggtccgcagcttaaggtcgttgaacgaactaggactgccaccatgttgtgtgccgcgtccggcaacccggatcccgaaatcacatggttcaaggattttttgccggtggacacttcaaacaacaatggtcgcatcaaacagctcagatcagagtcaataggaggcactccaataagaggggcactccagattgaacaatccgaggagagtgatcaggggaagtatgagtgcgttgcgacgaattccgctggaacgcggtactcagcccccgccaacctctatgtgcgggaactccgagaggtccgccgggtgcctccacgtttcagcatccccccgaccaaccacgagattatgccaggaggatctgtaaatatcacttgtgtggctgttgggtcacccatgccctatgtgaaatggatgctcggagcagaggacctgaccccagaggatgatatgccaatcggaaggaacgttcttgagcttaatgatgtgcggcagtctgctaattacacttgtgtggccatgagcaccctgggggtgatagaggcaattgcccaaattactgtcaaggccttgcccaagcccccaggtacccctgttgttacggaaagcaccgccacgtcaatcacactgacatgggatagcggaaatcccgaaccagtttcctattacattatccagcacaagccaaaaaatagtgaggaactgtataaggagatagatggggttgctaccacaaggtattctgttgccgggctgtccccttactcggactatgagttcagggtcgtcgcggtgaataacataggacgggggcctccctccgaaccggtcctcactcaaacgtccgaacaggccccgtcatctgctcctcgcgacgtgcaggcccggatgctgagctcgacaaccatcctggtgcagtggaaggaaccagaggaacctaatgggcagattcagggatacagggtttactatacaatggatcctactcagcacgtgaacaactggatgaaacacaatgtggccgactcccagatcaccactatcggcaacttagtgccacaaaagacatattccgtgaaagtgcttgcatttacatctatcggcgatggtccactgtcttcagacatccaggttatcacacagacaggggtgcccggtcaacctctcaacttcaaagcagagcctgagtcagagactagcatcctcctttcttggacaccccctagatcggatactatagccaactatgagctcgtgtacaaggatggcgaacatggcgaggagcagcgcattactatcgaaccaggtacctcctacagactgcagggcctcaagcctaacagcctgtattacttccgcctggccgctagatccccccagggtctgggtgctagcactgccgaaataagcgcccgaaccatgcaatctaaaccatcagctcctcctcaagatatctcctgcacaagcccttcaagcacatctattttagtctcttggcagccacctcctgtggagaagcaaaatgggatcatcaccgaatattcaatcaaatacactgcagttgacggcgaggatgacaagcctcatgaaattttgggtatcccttctgacaccactaaatacctgctggaacaacttgagaaatggaccgagtatcggataactgtcacggctcatactgacgtgggtcctggtccagaatccctgagtgtgctcattcgcaccaatgaagacgtgccaagcgggcctccccgcaaggtggaggtggaggcagtgaactctacctcggtgaaagtttcctggagatcgcctgtccctaacaaacagcacggacagatcaggggctaccaggtgcattacgttcgcatggagaatggtgaacctaagggtcagcctatgctgaaagacgtgatgttggcagatgcacaatgggagttcgacgacacaaccgagcacgatatgataatcagcggactgcagccagagacatcctatagtctcacagtcactgcttataccaccaagggggatggtgctaggtccaaaccaaagcttgtgtcaactacgggggccgtcccaggcaagccccgtctggttattaaccacactcaaatgaacaccgcgcttattcaatggcacccaccagtagacacgttcggcccactgcagggctaccggctgaagttcggccggaaagacatggaacccctgactaccttggaattttcagagaaggaggatcacttcacagctaccgacattcacaagggcgcatcttacgtgttccggctaagtgcccggaataaggtggggtttggggaagaaatggtcaaggagattagtatcccagaggaggtgcccactggcttcccccagaatcttcacagtgaggggaccacgagcacttcggttcaactttcgtggcaacccccggtgttggccgagagaaatggtatcatcacaaagtatacgcttttatatagggatatcaacattccgttgttacccatggagcaactaattgtgcccgcagacaccactatgaccctgacaggtctcaagccagacaccacttatgatgtaaaagtaagggcacatacttccaaaggaccgggtccctattccccatccgtccagtttcgaactctccccgtggatcaagtattcgccaaaaatttccatgttaaggcggtgatgaaaacaagcgtcctgctcagttgggaaatcccggaaaactacaactcagctatgccgtttaagatactttatgacgacggcaagatggttgaagaagtcgatggacgcgctacccagaagctgatcgtgaatttgaaacccgagaaatcatacagtttcgtgctaaccaatcgaggcaactcggctggtggactgcaacaccgagtaacagccaaaaccgctccagacgtgctgcgaaccaagccagcattcatcgggaaaactaacctggatggaatgatcacagtgcagctgcccgaagtccccgctaacgagaatataaagggctactatatcatcattgtgcccctcaagaagtccaggggtaagttcattaagccatgggagagtcccgatgaaatggagttggacgagctgctgaaggagatttcacggaaacgaaggtctattagatatgggcgcgaagttgagctgaagccttacattgcggctcactttgacgtgctgcccaccgaattcacattgggagatgacaaacactatggaggcttcactaacaagcagcttcagagcgggcaagagtacgttttttttgtgctggccgtgatggaacacgcagagagcaagatgtatgccacttcaccttactcagaccccgtggtttctatggaccttgatccgcagcccatcactgatgaagaagaaggcctcatatgggtggtggggcccgtcctcgccgtcgtattcatcatatgcatcgtaatagccatactcctatataaacggaaaagagctgaaagcgactccaggaagtccagcattcccaacaataaagagatcccgagccaccaccctaccgatccggttgagctacggaggctgaattttcaaacacctggcatggcaagccacccacctatccccattctggagctggcagatcatatagaaagactgaaggcgaacgacaacctcaagtttagccaggagtatgaaagtattgatcccggtcagcagttcacgtgggagcactccaatctggaggtaaataagccaaaaaacagatacgcaaatgtgatcgcatatgaccattccagggtgctgctctctgctatcgagggaatccccggctcggactacgtgaatgccaattacatcgacgggtacaggaagcagaacgcgtacatcgcgacacagggttcgctgcctgagacatttggagacttctggaggatgatctgggagcagcgttctgccaccgttgtgatgatgaccaagctcgaggaacgaagccgggtaaagtgtgaccagtattggcctagcagaggcaccgagacccatgggctggtgcaggtcacgcttctcgataccgtcgagctcgcaacttactgcgttcgcacgtttgcactctataagaatgggagctcggagaaaagagaagtcagacagtttcagttcactgcatggccggatcacggcgtccctgagcaccctaccccatttttggcctttcttaggcgcgtcaaaacttgcaatcccccggatgcaggtcctatggtcgtgcattgttcagcaggagtgggacggaccggctgctttattgtaatagacgccatgcttgagcggataaagcatgagaagaccgtggacatttatgggcatgtcaccctgatgagggcacaaagaaattatatggtgcagaccgaggaccaatatatctttattcacgacgctctgctagaggcagtcacttgtggtaacactgaggtcccagcccgaaatttgtacgcttatattcagaagctgacccagattgagactggcgagaatgtgactggcatggagctggaatttaagagactggccagttcgaaggcccacacttcacgctttatctcagcaaaccttccctgcaataagtttaagaatcggctcgtgaacataatgccatatgagagcacgcgagtttgcttgcagcctatccgaggtgtcgaagggagcgactacatcaatgcctcttttattgatgggtatagacagcagaaggcatacatcgccacccaaggaccactcgccgaaacgaccgaggacttttggcgaatgctgtgggaacataattcaactattgtcgtgatgttgactaagcttcgtgagatgggaagggagaaatgccaccaatactggcctgcagagcgctcagcacggtatcagtattttgtggttgatcctatggcagagtataacatgccacagtatattctccgggagttcaaagttaccgacgccagggacggacagagccgaacggtccgacagtttcagttcacagactggccggaacagggggtaccaaagtcaggtgagggcttcatcgatttcatcggacaggtgcacaaaaccaaagagcagtttgggcaggatggcccaatatcagtccactgctccgctggagtggggcgcactggtgttttcataactttatctatcgtgctagagcgcatgaggtacgaaggcgtggtagacatctttcagacggtcaagatgctgcgaacccaaaggcccgctatggttcagacagaagaccagtaccagtttagctacagagctgccctcgaatatctcgggtcatttgaccactacgcgacgtag

SEQ ID NO: 201716 - DNA, 4509 bp, synthetic construct
  misc_feature 1..4509: note = Description of Artificial Sequence: Synthetic coding sequence
  source 1..4509: mol_type = other DNA
atggtgcacgtggcccggctgctgctgctgctgctgaccttcttcctacgcacggacgctgaaacaccccctcggttcacgcgaacgccagtcgaccagaccggtgtcagcggcggcgtcgcctctttcatctgccaggctacaggcgatcctaggcccaaaatagtttggaataagaaaggcaaaaaggtcagtaatcagcgctttgaggtcattgagttcgatgatggtagtggttctgtcctccgcatccagcccctgcggacgccccgcgacgaagctatttatgaatgcgttgcgtctaacaacgtgggggagatcagtgtcagcactcgcctaacagttctgcgggaagatcagatacctcgagggttcccgactatagacatgggccctcaactaaaggtcgtagaacgtactcgcaccgcaaccatgctttgcgccgccagtggcaatccagacccagagataacctggttcaaggatttccttccagttgacacctctaacaataatgggaggatcaaacagctgcgcagcgggggaacacctatccgtggggctctgcagatcgaacagtccgaagaatcagatcagggcaaatacgaatgtgtggcaacaaattcggccggcacacgttacagcgcaccagcaaacttatatgtccgcgagctgcgcgaggtcaggcgagtaccccctcggttctccattccacccaccaatcacgaaattatgcctggaggctctgtgaacataacctgcgtagcagtgggatccccaatgccctatgtaaaatggatgctgggtgccgaggacctaaccccagaagacgatatgccaatcggacggaatgtgctggaacttaatgacgtacggcagtcagccaactacacgtgcgtagccatgtctactctgggcgtcattgaagccatcgctcagattactgtgaaagctcttccaaagcccccagggacaccggttgtgactgaaagtaccgctactagcatcacactgacctgggactctgggaaccctgagcccgtgtcctattatataatacaacataaaccaaagaattcggaagaactgtataaagaaatcgatggggtcgccacaaccagatactctgtagccgggttgagtccctacagcgattatgagtttcgggtcgtcgcagtgaacaacatcggaaggggtccccctagcgagccagttctgacccagacatcagagcaggcaccgtctagcgcccctcgggatgtccaggccaggatgctgagtagcaccaccattctcgtccaatggaaggaacccgaagagccaaatggccagatccagggctaccgcgtctactatactatggaccctacccagcatgtaaacaattggatgaaacataatgtcgctgactctcagataaccacaatcggaaaccttgtgccccagaaaacatactccgtcaaagtcctcgcttttactagcatcggagacggtccgctctcgagtgatatacaggtgatcacacagacaggtgtgcctggacagccactaaacttcaaggcagaacctgaaagtgaaacttctatactcctctcctggaccccgccaaggagtgacactatcgcaaattatgaattggtgtacaaggatggggagcacggcgaagagcaaagaatcactatcgaaccaggcaccagctacaggctgcaaggcctgaaaccaaattccctatattacttccggctagctgccagaagcccccagggcctcggggccagcacagctgaaatttccgctcgtactatgcaaagtatgttcgccaaaaattttcatgtgaaggcggttatgaaaacatctgtcctacttagctgggaaatccctgagaattacaactccgctatgccctttaaaatcttgtacgatgacggcaaaatggtggaagaagtggacggaagggccacacagaagcttattgttaacttgaagccagaaaaaagctacagctttgttctgacaaaccgcggtaatagtgcgggggggctgcagcaccgcgtgactgcgaaaacagcccccgatgtcctgcgcactaagcccgcatttataggcaagactaacctcgacgggatgataaccgtccagctgcccgaggtgccagcaaacgaaaacatcaaggggtactacattatcatcgtcccattgaagaaatctcggggcaaattcataaaaccgtgggaaagccctgatgaaatggagctggacgaactgttgaaagagatctccaggaaacggcgctccatccggtacggcagagaggtggaactgaaaccatatatcgctgctcattttgatgtgctgcctactgagttcacacttggcgacgataagcattacggaggatttaccaataagcagttgcaatccgggcaggaatacgttttttttgttctcgccgtgatggagcacgccgaaagcaagatgtacgctacaagtccctactcagacccggtcgtgtcaatggaccttgatccccaacccattaccgatgaggaggaaggacttatctgggttgtgggccccgtgctagcggtggtatttatcatatgtatcgtgatcgctatactactatacaagtctaagcctgaccgcaaacgcgcagagtccgactcacgaaagtcctcgattcctaacaataaagagattccatctcaccacccaacagaccctgtggagctgagacgtctcaacttccagactcccggtatggcctcgcaccctccgatcccgattctggagcttgccgaccacatcgagagattaaaggctaacgacaacctgaagttcagtcaggaatacgaaagtatcgatcccgggcaacagttcacatgggagcacagtaacttggaagtgaataagcccaaaaatcggtatgccaatgtgattgcatatgatcactctagggtgctgcttagcgcaattgaagggatacccggatccgactacgtaaatgccaattacatcgatgggtacaggaagcagaatgcctacatcgcaacgcagggatctcttccggaaacgttcggtgacttttggcggatgatctgggagcagaggagcgccaccgtggtgatgatgacaaaactggaagagcggagcagagtgaagtgcgatcaatactggcccagccgcgggactgagacccacgggttagtccaggtgacactgctggacacggttgaactggccacttattgcgtcagaaccttcgctttatacaaaaatgggagttctgaaaagagggaggtgcgacaattccagtttacagcctggccagatcacggagtacccgagcaccccacaccttttttagcattcctgagacgcgtcaagacctgcaatcctccggacgccggtcctatggtggtgcattgctccgccggcgtggggcggaccggctgcttcatcgtcatcgacgccatgctcgaaagaattaagcacgagaaaacagttgacatctatggccacgtcacactgatgagagcacagagaaattatatggtacaaactgaggatcagtacattttcatccacgatgctctcctggaggctgtgacctgtggaaacacggaggtgccagccagaaatttatacgcatacatccagaagctcacacagatcgagaccggcgaaaacgtgaccggcatggaactggagttcaagaggcttgcctcctcaaaagcgcacacctcccggttcattagcgcaaatctgccatgtaataagttcaagaatcgcctggtgaacataatgccgtacgaatctacgagggtttgtctgcaacctattagaggagttgaaggctctgactatatcaacgcttcgttcatcgatggataccggcaacagaaggcatatatcgccacccaggggcccctggcagagacaacagaagacttttggaggatgctctgggaacacaatagtacaattgttgtgatgctgactaaactccgggaaatgggacgcgagaagtgtcatcaatattggccagctgaacgctcagcccggtaccagtactttgtggtcgatcctatggctgaatacaatatgccacaatatatcctgcgcgagttcaaggtgacagatgctcgtgatggccagagccggacagtgcgccagtttcagtttacagactggcctgaacagggggtgccaaagtccggcgaggggttcatcgactttattggccaggtgcacaaaactaaggagcagttcggtcaggacggtcccatcagtgtgcattgtagtgcgggcgtagggagaacgggcgttttcatcactctgtccatagttcttgaaagaatgagatacgagggtgttgtggacatctttcagaccgtgaagatgctccgtacccaacgacccgcaatggttcaaactgaagatcagtaccagttctcataccgtgccgcactggaatatctaggcagcttcgatcattacgcaacttag

SEQ ID NO: 201717 - DNA, 4518 bp, synthetic construct
  misc_feature 1..4518: note = Description of Artificial Sequence: Synthetic coding sequence
  source 1..4518: mol_type = other DNA
atggtgcacgtggcccggctgctgctgctgctgctgaccttcttcctgagaactgacgcggagaccccaccaaggttcacaagaacccccgtcgatcaaacaggtgtgtctgggggggtcgcttcttttatatgtcaggcgacaggcgatccccgacctaagatcgtttggaataaaaaaggaaaaaaggtgtcaaaccagaggttcgaggtgatcgagttcgacgatgggtccggctctgtactgcgcattcaacccctacggacaccccgggacgaggctatttatgagtgtgttgcatccaacaatgtgggagagatttccgtgagtacacggctgaccgtgttaagggaagaccaaatccctcgcggctttcccaccatcgatatgggcccccagttaaaagttgtagaacgaaccagaacagctaccatgctctgtgcagcaagtggaaacccagacccggagattacctggtttaaagacttcctccccgttgacacatccaacaataatggtcggataaagcagctacggtcagtatctatcggggcgctgcaaatcgaacagagcgaggagagtgatcagggcaagtacgagtgcgtagcaaccaactccgcaggaacacggtactcagccccagccaacttatatgtccgggttagacgcgtgcccccccgcttttccatcccacccacaaaccacgaaatcatgcccggcggcagcgtgaatatcacatgtgttgcagtggggtctcctatgccatatgtgaaatggatgcttggcgcggaggacctgactccggaagacgacatgcccattggtcggaacgttcttgaactcaatgacgtgaggcagtctgcgaactatacctgtgttgcaatgagtacgttgggggtcattgaagctattgcccagatcaccgtgaaagcactgcccaagccaccaggaacccccgtcgtcacggaatccacagctacatctatcacccttacctgggatagcgggaaccccgagcctgtgtcatattacattatccagcataaaccaaaaaactcagaagagctgtataaggagatcgatggtgttgccaccacccgatattccgtggccgggcttagcccatactctgattacgagttccgggtggtggccgtcaacaacatcgggagaggccctcccagcgaacccgttctgacccagacttctgagcaggcccccagttctgccccacgggacgtgcaggctcggatgctttcctccaccactatcttggtgcagtggaaggagccagaggagcctaacggccaaatccagggttatcgcgtttactacacaatggaccccacccagcacgtcaacaactggatgaagcacaatgtcgcagatagccagataaccacaattgggaatttggtgccgcagaaaacgtactccgtcaaggttctcgcatttaccagcatcggagatggtcctctgagttctgacatccaggtgattacccaaactggggtcccaggccagccacttaactttaaggccgagccagagtccgaaacaagcattctcttgtcttggacgcctccacgcagcgatacgattgctaactatgagctggtctacaaggacggagaacatggcgaggagcagaggattaccattgagcctggcacaagctatcgattgcagggcctgaagcctaactcattgtattatttcagactcgccgcccgcagcccacagggacttggcgcctccaccgccgaaattagtgcccggactatgcagtcgatgtttgccaaaaatttccatgtgaaggccgtgatgaagacctctgtactgctgtcatgggaaattccagaaaattataattctgccatgcctttcaagatcctgtatgacgacggcaagatggttgaggaggtggacggcagggctacccaaaaactcattgtgaatctcaaacccgaaaagtcatattcattcgtgctaaccaaccgagggaatagtgccggaggcttgcaacaccgggttacagccaagaccgccccggatgtgttgagaaccaagcctgcctttatcggcaagaccaatctggatgggatgattactgtgcagttgcccgaggtacccgctaatgagaatatcaaggggtattatattattatcgtgccgctaaaaaaatcgcgcggcaagtttattaaaccatgggagagtccagacgaaatggagctcgatgaactcttgaaagaaatttctagaaagcgcaggtctatcaggtacggcagagaggtggagttgaagccctatattgctgctcacttcgatgtcctgcctacagaattcacactgggcgatgataagcactatggaggcttcactaacaagcaacttcagtcaggccaagaatatgtgttctttgtactggcagtcatggaacacgcggaatcaaaaatgtacgctacgagcccttacagcgacccagtggtgagtatggatctggacccgcagccaataaccgacgaagaagagggtcttatctgggtcgtcggccccgtactcgccgtggtttttatcatttgcatcgtcattgctatcctcctgtacaagcgaaaacgcgctgaatcagattctcgcaaaagttcgatcccgaataataaggaaatacccagccatcacccaacagaccccgtagaactgcggagactgaactttcaaacacccgggtccgatgactccgggtacccaggaaacctgcattcttcatccatggcgtcacaccctccgatcccaatcctcgagctagcagatcacatcgagagactgaaagctaatgacaacctgaaatttagccaggagtatgagtcaatcgaccctggacagcaattcacgtgggagcactcaaatcttgaggtcaacaaaccaaaaaatcggtatgccaatgtcatcgcttacgaccattcgcgtgtcctcctgtcagcaatagaaggcataccagggtctgattatgtcaacgccaattacattgatggatatcgaaaacaaaatgcatatatagctactcaggggagtctgcccgagaccttcggcgatttttggcgaatgatttgggagcagaggagtgccactgttgtgatgatgaccaagctggaggagcgttcacgcgtcaagtgcgatcagtattggccgtcgcgggggaccgaaactcatggcttggttcaggttaccttgctggatacagtagagctagcaacctattgcgttagaaccttcgcactctataaaaatggcagcagcgaaaagcgcgaggtgcgtcagtttcagtttactgcctggccagaccacggcgtcccggagcacccaacgccatttctcgcgtttctccggcgggttaagacctgtaatccgccggacgctggtccaatggtggttcactgctccgcaggtgtggggagaaccggatgttttatcgttattgacgccatgctggagcggatcaagcacgagaagactgtggacatttacggccacgttactttaatgcgagcccaaaggaactacatggtacaaaccgaagaccaatatatctttatccacgacgctttgctcgaagccgttacttgcggcaatactgaggtacctgcacgcaatctgtatgcatacatccagaagctcacgcagatcgagacaggcgaaaatgtaactggcatggagcttgagtttaagaggctggcgagcagtaaggcacatacgagccgttttattagcgccaatcttccttgcaataagttcaagaacagactcgtgaacatcatgccttacgagagtaccagagtatgtttgcagcctattaggggggtggagggatcagattacatcaacgcctccttcattgatgggtaccgccaacagaaagcttacatagccactcagggccccctggccgaaaccaccgaagacttttggaggatgctgtgggagcacaactccaccattgtagtgatgctgacaaaactgcgcgaaatggggagagaaaagtgccaccagtactggccagcagagagaagtgctcgctatcagtacttcgtggttgacccaatggccgaatataatatgcctcaatatatactgcgagagttcaaggtcactgatgcccgggatggacagagccgcaccgtgagacagtttcaattcaccgactggccagaacaaggggtccctaagtctggtgaaggctttatcgactttatcggccaagtgcataaaaccaaggagcagttcggtcaggacggcccaatctctgtgcactgcagtgccggggtcggaaggaccggcgtattcatcacactaagcatcgttctggaacgcatgcgttatgaaggcgttgtggatatctttcagacagtcaagatgctgaggacccagaggccggccatggtccagactgaggatcaatatcagttctcctatagagctgcccttgaatacttggggagcttcgatcactacgcaacctag

SEQ ID NO: 201718 - DNA, 282 bp, synthetic construct
  misc_feature 1..282: note = Description of Artificial Sequence: Synthetic coding sequence
  source 1..282: mol_type = other DNA
atggtgcacgtggcccggctgctgctgctgctgctgaccttcttcttgcgcaccgatgcagaaactcccccccggtttacccggaccccggtggaccagactggtgtatccggaggtgtggcttcgttcatctgtcaggccaccggcgatccacgaccaaagattgtttggaataagaaaggaaaaaaggttagtaaccagcgtttcgaggtcatcgaatttgatgacgggtctggcagcgttctgcggatccagcccttgcggacacccagagatgaatag

SEQ ID NO: 201719 - DNA, 4518 bp, synthetic construct
  misc_feature 1..4518: note = Description of Artificial Sequence: Synthetic coding sequence
  source 1..4518: mol_type = other DNA
atggtgcacgtggcccggctgctgctgctgctgctgaccttcttccttaggacagacgctgagacacccccccgattcacaagaacccccgtagaccagacaggagtcagtgggggagtggctagtttcatatgtcaggctaccggggatcccagaccgaagatcgtctggaacaagaagggaaaaaaagtgagtaaccagcgcttcgaggtgatcgagttcgacgatggctccggatctgttctgagaattcagcccctccgcacccctcgggatgaagccatctacgaatgcgtcgctagtaataatgtcggagagattagcgtctccactcgcctaaccgtgctgcgcgaggaccagatccctcggggatttcccactattgatatgggccctcagttaaaggttgtcgaacggacacgcacagctactatgctatgcgccgcatccggaaatcctgaccctgaaattacctggttcaaggactttctgccggtggatacttctaataacaacgggaggataaaacagctccggtctgaaagcatcggaggcacacccattcggggcgcccttcagatcgagcaatcagaagaatcagatcaagggaaatacgagtgtgtcgcgactaatagcgcaggaactcggtatagtgcccctgctaatttgtacgtgcgagaactgagggaggtgcggagagtccctccccgctttagcattccccctactaaccacgagattatgcccgggggatccgtcaacatcacgtgcgtggccgttggatcgccaatgccttacgtgaaatggatgctgggggctgaagacctgactccagaggacgatatgcccatcggacgtaatgtgcttgaattgaatgacgtccgccaaagcgctaattacacctgcgtggctatgagtaccctgggagtgatcgaggcaatcgcgcaaattaccgtaaaagccctgcctaagccccctgggacccctgtggtgactgaaagtacagctacaagcattaccctgacatgggatagcggtaatcccgaaccggtgagttattacattatccagcataagccaaagaacagcgaggagctctataaagaaattgacggtgtagcgactaccagatactccgttgcaggattatcaccatacagtgactacgagttccgggtggtggccgttaataacatcggacgaggaccgccctccgagcccgtcctgacccaaacctctgagcaggctccatcttctgcccccagggacgtccaggcgcgcatgctgtctagcacaactatccttgtacaatggaaggagcccgaggaacccaatggacagattcaaggatatagagtgtattatacaatggacccaacccagcatgtgaataactggatgaagcataatgtggccgattcacagatcaccactatcggtaatctcgtgccccagaaaacatattctgtgaaggtgctggccttcacttccattggcgacgggccattgagcagcgacattcaggttattacccagacgggagtaccaggccagcctttgaacttcaaggccgaacctgagtccgagactagcatcttgctgagttggacccctccacgtagtgacaccatagccaactacgagcttgtatacaaggacggcgaacacggggaagaacagcggataaccatcgaacccgggacaagttatcggctacaaggcctgaagccaaactctttgtactatttccgattggcggcgaggtcaccacaagggctcggagctagcacggctgagatttcagcacggaccatgcagagtatgttcgccaagaattttcacgtaaaggctgtcatgaagacctcggtgctgctgtcctgggaaatccctgagaactataatagcgccatgcccttcaagattttgtacgacgacggcaagatggttgaggaggtcgatggaagggccacacagaagctgattgtgaacttaaaaccagagaagtcatactcgtttgtcctgaccaacagaggcaactcagctggtggcctccagcatcgggtgaccgccaagaccgctcctgatgttcttaggacaaaacccgcttttatcggcaaaacgaatcttgatggaatgatcaccgtgcagttacccgaggtgccagccaacgaaaacattaagggatactatatcattatcgtgcccctgaaaaaaagtagaggcaaatttattaagccctgggagtcccctgatgagatggagctcgatgaattgctgaaagaaataagtaggaaacggagatctatcagatacggcagggaggtggaattaaaaccgtatatcgctgcccacttcgatgtgctccccacagaatttactctcggagacgacaagcactacggtggcttcactaacaagcagctgcagagcggccaagagtacgtgttctttgtattggccgtcatggaacatgcagaatcaaagatgtatgctactagcccttacagtgaccccgtcgtctcaatggatcttgaccctcaaccgatcaccgatgaagaagaggggctgatctgggtcgtcgggcctgttctggcagttgtgttcatcatctgtatcgttatcgccatcctgctgtacaagagcaaacccgataggaaaagagctgaatctgattcacgcaaaagtagcattcctaataataaggagatcccatcccaccaccctaccgacccggtggaacttcgtcgtctcaattttcagacccccggcatggcttcacacccaccaatccctatcctggaactcgccgatcacatcgagcggctgaaggcaaacgataacttaaaatttagtcaggagtacgagtcgattgaccccggacaacaatttacttgggaacattccaacttggaggtcaataagccgaagaatcgctatgctaacgtgattgcatatgaccactcccgcgtcttgctatctgctatcgaggggatcccgggctccgactatgtgaatgctaattatatcgacggctaccgaaaacaaaacgcctacattgccactcaggggtctttgcccgagaccttcggggatttctggagaatgatctgggaacagaggagtgccaccgtggttatgatgactaaactggaagagagatctagggtgaagtgcgaccaatactggccaagccggggtaccgagacacacgggctagtccaagtgaccctgcttgacaccgtggagctcgcaacttactgcgtgcgcacctttgctctttacaagaacggatcttcggagaaaagggaggttaggcaattccaatttacagcttggcccgatcacggagtgccggagcatcccacaccgtttcttgcttttctgcggagagtcaaaacgtgcaacccaccagatgcaggaccaatggttgtgcactgctcggcaggtgtaggacgtaccggctgtttcatcgttatcgatgccatgttagagagaattaagcatgaaaagacggtggacatatatggacatgttaccctgatgcgcgcacagagaaactacatggtgcagactgaagatcagtatatatttatccatgacgccttactcgaagctgtcacatgcggaaatacagaggtaccggcaaggaacctgtatgcctacatccagaagctcactcaaatcgagactggtgagaacgtgacagggatggaattggagtttaaaagactggcctcaagtaaggcccacacttcccgcttcattagcgccaacctgccatgcaacaagttcaagaatagattggtaaacattatgccctatgagtccactcgcgtgtgcctgcaacctatccgaggtgtcgagggctccgactacattaacgccagttttattgatggttatagacagcagaaagcctatatcgccacacagggccctctcgccgagactacagaagatttttggagaatgctatgggagcataactccaccatcgtggtgatgctgaccaagttaagagagatgggaagggaaaaatgtcatcagtattggcccgccgagaggagcgctcgctatcaatattttgtggttgacccaatggctgaatacaatatgcctcagtacatcctccgcgagttcaaggttacagacgcgcgagatggacagtctaggacagtgcgccagttccaatttacagattggcccgagcagggtgtgccaaagtccggggaggggttcatcgacttcatcgggcaagtgcacaagacaaaagagcagttcgggcaggatggcccaatctctgtccactgctctgctggggtggggcgaaccggcgtttttattaccctgagtatagtgctcgagagaatgcggtacgaaggagtagtggacatcttccagacggtcaaaatgctgcggacacaacgacctgcaatggtgcagacggaagatcagtaccaattcagctatagagccgcactggaatatctgggcagtttcgatcattacgcaacatag

SEQ ID NO: 201720 - DNA, 4509 bp, synthetic construct
  misc_feature 1..4509: note = Description of Artificial Sequence: Synthetic coding sequence
  source 1..4509: mol_type = other DNA
atggtgcacgtggcccggctgctgctgctgctgctgaccttcttcctgagaactgatgcagagactccacccagatttacacgcaccccagtcgaccagacaggagtgagtgggggcgttgcaagcttcatttgccaggcaaccggcgatcccagaccaaaaattgtgtggaataagaagggtaagaaggtctcaaatcaaaggtttgaggtaattgagtttgacgatggttctggatccgttctgcgcatccagccacttcgcacgccacgggacgaggcaatctacgagtgcgtggcttcaaataatgtgggggaaatctctgtgtctacgcgcctgaccgtgttgcgtgaagaccagattccccgaggtttcccaacgatcgacatgggcccgcagctcaaagtggtcgagcgaacacgtactgctaccatgttatgcgccgcatcaggcaatccagatccagagattacgtggtttaaggatttcctgcccgttgatacctcgaataataatggccggattaagcagctgcggtctggaagagtcttccacactggggcactgcagatcgagcagagtgaagaaagtgatcagggaaaatatgagtgcgtggctaccaattccgctgggacaagatattcagcacctgccaatttatatgtgcgggttaaccgcaaggtcaggagagtgcccccccgcttttcgattcctcccactaatcacgaaatcatgccagggggctcagtgaatatcacctgtgtagccgtgggttcacccatgccgtacgtgaagtggatgctgggcgctgaagatctcacaccagaggacgatatgccaataggaaggaatgttctggagctgaatgacgtccgccaatccgcaaattatacttgtgttgccatgtctacgctgggggtcatcgaggcgatcgcccaaattacagtcaaggccctgcccaaacctccaggcactcctgtggtaacggagtcaactgccacgagtataacgctaacatgggatagcgggaacccagagcctgtgtcttattatattatccaacataagcccaaaaattcagaagagctgtataaggagattgacggcgtcgcaaccacgcgttattcagtggcaggcctgtcgccatatagcgattatgagttccgcgtggtagccgtgaataacatcggccggggacctccgtcagaacccgtgcttacacaaacaagcgaacaagcacctagcagcgcccctagagatgtccaagcccggatgcttagctcaaccaccattctggttcagtggaaggaacctgaggagcccaacggtcagattcaaggatacagggtttattacacaatggaccccacccagcacgtgaataactggatgaaacataacgttgccgatagtcaaattacgactatcggtaacctcgtcccacaaaagacctacagcgttaaggtccttgcctttaccagcatcggagatggacctctctcttctgatattcaggttattactcagaccggagtacctggtcagccactgaacttcaaagcagagcccgagtccgagactagtattttactcagctggaccccaccacgtagtgatacaattgctaattatgagctggtttacaaagacggggagcacggtgaggagcagcggatcactattgaacccggcacttcatataggctgcaaggcctgaagcctaattcactttactattttagactggctgcccggtctccccagggccttggggcttccacggctgaaatcagtgctaggacaatgcagtctatgtttgctaagaatttccatgtaaaagccgtgatgaaaacatccgttttactgagttgggagatccccgagaactataatagtgcgatgcctttcaagattctttatgacgatggcaaaatggtggaggaagtcgatggtcgagcaactcagaagctgattgtgaacttgaaacccgagaagtcctattccttcgtactcactaatcggggtaacagcgctggaggactccagcatcgcgtgaccgctaagaccgcccccgacgtgctgaggaccaagccagcttttatcggcaaaactaacctcgatgggatgatcacagtgcagttacctgaggttcccgccaacgagaacatcaaaggatactacatcatcatcgtgcctctgaagaaatcccgaggcaaatttatcaagccctgggagagccctgatgagatggagctggatgagctgctcaaagagatctcaaggaaaaggaggagtatccgctacggccgcgaggtggagttaaagccttacattgcagctcacttcgacgtgctgccaactgagtttaccctgggcgacgataagcattacggcggcttcacaaacaagcagctgcagtccgggcaagaatatgtgttctttgtattggcagtaatggaacatgccgaaagcaagatgtacgcaacaagcccgtactccgatccagtcgtcagcatggatctggatccacagcccatcactgatgaggaagaggggcttatttgggtggtgggacccgtcctggcggttgtgttcatcatttgcatcgtgatagcaattctgctatataaacgcaagccgtaccgcaaacgtgctgagagtgatagcaggaaaagttcaattccaaataataaagagataccaagccaccaccctaccgatccggtcgagcttaggagactgaactttcagacacccgggatggcctcccaccccccaattcctattttagaactggcggaccacatcgaacgcctaaaagcgaacgataacctgaaatttagtcaagagtatgagtctatcgaccctgggcagcagtttacttgggaacactcaaatcttgaggttaacaaacctaagaatcggtatgccaacgttattgcctatgaccattccagagtcctgctgtctgccatcgaagggattccgggctctgattacgtgaatgccaactacattgacggatatcggaagcagaatgcctatatcgctactcaaggctccctgccggagacatttggcgacttttggcgcatgatttgggaacagcgctctgctactgtagtgatgatgacaaagctggaagagcgaagtagggttaaatgcgaccagtactggccatctcggggcactgaaactcacggtcttgtccaagtgacacttctagatacagtagagctggcgacatattgcgtgagaacattcgccctctacaaaaacgggtcctcagagaaaagggaagttcgtcaatttcagttcactgcgtggcctgatcacggggtgcccgagcaccctacgccattcctcgcgttcctcaggagggtaaagacttgcaacccaccagacgcgggtccaatggtggtccactgttcagccggggtgggtagaaccggctgctttatcgtgattgacgctatgctggaacgcatcaagcacgagaagaccgtggacatctatgggcacgtcacgctgatgcgcgcgcagaggaattacatggttcagactgaggatcaatatatctttatccacgacgccttactggaggccgtgacttgcggaaataccgaggtccccgcaagaaatctctatgcatacatccagaaactcacccagatagagacaggcgaaaatgtgaccgggatggagttggagttcaagagactcgcctccagcaaagcacacacctctcgcttcatcagcgctaacttgccctgcaacaaatttaagaatagactggtgaacattatgccctatgaaagcacgcgagtctgtctgcaaccaatcagaggggtggaagggagcgactatatcaacgcgtcattcatcgacggataccggcaacagaaggcctatatagctacccaggggcccctcgccgagaccacagaagatttctggaggatgttatgggaacataatagtactatcgtggtaatgctcactaaattgcgcgagatgggcagagagaaatgccatcagtattggcccgccgaacggtccgcacgctaccagtactttgtggtcgaccccatggccgagtataatatgccccagtatatattgcgcgaatttaaggtcacagacgccagagatggacagagtcgaaccgttcgtcagtttcagtttacagactggcccgagcaaggcgtgccaaaatcaggagaaggttttatcgatttcattggccaagtccacaaaaccaaggaacagtttggccaggacggacctatcagcgttcattgttccgctggagttggtagaaccggggtttttataaccctgagcatcgtgctggaaagaatgcgctatgagggagtagttgatatcttccagactgtgaagatgctgcgaacccagagacctgctatggttcagaccgaggaccagtatcagttcagttaccgggctgcgcttgaatacctcggaagctttgaccattacgcaacctag

SEQ ID NO: 201721 - DNA, 5739 bp, synthetic construct
  misc_feature 1..5739: note = Description of Artificial Sequence: Synthetic coding sequence
  source 1..5739: mol_type = other DNA
atggtgcacgtggcccggctgctgctgctgctgctgaccttcttcctacgaacggatgccgaaaccccacctcgcttcactcgcactcctgtcgatcaaactggagtgtccggaggcgtagcgtccttcatatgtcaggctaccggcgatcctaggccaaagatagtgtggaataagaaaggtaaaaaggtttccaatcaacgctttgaggtgatcgaattcgacgatgggagcggcagcgtgctgaggatccagccactccggactccccgtgatgaggccatttacgagtgtgtggctagcaacaatgtgggagaaattagcgtttccacgaggctgactgtcctgagagaggaccagataccacgtggcttcccaaccatcgatatgggcccacaacttaaagtggtggaaaggacccgtacagctaccatgctgtgtgccgcgtcgggcaaccccgatcccgagatcacctggttcaaggactttcttccggtggatacttcaaataacaacggacgcattaagcagctgagatctgagtccatcggcggcactcccatcagaggtgccctccagattgaacagtctgaggagtccgatcagggtaaatatgagtgcgtcgctacaaattccgcaggaacacggtacagcgcgcccgccaacttatacgtgcgagagctaagggaagtgcgcagggtacctcctagattttctattcccccaaccaaccacgaaattatgcctgggggcagcgtgaacatcacgtgtgtggccgttggctctcctatgccctacgtgaaatggatgttgggagcagaagatctgactcccgaagacgacatgcccattgggcggaacgtacttgaactcaatgatgtgcgccagtcggccaactacacctgtgtggccatgagcaccctgggcgttatagaggcgatcgcccagataaccgtgaaggccctgcctaaaccccctgggaccccagtggtgactgaatctacagcgacttccattacactgacttgggactctggcaatcccgagccagtgtcctattacatcatacagcacaaaccaaaaaacagcgaagagctgtacaaggaaatcgatggagtggccacaacgcgctacagcgtggccggtctctccccatattccgattatgaattccgcgtggtggctgtcaacaacatagggcggggaccaccgagcgagcccgtgctgacccagacttctgagcaagccccctcctccgctccgcgcgacgtccaggctcgcatgctctcaagtactacaattcttgtacaatggaaggagcctgaggagcccaacggacaaatccaaggctaccgggtctactacactatggatcccactcagcacgttaataactggatgaagcacaatgtagccgattcccagatcaccaccataggaaacctggttccccagaagacttactctgtgaaggttctcgccttcacttcgatcggagatggaccactcagctctgacatccaggtgattacccaaaccggggttcctgggcaacctctgaactttaaggctgaaccagaaagcgagacatccatcttgctctcatggactccgccacgaagcgacaccatcgcgaattacgagttagtgtataaagatggtgaacacggcgaggagcagcggatcaccatcgaacccggaacctcttacagactgcaaggactcaaacccaacagcctgtattatttccgactggccgcacgctctccccagggacttggcgcttctactgctgagatttctgcaaggactatgcagagtaagccgtctgcccccccccaggacataagctgtacatctccttcatcgacgagcatcctcgtctcttggcagccccctccggttgaaaagcagaacggcatcattactgaatactctattaagtataccgccgttgacggcgaagacgataagccacacgagatcctcgggataccttctgacaccacaaaataccttttagagcaactggagaaatggaccgagtacaggatcacagttacggcccacactgacgtgggccctggccccgagtccctgtccgtcttgatcagaacgaatgaggatgttcctagtggaccacctcgcaaggttgaggttgaggcagtaaacagtacaagcgtcaaagtgtcgtggagaagccctgttccgaataaacagcacggtcagattcgggggtaccaggtgcactatgttcggatggagaacggtgaaccaaagggccaaccgatgctgaaggacgttatgctggccgacgcacaatgggagttcgacgacacaactgagcacgacatgattatcagtggccttcaaccggaaacttcatactcattgaccgtgacagcatatacgaccaaaggtgacggggctagatccaagcccaaactagtgtctactactggcgcagtgccaggcaaaccacgtctggttatcaaccacacccagatgaacacagctcttattcagtggcatcccccggtggacacatttggccccctccaagggtatcgactaaagttcgggcgaaaggatatggaacccttaactactctggaattctcggaaaaagaggatcacttcacagccaccgacatccacaagggagcctcttacgtcttcaggctttccgctcgtaacaaggttggcttcggcgaagaaatggtcaaagagatttcaattcctgaggaggtgcctacagggttcccgcagaacttacatagcgaaggcactacaagcacaagcgtacagctctcttggcagccccccgtgctcgccgaacggaacggcattattacgaagtacaccctattgtatcgggatatcaatatcccgcttctgcccatggaacagctcatcgttcccgctgacactactatgactttgactggactcaagcccgatactacgtacgatgtcaaggtcagggcccacacctcaaaaggccccggaccatattccccatcagtgcagtttcgtaccctgcctgttgatcaagtgttcgcaaagaactttcacgtcaaggccgtcatgaagactagcgttctcctctcttgggagatccccgagaactacaactcggccatgcccttcaagatcctgtacgacgacggtaaaatggtggaggaggtggacggccgagctacccaaaagctcattgtgaatctaaagcctgagaaaagctatagctttgtgttgactaatcgcggcaacagcgcaggtggactccaacatcgagtgaccgccaagactgcgcccgacgtgctccgcacgaagcctgccttcattggcaagaccaacctggatgggatgataacggtgcaattgccagaagtcccagccaacgagaatataaaagggtactatatcataattgtaccgcttaaaaaatctaggggcaaattcatcaagccctgggagagccccgatgaaatggaactagatgagctcctaaaagagattagtcggaaaagaagaagtatccgctacggtcgggaggttgaactcaaaccatatatcgcggcacattttgatgtgctacccaccgagttcaccctcggggacgataaacactatggaggcttcaccaacaagcagctgcaatcgggccaggaatacgtgtttttcgtgctcgccgtgatggaacacgcagagtcgaagatgtacgccacctctccttactccgatcccgtagtgtctatggacctcgacccccagccaataaccgacgaggaggagggcttaatatgggttgttgggccagtcctggccgtggtctttatcatttgtatcgtgattgctatcctgctgtacaagcggaaacgtgccgagtcagactcaagaaaaagttccatccccaataataaagagatccctagccaccatcccacagaccccgtggagctgcgtcgattaaacttccaaacccctggaatggcttcccatccgcctattccgatcttagaactggccgatcacatcgagagactgaaagccaatgataatttgaagttctcccaggaatatgagtcaatcgaccctggacagcagtttacctgggaacactcaaatcttgaggtgaacaaaccgaaaaaccggtatgctaacgttatagcttacgatcactccagagtgctcctgagcgccatcgaaggaatacctggaagcgactacgtgaatgctaactatatagacggatacaggaagcagaacgcgtatatcgcaacccaaggcagtttacctgagacatttggggatttttggagaatgatttgggaacagcggagcgccaccgtggtgatgatgaccaagctggaagagcgttccagagttaagtgtgaccaatattggccttcccggggaaccgaaacccatggcctggtgcaagtcaccctgctcgacacggtggagctggctacctattgcgttcgcacttttgctctgtacaagaatgggtcttccgagaaaagagaagtgagacaattccagtttactgcttggcccgatcacggcgtccctgaacacccaacccctttcctcgcctttctcagacgtgtgaagacatgtaacccgcccgatgctgggccaatggtggttcactgctctgccggggtggggcgcacggggtgttttatcgtcatcgatgccatgctggagagaataaagcacgagaagactgtggatatctatgggcatgtcactctgatgcgggcccaacgcaactatatggtccaaaccgaggatcagtatatttttatccatgacgctctgctcgaagccgttacatgcgggaacacagaagtgccagcacgcaatttgtatgcctacatccagaaactgacgcaaatcgaaaccggagagaacgtgacaggaatggagttagagttcaagaggctcgccagcagtaaggcacatacatccaggttcatttctgccaaccttccttgcaataagttcaagaaccgccttgtcaacataatgccttatgagtcaaccagagtgtgcctccagcctatcagaggagtggaggggtctgattatatcaatgcttccttcatcgatggttaccgccagcaaaaggcctatattgccactcagggacccctggctgaaacaaccgaggacttttggaggatgctgtgggaacataactcgactattgtggttatgctgaccaagctgcgggaaatgggcagagaaaaatgccatcagtactggcccgccgagcggtctgctaggtaccaatactttgttgtcgaccctatggccgagtacaacatgccccagtatattctccgggagtttaaggtgacagatgcccgcgatggtcagtcacggactgtacggcagttccaatttaccgattggccggagcagggggtccctaaatccggagaagggttcattgattttatcggccaggtacacaaaaccaaggagcaattcggtcaggatgggcccatttctgtgcactgctcagcaggggtcgggagaacaggggtgttcatcaccctttcaatcgtcttagagcggatgcgctacgagggcgtggtagatatctttcagaccgtcaaaatgctgcgtacacagcgccctgccatggtgcaaacagaggaccagtaccaattcagttacagggccgctcttgagtatctcgggtcatttgaccactacgccacctag

SEQ ID NO: 201722 - DNA, 2103 bp, synthetic construct
  misc_feature 1..2103: note = Description of Artificial Sequence: Synthetic coding sequence
  source 1..2103: mol_type = other DNA
atggagcccctgtgccccctgctgctggtgggcttcagcctgcccttggcccgtgcccttcgcggcaatgaaaccacagccgactcaaatgagaccaccactacttcagggcctccggatccaggcgccagtcagcccctcttggcgtggctgctgctgccccttcttctactactactggtgctcttattggctgcctactttttcaggtttaggaaacagagaaaggcagtggtcagcacatccgacaagaagatgcctaacgggattctagaagaacaggagcagcagcgcgtgatgttgctttccagatcaccctcaggcccaaaaaaatacttcccgatccccgtggagcatttggaagaagagattaggatcagatccgctgatgactgcaagcagttcagagaagaattcaactctcttccctccggccacattcagggcacattcgagctggccaataaggaggagaacagagaaaaaaatcgctatcctaacatccttcctaatgaccactcacgagtcatcctgtcgcagctggacgggatcccatgctctgactacatcaatgcctcctacattgacggatacaaagagaagaacaaatttatagcggctcagggacctaagcaagagacagttaatgatttctggcggatggtgtgggagcagaaatcagcaactattgtgatgctgaccaacctcaaggagcgtaaggaagaaaaatgtcaccagtactggccggaccagggctgctggacatacggcaacattcgcgtgtgcgtcgaagattgcgttgtgctcgtggactacactatccgcaagttctgcatccagccccagctccctgacggctgcaaggctccacgcctcgtgagccagctgcacttcacaagttggcctgacttcggcgtcccttttaccccaatcggcatgctgaagtttctgaagaaggtgaaaacactaaatccagtccacgcaggaccaatcgtcgtgcattgtagtgccggcgtgggcaggacggggacctttatagtcatcgatgccatgatggccatgatgcacgccgagcaaaaggtggatgttttcgaattcgtcagccgcattcggaaccagcgaccccagatggtccaaactgatatgcagtatactttcatttaccaggcattgctcgaatattatttgtatggcgatactgagctggacgtgagttcactagagaaacaccttcagactatgcacggaaccaccacccatttcgataagattgggcttgaggaagagttccggaaattgacaaatgttcggatcatgaaagagaacatgcgtaccgggaatctaccagccaacatgaagaaagcacgagtgattcaaatcatcccctatgattttaatagggtgattctgagcatgaagcgggggcaggagtataccgattacattaacgcctccttcatcgatggttataggcagaaagattatttcatcgcgacccaaggacccctagcacatacagttgaggacttttggcgcatgatctgggagtggaagagccatacgattgtgatgctgaccgaagttcaggagcgcgaacaggataaatgttatcagtactggcccacagaaggcagtgtcacacatggcgagattacaattgaaatcaaaaatgatacactctccgaggctatttcaatcagggactttctggtcacgctaaatcagccccaggccagacaggaagagcaggtgagagtggtacgacagtttcatttccatggatggcccgaaatcggtatccctgctgagggaaaggggatgattgatctgattgccgctgtgcaaaaacagcaacagcagactggaaaccaccctattactgttcattgtagtgctggggccggcaggactggtacctttatagctctgagcaacatcctggagcgtgtgaaggctgaagggcttctggatgttttccaggcagtgaagagcttgagacttcagcgcccccatatggtccagaccctggagcagtacgaattttgttataaggtggtgcaggacttcattgacattttttcagactacgccaatttcaagtag

SEQ ID NO: 201723 - DNA, 1929 bp, synthetic construct
  misc_feature 1..1929: note = Description of Artificial Sequence: Synthetic coding sequence
  source 1..1929: mol_type = other DNA
atgagcaaccggagcagcttcagccggctgacctggttccggaagcagcgcaaagcagttgtaagcactagtgacaaaaagatgcctaacggaatcctggaggagcaggagcagcagagagtgatgctgctcagcaggtctccgtctgggcctaaaaaatatttcccaattcccgtcgagcacctggaggaggagattcggataaggagtgcggacgattgcaaacagttcagagaagagttcaatagtctcccgtctggtcacatccaaggcacattcgagctggcgaacaaggaggaaaatcgggagaaaaatcgatatcctaatatccttcctaatgaccacagtagggttatcttgtctcaattggatggcattccatgtagcgactatatcaatgcaagctatatcgatggctataaggagaagaacaagtttatcgcggctcaagggcctaagcaagaaacagtgaacgacttttggcggatggtgtgggagcaaaagagcgcgaccattgtcatgttgacaaatctcaaggagagaaaggaggagaagtgccatcagtattggccagaccagggatgttggacctatgggaacatccgggtatgcgtagaggactgtgtagtcttagtggactacactattcgtaagttctgtatccagccacagctgcctgatggttgtaaggcgccacggctggtttcacagctccattttaccagctggcccgacttcggggtgcccttcacccctatcggcatgctgaagttccttaaaaaggtcaagaccctcaatccagtacatgccggacctattgtggtgcactgtagtgccggtgtgggaagaacaggcacattcatcgtgatagacgctatgatggctatgatgcacgccgaacagaaagtggacgtctttgagttcgtatcccggattaggaatcaacgtcctcagatggtacagacagatatgcagtacacatttatctaccaggcactgctcgagtactatttgtatggcgacaccgagttagacgtctccagcctggagaagcacctgcaaaccatgcacggcaccactactcattttgataagataggtctggaagaagagttccgaaagcttactaatgttcggatcatgaaagaaaacatgcgcacaggtaacctacccgctaatatgaagaaggcaagagtaattcagataatcccctacgactttaatcgtgtgattcttagcatgaagcgcggccaggaatacacagactatattaatgcgtccttcatcgatgggtatcgtcagaaggactatttcatcgccactcaaggacccctggcccacactgtggaggatttttggagaatgatctgggagtggaagagccacacgatcgttatgctcacagaagtccaagaacgggaacaagacaaatgttatcagtattggcccactgagggtagtgtaacacacggagagattacgattgagattaaaaatgacaccctttccgaggctatatctatcagggatttcctcgtgactctgaatcaaccccaggctcgacaggaagagcaagtcagagtcgtgcggcagtttcacttccacggttggcccgagataggaattcccgccgagggtaagggaatgatcgatttaatcgctgccgtgcaaaaacagcagcaacagaccggcaaccaccctatcactgttcactgttccgcaggcgccgggcgcactgggacattcatcgccctcagtaacatcctggaacgcgtgaaggcggaaggattgttggacgtttttcaggctgtgaaaagcttgcggctgcagaggccccatatggtccaaaccctggaacagtacgaattttgctataaagtggtacaggatttcattgacatcttctccgattatgccaactttaaatag

SEQ ID NO: 201724 - DNA, 2103 bp, synthetic construct
  misc_feature 1..2103: note = Description of Artificial Sequence: Synthetic coding sequence
  source 1..2103: mol_type = other DNA
atggagcccctgtgccccctgctgctggtgggcttcagcctgcccctagcaagagcattaaggggcaacgaaacaaccgcagattctaatgagactacaacgacgtcagggccaccagatccaggtgcttcccaacctctgttagcctggttgctcctacctctgctgctgttgctgctcgtgctgttgctggccgcctacttctttcgcttccgaaaacagcgaaaggccgtagtatcaacatccgataagaaaatgccaaatggtatcctggaagagcaagaacaacagagggtgatgctgctttctcggtcaccctcaggccccaaaaaatatttcccaatccccgtagaacatctggaggaggagatccgcatccggtccgcggacgactgtaagcagttccgtgaagagttcaactccctcccatccggccatatccagggtacattcgagcttgccaataaggaagagaacagagagaaaaacagatatcctaatattttacctaatgaccactcccgggtaatactctcgcaattggatggcatcccctgctctgattacatcaatgcctcttacatcgacggatacaaagagaagaacaagttcatcgctgctcaagggccaaagcaagaaacagtgaatgatttctggcggatggtctgggaacaaaaaagcgcaactatcgtgatgctgactaatctcaaagagaggaaggaggaaaagtgccaccaatactggcctgaccaaggctgttggacatatggcaacattcgcgtctgtgtggaggactgcgtcgtacttgttgattacaccataagaaagttctgtattcagcctcaactgccggatggctgtaaagcccccaggctggtgagtcagctgcatttcacctcttggcccgattttggggtgccttttacacccatcgggatgcttaaattcctgaaaaaggtaaaaacactgaaccctgtgcatgccggaccaattgtggttcattgctcagccggtgtgggaagaactggcacgttcatcgtgatcgatgccatgatggcaatgatgcacgccgagcagaaggttgacgtattcgaatttgtctcacggattagaaaccaacgcccccagatggtgcagacggatatgcagtatacatttatctaccaagcactgctggaatattacctatatggcgatactgagttggatgtgtcgtcactggaaaaacacctacagactatgcacggtaccactacccactttgacaagatcggcctggaggaagagttccgcaagctgaccaatgttcggatcatgaaggagaacatgaggaccggtaatttacctgccaacatgaagaaggctcgtgtgattcaaatcataccttacgattttaacagggttattcttagtatgaagagaggacaggaatacaccgattatataaacgcctcattcatcgatggatatcgacaaaaagattactttatcgctacacagggccctctcgctcacactgtagaagacttttggcgtatgatctgggagtggaagagtcacaccattgtgatgctgacagaggttcaggagagggagcaggataagtgctaccagtattggccaaccgagggatctgtgacacacggcgagattaccattgagatcaaaaatgacacactgagcgaagccatttctatccgggatttcttggtgaccctgaatcagccgcaggcccggcaggaggaacaggtgcgggtcgtgaggcagtttcatttccatggatggccagaaattggcattcctgcggaaggtaaagggatgatcgacttgatcgccgcagtccaaaaacaacagcagcaaaccggcaaccaccccattacagtccactgttcagccggcgctggccgtacaggtactttcatcgctctgtcaaacattttagaacgagttaaagcggagggactgctcgatgtgttccaagctgttaaaagtctgagactgcagcgtcctcacatggtgcagacactggaacagtacgaattttgttacaaagtggtccaagactttatcgacatctttagcgattacgcaaatttcaagtag

SEQ ID NO: 201725 - DNA, 438 bp, synthetic construct
  misc_feature 1..438: note = Description of Artificial Sequence: Synthetic coding sequence
  source 1..438: mol_type = other DNA
atggagcccctgtgccccctgctgctggtgggcttcagcctgccccttgccagggcgctgcggggtaacgagaccactgctgattcaaacgagacaaccaccacttccggacccccggatccgggggccagtcagccacttcttgcatggctcttgctccccctgctgctgctgctcctcgtcctactcttggccgcctatttttttcgattccggaaacagcgcaaggctgttgtgtcgacctccgacaagaagatgccaaacggcattctggaagagcaggagcagcagagggtgatgttgttgtcacggtccccttcgggcccgaagaagtacttccccattcctgtggagcacctcgaggaggagatccgaatacgatccgccgatgattgcaaacagttccgcgaagaatttaacatgacaatacttggttag

SEQ ID NO: 201726 - DNA, 2010 bp, synthetic construct
  misc_feature 1..2010: note = Description of Artificial Sequence: Synthetic coding sequence
  source 1..2010: mol_type = other DNA
atggtgagccagcggctgccccggaagacccggggccccccctggagtccatgtgtgcattcctgctggtgggtgctcgcctgtcggtctcccggactgtctggtgcaactagacccctccccacagctacccggcagccaagaccgcaggcactccgtactagggcgcctccttcccgttgctggccaggctgttactgcagatgttgcagtagttctagctgtagtttttctccccctacatcctccggatcaggacctaaaaaatatttccccatcccagtggaacacctcgaagaggaaattcgtatcaggagcgccgacgactgcaagcagtttagggaggaatttaacagtttaccttctggacacatacaggggaccttcgagttggcgaacaaggaagaaaacagggaaaaaaaccgataccccaacattctacctaacgatcactctcgggtaattctgagccagctggatgggataccatgttcagattacatcaatgcgagctatattgacgggtacaaggagaaaaataagttcattgctgcacagggtcccaagcaggagaccgtgaatgacttctggaggatggtgtgggaacagaaatcagccactatcgttatgttgaccaaccttaaagagcgaaaagaggagaaatgtcaccagtattggccagatcaaggatgttggacgtacgggaacatccgggtctgcgtggaagactgtgtggtgctcgtagactacactattcgaaagttttgtatccagccgcaactccctgatggctgcaaggctccgcgactggtctctcagcttcacttcaccagctggcccgatttcggcgttccctttacaccgatcggaatgctgaaattcctaaagaaagttaagaccctcaaccccgtgcacgctggccctattgtggtccattgttcagccggagttggccgcaccggcacttttatcgtcatcgacgccatgatggccatgatgcatgctgagcagaaagttgacgttttcgagtttgtgtctcgcatccgtaatcagcggccgcaaatggtgcagacagacatgcagtataccttcatttaccaggcactgctggagtattacctgtacggtgacaccgagttagacgtctcaagcttagagaaacatctccagaccatgcatgggacaacgacccatttcgataaaatcggcctggaggaagagttcaggaaactaacgaatgtaaggattatgaaagaaaacatgcggaccggaaatctcccagccaatatgaaaaaagctagggtcattcagattattccttatgattttaaccgcgtaatcctcagtatgaaacgaggccaggaatataccgattacattaacgctagctttatagatgggtaccgccagaaggattattttatcgcaacccaaggccctctggcgcacaccgtggaggacttttggcggatgatttgggagtggaagagccatactatcgtgatgctgacagaggtccaagaaagggagcaggataagtgctaccagtattggcccaccgaggggagcgtaacacacggagaaattacaatcgagattaaaaatgatactctgtctgaggcaatttccattagagatttccttgtcactttgaatcagccacaggcaaggcaggaagaacaggtgagagtcgtgcgccagttccattttcacggatggcccgaaatcggaatccccgccgagggtaagggaatgatcgacctcattgccgcagtgcaaaaacaacagcaacaaacagggaatcacccgattactgtccactgtcgtaactccatgaacagtgccaccaagtggtacaagatactgctgatctatttcctgataatgctcatcagcaacgaggatagttgcctcaaaatattcttcaaccttatggaacagcggcgatcccactttccccaggatgctaggctgagccctccactctctgggaccgcttttgctctctag

SEQ ID NO: 201727 - DNA, 423 bp, synthetic construct
  misc_feature 1..423: note = Description of Artificial Sequence: Synthetic coding sequence
  source 1..423: mol_type = other DNA
atggagcccctgtgccccctgctgctggtgggcttcagcctgcccctggctcgggctctgagaggcaacgaaacgacagccgattccaacgagacaactacaacatcgggccctcccgatccaggggcaagtcagcctttgctggcgtggctattgctccccctgttgctactgctcctagtcctacttctagctgcgtacttcttccggttcaggaagcagagaaaggcagttgtgagtacttcagacaagaaaatgccaaacggcatcttggaggaacaggaacagcagagagttatgctgctgtcgcgttctccatcaggcccaaagaaatatttccccatcccagtagaacacttagaggaagaaattaggattcggtcggcagatgactgcaagcagttcagagaagaatttaattag

SEQ ID NO: 201728 - DNA, 465 bp, synthetic construct
  misc_feature 1..465: note = Description of Artificial Sequence: Synthetic coding sequence
  source 1..465: mol_type = other DNA
atggagcccctgtgccccctgctgctggtgggcttcagcctgcccctggcccgcgcgttgcggggaaacgaaacgacagcagactctaacgaaaccaccacaaccagcggcccccccgatcccggtgcatcacaacccctcctagcatggctgttgttacccctcttgctgttactcctagtactgttgctggctgcctacttcttcagattcagaaaacagcggaaggcagtcgtgagtacctccgataagaaaatgcctaatggcatactggaggagcaagaacagcagagagtcatgctgttgtccagaagccctagcggccctaagaagtacttcccaattcccgtggagcatctggaggaggagatcagaattaggtccgcggatgattgtaaacagtttcgcgaagagtttaacagcctgccaagcggccatatccagggtacctttgaactggcatag

SEQ ID NO: 201729 - DNA, 5724 bp, synthetic construct
  misc_feature 1..5724: note = Description of Artificial Sequence: Synthetic coding sequence
  source 1..5724: mol_type = other DNA
atggcccccgagcccgcccccggccggaccatggtgcccctggtgcctgcactagtcatgctgggcttagttgccggagcacatggtgattccaagcccgtctttatcaaagtgcccgaggatcagacgggcctgtcaggtggagtggcgtcttttgtctgccaagcaactggggagcccaagccacggatcacatggatgaaaaaggggaagaaggtgtcctcccagcggttcgaagtcattgagtttgacgacggggcaggaagcgttctgagaattcaacctctgcgagtccagagggacgaggcaatctatgaatgtacggcaacgaattcactgggcgagatcaataccagcgccaagctctccgtgcttgaggaggaacagttgcccccgggctttccctcaatcgacatggggccccagttgaaagtggtcgaaaaagcaaggaccgccacaatgctgtgtgcggctggcggtaatcctgacccagagatctcgtggtttaaggatttcttgcccgttgatcctgccacatccaacggccgcatcaaacaactgagatccggggccttgcagattgaatccagcgaggagagcgaccagggaaaatacgagtgtgtggcgactaactcggccggaactcgttacagtgccccagcaaacttatacgtgagggtacgtagggtggccccccgattcagtatcccgccgtctagccaggaagtgatgccagggggatcggtaaacctgacatgcgtcgccgtgggagcacctatgccatacgttaagtggatgatgggtgccgaggagctaacaaaagaagacgagatgcccgtgggccgcaatgtcttggagctgtcaaacgttgtgaggagcgctaactacacttgcgtagccatctcatctcttggaatgattgaagccaccgcccaggtgaccgtgaaggctctgccaaaacctcccattgacttggttgtgacggagaccaccgccacctctgtgactctcacctgggatagcgggaacagcgaaccggtaacgtattatggaattcaatatagagcggctggtactgagggaccttttcaagaagttgatggggtggcaacgactcgctacagtatcggcgggctgtcccctttttctgagtacgccttccgtgtactggctgtgaattccatcggcaggggccccccgagcgaggcagtcagagcccgaaccggcgaacaggctccctcgtctccgccacgccgggttcaggccagaatgctctcagctagcacgatgctcgtgcaatgggaaccccccgaggaaccaaatggcctcgtccgtggttatagggtttactacacaccagacagtcggaggccacctaacgcatggcacaagcacaataccgacgccgggttgctgactacagtagggtccctgctgccaggaatcacctacagcctgcgggttctcgcgttcaccgcagtgggtgatggcccgccctccccaacgattcaagtgaagactcagcaaggcgtgccagcacagcccgccgattttcaggctgaggtggagagcgatacaagaatccaattgagctggcttctgccaccccaagagagaattataatgtacgaactcgtctactgggccgcagaggatgaggatcagcagcataaggtcacatttgaccccacatctagctacactcttgaagatctaaaacccgataccttgtaccgatttcagctggccgcccgcagcgacatgggcgtgggcgtctttacgccaactatcgaggctcgtacagcccagtctactcctagcgcccccccccaaaaggtaatgtgcgtgagtatgggtagtacaaccgtccgggtgagctgggtaccccctcctgccgacagcagaaatggagtgattacacaatattctgtcgcctatgaggccgtcgacggagaggaccgaggtaggcacgttgtcgacggaatctctagagagcacagctcttgggatctggtgggcctagagaaatggacagagtacagggtatgggtgagagcacacactgacgtcggacccggccccgaaagttccccagttctggtgcgcactgacgaagatgtgccgtccgggccgccaaggaaggtggaggtcgagcccttaaatagcacggctgtgcatgtgtattggaaattgccagtcccttctaagcagcatggccagatacgtggctatcaggtaacctatgtgaggcttgaaaacggggagccccgggggctaccaatcatacaggatgttatgctggccgaggcacagtggcgacccgaggaaagcgaggactatgaaaccactatcagtggtctcacaccggaaacgacctacagcgtcactgtcgctgcttacactacaaaaggagacggggctagaagcaagcctaaaatcgtaacaacaacgggcgccgtacccgggcgccccacaatgatgatttccaccacagccatgaacacagcgttgctccagtggcacccacctaaggagctgccgggagagctgctaggctatcgactgcagtattgtagggctgacgaggcccggcccaacactatcgacttcgggaaggacgatcaacattttactgtaaccggcctccataagggtacaacctacattttcaggttggccgctaagaacagggctggattaggcgaggaattcgagaaggagatccggactcccgaggaccttccaagcggttttccacagaacctacatgtcacgggccttactacttccaccactgagttagcttgggacccaccagtacttgccgagcgcaacggacgcattattagctacaccgtcgtcttccgcgacattaattctcaacaggagttgcaaaacattaccactgataccaggttcacactcaccggcttaaagccggatacgacctacgatattaaagtccgcgcgtggacctccaaggggtctggtcctctgagtccttctattcagtctaggacaatgcccgtggaacaggtttttgcaaagaacttccgagtggctgctgccatgaagacttctgtcctgttgtcttgggaggttcctgactcctataagagcgccgtcccattcaagatcctgtataatggtcagagcgtggaggttgacggacattctatgcgtaagctcatcgcagatttacagccaaatacagaatattcattcgtcctgatgaacagaggtagctcggccggaggattacagcacctggtgtctattagaacagccccggatctcttgccccacaaacctcttcccgccagtgcctacatcgaagacgggcggttcgacctgtctatgccccacgtccaagatccgtcattggttaggtggttttacatcgtggtggtgcctattgaccgagtaggaggaagcatgttgaccccccgttggtcaaccccagaagaactggagctggatgaactgctggaagctatcgagcagggaggagaagaacagaggagaagacggcgccaggccgagcgcctaaagccttatgtggccgctcagctggacgtgttgcctgaaaccttcaccctgggcgacaaaaagaactatcgcggcttttacaaccggcccctgagtcccgacctgtcctaccagtgtttcgtgctcgccagtcttaaagaacccatggatcagaaacgctatgcctccagcccatattctgacgaaattgtggtgcaagtcacacccgcacagcaacaggaggagccagagatgctgtgggtcacggggcctgtcctggccgtaatcctgatcatccttatcgtgatagcaatcctgctattcaagcgaaaacgaacccactctccaagtagtaaggatgaacagagcataggcctgaaagattctttgctcgcgcactcctcagatccagtcgagatgcgtcggttaaattatcaaactcctggaatgcgcgaccatcctccgattccaattaccgacttggccgataacatcgaaagactgaaggccaatgacggcctcaagttttcccaagagtatgaaagtatcgatccaggtcaacagtttacatgggagaactccaatctcgaggtgaacaaaccaaaaaatagatacgccaatgttatagcttatgaccactcccgggtgatccttacgtccattgacggggtgcctggatcagattacatcaacgctaattatatcgacggctatcggaagcagaatgcctacatcgccacccaggggcctctgcccgagactatgggggatttctggcgtatggtgtgggagcaaagaacagctaccgttgtgatgatgactagactcgaggagaagagtagagtcaaatgcgatcagtactggcccgcaaggggtaccgagacttgcgggttgatccaggtgactctgctggacacagtggaactcgcaacatatactgtcaggacttttgctctccacaaatccggcagttccgagaaaagggagttgcggcagttccaatttatggcctggcctgaccacggcgtgcctgaatatcccactcctattctggcatttttaagaagagttaaggcttgcaaccctctggatgcaggaccaatggtggtgcattgttctgcaggtgtcggacgtaccgggtgtttcatcgttatcgatgctatgctggagaggatgaagcacgaaaagacagtagacatttacggccatgtgacttgtatgcgctcccagcgcaactatatggttcaaaccgaagatcagtatgtgtttatccatgaggctctgctcgaggcagcgacctgtggacacaccgaggtgcctgccagaaacctctatgcacatatacaaaagcttggccaagtgccgcccggggaaagtgtaaccgctatggagctggagtttaagcttctggcttcatccaaagcccacacatcccggtttatttccgcaaacctgccctgcaataagttcaagaatcgactcgtgaatattatgccttatgagcttactcgcgtgtgtctccaaccaattcggggtgtcgaaggatccgattacatcaacgccagcttcttagatgggtatcgtcagcagaaggcctatatcgctacccagggccctcttgccgagtccacagaggacttttggcgcatgctttgggagcacaactccacaatcatcgtaatgttaacgaagcttagggagatgggcagagagaagtgccaccagtactggccagccgaacgaagcgcacgctatcagtattttgtggtggatccaatggcagagtacaacatgccccagtacatcctaagggagttcaaggtgacagatgcccgtgatgggcagagccggacaattagacaattccagttcacagattggcctgagcagggggtgcccaagactggagaggggtttatcgatttcataggccaggtgcataagaccaaggagcaatttgggcaggacggacccatcaccgtccactgttctgctggggttggccgcaccggagtatttatcaccctcagcatagtacttgagcgcatgcggtatgaaggggtcgtggacatgttccaaacagtcaagactctgaggacacagagaccggccatggtgcagacagaagatcagtaccagctctgctacagagcagcgttggagtatctgggttcattcgatcattacgccacgtag

SEQ ID NO: 201730 - DNA, 5697 bp, synthetic construct
  misc_feature 1..5697: note = Description of Artificial Sequence: Synthetic coding sequence
  source 1..5697: mol_type = other DNA
atggcccccgagcccgcccccggccggaccatggtgcccctggtgcctgccttggtcatgctgggacttgtggctggtgcccatggagattccaagccagtattcatcaaggtacctgaggaccagaccgggttgtctggaggggtcgccagcttcgtatgccaggcaaccggagagcccaaaccgagaatcacatggatgaaaaaaggcaagaaggtgtcttcacagcgatttgaggtgatagagtttgacgatggggctgggtcagtgttgagaatccagcccttaagggtacagcgtgacgaggccatttacgagtgcacggccaccaatagcctgggtgagattaacacgagtgctaagttgagtgtgttggaggaggaacagctccctccaggtttcccctctattgacatgggaccgcagctcaaggtggtggaaaaggctcggacagctactatgttgtgcgctgctgggggaaaccctgatccagaaatctcttggttcaaggacttcctgcccgtggaccctgcaaccagtaatggaaggatcaagcaactgaggtcgggggcactgcaaatagagtcttctgaggaaagtgatcaaggaaaatacgaatgtgttgcaactaacagtgctggtacccgctattcagcaccggctaatctttatgttcgcgtcagacgtgtggctccccgcttcagcatacctccatctagccaggaagtaatgccaggagggtctgtgaatctcacgtgtgtggccgtgggcgctcccatgccttatgtaaagtggatgatgggggctgaagagcttacaaaggaggacgagatgcctgtgggccgcaatgtcctggagctgtccaatgtggtgaggagcgctaactacacttgcgttgccatatcttcgcttgggatgattgaggccaccgcccaggtgactgtgaaggccctcccaaagccccctatcgacttagttgtgacagagactacagccacctctgtgactcttacttgggactctggaaattctgagcccgtgacttactacgggatccagtatcgagccgcaggcacagagggcccatttcaggaggttgatggggtggccaccactcgatactctatcggcggtctttctcccttttcggagtacgcattccgcgtgctagcggtgaacagcatagggcgagggcccccttccgaagccgtgcgcgcccggactggcgagcaggctccgtctagtccaccaaggcgcgtgcaagctcgcatgctcagtgctagcacaatgttggtccagtgggagccacctgaagagcctaatggattggtgaggggctacagggtgtattacacaccagatagccgtcgcccacccaatgcttggcataaacataacacagacgcaggacttttaacaactgtggggagcctgctccccgggattacgtactccctccgcgtgttggccttcacagcagttggtgatgggcctccctcaccaacaattcaggtgaaaacccagcaaggcgtcccagcccagcctgcagactttcaggccgaggtggaaagtgatacccggatccagttgtcttggctcctgccacctcaggagaggatcataatgtacgagcttgtatactgggctgccgaagatgaggaccagcagcacaaggtgacctttgaccccactagcagttacaccttagaggacttaaagcctgacactctttacaggtttcaactcgcggcaagatctgacatgggcgtaggggtttttacaccgacaatcgaagctcgcacagcgcagtctacgccaagcgccccacctcagaaggttatgtgtgtctcaatgggaagcaccaccgttagagtatcgtgggtgcctccacccgctgacagccgaaacggagtgatcacccagtacagtgtggcctacgaagcggtggacggggaggaccggggacggcacgtcgtagacggtatttcacgggagcatagcagttgggatctggttggactggagaaatggacagagtacagggtgtgggtgcgggcccatactgacgtcgggcctggaccagaaagctcccctgtgctggtccgaaccgatgaagatgttccaagcggcccccctcgcaaagtggaagtggagcctctgaatagcacggcagtgcacgtgtactggaaactgcctgtacccagtaagcagcacggacagatcaggggttaccaagtgacgtacgtccgcctggagaatggggagccgcgcgggctcccgatcatccaggatgttatgttagctgaagcccaggaaacaaccatttccggtctcacacccgagaccacctattccgtgactgtggctgcgtacacaaccaagggagacggcgctaggtctaagccaaaaatcgtcacaactaccggagccgtgcccgggagacctacaatgatgatctctactactgctatgaacacagccctcctccagtggcacccacctaaggaactgcctggtgaactgttagggtatcgccttcagtactgcagggccgatgaggctcgaccaaataccatcgactttggaaaggacgaccagcactttaccgtcacaggtctgcacaagggcacaacatacattttccggctcgctgccaaaaatagggcaggactaggcgaggagtttgaaaaagagatcagaacgcctgaggatctgccttccgggtttcctcagaacctacacgtgactgggctgactaccagcaccactgagctcgcatgggatccaccagtcctggccgaacggaatggtcgcattatctcctataccgtggtgttcagagatataaactcccagcaggagctacagaacattaccactgatactagattcaccttgacaggtctgaaaccagacacgacttacgacattaaagttcgggcgtggactagcaaaggctctggcccactgtcaccctccatacagtcacggactatgccggtagaacaggtgtttgcaaaaaactttcgagttgcagctgccatgaagacctcagtgctgctgagctgggaagtcccagattcttacaagtcagccgtgccctttaagattttatataacggccagtctgtcgaagttgatgggcactcaatgcgcaaactgatagctgacctgcagcccaacaccgagtatagcttcgttcttatgaatagggggtccagcgccggtggattacagcatcttgtatctattagaacggcccccgacctgctgcctcataaacctcttccagctagtgcatatatcgaggatggccggtttgacttatccatgccacacgtgcaggacccctcactggtaaggtggttctacatcgtcgtggtgcctatagaccgcgttggggggtctatgctgactccccggtggtcaacacctgaggagctggaattggacgagctgctggaagcgattgagcagggtggtgaggagcagaggcgacgtcggaggcaggccgagcgcctgaagccttacgtcgccgcacagctggacgtactgcctgagacattcactctcggagataagaaaaattaccgcggattctataaccgtcctctgtctccagacctgagctaccaatgctttgtgctggcttccctcaaagagccaatggaccaaaagcgatatgcctccagtccatattcagatgagatcgtggttcaggtgacacctgcacaacagcaggaagaacctgagatgctctgggtgaccggtcccgtcctggcagtgattcttattatcttaattgtaattgctatactcttattcaagcgcaagaggacacatagtccgtcatccaaagatgagcagtccatagggctgaaagatagcttactggcccactcttccgatccggtcgaaatgcgacggctgaattaccagacccccggaatgcgcgatcacccgcctattccaataacagatctggccgataatattgaaagactgaaggctaacgacggactgaagttctctcaggaatacgagagtatagacccagggcaacaattcacttgggaaaattccaatcttgaagttaataagcccaaaaacagatatgccaacgtgatcgcttatgaccacagtagggtgattctgacttctatcgacggtgttcctggatccgactatattaatgcgaattacatcgacggctataggaagcaaaatgcatacatcgcaacccaaggcccgctgccggaaacgatgggcgacttttggcgcatggtgtgggaacagcgcaccgccaccgtcgtgatgatgaccaggctggaagagaagtcacgggttaagtgcgaccagtactggcccgccagaggaaccgagacatgcggcttaatacaggtgactcttcttgacactgttgaactcgcaacgtatactgtccgtacctttgctctccataagtccggcagttcagagaagcgcgagctgaggcagtttcagtttatggcatggcccgatcacggcgtcccagaatatcccacaccaatacttgcatttctaaggagggtgaaggcttgcaatcctttggacgccgggcccatggtggtccactgttccgccggtgtcggccggaccggttgcttcattgtgattgacgctatgttagagcgcatgaagcatgagaagacagtggatatttacggccatgttacatgtatgagatcccaaaggaactacatggttcagaccgaggatcagtacgtgttcatccatgaagcgctgctcgaggctgccacttgtgggcataccgaagttccagccaggaatttgtatgcacacatccaaaaactcgggcaggtgccacctggcgaatcagtgactgcgatggaattagaatttaagctgctcgcctcatctaaggcacatacgagtagattcatatcggccaacctcccttgtaataagttcaaaaaccgcctcgtgaacataatgccctacgaactgacaagagtgtgccttcagccaatccgcggggtcgagggcagtgactacatcaatgcaagctttcttgatggttatcgccaacagaaagcttatatcgcaacacagggcccattggccgaatccacagaggatttttggcgtatgttgtgggagcacaattccacaataatcgtgatgctaaccaagttaagagaaatggggagggagaaatgtcaccagtactggcccgcagagaggtccgcacgataccagtatttcgtagtggatccaatggccgaatacaatatgccccagtatattctgagagagtttaaggtcaccgatgcaagagatgggcagtcgagaaccatccgccaatttcagttcacagactggcccgagcagggcgtccccaagactggtgaggggtttatcgatttcataggccaggtccacaaaaccaaggaacagttcggacaggacggccccatcacggtccattgctctgccggagtgggaagaactggagtctttatcaccctgagcatcgtgttggagcggatgcgatacgagggagtggttgatatgttccagaccgtgaaaaccctgcgcactcagagacccgcgatggtccagacagaagaccaataccagctctgctacagggccgcacttgagtacctgggtagtttcgatcactatgctacttag

SEQ ID NO: 201731 - DNA, 5724 bp, synthetic construct
  misc_feature 1..5724: note = Description of Artificial Sequence: Synthetic coding sequence
  source 1..5724: mol_type = other DNA
atggcccccgagcccgcccccggccggaccatggtgcccctggtgcccgccttggttatgctgggtctggtggcaggcgcccacggcgactccaagcctgtgtttatcaaggtgcctgaggatcagacagggctgtcagggggcgtggcgagctttgtatgtcaggccacaggggaacccaaaccgcgcatcacctggatgaagaaagggaaaaaagtcagttctcaacgtttcgaagttatcgagttcgatgatggggccggctcagtcctaaggattcagccacttcgagtccagagggacgaggccatatacgaatgtaccgctactaatagcctgggagaaataaatacgagcgccaaattatccgtattagaggaggagcagttgccaccagggttcccatcaatcgatatggggcctcagctgaaagtcgtggaaaaggctaggaccgctactatgctgtgcgccgccggcggaaaccctgatccagaaattagttggttcaaagatttcttgccagtagaccccgccaccagcaacgggcgaatcaagcaactgcggtcgggggccctgcaaattgagtcctctgaggaatccgaccagggaaaatacgagtgcgtcgccacaaatagtgccgggacccggtacagcgcccccgcaaacctgtatgttagagtgaggcgagtggcgccaagattttctatccccccatcatctcaggaggtgatgccaggaggatcggtaaatctcacctgtgtggctgttggcgcacccatgccttatgtgaagtggatgatgggcgccgaggaactgacaaaggaggacgaaatgcctgtcgggcgaaacgtactggagctgtccaacgtggtgaggagtgctaactacacctgtgttgcaattagctcgttgggtatgatcgaagccaccgctcaagtgaccgtgaaagcgctgcccaaaccccctattgatttagttgtgacggaaacgactgctaccagcgttaccttgacctgggatagtggtaattctgaacctgtgacctattacggtatccaatatagggccgctggcacagagggcccttttcaagaggtcgacggggtagccacaactcggtatagcatcggcggactgtcccccttctctgagtacgcatttagagtgctggccgtgaactcaattggtagaggccccccctccgaggcggttagagctcgaaccggtgaacaagccccgagcagcccaccacgacgggtgcaggcccggatgctgtcagcgagcaccatgttggttcagtgggaaccacccgaggaaccgaatgggctggtgcggggctacagggtttattacaccccagactccagacgtccacctaacgcctggcacaagcacaataccgatgctgggcttcttaccaccgtgggttcattactacccggaatcacatactctttaagagttctggctttcaccgctgtaggtgacggacctccatcacccacaattcaggtgaagacccagcaaggcgttccagcacaacctgctgattttcaggctgaagtggaatctgacacccgaatccagctctcatggcttctccctccccaggagcggatcatcatgtatgagcttgtttactgggctgcagaagatgaggatcagcaacataaagtgacatttgacccgacaagctcatacactctcgaggaccttaaacctgatacattataccggtttcagctggctgctcggtctgacatgggcgtgggcgttttcacccccacaatcgaagccaggacggcacaatcgactccttccgctcctcctcaaaaggtaatgtgcgtgtcaatgggctctacgactgtgagagtcagctgggttcccccccccgctgattcccgaaacggtgtgataacccagtactccgtggcctacgaggcagtcgacggagaagaccgggggaggcacgtggtggatggtataagtagggaacattctagctgggacctcgttgggctggagaagtggaccgagtaccgggtgtgggtgcgcgcacatacagatgtcggaccaggccctgaatcatcgccagtcttagttaggaccgacgaagacgtgcccagtggacccccaaggaaggttgaggtcgaaccactcaactctactgccgtccacgtttactggaaactgccagtcccttctaaacagcatgggcagatccggggctaccaggtgacatatgttaggcttgagaacggtgagcctcgtggactacctataatccaggacgttatgcttgctgaggcccagtggcgaccagaagagtccgaagattacgaaaccaccatctctggacttacccctgagaccacatattcggttactgtggcagcatacacaactaagggtgatggcgccaggagcaaacctaagatcgtgaccaccactggagccgtccccggacgtcccactatgatgatctccacaactgccatgaataccgcactgctacaatggcatccgcctaaagaactgccgggggagcttctgggatatagattgcagtactgccgggctgacgaggcacggccaaatacaattgatttcggaaaggatgatcaacatttcacagtgactggcctacacaagggcacaacctacatctttcgactggccgccaaaaaccgcgctggactgggagaggagttcgaaaaggagatccgtactccagaagacctgccctccggctttccacagaacctacacgtgacaggtttaaccacatccaccactgagctcgcctgggaccctccagttctggcggaacggaatggtaggatcatcagctacaccgtcgtattcagggacattaattcgcagcaggagctgcagaatatcaccaccgataccaggttcaccctcactggactcaaaccagatactacttacgacatcaaagtcagagcctggacctcaaagggctccggcccactcagtccatcgatccaatcccggacaatgcctgtcgagcaagtgttcgctaagaatttccgcgtggcggctgctatgaagaccagtgtgttattatcgtgggaagtgccagattcctacaagagcgcggtgccattcaagatcctgtacaacggtcagtcagtggaagtcgacggccatagcatgagaaaattgattgccgatctgcagccgaatacagagtatagcttcgtgctgatgaataggggtagctccgcaggcggcctacagcatttggtcagcattcgaaccgcccctgatcttttgccccataagcctctgcctgcctcggcctacatcgaggacggaagattcgatctcagtatgccccatgttcaggacccgagtttagtccgctggttttacatcgttgttgttccgatcgatagggtcggcgggagcatgcttaccccgaggtggtccacaccggaagagctggagttagatgagctgttggaggcaatagaacagggcggagaggaacaaaggcgtcggcggagacaggccgaacgcctgaagccttatgtggccgcccagctggatgtactgcctgagactttcactctgggggacaaaaaaaattacagaggattctacaatagacccctgagtcctgacttgtcataccagtgtttcgtccttgccagccttaaagagccaatggaccagaaacgatacgcctcttccccttactctgacgaaatagttgtacaggtgacacctgcacaacagcaggaggagccagagatgctgtgggttacaggccccgtgttggctgtgatcctaataatattgatcgtgatagctatcttgctcttcaagagaaaacgaacacactcaccgtccagcaaggatgaacagtctattgggctcaaggactccctgctcgcccattcgtctgaccccgtggaaatgcggaggcttaactaccagactccaggtatgagagatcatcccccaatcccaattacagatttagctgacaacatcgagagattgaaggctaatgacggacttaagtttagtcaggaatatgaatccatcgatcctggccagcaatttacttgggagaattctaacctggaggtcaataagccgaagaataggtacgctaacgtcatcgcgtacgaccattcacgcgttattttaacttccattgacggcgtgcccggttctgactacattaacgccaattacattgacgggtatcgaaagcaaaatgcgtatattgccactcaagggcctctgcccgaaaccatgggggatttctggcgcatggtctgggaacagagaactgcgaccgtcgtgatgatgacacgcctcgaggaaaaaagcagagtaaaatgtgatcaatactggcccgcccgcgggacagaaacctgtggcctgatccaagtcaccctcttagacactgtcgagctggctacttacaccgtgcggacatttgctctgcacaagtccggcagtagtgaaaagcgggaattaaggcagttccagtttatggcgtggccagatcacggcgtgccagagtatccgactccgattctagcttttttgcggcgtgttaaagcatgcaacccactcgacgctggcccaatggtggtgcattgttccgctggagtgggccggaccggttgcttcatagtgatagatgcaatgctcgaacgaatgaagcacgagaagaccgtggacatttacggccatgtcacctgtatgcgctcgcagcgaaactacatggtgcagaccgaagatcagtacgtttttatacacgaggctctcctagaagccgccacatgcggacacaccgaggtgcccgcacgcaacctgtacgctcacatccaaaaactggggcaggttccccctggggagtccgtcacagctatggaattagaattcaaattgctcgcttcttccaaagcacatacttcccgctttatttccgctaacctaccctgtaataagttcaaaaaccgactggtgaacatcatgccgtacgagcttacccgagtatgtctgcagcccattcgtggagtcgaaggctccgattatatcaacgcctcttttctcgatggttacaggcaacaaaaggcctatatcgccactcagggacctcttgccgaatccacagaagatttctggcgtatgctttgggagcacaacagcaccatcatcgttatgctcactaaactgcgcgagatgggacgcgaaaagtgtcatcagtattggcccgccgagcggagtgctagatatcagtactttgttgtggacccgatggccgaatataacatgccgcagtacatcctgcgagaatttaaggtgactgatgctagagatgggcagtcaaggactatcagacagttccaattcaccgattggccagagcagggtgtgccgaagaccggcgaaggctttatcgatttcattggacaagtgcacaaaactaaagaacagttcggccaggacgggcctatcactgtgcattgctcagccggtgtcggtagaacaggagtattcatcaccctgagtatcgttctggagcggatgagatatgaaggcgttgtcgacatgttccagacagtgaagaccctgagaactcagaggcctgcaatggtgcagacagaagatcaataccagctctgttaccgggcagcactcgagtatctcggctcttttgatcattatgccacatag

SEQ ID NO: 201732 - DNA, 3801 bp, synthetic construct
  misc_feature 1..3801: note = Description of Artificial Sequence: Synthetic coding sequence
  source 1..3801: mol_type = other DNA
atgtacgagctggtgtactgggccgccgaggacgaggaccagcagcacaaagtgacattcgatcccacatcctcctataccctggaagatctgaaacctgataccttgtatagatttcagctggctgcaagatctgatatgggagtgggagtatttacacccactatcgaagcaagaaccgctcaaagcatgccgtccgggcccccgaggaaggttgaggtggagcccctgaattcaacagcagtgcacgtgtattggaagttgcctgtgcccagcaagcaacacgggcagattaggggataccaggtgacctacgtgagactggagaacggggaaccacggggactgccgattattcaggatgttatgcttgcagaagcccaggagacaactatttccggactgacacccgaaaccacctactcagtcaccgtggccgcctacacaactaaaggggatggtgcaaggagcaaacccaagatcgttacaaccaccggcgccgtgccgggtagacctactatgatgatctcaacaaccgctatgaacaccgcccttttgcagtggcacccccctaaggagctgcctggcgagctgctcggctaccggctgcagtactgtagagcagacgaagcccgccccaacactatcgattttggaaaggacgatcagcatttcacggtcactggactgcacaaaggaaccacctacattttccggctagccgccaaaaatcgcgccggcttgggtgaggagttcgagaaagaaattagaactcctgaggacctccctagcggttttcctcagaacctgcacgtgacgggacttacgacaagtacaactgaactggcatgggaccctccagtcctggcagagaggaatggaaggatcatctcttacacggtagtcttcagagacattaatagccaacaagagctccagaacataactaccgatactcgattcacactcacaggtctcaagcctgacaccacgtacgacatcaaagtgcgcgcctggactagcaaaggctctggtccactttctccaagtatccagtctcggactatgccggttgagcaggtgtttgcaaagaattttcgtgtagccgctgcaatgaaaacgagcgtgttgcttagttgggaagtgcccgacagctacaagagtgcagttccgttcaagatcctttataacggtcagtccgtggaggtggacggacatagtatgcggaagttaatcgctgatctgcagccgaatacagagtatagtttcgtgctgatgaaccgcggatcttcagctgggggcctacagcatctggtcagcatcagaacggcgccagatttattgccccacaagccactgccagcaagtgcatatattgaagatggtagattcgatctgtcgatgcctcatgtgcaggatccttcgttggttaggtggttttacatcgtagtggtgccaatcgatcgggtggggggcagcatgctgactccgcggtggtccacgccggaggaattagagctcgacgaactgctggaggctattgagcagggaggagaagagcagcggcgaagaaggcgtcaggccgaacggctgaagccttacgttgctgcccagctcgatgtgctcccggaaacttttacgctgggggataaaaagaattatcgcggattttacaaccggcccctatcccctgacctctcttatcagtgtttcgtgctagcaagcttaaaggagcctatggaccaaaagaggtatgcttcttccccctattcagacgagattgtggtgcaggtgacaccggcgcagcaacaggaggaaccggagatgctctgggtaaccggccccgtactggcggttatactgattatccttattgtcatagcaatcctcctgtttaagaggaaaaggacccatagcccatcatcgaaggacgaacagagcattggactgaaagatagccttctggcccatagctctgaccccgtggaaatgaggaggctgaattatcagacacctggctcttctgtgcccagttgccctaatacctcttcaatgcgagatcacccgcctatccctatcactgacctcgcggacaatattgagcgtttgaaggcaaacgatggactgaagttctcacaggagtatgaaagcatagacccaggccagcagttcacatgggagaatagcaatttggaggtgaacaaaccaaagaatcgctacgcaaacgtcatagcttatgaccatagcagagtgatcctcacctcaatagacggagttccaggttcagattacatcaatgcaaattatatcgatggatacagaaagcagaacgcctacattgccactcagggaccattgcctgaaacaatgggcgacttctggcgcatggtgtgggagcagcggactgccactgttgtaatgatgaccaggttagaagagaagtccagagtcaaatgcgaccaatactggcctgccaggggcactgagacctgtggtttgatccaggtaactctactggatacggtcgagctggcaacgtacactgtgcgtacttttgcacttcacaagtcaggcagctcggaaaagagagaactacgccagtttcaattcatggcatggcctgatcacggcgtccccgagtaccccacccccatccttgccttcctgcgaagagtcaaagcctgcaatcccctggacgcgggcccaatggtggtccattgctctgctggggtggggcggacagggtgttttattgtcatagatgccatgctcgaaaggatgaaacatgaaaagactgtagatatctatgggcatgtgacctgtatgagatcccaacgcaactacatggtccagactgaagaccagtacgtgtttatccacgaggcactcttggaggcagcaacctgtggccacactgaggtgcctgcccgtaacttgtacgctcatatccaaaagctcggccaggtcccacctggggaaagtgtgacggctatggaacttgagtttaaactactggcaagtagtaaagctcataccagtaggtttatctcagctaatctgccgtgtaataagttcaaaaatagactagtcaacatcatgccttatgaactaacaagagtgtgcctgcaaccaatccgaggcgtggaggggtcagactatattaatgcaagtttcctggatggatatagacagcagaaagcatatattgccacgcaggggcctcttgcagagtccaccgaggacttctggagaatgttgtgggaacacaactcaacaatcattgtgatgctcaccaaactacgcgagatgggacgtgagaagtgtcatcagtactggccagccgaacgctcagcccggtaccagtactttgtggttgatcccatggccgaatacaatatgcctcagtacattctgagggagtttaaagtaacagacgctcgggacggtcagagcaggaccattcgacaattccagtttaccgattggcccgaacagggtgtccctaaaacaggcgaggggttcatcgactttatcggccaggtccacaaaacaaaagaacaattcgggcaggacggccccataaccgtgcactgcagcgccggcgtagggcgcaccggcgtcttcattactctgagcattgtcctggagcgtatgcgctacgagggcgtggtggatatgttccagacagtgaaaactctgcggactcagcgaccggccatggtgcagacggaggaccagtaccagttgtgctaccgggctgccttggagtatttgggctcattcgatcactatgctacttag

SEQ ID NO: 201733 - DNA, 5697 bp, synthetic construct
  misc_feature 1..5697: note = Description of Artificial Sequence: Synthetic coding sequence
  source 1..5697: mol_type = other DNA
atggcccccgagcccgcccccggccggaccatggtgcccctggtgccagctctcgtaatgctggggctggtggctggggcacacggcgattccaagccagtgttcatcaaagtgccagaagaccagacaggattgtccggaggcgtggcgtcctttgtctgtcaggctacaggcgaaccaaagccgcggatcacatggatgaagaagggcaagaaagtaagctctcaaaggtttgaagtgatcgagttcgacgacggtgccgggagcgtcctccgcattcaaccactgagagtccagcgcgatgaagctatctacgagtgcacagcaacaaattccctgggcgaaatcaatacatccgctaaactcagcgtgcttgaagaggaacagttgccacctggcttccccagtattgacatgggaccccaactgaaggtggtcgaaaaggcccgaactgctacaatgctgtgcgctgccggcggaaatccagacccagagatctcatggttcaaagattttttgcctgtggaccccgcaacgtcaaatgggcgaattaagcaacttaggagcggcgctctgcagatcgagagcagtgaggaaagtgatcaggggaaatatgaatgtgttgcaaccaatagcgccgggactagatatagcgctccagccaacttgtatgtgagggtgcggcgcgtggccccacggttctccatccctccctcgagtcaagaggttatgcctggaggcagtgtgaatctcacatgtgtagccgtcggagcaccaatgccttatgtgaaatggatgatgggcgctgaagagctcactaaggaggatgagatgcccgtgggccggaacgtccttgagctgtcaaatgtcgtgaggtccgccaactacacctgtgtcgctatttctagcttaggtatgattgaagctactgcgcaagtgactgttaaggcacttcctaagccgccaatcgatctcgtcgtcactgaaactactgctactagcgtgaccctcacttgggactccggtaactccgaaccagtgacctattacggaattcaatacagagctgcagggacagagggccctttccaggaagtggacggcgtggctaccacccgctactcaataggcggactgtctccgttctctgagtacgcctttcgagtgttggcagttaatagcatcgggcgcgggcccccaagtgaagctgtgcgggctcggaccggggaacaggctccttcttccccccctaggcgggttcaggcacggatgctgtcagcttctacgatgttggtgcaatgggagcctccggaggagcctaatggactcgtgcgcgggtacagagtttattatacccccgacagccgcaggcctcctaatgcatggcacaagcataacactgatgccggtttgctgaccactgtgggttctctcctgccagggatcacatatagtctgcgagtcctggcctttacggctgtgggggacgggccccccagccccacaatccaggtgaagacccagcagggagttccagcccagcctgctgattttcaagcagaagtcgaatccgatacccgtatccagctgtcatggttgctccccccccaggagagaatcatcatgtacgaactggtgtactgggccgctgaggatgaagatcagcagcataaggtcacctttgacccgacgtctagctatacgctagaagatttgaagcccgacacattatatcggtttcaactagcagcccgtagcgacatgggcgtgggggtattcacacccaccatagaggcgcggacagcccaatccacccctagcgcgcccccccaaaaagtaatgtgtgtctccatgggcagtactactgtgcgcgtgtcttgggttcccccacccgctgactccaggaatggcgtaataacacagtatagtgtcgcatatgaggccgtagacggggaggaccgcggccggcacgtggtcgacgggattagtagagaacattccagctgggatctcgtgggcctggagaagtggacggaatatagggtgtgggtgcgggcccataccgacgtgggacccggaccagagtcatcacctgtcctggtccgcactgatgaagatgtgccctccggaccccctagaaaggtcgaggtggagccacttaacagcaccgcggtgcacgtgtactggaagcttccggtacccagtaagcagcacggacaaattagagggtaccaagtgacttacgtccggctggagaacggtgagcctagagggcttcccattatccaagacgtaatgttagctgaggcccaagaaacaactatctccgggctaacaccagaaacaacctattctgttacggtggcagcctacacaacaaagggggacggggcgcggtcgaagccaaaaattgtgacaaccactggtgctgtacccggccgtcccaccatgatgataagtaccaccgcaatgaacacggccctgctgcagtggcatccgcctaaagagctccctggtgaactgctgggctaccgtttgcagtattgcagagcagacgaggcaaggcctaacaccatagatttcggcaaggatgatcagcactttacggtgacgggattacacaagggcacaacctacatatttagattggccgccaagaacagggcggggctgggagaggaatttgagaaagagattcgaacacccgaggacctaccctccggcttcccacaaaacctgcacgtgacaggtctcactacaagtacaacagagctggcctgggaccccccagtcctcgccgaacgtaacggacgtatcatttcatatactgtagtgtttagggatatcaacagccaacaagaacttcagaatatcaccaccgatacccgcttcaccctgactggcctgaagcctgacaccacatacgatataaaggtgcgagcgtggacctccaaggggtctggcccactgtcgccttcaatacagtctcgaactatgcctgttgaacaggtttttgccaagaattttagagttgccgccgccatgaaaacctctgtgttgcttagctgggaggtccctgactcatacaagtctgctgttccattcaagatcctctataacggccaatctgtggaagtggacggtcactccatgcgtaaactcatcgccgaccttcaacccaatacagagtactctttcgttcttatgaaccgaggatcttccgccggaggcctgcagcacttggtatctatcaggacagcccctgacttgctcccacataaaccactccctgcttccgcttacatagaggatggacggtttgacctgagcatgccacacgtacaagatcctagccttgtacgatggttctatatagtggtagtgccgatcgacagggtgggcggcagcatgttgacgcctaggtggtccactcctgaggaactcgagctggatgaattgttggaagcaatcgaacagggaggagaagagcaaagacggagacgccgtcaggcagagaggctcaaaccttacgtggccgcccagttagatgttctccccgaaacatttactctgggcgacaagaagaactaccgtggcttctataataggccactatcgcctgacctgagttaccagtgtttcgttctggcctcgttgaaggagcctatggaccagaagcgctacgcctcttccccctattcagatgaaatagtggtgcaagtgacacctgcccaacagcaggaggagcccgagatgctgtgggttacaggacccgtgctggccgttattctgatcatactcatagtaattgccatcctcctattcaagcgcaagagaacccactccccatcgagcaaggacgagcagtccatcgggttgaaagactctctcctcgctcactccagcgacccagtggagatgaggagactaaattaccagacccccgggatgcgcgaccacccaccaatcccaataaccgatcttgccgacaacatcgaacggctgaaagccaatgacggtctgaaattctcccaagaatatgaatctatcgaccctggtcagcagtttacctgggagaattctaatctggaagtgaacaaaccaaagaacagatacgcaaatgttatcgcctatgaccacagtcgggtaattctgaccagtattgatggcgtgcctggctccgactatatcaatgctaactacatcgatggatataggaaacagaacgcctacatcgctactcagggcccgctgcccgaaacaatgggagacttctggaggatggtgtgggagcagcgaacagcaaccgttgtgatgatgacacgtctggaggagaagagtagagtgaagtgtgaccagtattggcctgcgcgcggtacagagacatgcggcctgatccaggtgacactgctcgacacagtcgaactggccacgtacaccgtccggaccttcgctttgcacaaaagtgggtcctcagagaagcgggagctccgacagtttcaatttatggcttggcccgaccatggagtgcccgagtaccctacaccaatattagccttcctgcggcgtgtcaaggcatgcaatcctctggatgctggccccatggtggtccactgctctgccggagtgggtcgaactggttgctttatagtaattgacgccatgcttgagcgcatgaagcatgagaaaactgttgacatttacggtcacgtgacatgtatgcgctctcagcggaactatatggttcagactgaagaccaatacgtattcatacacgaggccctcctggaggccgcgacatgcggccacactgaagtgcctgcacgaaacctttatgctcacatacagaagttgggccaggtgccgcccggcgagtccgtcaccgctatggaattggaatttaagttgctcgcatcctccaaggctcatacctcccggtttatttctgccaacctgccttgcaacaagtttaaaaacagactcgtgaacataatgccatatgagttgacccgggtctgcctgcagccaatccggggcgtagaagggtctgactacattaacgctagctttcttgatggttacagacaacagaaggcctatatcgccacgcaaggaccgcttgctgagagcactgaggatttctggcgaatgctgtgggagcacaacagcacaatcatcgtcatgctgacaaagctcagagagatgggaagggagaagtgccaccagtattggccggcagaacggtctgcaagataccagtatttcgttgtcgatcccatggctgagtacaacatgccccagtacattctaagagagtttaaggttacagacgctcgtgacggccagtctcggacaatccgacagtttcagttcacggattggcccgagcaaggggtccccaagactggagaggggtttattgactttataggacaggtgcataagaccaaagagcagttcggccaggatggccccatcactgtgcactgcagcgccggagtgggtcgcacaggggtattcatcacgctgtctatagtgctggagcgaatgagatacgagggagtcgttgacatgttccagactgttaagaccctcagaactcagcgccccgccatggtccagacagaggatcaatatcagctgtgctacagggccgccctcgagtaccttggttccttcgatcactacgcgacatag

SEQ ID NO: 201734 - DNA, 3609 bp, synthetic construct
  misc_feature 1..3609: note = Description of Artificial Sequence: Synthetic coding sequence
  source 1..3609: mol_type = other DNA
atgatgtgcgaggtgatgcccaccatcagcgaggccgagggcccccccgggggcgggggcggccacgggtccggctctccgtcccagccggatgcagatagccactttgagcagttgatggtgtctatgctggaggagagggataggctgcttgacacacttagagagactcaagagaccctggccctgacacaggggaagctgcatgaggtcggccatgagagggacagcctgcagcggcaactaaatacagccctgccacaggagttcgctgcactgaccaaggagctgaatgtgtgcagagagcagctgctagagagggaggaggagatcgccgagttgaaggccgaacggaataatacaagactcctccttgaacatctggaatgcctggtgtctcggcatgagcgcagtcttaggatgacagtcgtgaaaaggcaagcacagagtccagcgggtgtgagttctgaggtcgaagttctgaaagccctaaagagtctcttcgagcaccacaaggccctggatgaaaaggtaagggaacggcttagagtggccttggaacgatgcagcctcctcgaggaggagctcggagctacccataaagagttgatgattctcaaggagcagaacaaccaaaagaaaacccttaccgatggcgtcctggacattaatcatgagcaggagaatactccttcaacttcagggaaaagatcgagtgacggctctttgtcacatgaggaagatctggctaaagtcatcgaattacaagaaatcatcagtaagcagtctcgtgagcagagtcaaatgaaggagcgcctggcttctctttcttcccacgttacggagctggaggaggatcttgataccgccagaaaagacctgatcaagtccgaggaaatgaacacaaaattgcaacgagacgtgcgggaggcgatggcccagaaagaggatatggaggaacgcatcacaactctggagaaaagatatttggctgcacagcgtgaggccactagcgtgcacgacttgaatgataaacttgaaaacgaaatagcgaacaaagactccatgcatagacagaccgaagacaagaatagacaactccaggagcgtttagaactcgcagaacagaagctccaacagacgttgcggaaggcagaaacccttcctgaggtggaggccgagcttgcacagagagttgctgcactctcaaaggcagaagagaggcacggcaacatcgaggagcggcttagacagatggaggcccagctggaagaaaagaaccaggagttacagcgggccaggcagcgagagaagatgaatgaggagcataacaagcgtctatcagataccgttgacaagctgctctccgaatccaacgagcggctacagcttcacttaaaagaaagaatggccgctctcgaagacaagaattcgctgctgcgagaggttgagtcggcaaaaaagcagttagaggaaactcagcacgacaaagaccagctggtacttaacatagaggcactgcgggccgagctggaccacatgcgcctgcgcggggctagcctccaccacggtcgcccacacttaggctctgtaccggactttagattccctatggcagacggtcatacggacagttactccacatcagcagtgcttaggagacctcagaagggcagattggcagctttgcgcgatgaaccgtcaaaggtacagacactgaatgagcaggattgggagcgagctcagcaggctagtgtgctggccaatgtggcccaagcctttgaatctgacgctgatgttagtgatggggaggacgatcgtgacaccctcctgagctccgttgatctcctcagtccttccggacaggccgatgctcatacattggcaatgatgctacaggaacaactggatgctataaataaggagatccgcctcatacaagaagagaaagaaaatacggaacagcgggctgaggaaattgaatctcgggtgggatccggaagtctggacaatctgggaaggttccgatcgatgtcttctatacctccctacccagcttccagcttggccagcagctctccccccggatctggaagaagtacccccagacggataccccacagtccagcccgcgaagtagaccggctgggggtgatgacactgctccctcctagcagagaagaggtcagggacgataaaactaccatcaagtgtgagacctcgcccccaagtagcccccgcgccctccgattggacaggctgcacaaaggtgcgctgcacacagtctcacatgaagacatcagggacatccggaactcgacaggcagtcaggacggaccagtttctaaccctagttctagcaactcgtcccaggactctcttcataaggcccctaagaagaagggcatcaagtcttccattggtaggctgttcggtaagaaagagaaaggcaggcctgggcagaccgggaaggaagcactgggccaggccggcgtctccgagaccgacaacagctctcaggatgcactgggcctctcgaaactggggggtcaggctgagaaaaacagaaaattgcagaaaaagcatgagctcctggaagaagctagaagacagggcttgccgtttgcccagtgggacgggcccactgtggttgtctggctcgagctgtgggtgggtatgcccgcctggtatgtggccgcctgtagagccaacgtaaagtcaggagctatcatgtccgcattatccgatacagaaattcagagggagatcggtattagcaatccgctccacaggcttaaacttaggctagcaatacaagaaatcatgtccctgacgtccccgtccgccccgcctacgagccgcaccactttggcttacggggacatgaaccatgaatggatcggtaacgaatggctgccgagccttggtttgccacagtaccgatcatacttcatggagtgtttagtggatgcccgaatgctggatcacctgactaagaaggatctgcgcggacagcttaaaatggttgacagtttccaccgcaactcctttcagtgcggcattatgtgtctgaggcgactgaattacgaccgcaaagaactcgagcgaaagcgagaagagtcgcaaagtgaaatcaaagacgtgctggtgtggagtaacgaccgggtcatacgctggatcctctctatcggcctgaaggagtacgccaacaacctgattgagtctggggtgcacggtgccttgttagctctagatgagacctttgactttagtgcgctagcattgctactccaaatcccaactcagaacactcaggcccgagcagttctcgaaagggagttcaataacctgctggtaatgggcacagatcggagattcgacgaagatgatgacaagtcatttaggcgggctccctcctggcggaaaaaattcagacccaaggacatccgaggtctggctgctgggagcgctgaaacacttcccgctaacttccgggttaccagctcgatgtctagtccgtctatgcagcccaaaaagatgcagatggatggaaatgttagtggcacacagaggctggattcggccacagtgaggacatattcttgctag

SEQ ID NO: 201735 - DNA, 3558 bp, synthetic construct
  misc_feature 1..3558: note = Description of Artificial Sequence: Synthetic coding sequence
  source 1..3558: mol_type = other DNA
atgatgtgcgaggtgatgcccaccatcagcgaggccgagggccccccaggaggaggcgggggacatggaagcgggtcaccgagtcagcccgatgctgactcccatttcgaacaactgatggtctccatgctagaggagagagatcggctgctggacacccttagagaaacacaggagacactggccctgacgcagggcaaacttcacgaagtgggccatgaacgcgacagcctccagcggcaactcaataccgctcttcctcaggagtttgccgccctcactaaagagctgaacgtttgtcgggagcagctcctggagcgcgaagaggagattgccgaactgaaagccgagaggaacaacacacgtcttttgcttgagcacttggagtgccttgtctctcggcatgagcgctccctgagaatgactgtcgtcaagagacaggcccaatccccagctggcgtaagctctgaggtggaagtcctgaaagctcttaaaagcctttttgaacatcataaggccctcgatgagaaagttcgtgagagactaagagtggcactggagagatgctcccttctcgaggaagaacttggcgctacacataaggaactgatgatcttgaaagaacagaataaccaaaaaaagacactgacagatggagtgcttgatattaatcacgaacaggaaaacacgcccagcacctctggcaaaaggtccagcgacggatccctgtctcatgaggaggatctggccaaggtgattgaactgcaggaaattatcagcaaacagagccgggagcaatcccaaatgaaagaaaggttggccagcctatcaagccatgtgacagagctggaggaagatctggatacagctaggaaggacctgatcaagtctgaggaaatgaacaccaaactgcaaagggatgtgcgcgaggctatggcacaaaaagaagatatggaagaaaggattacaacactggagaaacgttacctagcggctcaaagggaggcaacctccgtgcacgatttaaatgacaaactggagaatgagatcgcaaacaaagattctatgcacaggcaaaccgaagataaaaatcgccagttgcaggagcgattggagctggcagagcagaaactgcaacaaactctccgtaaggcggaaacactgccggaggtggaggccgaattagcccagagagtcgcggcattgtccaaggccgaagaacgacacggaaacatcgaggagcggttacggcagatggaggctcaactggaagagaagaatcaggagctgcagcgcgccagacagcgagagaaaatgaatgaggagcacaacaaaaggctttctgacaccgtggataagcttctttcggaaagcaatgagcggctgcagctgcaccttaaggagagaatggccgccctcgaggataagaactcactgctccgggaggtggaatcagcaaagaaacagttagaagagacacagcatgacaaagatcaactggtgctgaacattgaggcccttcgggccgaattagaccacatgcgcctccgtggagcatcactccatcatgggcggccccatctaggatctgtccctgactttcgtttcccaatggccgatggccatacagatagctactcgacctctgccgtcctgcggcgccctcagaagggacgacttgctgccctaagagacgagccatcaaaggttcagacacttaatgagcaggattgggagagagcacagcaggcttcagtgttggccaatgtcgcccaggccttcgagtccgacgctgatgttagcgatggagaagatgatagagataccttgctgtcttcagtggacctgttgagcccaagcggtcaggccgacgctcatactctggccatgatgttgcaggagcaactggatgcaattaacaaagaaatcaggctcatacaggaagagaaagaaaacaccgagcaacgagccgaggagatcgagagccgggttggctcagggagcctcgataatttgggcaggttccgatctatgagttcaatccccccatatcctgccagcagtcttgcctcttcatcgcctcctggatccggacgaagcacacccagaaggatcccacactcccctgcacgggaggtggatcgtttgggtgttatgacactgctcccccctagccgggaagaggtgcgagatgacaaaacgaccatcaaatgcgagacgagcccgccctctagcccaagagctcttagattggaccgactgcacaaaggggcactgcatactgtgtcacacgaggatatccgggacattagaaacagcaccggctcacaggacgggcccgtgtcaaacccttcctcatctaattcctcccaggacagcttgcataaggcccctaagaaaaagggcataaagagctcaatagggaggctatttggtaaaaaggaaaaaggcagaccggggcagaccgggaaagaagcactagggcaagcgggggtgagcgaaactgacaacagcagccaggatgcactgggcctcagtaaactgggcggccaggccgagaagaatagaaaattgcagaaaaagcatgaactactcgaggaggccaggcgccagggcttaccctttgcccagtgggacgggccgaccgtagtggtgtggctggagctgtgggtggggatgcctgcatggtatgtcgcagcttgcagagctaacgtcaagtccggggccatcatgtcagccctgtccgatactgaaattcagcgggagattggtattagcaacccactccatcgcctcaagttgaggctggctatacaggaaatcatgtctttaacctctccgtctgctccgcctacaagccgcacaaccctggcttatggcgacatgaatcatgagtggataggtaatgagtggctccccagcctgggcctgccccaataccggtcatattttatggagtgcctggtggatgctcggatgctcgaccatcttaccaaaaaagacctgcgggggcagctgaagatggttgactctttccaccgtaactccttccagtgcgggattatgtgtctaaggcggctcaactatgacaggaaggagctggagcggaaacgggaggagtcacaatctgagattaaggacgtcctggtgtggagcaacgacagagtgatccgctggatcctgtcgattggcttaaaggaatatgccaataacctgatcgaatctggggtacacggggccctgctggctcttgacgagacttttgatttcagtgcattagcactgctcctgcaaatccccacacagaacactcaagctagggcggtcctggaaagagagttcaataacttgttagtcatgggaaccgaccgtcggttcgacgaagacgacgataaatcatttagacgggcccccagctggcggaagaaattccgaccgaaggacatccgaggactcgccgcggggtcggcagaaactttgccagccaattttcgtgtgacctctagtatgtcttcaccgagcatgcagcccaaaaagatgcagatggacggcatgtag

SEQ ID NO: 201736 - DNA, 477 bp, synthetic construct
  misc_feature 1..477: note = Description of Artificial Sequence: Synthetic coding sequence
  source 1..477: mol_type = other DNA
atgatgtgcgaggtgatgcccaccatcagcgaggccgagggccccccgggaggtgggggcggacatggcagcggcagtcctagccagcctgacgcagattctcacttcgagcagctgatggtgtcaatgctggaggaaagggaccgtttgttggatacgttgagggaaacacaggagacattggcgttgactcagggtaagctccacgaggtgggccacgaaagagatagtctgcagagacagctcaacacggctctgccccaggaattcgctgctctgactaaagagctgaacgtatgccgcgaacagctgctggagagggaagaggagatagctgagctaaaggccgagcggaacaacacgcggctattactcgagcacctggaatgtctcgtcagtcgccacgagcgctctctgcgcatgaccgtagttaagaggcaggctcagtcacccgccggagttagcagcgaggtttag

SEQ ID NO: 201737 - DNA, 300 bp, synthetic construct
  misc_feature 1..300: note = Description of Artificial Sequence: Synthetic coding sequence
  source 1..300: mol_type = other DNA
atgatgtgcgaggtgatgcccaccatcagcgaggccgagggccccccaggcgggggtggcggacacggcagcgggtctccatctcagccagatgcggactctcatttcgagcaattaatggtctccatgcttgaagagcgggacagacttctggacacactccgtgagactcaggaaactttggcactcacacagggcaaactccacgaggttggacacgaacgggattcactgcagcggcagctcaacacagctctaccacaggagtttgccgcattaacaaaagagctgaacgtgtag

SEQ ID NO: 201738 - DNA, 2100 bp, synthetic construct
  misc_feature 1..2100: note = Description of Artificial Sequence: Synthetic coding sequence
  source 1..2100: mol_type = other DNA
atgcggctgcggggcgccagcctgcaccacggccggccccacctggggagcgtccccgatttccgctttcctatggccgacggtcacacagactcttattcaaccagcgccgtcctgcgaagaccccagaagggcagactcgccgcacttcgcgacgagccaagtaaagtgcaaaccttgaacgagcaggactgggagagagcacagcaggccagcgtgctggctaacgtggcccaggctttcgaatccgacgctgacgtgtccgacggcgaagacgatcgtgacactttattaagttccgtggacctgctgagcccctcaggccaggctgacgcccataccctggccatgatgctccaggaacaactggacgccatcaataaggaaatccgccttattcaggaagaaaaggagaatacagagcagcgggcagaagaaattgaatccagggttggtagcggttccttggataatctggggaggtttcggagcatgtcatcaattccaccttaccctgcttcttcattagcctcttcttcacctcccggatcagggaggagcaccccacgccgcattccacattccccggctcgcgaggtggaccgcctcggggtcatgaccctgccttccgaccttagaaaacaccggcggaagttgcctccatccagggaagaagttcgcgatgacaagactaccatcaagtgcgagactagtcctccatcctctcccagggccctgcggctcgatcggctgcacaagggagccctgcacaccgtttcccatgaggatattagagatatccggaatagtacaggatcccaggacgggcctgtgtccaatccctcaagttccaacagttcccaagatagtctccacaaggctccaaaaaagaaaggaattaagtcaagcattggaagattgtttggtaaaaaggaaaaaggccggccaggacagacaggcaaagaggcacttgggcaggcaggagtctctgaaactgacaatagctcccaggatgcattggggttgtcgaaactcggcggtcaagcagagaaaaatcggaaactccagaaaaagcacgagctcttagaggaagctaggaggcaaggactcccatttgcgcagtgggatggacccactgtggtggtttggttggagctgtgggtcggcatgcctgcctggtacgtggccgcatgtcgggccaacgtgaaatctggggccattatgtcggctctgtccgacacagaaatccagcgcgaaattggcatctctaatcctttacatagactgaagctgcgccttgcgatacaggaaataatgagcctgacatccccgtccgccccacctacttccaggaccaccttggcttatggagatatgaatcatgaatggatcggcaacgagtggctgcccagcctgggtcttccccagtaccggtcatacttcatggaatgcctggtggacgcccgaatgcttgaccaccttacaaagaaagacctgcgtggacagctgaaaatggtggatagtttccacagaaattcttttcagtgtggtattatgtgcctgagacggctcaattatgacaggaaagaactggagcgtaaacgagaggaaagccagtctgagatcaaagatgtacttgtgtggagcaatgatagagtaataaggtggatactaagcattgggctaaaggaatacgccaataacctcatcgagtctggtgtgcatggtgccctgttagcccttgatgagaccttcgatttctctgctctggcgctccttctgcaaatcccaacacaaaacacccaggccagggcagtgcttgaacgcgagttcaataaccttctcgtcatgggcaccgacagacggtttgatgaggacgatgacaaatcttttaggcgcgcgcctagctggcggaagaaattcaggccgaaagacatccgaggccttgcagcgggctccgctgaaactctgcctgctaactttagggtgacgagctctatgtctagtccatccatgcaacccaaaaagatgcaaatggatggaaacgttagtggtactcaacgattagactcggccaccgtgaggacgtactcatgctag

SEQ ID NO: 201739 - DNA, 3585 bp, synthetic construct
  misc_feature 1..3585: note = Description of Artificial Sequence: Synthetic coding sequence
  source 1..3585: mol_type = other DNA
atgatgtgcgaggtgatgcccaccatcagcgaggacggccggcgggggtccgcacttggccccgatgaggccggtggagagttagagagactgatggtcactatgctcactgaaagagaaagactacttgagaccttacgcgaggctcaggacggcctagccacggcccagctcaggctgagggagctgggacatgaaaaagacagcctgcagcggcagctttctattgctctgccgcaggaattcgcagctttaaccaaggaacttaacctctgtcgcgagcagctactcgagagggaagaagaaatagccgaactcaaggctgagagaaacaacacccgtctcttgctagaacacctcgaatgtttggtgtctcggcatgagcggagtttgcggatgaccgtggtgaaaagacaggctcagtcacccgggggcgtgtcttcggaagtggaagtgctgaaggccctgaaatccctgtttgagcatcataaggctctggacgaaaaagtgagagagcgccttcgtatggccttggagcgagttgccgttcttgaagaagaactagaactgtccaatcaggaaactctcaatcttcgggaacagctcagcagacggaggtcaggtctggaggagcccggcaaagatggggacggacagacccttgcaaatggcctgggacccggcggcgatagcaatcggcgcaccgcagaacttgaggaggccctggagcggcaacgggcagaagtctgccagttgcgcgaacgcctggctgtcttgtgcagacagatgagtcagctggaagaagaactcgggaccgctcatcgagaactcggcaaggccgaggaggcaaactctaagctgcagcgagacctcaaagaagcacttgcccagcgcgaagacatggaggaaaggattacgacactagaaaagcggtacctcagcgcacaaagggaagcaaccagtttgcacgatgctaacgataagctggagaacgagctcgcgtctaaggagagtctgtaccggcagtctgaggagaagtctagacagcttgcagagtggctggatgacgctaagcaaaaactgcagcagacactccagaaggctgagacattgcctgagattgaggcccagctcgcccaacgcgtagccgcgctgaacaaggcagaggaaagacatggcaattttgaagagcggctcagacagctggaagcccagttggaggagaagaaccaagaactccaacgagcgaggcagagggaaaagatgaatgacgaccataacaagcgtctgtccgaaaccgtggataaactactgtcggagtccaatgagaggctgcaattgcatctgaaggaacgcatgggagcactggaagagaaaaacagcctcagtgaggaaattgccaatatgaagaaactgcaagatgagctactgttaaataaggaacagttgttggccgaaatggagcgaatgcagatggaaattgatcaattacgaggacgtcccccttcaagctactcgagatctctgcctggaagtgccctggaactgcggtattcccaggcccccaccctgcccagcggtgcacacctggatccgtacgtcgctggcagcgggcgtgccgggaaacgcggaagatggtcaggtgtcaaggaggagcccagcaaggactgggagcgctcagcaccagccggctccataccaccccccttccctggtgagctggatgggtctgacgaggaagaggccgaaggcatgtttggagccgagctgctgagtccatcaggccaggccgacgtccagaccctggcgattatgctgcaggagcaattggaagccataaataaggagattaagctaattcaggaggaaaaagaaacgaccgaacagcgcgccgaggagctggaatcgcgggtgtccagcagcgggctggattcactcgggaggtatcggtcctcttgttcattgccacctagcctgaccaccagtactctcgcaagcccctccccacctagcagcggacacagcacccccagattggctccccccagccccgcaagagaagggactgataaagccaatcatgtcccaaaggaggaggcaggggcccctcgtggtgagggacccgcgatcccaggcgacacacctccccctacacctaggagcgcccgtctggagaggatgacgcaagccctcgcgttgcaggcagggtcgctggaggatgggggccctccgaggggcagcgaaggaaccccagactctctgcacaaggcccccaagaagaagtcaatcaaatcttctattggaaggctgttcggaaaaaaagaaaagggacgaatgggtccccctggaagggatagttcatccttagcaggaaccccttcagacgaaaccctggctaccgaccctttggggctggcgaaacttaccggccccggtgataaggaccgccgtaataagcgcaaacatgaactgctggaggaagcttgccggcaagggcttcccttcgccgcctgggacggccctacagtagtctcatggctcgagctctgggtgggcatgccggcatggtatgtagctgcttgtagagcaaacgtgaagagtggtgcaattatggccaatttgtctgatacagaaatccaacgggagataggaatctcaaatccccttcataggttgaaactgcggcttgccattcaggagatggtgtcactcaccagccccagcgcccccgcttcttcacgcactagcactggaaatgtgtggatgacgcacgaagaaatggagagcctgaccgcgaccaccaagccagagactaaagaaatatcttgggaacagattctggcctatggggatatgaaccacgaatgggtgggcaacgattggctgcctagcctcggccttccacagtatcgatcgtattttatggagagtttggtcgatgcccggatgctggaccacttaaacaagaaggagctccggggccagctgaagatggtggacagcttccacagagtctccctgcactacggaattatgtgtctcaagcgcctgaactacgacagaaaggacctggaaagacgcagggaagaatcacagacccagatcagagacgtgatggtttggagtaacgagcgcgttatgggttgggttagcggactcggcctgaaggaattcgccactaacctgactgagagtggcgttcatggggccctcctggccttggacgagaccttcgattatagtgatctcgcactgcttctacaaatccccacccagaatgctcaggctcgccagttgctggaaaaggaatttagtaatttgatctccttgggcacagataggagacttgatgaagactcagcgaagtcattttctcgcagcccgtcatggaggaagatgttcagggagaaagatctgcgtggcgtgaccccagacagtgccgaaatgctgccgcctaatttccggtccgccgccgccggggccctgggcagtccgggcctgcctctacggaaattacaacctgaggggcagacttccgggagctcaagagcggacggtgtgtcagtacggacatactcttgttag

SEQ ID NO: 201740 - DNA, 1731 bp, synthetic construct
  misc_feature 1..1731: note = Description of Artificial Sequence: Synthetic coding sequence
  source 1..1731: mol_type = other DNA
atgagcggccaggagttcgccgccctgaccaaggagctgaacctgtgcagagagcagttgctggaacgcgaagaggaaatcgccgagctcaaggctgagcggaacaacaccagattgctgctcgagcatctggagtgcttggtctcacgccatgagcgcagcctgcggatgaccgtcgttaagcgccaggcccagagccccggaggtgtgtcctcggaggtggaggtgctgaaggctctgaaatccctgtttgaacaccataaggccctcgatgagaaagttcgcgagagactgcgcatggcactcgagcgcgtggcagtgctggaggaggaattggagctatctaaccaggagacattaaacttgcgggaacaattatctcgtcgtcgctctggcctcgaggagcccgggaaagacggcgatgggcagaccttggcaaacggcctgggccccggcggcgacagcaaccggcgcactgctgagctcgaggaggcactggagcggcaaagggctgaagtgtgccagctccgtgagcgtctcgcggttctgtgcaggcaaatgtcgcagttggaagaggaactcggtacagctcaccgcgaactgggcaaagcagaagaggccaatagtaagttgcagagggatctgaaggaggcacttgctcaacgcgaagacatggaggagcggatcacgaccctcgaaaaaaggtatttgtctgcccagagggaggctacctcactgcacgatgccaatgataagcttgaaaacgagttggcctctaaagagagcttatatagacaatcagaagagaagtccaggcagcttgcagagtggctggatgatgcgaaacaaaagctgcagcagaccctccagaaggccgagaccctacctgaaatcgaggcacagctggctcagcgggtggcagctctcaacaaggccgaagagaggcatggaaactttgaagaacggctcagacagcttgaggcccagctggaggagaagaatcaagaactccagagggcaaggcagagggagaaaatgaatgatgaccacaataaaaggttatctgagactgtggacaagctactgagcgaatcaaatgaaaggctccaacttcacctgaaagagcgcatgggtgcccttgaggagaagaattccctatccgaagagatcgccaatatgaagaagttgcaggacgagctcttacttaacaaggaacaattgctcgctgaaatggagcggatgcagatggagatagaccagctcaggggcaggcctccttcttcctatagccggagccttccggggagtgcactggagctgaggtacagccaggcccctacactgccaagcggcgcccacctcgacccttacgtggcaggatccggacgggcgggtaaaaggggaagatggagtggcgtgaaagaggaaccatctaaagattgggagcggtccgcaccagcaggatcgattccaccaccgtttccgggcgagctggatggaagtgacgaggaggaagcagaaggtatgtttggcgcagagctcttatctcctagtggacaggccgatgtgcaaactctggcaattatgttgcaagaacagttggaagcaatcaataaagagattaaaatcatgagccttcggagaaaactggaacttcatgagggtagaggtcgacctagtcaagagaccccacaccaccccctccccgccttgcccgtgctgagagaatag

SEQ ID NO: 201741 - DNA, 4338 bp, synthetic construct
  misc_feature 1..4338: note = Description of Artificial Sequence: Synthetic coding sequence
  source 1..4338: mol_type = other DNA
atgcggcggctgctggagccctgctggtggatcctgttcctgaagattacatcgtctgtgttgcactacgtggtgtgctttcctgcactgacagagggttacgtcggtgccctgcacgaaaacagacacggcagtgcggtccagattagacgtaggaaggcctctggcgacccctattgggcctacagcggagcatatgggcctgagcattgggtgacaagctccgtctcctgcggaggacgccatcaatccccgatcgacattcttgaccagtatgcaagggtaggcgaagaataccaggaactgcagctggatggcttcgacaatgaatcatcaaacaagacctggatgaaaaatacagggaaaactgtggcaatcttgctcaaggatgactacttcgtatctggcgcaggactgccaggacggtttaaggccgagaaagtagaattccactggggccattccaacggcagtgctgggagtgagcactcaatcaacggacggcggtttcctgtggaaatgcagatcttcttctacaatccagacgatttcgactctttccagacagccatcagcgagaatagaattatcggtgccatggctatattttttcaggttagtcccagagataattcagcattggatccgatcatacacggtctgaagggagtggtgcatcacgagaaggaaacctttctggaccctttcgtccttcgcgatctgctgcctgcgtctctgggaagctactataggtacaccggttcactcactacccctccctgcagtgagatcgtagagtggatcgtctttcggagaccggtgcccattagctatcaccagttggaggccttttactcgatctttacgacagaacaacaagaccacgtcaagtctgttgaatatctgagaaataactttcggccacaacagaggctgcacgatcgcgtggtgtcgaaatcggctgtccgtgactcatggaatcacgacatgaccgactttctagagaacccactaggcacagaggcgtcaaaagtgtgtagttctcctcccatccatatgaaggtgcagccattgaaccaaaccgcattacaagttagctggtcccagccagagactatataccaccctcccatcatgaattatatgatatcctacagttggacaaaaaacgaggatgagaaggagaagacttttacgaaagactctgataaggatctcaaggctacaatttcacatgttagccctgattccctctatctgttccgtgtgcaggccgtctgtagaaacgacatgcgatccgatttttcacagaccatgctatttcaagcaaatacgacacgtatttttcaaggtacaaggattgttaaaacaggcgttcctactgcgagccctgccagttcggccgacatggcgcccatcagctctgggtcttccacctggactagctctggtatccctttctcctttgtgagtatggccacaggcatggggccttcgagtagcggttcgcaggcaactgtggcaagcgtcgtgacctccactctgttggctggtctgggattcggtggtggcgggattagcagttttccgtcgaccgtgtggccaactcgattacccaccgctgcctccgcctcaaaacaggcagccagacccgtcttagcaaccacagaagcactggcttcacctgggccagatggcgattcctccccgactaaggacggtgagggcacagaggaaggcgagaaggatgaaaaatccgaatcggaagatggggagcgggagcatgaagaagacggcgagaaggattccgagaaaaaagagaagagcggagtaacccatgccgcagaagaacgtaaccaaactgaaccgagccctacacccagcagccctaatagaacagccgagggaggccaccagaccatcccaggccacgaacaggaccatactgcagtgccaacagatcagaccgggggacgtcgcgatgccggccccggtcttgaccctgatatggtcacctccactcaggtgccccctacagccaccgaagagcagtacgccggcagcgatcccaaaaggcctgagatgccctcaaaaaaacctatgagcagaggtgaccgtttctcggaagactcgcgattcatcaccgtcaaccccgccgaaaagaacacttcggggatgatttctcggccagctcctggaagaatggagtggatcatcccactcattgtcgtctccgcactcaccttcgtgtgcttgatcctgctgattgcagttctggtatactggcgcggctgcaataagatcaagagcaagggatttccgcggagatttcgcgaagttccatcgtctggagagagaggggagaagggcagccggaaatgctttcagacagcccatttttacgttgaggacagctcgagtcccagagtagtgccaaacgaatcaattccaattatacccataccagacgatatggaggcgatcccagttaaacagttcgttaagcacatcggcgagctctacagtaataaccaacatgggtttagcgaggatttcgaagaagtccagcggtgtacagcggacatgaatatcactgccgaacacagcaaccatccagagaacaagcacaagaacagatacataaatatcctggcctacgaccatagccgggtgaaacttcgcccgctcccggggaaagacagcaaacatagcgactacattaacgctaattatgttgacggatacaacaaagcgaaagcttacatcgccacccaaggtcctcttaagagcacattcgaagatttttggcgcatgatctgggaacagaataccggtataatcgtcatgatcacaaatttggtcgagaaaggacgaagaaagtgcgaccagtactggcctacggagaattccgaggagtacggtaatataatcgtgacactgaagtccacaaagatacatgcgtgctataccgtccgaagatttagcatccggaatacaaaagtcaaaaaaggacaaaaaggaaatcctaagggtaggcagaatgagcgggtggttatccagtatcattacacccaatggcctgatatgggggtacccgagtatgccctgcccgttctcacatttgtgaggcggagcagcgctgccagaatgccagaaacagggccggtactggtccactgctcagcgggcgttggacggaccggaacgtacatcgtcatcgactcaatgctgcagcaaatcaaagataagtctaccgttaatgttttgggctttctaaaacatatcagaacacaaaggaattatctggttcagaccgaggaacaatatattttcatccacgacgccctgttagaagctattctgggcaaggagactgaggtgagcagcaaccagcttcacagttacgtgaatagtatccttatccctggcgtggggggaaaaacccgcctcgagaaacagtttaagctggtgactcagtgcaacgccaaatatgtcgagtgtttttcagctcagaaggagtgcaataaggaaaaaaacagaaactcttctgtggtgccttctgagcgggccagggtgggtctggcgcctttacccgggatgaaaggcactgattacataaacgcatcatacatcatgggctactacaggtcaaatgaatttataattactcagcaccccctgcctcacaccactaaagacttttggagaatgatatgggatcacaacgctcagattatcgttatgttgcctgataatcagtccctcgctgaagatgagttcgtctactggcccagcagggaagagtcaatgaattgtgaggcttttaccgtgactctgatttctaaggaccgtctttgcctctcaaacgaagaacagatcatcattcacgacttcatactcgaggccacccaggatgactatgttctcgaagttaggcacttccaatgtcctaagtggcctaatccggatgccccaatctcaagcacatttgagttaattaatgtgattaaggaagaggccttaacacgagatggcccaactatcgtgcacgacgagtacggagccgtgtccgccggcatgctgtgcgcgctgaccaccctcagccagcaattggagaatgaaaatgccgtcgacgtttttcaagtcgccaagatgataaacttgatgcgccccggcgtgttcactgacatcgagcagtatcagtttatatacaaagcaatgctctctctcgtaagtactaaggaaaatggcaacggtccaatgaccgtggataagaacggcgccgtgctcatagctgatgaatcagacccggcagagagtatggaatcactggtatag

SEQ ID NO: 201742 - DNA, 309 bp, synthetic construct
  misc_feature 1..309: note = Description of Artificial Sequence: Synthetic coding sequence
  source 1..309: mol_type = other DNA
atgcggcggctgctggagccctgctggtggatcctgttcctgaagatcacaagcagcgttcttcactatgtcgtgtgttttcctgcactgactgaagggtatgtaggcgctttgcacgaaaacaggcacggcagcgctgtgcagatcaggaggcgcaaagcaagcggagatccatattgggcttactccgggaagtccagttgctcaaatggagaccataccggacagctgacctcacattctactcatctgaaggctcactttgagtccttgttgtgtttaagctctgtgtgcagcaatttatcctag

SEQ ID NO: 201743 - DNA, 2814 bp, synthetic construct
  misc_feature 1..2814: note = Description of Artificial Sequence: Synthetic coding sequence
  source 1..2814: mol_type = other DNA
atggccggcgccggcggcggcctgggcgtgtggggcaacctggtgcttcttgggctttgttcttggactggcgcccgtgcacctgcgcctaacccaggcaggaatttgacagtcgagacgcagacaacctcttctatctccctcagctgggaagtacccgacggactggactctcagaattccaattattgggtgcagtgcaccggtgacggaggaacaacagagactagaaacacgactgctactaacgttaccgtcgatggactcggcccgggcagcctatacacatgttccgtctgggtagagaaggacggcgtgaattcaagtgtgggcaccgtcaccaccgccaccgcacctaatcccgtgcggaatttaactgtcgaagctcagacaaatagctcaattgctctgacctgggaagttcctgacggaccggatccccagaatagtacatatggggtagagtacactggcgatggaggtagggcaggtactcgcagtacggcacataccaacatcaccgtggatcgtcttgagccaggatgcctgtacgtgttctccgtgtgggtcggcaagaacggtattaattccagccgcgaaacacggaatgccacaaccgcacccaatcctgtgcgaaaccttcatatggagacccagactaattcctccattgcactgtgctgggaggtgccggacggaccctacccccaagattatacttactgggttgaatatactggggatgggggcggaacagaaactcggaacacaacaaatactagcgttactgccgaacggctggagcccgggaccttatatacgttcagcgtctgggcagagaaaaacggtgcaagaggtagtagacagaacgtctctatctcgaccgtgccaaacgccgtcacatctcttagcaagcaggactggacaaactcgacaatagccttgagatggactgcgcctcagggacccggacagagctcttattcctattgggtttcctgggttagagagggaatgaccgatcctagaactcagtccacgtctggcaccgacatcacgctgaaagaacttgaagcgggctccctttaccatcttactgtatgggcggagcgcaatgaagttagggggtataattccactcttactgccgcaaccgcaccaaacgaggttaccgacctccaaaatgagacacaaaccaagaattccgtaatgctgtggtggaaagcccccggcgatccacactcacagctgtacgtctattgggtgcaatgggcctcaaaagggcaccccagaaggggacaggatcctcaggccaattgggtgaaccagacctctcggacaaacgaaacctggtacaaagtcgaagcgctcgagcccgggacactctataacttcaccgtgtgggcggaaagaaatgacgtggcctctagcacacagtccttatgtgctagtacatatccagatacggtgacaatcacatcttgtgtttctacatctgcgggctatggagtcaacctgatatggtcctgccctcaaggaggatatgaagcctttgaacttgaagtcgggggccaacggggatcccaggacagaagctcgtgcggcgaggcagtgtctgtcctgggactaggacccgcgaggtcgtacccagcgactataaccaccatctgggacggcatgaaagtcgtgagccacagcgtcgtctgtcacacagaatctgcgggcgtcatcgcaggtgctttcgtagggatactacttttcctcatcctggtggggttgctgatcttctttcttaagaggcgaaacaaaaagaagcagcagaagccagagctaagggacctggtgtttagcagtcctggagatatccctgccgaggactttgcagaccacgtcaggaaaaatgaaagggatagtaactgcggctttgcagataagtatcagcaactcagtttggtcggtcactctcagtcccagatggtggccagtgctagcgaaaataacgcaaagaacagataccggaacgtattaccatatgactggagtcgagtgcccttgaagcctatccatgaagagcccggctcagactatatcaacgcgtccttcatgcccggtctgtggtctccgcaggagttcatcgcaactcaggggcccctcccacagacagtcggagacttttggcgtctcgtttgggagcagcagtcccacacccttgtgatgctcacgaactgcatggaggctgggcgggtgaaatgtgaacattattggccactcgactcacagccttgtacacatgggcacctgagggtgaccttggtcggagaggaggtgatggaaaactggactgtcagagaactattgctcttacaggtagaggagcagaagacactgtccgtgagacaattccactaccaggcctggcccgaccacggcgtgccctcctcacccgacacactcctggcattctggcgcatgctgcgccaatggctggatcagaccatggagggcggaccccctatagttcactgttctgcaggggtggggcgaacaggtacgctcatcgccctcgatgttctgcttcggcagctccaaagcgagggtttactcggcccatttagtttcgtgaggaagatgcgcgaatcgcgccccttgatggtgcagactgaagcccagtacgtttttctgcaccagtgtattctacgctttctacagcagagtgcgcaagcccctgcagagaaagaggttccctacgaggacgtcgaaaacctcatatacgaaaacgtcgccgccatacaggcccacaaactggaagtttag

SEQ ID NO: 201744 - DNA, 3348 bp, synthetic construct
  misc_feature 1..3348: note = Description of Artificial Sequence: Synthetic coding sequence
  source 1..3348: mol_type = other DNA
atggccggcgccggcggcggcctgggcgtgtggggcaacctggtgctgctgggcctttgctcgtggacaggcgcccgggctcccgcgcctaaccctggacgcaacctgaccgtcgagactcagaccacgtcaagcatttcactcagttgggaagtacccgacggtctggacagccaaaactcaaactactgggtacagtgtacgggagacgggggaacaaccgagaccaggaatacaactgctaccaatgtgaccgtggacggactaggccccggctcattatatacctgctctgtctgggtagaaaaggacggagttaactcttctgttggcaccgtgaccaccgcaaccgccccaaatcccgtaaggaatttgagagtggaagcccaaacaaatagcagcattgcacttacttgggaggtcccagatggcccagatccccagaactccacctatggggtggagtatacaggggacggaggccgagcaggaacacgctccacagcccatacgaatattacagtggatggcctcgaaccaggctgtctttacgccttttccatgtgggtcggtaaaaatggcattaactcctccagagaaacccgcaacgccaccactgctcacaatcctgtgcgtaacttacgagtcgaggctcaaaccacatcttcgattagcctgtcttgggaagtcccagacggcacagacccacagaactctacttactgcgtgcagtgcacaggggacggaggcaggaccgaaacacggaacactacagacacccgggtgactgttgatgggctgggtccaggatcactgtatacttgttcagtttgggtggaaaaggatggtgttaattctagtgttgaaatcgtaactagtgctactgctcctaacccagtcaggaatctcaccgtcgaggcccaaacaaattcttctatcgctcttacttgggaagttccagacgggcccgaccctcagaactccacctacggagtggaatacacaggggacggggggcgcgcgggcactcggtctacggcacacacaaacataaccgtcgataggttggagccagggtgtctgtatgtgttttctgtgtgggtgggcaaaaatgggataaatagctctagggaaaccaggaacgccaccacagccccaaacccggtgcgtaatctccacatggaaacgcagactaattcctcgatcgcactctgctgggaagttcctgatggcccttacccacaggactatacttactgggtagaatataccggtgacggaggaggtacggagacaaggaatactactaatactagtgttactgccgagcggctggagcctgggacactttacaccttctcagtgtgggctgagaagaacggggcaagagggtcacggcagaatgtgtccatctcgaccgtgcccaatgctgtaacgtctctgtctaaacaagactggactaactccactatcgctttaaggtggacggccccgcaaggccctgggcagtcttcctactcctactgggtgagttgggtgagagagggtatgaccgatccaagaacccagtctacctctggcacggacatcacactcaaggaattggaagccggatctttataccatctgactgtttgggccgaaagaaatgaagttcgcgggtacaattctactctgactgctgccacagcccctaacgaagtgaccgacctccagaacgaaacgcaaacaaagaatagcgtcatgttgtggtggaaagctcctggagaccctcactcacagttgtatgtttattgggttcagtgggctagcaaaggccacccccggcgggggcaggaccctcaggctaattgggttaatcagacgtctagaacaaatgagacctggtataaggtggaggctctggagccaggcaccctgtacaactttactgtatgggctgagcgcaacgatgtggccagcagcacccaatccctctgtgcttccacgtaccccgatacagtcacaatcacaagttgtgtctctacttccgcggggtatggagtaaatttgatctggtcctgccctcagggtggatacgaagcctttgaactggaggtgggggggcaaagagggagccaggaccggagtagctgcggagaggccgtttccgtgttgggattaggccccgccagatcctaccccgcgactatcaccactatctgggacggaatgaaggtggtctcccactcggtggtgtgccacacagagagtgccggcgtcattgccggtgcttttgttggaattcttttgttcttaattctggtcgggcttttgatctttttcctgaagagacgtaataagaagaagcaacaaaaacctgagctacgcgatctcgttttctctagccccggagatattccagccgaggactttgcagatcacgtgaggaagaatgaacgagactcaaactgtggcttcgctgataaatatcaacagctgtccctggtcggacactctcagagccaaatggtcgcttcagcctccgagaacaatgctaaaaacagatatagaaatgtgttgccctacgattggtcccgcgtacctctgaaacctattcacgaagaaccaggttctgattacatcaatgcctcattcatgccagggctgtggtccccacaggagttcatcgcaacacaaggtcccctgcctcagacagtcggggacttttggaggctggtgtgggagcaacaatcacatacacttgtgatgcttacaaactgcatggaggccggcagagttaagtgtgaacactattggccactggatagccagccctgtacgcatgggcatctgcgcgtcactttggtcggggaagaggtcatggagaattggacagttcgagagttattgctgctccaagtggaggaacagaagacactgagcgttcggcagttccactaccaggcctggcccgaccacggagtcccatcgtcgcccgatacccttttggcgttttggcgcatgctgcgacagtggttagaccagacaatggagggaggtccacccattgtccactgttcggcaggcgtgggacgcaccggaactctgatcgccctggatgtgctactgcggcaactgcagtccgaaggattattgggcccattcagcttcgtcagaaagatgcgcgaatctaggccactgatggtgcagacggaggctcagtacgtgttcctgcaccaatgcatcttgcggttcttgcagcaatcagcacaggctcctgccgaaaaggaagtcccttatgaagacgtcgagaatctaatttatgagaacgtggcagccatacaagctcataaactggaagtgtag

SEQ ID NO: 201745 - DNA, 1278 bp, synthetic construct
  misc_feature 1..1278: note = Description of Artificial Sequence: Synthetic coding sequence
  source 1..1278: mol_type = other DNA
atgaagcccgccgcccgggaggcccggctgcccccccggagccccggtttacggtgggccctgcccttacttttattacttttacggttggggcagatcctttgcgcaggcggcacgccgagccccattcctgacccaagcgtagctaccgtagcaaccggtgaaaatgggattactcagataagcagcactgcagagtcattccataaacagaatggcacaggtaccccccaagtggagaccaatacgtcggaggatggggagtcaagcggggctaacgacagtctcaggacccccgagcaaggttccaatgggaccgatggagccagtcagaagactcccagctccactggtccatcccctgtcttcgacattaaggccgtaagcatcagtccgaccaacgtgattctgacctggaagagtaacgatacagccgcttccgagtataagtacgtagtaaaacacaaaatggaaaacgagaagactatcacagttgttcatcagccatggtgcaacattactggattaagaccggccacctcttacgtgttcagtatcactcccgggatcggcaatgaaacctggggggacccacgggtcattaaggtgattacagagcccatacctgtgtccgatctgcgcgtggcgctaaccggtgtgcgcaaggctgctctcagctggtccaacggcaatgggaccgcatcatgtcgcgtgttactggagtcaatagggagccacgaagagttgacccaggacagccgcctccaggtgaacatttcaggcctgaagcccggagtccagtacaacatcaacccttacctgctgcaatcgaacaaaacaaaaggcgatcccctgggtactgagggtggcctggacgcatcaaacactgagaggtctcgcgccggctctccgactgcacccgtgcatgatgaatccctggtcggcccagtcgatccaagctccggtcagcagagtcgagatacagaggtgctactggtgggcctagaaccagggacaaggtacaatgctacggtgtattctcaggctgctaatggcaccgaaggccagcctcaggctatcgagtttcggaccaatgcaattcaggtctttgacgtgacagctgttaacatatctgcgacttcccttactcttatctggaaggtaagcgataacgagagcagtagcaactacacttataagatccacgtggctggggagacagatagtagtaacttaaatgtctccgagccccgcgccgttatccctggactgagatag

SEQ ID NO: 201746 - DNA, 4014 bp, synthetic construct
  misc_feature 1..4014: note = Description of Artificial Sequence: Synthetic coding sequence
  source 1..4014: mol_type = other DNA
atgaagcccgccgcccgggaggcccggctgcccccccggagccccgggctgagatgggccctgcctctgctgctccttttgctgcggctgggacagattctctgtgctggaggaacgccatctccgattcctgacccttccgttgcaaccgtcgctaccggagagaacgggatcacccagattagttcaacagcagagtctttccacaaacagaatggaacaggcacgccgcaagtggaaaccaatacctccgaagatggagaatcctctggcgccaacgattccctgcggacccctgaacagggctccaacggcacagacggtgccagtcagaaaacgccttcttctaccgggccttcgcccgtttttgatattaaggctgtgtctatcagtcccactaacgtgatactgacctggaaatccaatgacaccgctgcctctgaatataagtatgtcgtgaagcataagatggagaatgaaaagaccatcaccgtcgttcaccagccatggtgcaacattaccggcctgcggcccgctacctcgtatgtgttttccattactcccggcatagggaatgagacttggggagaccctagagtgatcaaagttatcaccgaaccgatcccagtttctgacttgagagtggccctgaccggagttcgaaaggcagccttaagttggtcaaatgggaacggcactgccagttgcagggtcctcctggagagcatcgggagccacgaagaactgacacaggattcaagactgcaggttaatatctccggactgaagcccggggttcagtataacattaacccctatctgctccaatccaataagaccaagggcgacccccttggcacagagggtggcctcgatgcttccaacaccgagcggagccgggccggctctcccaccgctcctgtgcacgatgaatctcttgttgggcccgtggatcccagctcaggccagcagagtagggatactgaagtcttgctggtcgggctggagcctgggactaggtataacgccacggtatacagtcaggccgcgaatgggacagagggacagccccaagccatagaatttaggacaaatgctatacaggtgttcgatgtaaccgctgtgaatatctcggcgacttcattgaccctgatctggaaggtgtctgataatgaatcgagttccaattacacttacaaaatccacgtggcaggtgaaaccgattcaagcaatcttaacgtgtcagagccaagggcagtgatccctgggcttaggtcttctaccttctataacattacagtgtgccctgttctgggcgatatcgagggaacacctggttttttgcaggttcacacccccccagtgccagtgagtgattttagagtgacggtggtatcaacaactgagatcggtctagcatggtcctcacacgacgccgagtcctttcagatgcacatcacacaggagggcgctggtaattctcgcgtcgaaattacgaccaatcagagtatcatcattgggggactgttcccaggaactaagtactgcttcgaaattgttcccaagggtcccaacggcactgagggggcttcccgtacagtttgcaataggaccgttccaagcgccgtgttcgatatccacgttgtgtatgtaaccaccaccgaaatgtggttggactggaagtccccagacggtgcctctgagtacgtctaccacctggtaattgagtccaaacatggaagcaaccacaccagcacgtatgacaaagccattacgttgcaggggttgataccgggtaccctgtataatatcactatttcacccgaagtcgaccacgtttggggtgatcccaatagtacggctcaatacacccgcccgtccaacgtgagtaacatcgatgtgagcactaacacgacagctgcgacactgtcttggcagaattttgacgatgcttcccccacttactcttactgcctgctgattgaaaaggcaggaaattcctcaaatgctactcaagttgtgaccgacatcggtataaccgatgcaactgtcacagagcttattcctggatcatcctatacggtcgagatcttcgctcaagtaggggacggaatcaagtcactcgagcccggacggaaaagtttctgcacagaccccgcttctatggcttcttttgattgtgaggtagtgcctaaggagcctgcccttgttctcaagtggacctgccccccgggtgccaatgcaggctttgaactagaggtatcctcgggcgcttggaacaatgctactcacctagagagctgctcttcagagaacggcaccgaatacagaacagaggtgacctatctcaattttagcacttcctacaacatcagcataaccacagtgagttgtgggaaaatggctgcccctactcggaatacatgtaccacggggattactgatcctccgccaccagacgggtctcccaatattacctcggtgtcccataatagtgttaaagtgaaatttagcggcttcgaggcaagccatggcccaatcaaagcatacgcagtgatcctgaccacaggggaggccggtcaccccagcgccgacgtacttaaatacacatacgaagatttcaagaaaggtgcttccgatacctacgttacttacctcattcgaaccgaggagaaaggtaggtctcagtccttaagtgaagtgctcaaatatgagatcgacgtgggaaacgaatccaccacattgggatattacaatggaaaactcgagcctctgggcagctaccgggcctgcgtcgccgggtttactaatatcaccttccatccacaaaacaaaggcctgatcgacggggccgagtcctatgtatcattctctcgatactccgatgcggttagcctgccacaagaccccggagtgatatgtggagcagtgttcggctgcatcttcggagctctggtcatagtgactgtgggaggatttatcttttggcgtaagaaacgtaaggatgctaaaaataatgaggtttccttttcacaaattaagccaaaaaagagtaaacttattagggtggagaactttgaggcctactttaagaagcagcaggccgactccaattgcggatttgcagaagaatatgaagacttgaaactggtagggatttcgcagcccaagtacgcggccgaactggccgagaatcggggcaagaatcgctataacaatgtcctaccgtatgatataagtcgggtgaagctttcagtgcagacacattcgactgatgactatatcaatgccaactacatgcctggctaccacagcaagaaggatttcatcgccacccagggaccgctcccgaatacgcttaaagatttctggcggatggtttgggaaaagaacgtatacgccattatcatgctaacaaagtgcgtagagcagggacgcacgaaatgcgaagagtactggccctcaaagcaggcccaagactatggcgatatcaccgttgctatgactagtgaaattgtgctgcccgagtggaccatccgtgatttcactgtcaagaacattcaaaccagtgagtcacatccactgcggcaattccacttcacctcatggccagaccacggggtcccagataccactgatttgttaatcaacttccggtatctcgtgcgcgattatatgaagcagagtcctccagagtcaccgatccttgtgcactgttcagcgggagtggggaggaccggcacgttcatcgccattgaccgactgatctaccagattgagaatgaaaatactgtcgatgtgtatggtatcgtttacgatctgcgcatgcatcgaccattgatggtacagaccgaggatcagtacgtgttcctgaaccagtgtgtgctcgatatagtgcgctcccagaaggatagtaaggtcgatctcatttaccagaacaccaccgctatgaccatctacgagaaccttgcacccgtcacgaccttcggcaagactaacggatacatcgcttag

SEQ ID NO: 201747 - DNA, 1620 bp, synthetic construct
  misc_feature 1..1620: note = Description of Artificial Sequence: Synthetic coding sequence
  source 1..1620: mol_type = other DNA
atgaagcccgccgcccgggaggcccggctgcccccccggagccccgggctgcggtgggcccttcctctgttattgttgctcctcaggctcgggcaaattctttgcgctggtgggacacccagtcccattcccgatccttcggtcgccacggttgctacaggagagaatgggattacacaaattagttccaccgcagagtcttttcataagcagaacggcacgggtacacctcaagtggagacaaacacctcagaggatggcgaatcttctggtgcaaacgattccctcagaactccagagcaaggttccaacggcacagacggcgcttcccagaaaaccccatcgagcaccggtccgagcccagtgtttgacataaaagccgtcagtattagccctacgaatgtgatcttgacatggaaaagcaacgatacagctgcgtccgaatacaaatacgtggtgaaacacaaaatggaaaacgaaaagaccattacagtcgtccaccagccttggtgtaatatcaccgggcttagacccgcaaccagctacgtgtttagcatcacccccgggattggaaacgagacttggggtgacccccgggtcatcaaagtgatcaccgagcctattccagtttcagacttgagggtggccctgacaggagttcggaaggccgcactctcatggtcaaatggcaatggcacagcctcttgccgcgttctgttagaaagcattgggtcgcacgaggagttgactcaggatagccgcctccaggtcaatatctctggactgaagccaggtgtccagtacaatatcaacccttatctcctacagtccaataaaaccaagggcgatcctctcggcacagaaggtggcttagatgcttctaataccgaaagaagtcgcgcaggatcaccaacggcccccgtgcatgatgagagcctggtcgggccagtggacccaagctctggccagcagtccagagacacagaggtgcttctggtcggtcttgaacccgggacacgatataacgccaccgtctattcacaggccgctaatggaacggaaggacagccccaagctatcgaatttcgaaccaacgctatccaggtatttgacgttacagccgtgaacattagcgcgacctctctgacacttatatggaaggtctctgacaacgagtcgtcgtccaattatacgtacaagattcacgtcgcaggcgaaacggactcatccaacttgaacgtttccgagccacgggcagtgatccccggtctgagaagctctactttctataacattaccgtgtgccccgtccttggagacatcgaaggtacccccggctttctccaggtgcatacaccaccagtgccggtgagtgacttccgagtgactgtggtaagcacaactgaaatcggcctggcctggagctctcacgacgccgagtcgttccagatgcacattactcaagagggagccggtaactcccgagttgagattacaaccaatcagtctattatcatcggcggactgtttccgggtacaaagtactgttttgaaatagtccctaagggccctaacggaaccgagggggcaagccggaccgtgtgtaacaggaccggctag

SEQ ID NO: 201748 - DNA, 4419 bp, synthetic construct
  misc_feature 1..4419: note = Description of Artificial Sequence: Synthetic coding sequence
  source 1..4419: mol_type = other DNA
atggacaccaccgccgccgccgccctgcccgccttcgtggccctgctcctcctgagtccatggcccttgctgggaagtgctcaagggcagttttcagcaggtgggtgtaccttcgatgatggaccaggcgcttgtgactatcaccaggacctgtacgatgacttcgaatgggttcatgtcagcgcacaggagccccattaccttcctccagaaatgccccaggggtcatacatgattgtggatagcagcgatcatgaccctggggagaaagccagactacagctgcccacgatgaaagaaaatgatacccactgcatcgatttcagctacctgctgtactcccaaaagggactaaacccagggactctgaatattctcgtccgggtcaacaagggccctctggccaaccctatatggaacgtaacgggcttcaccgggcgagattggctgcgtgccgagttagctgtgagtactttctggcccaacgaataccaggtgatattcgaagcagaggtaagtggcggccggagtgggtatatcgctatcgacgacatacaggtcttatcctacccctgcgacaagagccctcacttcctccggctcggagatgttgaggtaaatgccggtcagaacgctaccttccagtgtattgctactggtcgcgacgcagtccacaataaactttggctgcagcgcaggaacggggaggatatccccgttgcccagaccaaaaacatcaatcaccgtaggttcgccgcctccttcaggctgcaggaggttaccaagaccgatcaggatctgtaccggtgtgtaacccagagcgaaaggggaagtggggtttcaaatttcgctcagctcatcgtacgcgagcccccacgaccgatcgcccccccccaattactgggcgtcggaccaacctatctccttatccagctgaatgctaatagtatcattggggacggccctataatccttaaggaggtggagtaccggatgacttccggttcctggaccgagacccatgccgtgaatgctcccacctacaaattgtggcatttggacccagacacggaatacgaaatccgcgtgctgctcaccaggcccggtgaaggcggtacgggtctacccggaccaccactgattacccggaccaagtgcgctgaacctatgcgaacacccaaaacgttaaagattgccgagattcaagcaagaaggatcgcagttgactgggagtctctgggctacaacatcacccgctgccacacattcaatgtgaccatctgctatcattatttccgcggccacaacgaatcaaaggcggattgcctcgacatggaccctaaagccccacagcacgtggtgaatcatctgcccccctatactaacgtgtcactcaaaatgattctcaccaatcctgaaggaagaaaagagagcgaggaaacaatcattcagaccgacgaggacgtccccgggcctgtgccggtcaaatctctgcagggtaccagctttgagaataagatttttctgaactggaaggagccactggaccctaacgggattatcacccaatatgagatctcctattcttctatcaggtcatttgaccccgccgtgcctgttgcgggccctccgcaaacagtctccaatctgtggaattcaactcatcatgtattcatgcacctccaccctggcactacctaccagtttttcattagggcgtccaccgtcaaaggattcggaccagccaccgcgatcaacgttactacaaacatatccgcacctacactccctgattatgagggcgtggacgcgtccttaaacgagacagcaacgaccataactgtgctgttaaggccagctcaggcaaagggggctcctattagcgcatatcagattgtcgtcgaggagctccacccccatcgtactaagcgtgaggcaggcgccatggaatgttaccaggtgcctgtgacatatcagaacgctatgtccggtggagccccctactatttcgccgcggaactgccccccgggaacttgcctgagcccgcacctttcacagtaggggataataggacctaccagggattctggaatcctccactggccccacgaaagggttacaatatctatttccaggctatgtcttccgtggagaaagagacgaagacccagtgtgtgagaattgccacaaaggctgcagccaccgaggagcccgaggtcatcccagacccagcaaagcagaccgatcgagttgtgaagatagccggcatttccgccggaatactagtttttattcttctgttgttagtcgtaattctaattgttaaaaaaagacgttcctactactcatactcatattacctgaagttggcaaaaaagcggaaggatgctatgggcaatactaggcaggagatgacccacatggtcaatgctatggacagatcctatgcggaccagagcaccctccacgctgaagatcccctcagcattacattcatggatcagcacaactttagtccaaggctgcctaatgatcctctcgtgcctacagccgtgctggtaccgatcaccgatgagaaccacagcgccaccgctgagagctctcgactgctggatgtccctaggtacctctgtgaggggacagaatcaccctaccaaactggccagctgcatcccgcaatccgggttgccgacctgctccagcatattaatttgatgaagacgagtgatagttacgggtttaaggaagagtacgagtccttctttgagggccaaagcgcctcctgggacgttgccaaaaaggatcaaaacagggcgaagaacagatatggtaatatcatagcctacgatcactctagggtaattctccagcccgtagaggacgacccctctagcgattacattaatgctaactatatcgacatttggctatatagagatggttatcagaggccttcccactatatcgcaacacagggccccgtccacgaaaccgtgtatgacttctggcgcatgatatggcaagaacagtccgcctgtatagtcatggttaccaatctcgtagaggtagggagggtgaagtgctacaagtattggccagatgacactgaggtctacggagatttcaaagttacatgcgttgagatggagcccttggccgaatacgtcgtccggaccttcacgttggagcgtagagggtacaacgaaattcgggaggttaagcagttccattttaccgggtggcctgaccacggagttccttatcatgccaccggattgctctcctttattaggcgcgttaaactgtccaatccccccagtgccggtcccattgttgtccactgttcggctggtgcaggaaggacaggttgttacatcgtgatcgacattatgctggatatggcggaaagagagggagtggtggacatttacaattgcgtcaaggccctcaggtccagaaggatcaacatggtacagaccgaagaacagtacatttttattcacgacgccattttggaggcttgtttatgcggggaaactgctatccccgtttgtgagtttaaagcagcctacttcgacatgatcaggatagatagtcagaccaactcctcacacctgaaggatgaattccagacactgaactctgtgactccacggttgcaggcggaggattgtagtattgcatgcctgcctcgaaatcacgataaaaatcgtttcatggacatgttgccccccgatcggtgtcttccattcctgatcaccattgatggggagtcatcaaattacattaacgctgcactgatggatagctatcgacaacccgccgctttcatcgtgacgcagtatccgctgccaaataccgtcaaggacttctggcggctcgtctatgattacgggtgtacgtccatcgtaatgctgaacgaggtggatctctctcaggggtgccctcagtactggccagaggagggtatgctaaggtatggcccgattcaggtggaatgtatgagctgtagtatggactgcgatgtcattaaccggatttttcggatctgcaatctgacacgcccccaagaaggatatttaatggtgcaacagtttcaatacttgggctgggcctctcatcgggaggttcctgggagcaagcgaagttttctcaagttgattctacaggtggaaaaatggcaggaggaatgcgaggaaggggaaggacggactatcattcactgcttgaatggtggcggaagaagcggaatgttctgtgccataggcatcgtggtagaaatggtaaaacggcagaatgtggtcgacgtattccacgctgttaagaccttaagaaattccaaacccaatatggtggaggctccagagcagtaccgcttctgttacgacgtagcccttgagtaccttgaatcgtcttag

SEQ ID NO: 201749 - DNA, 4377 bp, synthetic construct
  misc_feature 1..4377: note = Description of Artificial Sequence: Synthetic coding sequence
  source 1..4377: mol_type = other DNA
atggacaccaccgccgccgccgccctgcccgccttcgtggccctgctgttgctgtctccgtggccactactcggatccgctcagggacaattctccgcagggggatgcacctttgacgacggccccggcgcatgtgactatcaccaggatctgtacgatgatttcgaatgggtgcacgtgtcggcgcaggaacctcattacctgccaccagagatgccccagggttcctacatgatcgtcgactcaagtgatcatgatcctggcgagaaggcaaggctccagctgcccacaatgaaagaaaatgacactcattgcattgacttttcatatttgctgtattcacaaaagggcctcaaccctggtacactcaatatcttggtgagagtcaacaaagggccactcgccaatcctatttggaacgtgacaggatttacagggcgggattggctgagagcagagctggccgtgtccacattctggccaaacgagtaccaggttattttcgaggcagaggtgtctggtggccggtctggatacatagcaatcgacgacattcaagtgctgagctatccctgcgataagtcaccacattttctgcggctaggggacgtggaggttaacgctggtcagaatgctacatttcagtgtatagctactggaagggacgctgttcacaacaagctgtggctgcagcgccgcaacggggaggatattcctgtggctcagacaaagaatatcaaccaccgaaggttcgcagcaagttttcggctgcaggaggtcaccaagacagaccaagacttgtaccgctgtgtaactcaaagcgagcgggggtcaggtgtctccaacttcgcccagctgatagtgcgcgaaccaccaagacccatcgccccaccacagcttcttggagtcgggccaacatacctgcttattcagctcaacgcaaacagtattattggcgacggtcccataattctcaaagaggtggagtatcggatgacttcagggagttggacggaaacccacgctgtgaacgcacctacatataaactgtggcatctcgatcccgacacggagtacgagatcagggtgctgctgacacgtcctggcgaaggtggcacaggactgcccggacctcccttgattacacgcacaaagtgcgccgagccaatgcggacgcccaaaaccctaaaaatcgctgaaattcaagcccggagaatagcagtcgactgggagtccctgggctataacatcacgcggtgccatacattcaacgtcactatttgctatcattattttcgtggccataatgaaagtaaagccgactgtctcgacatggacccaaaagcaccacagcatgtggtgaaccatcttccgccttatacaaatgttagtctaaaaatgatcttaactaatcccgaaggccgcaaggagtccgaggaaacaatcatccagactgacgaagacgtgcctggtcctgttcctgttaagtcactgcagggaactagcttcgaaaataaaatattcctgaactggaaggagcctctggacccaaacgggatcattacgcagtatgagatatcgtactcatccatcagaagcttcgaccccgccgtgcccgtggcaggcccccctcaaacggtcagtaacctttggaacagtacccatcacgttttcatgcatttgcatcccggcactacctaccagttcttcatcagagccagcactgtgaagggcttcggtcccgccactgctattaacgtcaccaccaatatttctgcgccaacgctccctgattatgaaggcgtagatgccagtctgaatgagacagcgactacaattaccgttctactacggcccgctcaggctaagggggctcccatcagcgcctaccaaatagtcgtagaagaattgcaccctcacagaaccaaacgggaggccggcgccatggagtgttatcaggtgccagtcacataccaaaatgccatgtcagggggggcaccatattactttgctgccgaacttcccccagggaacctccccgaaccagcccccttcaccgtgggtgacaaccggacatatcaggggttctggaacccccctctggcccccagaaagggatataatatctattttcaggccatgagcagtgtcgagaaagagaccaagacccagtgtgtcagaattgctactaaggccgccgccacagaagaacctgaagtcattcctgacccagcaaagcagacggatagggttgtgaagatcgccggtataagcgccgggatacttgtcttcatactgctcctactggtggtaatcctgattgtaaagaagtctaagctagcgaagaagcggaaggatgccatggggaatacacggcaggagatgacacacatggtcaacgcgatggataggtcgtacgcggatcagagcaccctgcacgccgaagaccccttgagtataacttttatggatcagcacaacttttccccccgcctgccaaatgatcccctggtccctacagctgtactggatgagaaccactctgctacagccgaaagttccagactgctggatgttccacgatatctgtgtgagggtaccgagagcccataccagaccgggcaactacaccctgcgatcagagtcgctgatttgctgcaacatatcaacctcatgaaaacttcagattcttacgggttcaaggaggaatacgagtcattcttcgaaggccagtctgccagctgggacgtcgcaaagaaggaccagaaccgggcaaaaaataggtacggaaacatcattgcctacgatcatagcagggtcattctacagcccgttgaggacgatccatctagcgattacatcaacgctaattatatagacatttggctgtatcgcgacggataccagagaccaagccattatattgccacacaggggccagtgcatgaaactgtgtacgacttctggcggatgatatggcaggagcagtctgcttgtattgtgatggtgacgaacttagttgaggtgggacgagtcaaatgctataaatactggcctgatgacactgaagtctatggcgattttaaggtgacatgtgtggagatggagcccctagctgagtacgtagtacggacgtttacattggaacggcgcgggtataacgaaataagagaggtgaagcagttccattttacagggtggcctgaccatggggtgccatatcacgctacaggactcttgagcttcatccggcgtgtcaaactttctaatccaccatctgctggccccatcgtggtccattgctctgcaggggccggacggactggatgttatatcgtaatcgatataatgctcgatatggcagagcgcgagggcgtggtggatatctacaactgcgtcaaggccctgcggtcaaggagaatcaatatggtgcaaacggaggagcagtacatattcattcacgatgcaatactggaagcctgcctgtgcggggagaccgcgattcctgtgtgcgagttcaaggctgcctattttgacatgatccggattgactctcagactaactcctcccacttaaaggatgagttccagaccctcaattctgtcaccccaagactgcaggcagaggactgttcaattgcttgtctgccgaggaatcacgataagaacaggtttatggacatgctgccccccgacaggtgtctacctttcctgataaccatcgacggggagtcctccaattacattaacgctgcgctgatggattcatacaggcagcccgcggcatttatagtgacccaataccccctgccgaataccgtcaaggatttctggagactagtgtacgattacggatgcacaagcatcgtgatgctaaatgaagtggatcttagccagggttgcccacaatactggccagaggagggcatgcttagatatgggccgatccaggtggagtgcatgagttgctctatggattgtgacgtgattaatcgtatatttagaatatgtaatttaacgaggccccaagaggggtatttgatggtccaacagttccagtatctgggttgggcctcacacagggaagtacccggctctaaaaggtcctttctcaaattaatcctgcaggtagagaagtggcaagaagaatgcgaggagggagaagggaggacaataatccattgtctgaacggcggcgggcggagcgggatgttctgcgctatcgggattgtggtggagatggtgaagcgacaaaatgttgtcgacgtattccacgccgtaaaaacattaaggaacagcaagccaaatatggtggaggccccagagcagtaccgcttctgctacgatgttgccttggagtaccttgaaagcagctag

SEQ ID NO: 201750 - DNA, 4341 bp, synthetic construct
  misc_feature 1..4341: note = Description of Artificial Sequence: Synthetic coding sequence
  source 1..4341: mol_type = other DNA
atggacaccaccgccgccgccgccctgcccgccttcgtggccctgctactgctctccccatggcctctgctgggctccgctcagggccagttcagcgctggcggctgtacattcgatgacggtccaggcgcttgcgattatcaccaggatctctacgacgatttcgagtgggtgcacgtatccgctcaagagccacactatttgccccctgagatgccccagggatcttacatgatagtggatagttccgaccacgatccgggggaaaaggccagacttcagttgccgaccatgaaggagaacgacacccactgcattgacttttcttacctgctatacagccaaaagggcctgaaccccggaacactgaatattttggtgcgtgttaacaagggaccccttgctaacccgatatggaatgtgacaggcttcactggcagggactggctccgagccgaactggctgtgtctacattttggccaaacgagtaccaggtgatcttcgaagctgaggtaagcggaggccgctccggctacatcgcaatcgacgatatacaggtactaagctacccctgcgacaaatcccctcacttccttagattgggagatgtagaggtgaatgcgggccaaaacgcgacatttcagtgcattgccacgggtagagatgccgtccacaacaaattgtggctgcagcgaaggaatggcgaagacatccccgttgcccagactaaaaatattaatcataggcgattcgccgcaagctttagattgcaggaagtcacaaaaaccgatcaggatctctacaggtgcgtgacgcagtcagaaaggggatccggggtctccaactttgcacagcttatcgtaagggaacccccccgtcccatcgctccgccgcagttactgggcgtgggcccgacgtatctcctgatacagctgaatgccaattcaattattggcgatggacctatcatcctgaaagaggtagagtataggatgacgtctggatcatggaccgagactcacgccgtcaacgccccaacctacaagttatggcatctcgatccagataccgaatacgaaataagagtgctgctcaccagaccgggggagggtggaaccggattacccgggccccccttgattactcggacaaaatgcgcggaacccatgaggactccaaaaaccttgaagattgccgagatccaggccagaagaatcgctgtggactgggaatcattgggatacaacattacccggtgtcatacttttaacgtcacgatctgctaccactactttcgcgggcacaacgaaagcaaggcagactgtctcgatatggacccgaaggcgcctcaacacgtggtcaaccatctgcccccttatactaacgtcagcctgaaaatgatcctaaccaatccggaggggcgaaaagaaagcgaagaaaccattattcagacggatgaggatgtcccagggcccgtgcccgtgaagtcactccagggtaccagtttcgaaaataaaatctttctgaactggaaagagcctttggatcctaacggtattataacccagtatgagatatcctattccagtatccgcagcttcgaccctgcagtcccagtcgccggacccccccagaccgtatcaaatctgtggaacagcacacaccacgtgttcatgcatctccatccgggtactacttatcagttcttcatccgcgcctccacagtaaaagggttcgggcctgctactgccattaatgtaacgacgaacatatccgccccgactctcccggactacgagggcgttgatgcctctctgaacgaaacagcgaccactattacagtgctcctgcgccccgcacaggccaagggcgcccccatcagcgcttatcaaattgtggtggaggaactgcatccccataggacgaaacgggaggccggcgctatggagtgttatcaggtgcccgttacttatcagaacgctatgagcgggggtgccccgtattattttgccgcagagctccccccagggaacttaccagagcccgctccattcacagtgggagataaccgcacttatcagggtttctggaacccgcctttggctccacgcaaggggtacaatatctactttcaggccatgtcttctgttgaaaaagagaccaaaacacaatgcgtgaggattgcaacaaaggcagccgccacggaagagccagaggtaatccctgacccagctaagcagaccgaccgagtcgttaagatcgctggtattagcgccggaatccttgtttttattctgctgctgttagtggtgatcttaatcgtcaagaagagcaagcttgccaagaagcggaaggatgcaatgggcaacacacgacaggaaatgacccatatggtaaatgctatggacagaagttacgctgatcagtccaccctgcacgctgaggatcctttatccattaccttcatggaccaacataacttttcaccgcggtatgagaatcacagcgccacggccgagtcctcacggttgctggacgtaccgcgctacctctgtgaaggcaccgaatccccttatcagacagggcaactgcacccagccatacgtgtagcagacctgttgcagcatattaacctgatgaagacatcggattcgtacgggtttaaggaggaatatgaaagcttttttgaagggcagtcagcgagctgggatgttgccaagaaagaccagaatagggccaaaaatcggtacggaaacattattgcatatgaccattcaagggtgatcctccagcctgtggaggacgatccctcctcagactacatcaacgccaactacatagacatttggttatacagggatggctaccaaaggccctcacattacatcgcaacccaaggaccagtacacgagacagtgtatgatttctggagaatgatctggcaggaacagtctgcctgcatcgtgatggtcactaaccttgtggaagtgggccgtgttaagtgttataaatactggccagacgacaccgaggtatatggtgactttaaagtcacatgtgtggagatggaaccactcgctgagtatgtggtgcgcactttcacactagagaggagggggtacaatgagatccgagaggtcaaacagttccatttcacgggatggcctgatcacggcgtgccttatcacgccacaggtctgttgtcatttatacgacgcgtgaaactgagtaatcccccaagcgcaggaccaatcgtggtgcattgctctgcaggggctggccggacaggctgttatatagtgatcgacattatgctcgacatggccgagcgcgaaggcgttgtggacatctataactgtgtcaaggcattaagatctcgtcgtatcaacatggtccaaacggaggagcagtacatcttcatccacgatgctatcctggaagcctgcctctgcggagagacagccattccagtctgtgaattcaaggccgcttacttcgatatgatcaggattgacagccagaccaactcatctcacctgaaggacgaatttcagacgctgaactctgtgacacccagacttcaggccgaggactgctctatcgcctgtcttccgcgcaaccatgataagaaccggtttatggacatgctacctcccgacagatgcctgccctttctgattaccatcgacggagaaagctctaactacatcaacgcagctcttatggactcctataggcagcctgccgcttttattgtgacccaatacccactgcctaacacggtgaaggacttctggcggcttgtgtacgactatgggtgcacttccattgtcatgcttaacgaggtcgacctgagccagggctgcccacaatactggcctgaagagggcatgctgcggtacggacctatacaagtcgaatgcatgtcttgtagcatggactgcgatgtaattaaccgtatcttcaggatttgtaatctgacccggccacaagagggatacctgatggtccaacaatttcagtacctgggctgggccagtcaccgcgaggtgcctggaagcaagcgctcatttttgaagcttatccttcaggtggaaaagtggcaggaggagtgtgaggagggcgagggcaggaccattatccactgcctgaatgggggggggcgctcgggtatgttctgtgccataggcatcgtggtggagatggtgaagcgtcagaatgtcgttgatgtgtttcatgccgtcaaaaccctgcgaaacagcaaacccaacatggtcgaggcccctgaacaatatagattctgttacgatgtcgcccttgaatacctggaatcttcttag

SEQ ID NO: 201751 - DNA, 4320 bp, synthetic construct
  misc_feature 1..4320: note = Description of Artificial Sequence: Synthetic coding sequence
  source 1..4320: mol_type = other DNA
atggacaccaccgccgccgccgccctgcccgccttcgtggccctgctgcttttatccccatggcccctgctgggaagtgcgcaggggcaattttctgctggaggctgcacctttgatgatggcccgggagcctgcgattatcatcaagacctgtacgacgattttgagtgggtgcacgtcagtgcgcaggagcctcattatctgcctccagaaatgccgcaggggtcctatatgatcgtggacagctcagatcatgaccccggcgaaaaggcgcgtttacagctgcccaccatgaaggagaatgatacccactgtattgatttctcctacctgctgtatagtcagaagggtctgaaccctggtacgttgaacattttggttcgagtgaacaaaggccctctagcaaatcctatttggaatgtcaccggattcacagggagggactggcttcgtgctgagctcgccgtaagtacattctggccaaacgagtatcaggttatctttgaggccgaagtctccggtggacgctcagggtacatcgcgatcgatgatatacaagttttgtcatacccttgcgacaaatccccacattttctgcggctgggcgacgttgaggtcaatgccgggcaaaacgctacattccagtgtatcgcaaccggcagagacgcagtgcataataaactttggctccagcggcgtaacggagaggatatacccgtcgctcagaccaagaatatcaatcacaggcggttcgctgcctcgtttagattgcaggaggtaaccaaaaccgatcaggacctctaccgatgcgtaacccaatccgaacgggggagcggagtgtctaacttcgcacagttgatcgtcagagagcctcctaggcctattgcccccccccaactcctgggagtgggtccaacctatctgttgattcaactgaatgcgaattccatcattggcgatggccctatcattctgaaagaagtcgaatatcgtatgacaagcggctcctggacagaaacccatgctgtcaatgcccctacctataaactgtggcatttggatcccgacaccgaatatgagattagagtgctgttaactcgacctggcgaaggtggcaccggactgcccggcccgcctttgatcacccggaccaagtgcgccgaacccatgcgcactcctaagaccctgaagattgctgagattcaggcacgcagaatcgcggtggactgggaatccctggggtacaacattacccgctgtcatactttcaatgtcacgatctgttaccactattttaggggacacaacgagtctaaggcagactgtttagacatggacccgaaggcaccacaacatgtagtgaaccacctgcctccctacaccaacgtgtctcttaagatgattctcacaaaccctgaggggagaaaggaatccgaggagacaatcatacagaccgacgaggatgttccaggtccagttcccgtgaagtccctccaaggtaccagtttcgagaacaaaattttcctgaactggaaggaaccactggatcccaatggcataatcactcagtatgagatctcatacagctctattcgctcatttgaccctgccgtccccgtcgccggtccccctcagacggtttccaacctttggaacagtactcatcatgttttcatgcaccttcaccccggcacaacataccagtttttcatcagagctagtaccgtcaaaggcttcgggcctgcgacagcaattaacgtgacaaccaatatttctgcaccaaccctcccggattacgaaggcgtggacgccagtttgaatgaaaccgcgaccacaatcaccgtgctcctgagaccagctcaggccaagggggccccgatctcagcttaccagatcgtggtagaggaactgcacccgcacaggacgaagcgagaggctggtgctatggagtgctaccaggtccctgtgacctaccaaaacgcaatgtctggtggagccccctattacttcgcagctgagttgcctcccgggaatcttccagagccggccccgtttaccgtgggggacaatagaacttaccagggattctggaatccaccacttgccccccgcaagggctacaatatctattttcaggccatgagctccgtcgaaaaggagactaaaactcagtgcgttaggattgcgacaaaggcagccacagaggaacccgaggtgattccggatcctgccaagcaaaccgatcgcgtggtgaaaatagcgggcatcagcgctggaatcctggtattcattctcctgctgctcgtggtgattttaattgttaagaaaagcaaactggccaagaagcggaaggatgcgatgggcaacacacgtcaagagatgacacacatggtgaacgctatggaccggtcttacgcagaccaatctaccttgcatgcagaagatcctctgtctattacttttatggaccagcataacttctcccctagatacgagaatcacagtgctaccgcagagtcgagccgcctgttggacgtgccacgctacctgtgtgagggcacggaaagcccctaccagacgggtcaactgcaccccgccatccgtgttgccgacttgctccagcacattaaccttatgaagaccagcgatagttatggctttaaggaagagtatgagtcatttttcgaaggccagagcgcatcctgggacgttgcaaagaaggaccagaatcgggccaaaaacaggtatggcaacattatagcctacgaccactctcgagtgatccttcagcccgttgaggacgaccccagtagtgactatattaatgctaattatatagacggctaccagcgccccagtcattatatcgccacccaaggtccagttcatgaaacagtttacgatttctggcggatgatctggcaagaacaaagtgcttgcatcgtgatggtaacaaatctcgtcgaggtgggcagagtgaagtgttacaagtattggcccgacgataccgaggtctacggtgacttcaaagttacctgcgtggagatggaaccattggccgaatacgtggtgcgtaccttcacgctggaacgtaggggctataacgaaatccgggaagttaagcagttccactttacaggctggcccgatcacggtgtgccttatcacgccactggtctgctgtcctttatccggcgcgtgaagttgtctaatccaccaagtgcgggaccaatcgtcgtccattgcagcgccggtgccggaagaaccgggtgctacatagtgatcgacatcatgcttgatatggctgagagagaaggtgtggtggatatatataactgcgtgaaagcactgcgatccaggcggattaacatggttcagaccgaagagcagtacattttcatccacgatgctatcctcgaagcctgtctctgtggagagacagcaataccagtgtgcgaatttaaggcagcctattttgatatgattagaatcgattcccagacaaacagcagtcatctcaaggacgagtttcagacgctcaattccgtcacccctcgtctccaagccgaggattgcagcattgcatgcctgcctcggaaccatgataagaatagatttatggacatgctgccgccagatcgctgtctgccctttttgatcaccatcgacggtgaaagttctaactatattaacgctgccctgatggatagttaccgccaaccggcagcattcattgtgacacagtaccctctgcccaacaccgttaaggacttttggcgattggtttacgattacgggtgtaccagcatcgtcatgttgaacgaggttgacttgagccagggctgtcctcagtactggcctgaagagggcatgttacggtatgggcccatccaggtggagtgtatgtcttgctctatggattgcgacgttataaatagaatctttagaatttgcaacttaacacgaccccaagaggggtacctaatggtgcagcagttccagtatctggggtgggcatcccaccgggaagtgcctgggtctaagcgctcctttctgaagttgatactgcaggtggagaagtggcaggaggagtgcgaggaaggcgaaggcaggactattatccactgtttaaatggagggggacggtcgggaatgttttgcgcaatcgggattgttgtggagatggtaaaacgccaaaacgttgtggacgtgtttcacgcagttaaaacccttcgaaactccaaacccaacatggtcgaagccccagagcagtataggttttgttatgacgtggctcttgagtatcttgagagcagttag

SEQ ID NO: 201752 - DNA, 4323 bp, synthetic construct
  misc_feature 1..4323: note = Description of Artificial Sequence: Synthetic coding sequence
  source 1..4323: mol_type = other DNA
atggacaccaccgccgccgccgccctgcccgccttcgtggccctgttgctcttgtccccatggcctctgcttggtagcgcccagggacagttctctgccgggggttgtacattcgatgatggacccggcgcctgcgactaccaccaggatctctacgatgactttgagtgggttcatgtgtcagcccaggaaccacattatctcccccctgagatgccccagggatcatatatgatagtggactcgtccgatcacgacccgggtgagaaagcaaggctgcagttacccacaatgaaagagaacgacacacattgcattgacttttcttatctgctttattcccaaaagggtctcaacccaggcacactcaacatactagtgagggtgaataaaggaccattagccaatccaatttggaatgtgaccggctttactggaagagactggctaagagctgaattagctgtgtcaactttttggccaaatgagtaccaagtgatcttcgaggctgaagtttctgggggccggtctggttacatcgctattgacgacatccaggtcttgtcctacccttgcgacaaaagtcctcattttctgcgactgggcgatgttgaggtgaacgctggccagaatgccaccttccagtgcatcgccaccggccgggacgcagtacataacaagctgtggctccaaagaagaaatggtgaagatatccctgtcgctcagacaaagaacataaatcatcgaaggttcgcggcgagcttcaggttgcaagaggttaccaaaacagaccaggatctctatagatgtgttactcagtcggagagaggaagtggagtgtcaaactttgcccaattaatagtacgtgagcctccgcggccaatcgcccctccacagcttcttggggtaggccccacatatttgctgatccagttgaacgccaactcgatcattggggatggtccaattatcctgaaggaggtagaatacagaatgaccagcgggagctggaccgaaacgcacgccgtcaacgcacccacctacaagctctggcatctcgatccagataccgaatatgaaatcagggttcttcttacaaggcctggagaaggaggtacaggactgccaggccctccactgatcacacggaccaagtgcgccgaacctatgcgaactcccaaaaccttgaagatcgccgaaatccaggcacgccgaatcgccgtcgattgggagagccttggctacaatataactcgctgccacacatttaacgtgacgatctgttaccattattttagagggcataatgagtcaaaagccgactgtctggacatggatcccaaagcccctcagcacgtggtcaaccacctgcctccttatacaaacgtgtccctgaagatgatcctcaccaacccagaagggagaaaagaaagtgaggagacaataatccagacagacgaggacgttccgggccctgtccccgtcaaatcgctccagggtacctcatttgaaaataaaatatttctgaactggaaggaaccattggacccaaacgggattatcacacagtacgaaataagctactcctcaatcagaagctttgatccggccgtgcccgtggcaggacccccccagacagtgagtaacctctggaatagcacgcaccatgtcttcatgcacttgcaccccggaacaacgtatcaattctttatccgtgcctccaccgtaaaggggttcggtcctgccacagccataaatgttacaacaaacattagcgccccgacactgccagattatgaaggagtcgatgcctcccttaacgagacggccacaacaatcaccgtgttgctgcggcctgcacaggctaagggcgcaccgataagcgcatatcagatcgtggtggaggagctgcaccctcatcgcacaaagcgggaagcaggcgctatggaatgttatcaggttcccgttacctaccagaatgctatgtcaggaggcgccccttattattttgcggccgaacttccacctggcaaccttccagaaccagccccctttactgtaggcgacaaccgtacatatcagggattttggaaccctcctctggcaccccgcaaggggtacaatatctacttccaggcaatgagttccgtggaaaaggagactaagacccaatgtgtgcgcattgcgaccaaggccgcagccacggaagagcctgaagttatccccgaccctgctaagcagaccgaccgagtggtaaaaattgctggaatctccgccggaattctcgtgttcatcctactactgctggttgtgattctcattgtcaaaaaaagtaaactggctaagaagcggaaggatgctatggggaacacacgccaggagatgacccacatggtgaatgccatggatagaagttacgccgaccagagcactctccacgcagaagatccattgagcatcaccttcatggaccagcacaactttagccccaggtatgagaaccacagcgccactgctgagagctcccgcctacttgatgtccccagatacctgtgtgaaggaacagagagtccataccagaccggacagctccacccagccatcagagtcgccgacctgctgcaacatatcaaccttatgaagactagtgactcgtatggcttcaaggaggaatacgaatcttttttcgaaggacagagtgccagttgggacgtggcgaaaaaagaccaaaaccgggcaaaaaaccggtacgggaacatcatcgcttacgaccactcaagggtcattctgcagccagtggaggatgatccttcttctgactatattaatgccaattacatcgacggctatcagcggcccagtcattacattgcaacccaggggccggtccacgagacagtatatgacttctggcgcatgatttggcaagaacaatcggcttgtatcgtcatggttaccaacctcgtcgaggtggggcgcgtgaaatgttataaatactggccagacgatacagaggtgtacggagatttcaaagtcacctgcgtcgagatggagcccttggccgagtatgtggtgcgcacctttaccctcgagcggaggggctataatgagattagggaggtgaagcagttccactttacaggctggccagatcacggcgtcccctaccacgctaccgggctccttagcttcatcaggcgagttaaactctctaatcctccttcagctggaccaatagtggtacactgctccgcgggtgctggtcgcacaggctgctacatcgtcattgatatcatgctggatatggcagaaagggaaggggtggtcgatatctataattgcgtcaaggctctgcgctcacggcggattaatatggtccaaacagaagagcagtacatctttatccacgatgcgatcctggaagcctgtctctgcggcgagactgctattccggtgtgcgaatttaaagcagcctacttcgatatgataagaatcgactctcagacgaactccagccacctgaaggatgagttccagacccttaactcggtgactccaagactccaggccgaggattgctccattgcctgtctacctagaaaccatgacaagaatcggtttatggacatgcttcctcccgatcgatgtctacccttcctgatcaccatagatggcgaaagttcaaactatatcaatgccgccctcatggacagctaccggcagccagcagccttcattgtcacccagtatcccctaccgaatacggtgaaagacttttggcggctggtgtatgattatggttgcaccagtattgtgatgcttaacgaagtcgacctcagccagggttgtccccaatattggccagaggagggaatgctcagatacggaccaattcaagtggagtgcatgtcctgttcaatggactgcgacgtaattaacaggatcttccgcatctgtaatctcacccgacctcaggaaggatacttaatggtgcagcagttccagtatcttggatgggcctctcaccgcgaggtacctgggtcaaagagatcattcctgaaactgatcctccaggtcgagaagtggcaggaggagtgcgaagagggcgagggccggaccatcatacactgcttgaacggcggagggcggtcagggatgttctgcgctatcggtatagttgttgagatggtcaagaggcagaatgtcgttgacgtctttcatgcagttaaaaccctccgcaactccaagccaaacatggttgaggccccggaacagtaccgattttgctacgacgtagccttggaatatctagagagttcatag

SEQ ID NO: 201753 - DNA, 4374 bp, synthetic construct
  misc_feature 1..4374: note = Description of Artificial Sequence: Synthetic coding sequence
  source 1..4374: mol_type = other DNA
atggacaccaccgccgccgccgccctgcccgccttcgtggccctgctgctgctaagcccatggcccctactgggctcagctcagggtcaattctctgccggcggttgcaccttcgacgatggacctggggcctgcgactaccatcaggatctctacgatgatttcgaatgggtgcacgtgagcgcccaggagccacattacttgcctcctgaaatgccacaagggagttacatgatcgtcgattctagtgatcatgaccccggcgagaaggctcgcctgcagttacccactatgaaggaaaatgacactcactgtattgatttttcctacttgctctactcccaaaaagggttgaaccctggtacattgaacattctcgtgagggtgaataaaggccccctcgcaaatccaatctggaacgtgactgggttcaccggccgtgactggctacgcgccgagctggcagtgtcaacattttggcctaacgagtaccaggtgatattcgaagccgaggtatccggcggcaggtccggctacatcgccattgatgatattcaggtcttatcgtatccctgtgataagtcccctcacttccttcgactgggagacgtggaagtcaatgccggtcagaatgctaccttccagtgcatcgccaccggccgcgacgctgtgcataacaagctgtggctgcagcggagaaacggggaggatatccccgtggcccagactaaaaacatcaatcatcggcggttcgcagctagctttcggttacaagaggtaaccaaaaccgaccaggacctgtataggtgtgtgactcagtcggagaggggatcgggggtgagcaattttgcccagctgattgtgcgcgaacccccgagaccgattgcgccacctcagctactgggagtggggcccacttatctattgattcagctgaatgcaaatagcattattggcgatgggccaataatcctgaaagaagtcgagtatcgaatgacctctggtagctggacggaaacccacgctgtaaatgcccccacctacaagttatggcatcttgatccggatactgagtacgaaatccgagtcctcctgactcgacctggagaggggggaaccggactcccaggccccccacttatcactcgtactaaatgcgccgagcctatgaggacacccaagacactgaagatagccgaaatccaggcgagacggatcgccgtggactgggagtccctcgggtacaatatcaccagatgtcacacattcaatgtaaccatttgctaccactacttccggggtcacaacgaatctaaagccgattgcctcgacatggatcctaaggctccacagcatgttgtgaaccacctgcctccctacactaacgtgagtttgaagatgatactgactaatcctgaaggtcggaaagagtcagaagaaacaataatccaaaccgatgaggatgtgccaggacccgtaccagttaaatcccttcagggcacaagttttgagaacaaaatttttttgaattggaaagagccattggatccaaacggcataattacccaatacgagatctcctattcctctattcggtcattcgatccagctgtgcccgtggccggaccacctcaaacagtcagtaatctctggaacagtacccatcatgtgttcatgcacttgcatcccggcaccacatatcagttttttattagagcatcgacggtcaagggctttgggcccgccaccgcgatcaatgtcaccactaacatcagcgctccaacactccccgattatgagggcgtggacgcctcactgaatgaaaccgctaccaccatcaccgtgctgttacgccctgcccaagccaaaggtgcccccatctccgcctatcagatcgtcgtggaggagctccatccgcatcggacgaaaagagaagccggcgctatggaatgctatcaagtgccggtgacttaccagaatgccatgtctggcggcgccccttactactttgctgccgaactgccccccgggaacctgcctgaaccagccccattcacagtaggcgataatcgcacctaccagggtttttggaacccacctctggccccaagaaagggctacaatatttactttcaagccatgtcttccgtcgagaaggaaacgaagacccagtgtgtgcgcattgcaaccaaagccgccgccactgaagagccggaggtgataccggatcctgccaagcagacggaccgtgttgtgaaaatcgctgggatcagcgcaggcatcctggtctttatcctattgttgcttgttgtgattctcatcgttaaaaagagcaagcttgcaaaaaagaggaaggacgctatggggaatacccggcaggagatgactcatatggtgaatgcgatggatcgatcttacgccgatcagtctacgcttcacgctgaggaccctctcagcattactttcatggatcagcacaacttctctccccgcctgcccaacgaccctttggtcccaacagcagtgctcgatgagaaccacagcgctacggctgaatcatccagactcctggatgtccccaggtatctgtgtgagggaacagagtccccataccagaccggccagttacaccctgctattcgcgtggctgacttgctgcagcacattaatctgatgaaaacatctgatagctacggcttcaaagaggagtacgaatccttctttgagggtcagtcagcgtcttgggatgtggctaaaaaggatcagaatcgggctaagaaccgctacgggaacataatcgcctacgaccattcaagggtgatactgcagccagtagaggacgacccttcgagtgattacataaatgctaattatatcgacgtgagcatctttattggttatcagcggccgtctcactacatcgccacgcagggcccggtgcatgagacggtgtacgatttttggcggatgatctggcaggaacagtcagcctgtattgtaatggtgaccaatctcgtcgaggtgggaagagtcaagtgctataagtattggccagacgataccgaggtgtatggcgacttcaaggtgacctgtgtggagatggagcccctggccgagtatgtggtgaggactttcaccctagaaagaagaggttacaatgaaattcgggaagttaagcagttccacttcacaggatggccagaccacggggtgccatatcacgcaactgggttactgtcattcatcaggcgtgtgaagctctccaacccgcccagtgccggccccatcgtagtacactgctccgcaggggccggccgcacaggctgctacatcgtgatcgacattatgttggacatggccgaaagagaaggggtggtcgacatatacaattgcgtcaaagccttgcgaagcaggaggatcaatatggtccagacagaagaacaatatatctttattcacgatgcgatcctggaggcgtgcctgtgtggcgaaactgcaatccccgtgtgcgagtttaaggcagcgtatttcgacatgatacgtatagactcacagacaaatagctcccacctcaaggacgaattccaaacactgaacagcgttacccctagattgcaggccgaggattgtagcattgcatgtttaccaaggaatcacgacaaaaatagatttatggatatgttgccgccagatcggtgtctcccctttcttatcacgatagacggggagagttctaactacatcaacgcggcccttatggacagctaccggcagcccgccgcattcatcgtgacccagtaccctctacccaacacggtgaaagacttctggcggctcgtgtacgattacggctgcacttccatcgttatgctaaatgaggtggacctctcccaaggatgtcctcagtactggccggaggaaggcatgctgcggtacgggcctattcaggtagaatgtatgagttgtagcatggattgtgacgtgatcaatcgcattttccgcatttgcaaccttacccgtccacaggaaggctatctgatggtgcagcagtttcagtatctgggttgggctagtcacagagaggttcctggttctaaaaggtccttcctgaaattgatcctgcaggtagaaaaatggcaagaggagtgcgaagagggagaagggcggactatcatccactgtctgaacggcggcgggcgatctggaatgttctgtgcgattgggatcgtggtcgaaatggtaaagagacagaacgttgtggacgtcttccatgctgtgaaaaccctccggaattcaaagccaaacatggtcgaggctccggagcagtacagattctgctacgacgtggctctggagtaccttgagtcttcctag

SEQ ID NO: 201754 - DNA, 2244 bp, synthetic construct
  misc_feature 1..2244: note = Description of Artificial Sequence: Synthetic coding sequence
  source 1..2244: mol_type = other DNA
atgaccctgaacggctgcatgctggtgctgaagagcctgatcatctaccatccaagatgccccaaagtcatatttgaggccgaagtttctggtgggaggtcagggtatattgctatagatgatatccaggtgctcagctatccttgtgacaaatccccacactttttgaggttgggagatgtggaggtgaacgcaggccagaacgcaacttttcagtgcattgcgacaggacgtgatgcggtgcataacaagctctggttgcagaggcgtaatggggaggatattcctgtggctcagaccaagaacataaatcacaggcgctttgcagcctctttcaggttgcaggaggtgacaaaaaccgatcaggatctgtaccgctgcgtcacgcaatcggagcggggatccggagtcagcaatttcgctcaactcattgtaagggagcctccgcgccctatagctccaccacaactgcttggtgtgggacctacctacctcttgattcagctgaatgccaattctattattggggatggccctattatcctaaaggaagtggaatatagaatgacctctggcagttggacggaaacacacgctgtgaatgccccaacctacaaactatggcacctcgaccccgacacagagtatgagatccgtgtgctattaacacgccctggtgaggggggcactgggctgcctgggccccctctcatcacaaggaccaaatgcgctgagcccatgcgcacccctaaaacgctgaagatagccgagatccaggcaagaagaattgctgtggattgggagtcactggggtacaacatcacacggtgccatactttcaatgtgacgatctgttaccactactttaggggacataatgaaagcaaggcagactgcctggacatggatcccaaggcgccccaacacgttgtaaatcacctgccaccatacactaatgtctctttaaagatgattcttaccaaccctgagggaaggaaggagtccgaggagaccatcattcagaccgatgaagacgtgcctgggcccgtacctgtcaaatctctgcagggcactagttttgagaacaaaatcttcttaaactggaaagaacccctggaccccaacggaataataacacaatacgagatcagttattcgtccatcagatcattcgacccagccgttccagtggccgggccccctcagacagtgagcaatctgtggaatagcacccaccacgtcttcatgcatctgcatcccgggactacctaccagtttttcatccgcgcctctacagtaaagggcttcgggcctgctacagccatcaacgtcactaccaatatcagcgcaccaacgctgcctgactacgaaggtgtagatgctagccttaatgaaacagctaccaccattacggtcttgctgaggcccgcccaggcgaaaggcgcacctatcagcgcctaccaaatcgtagtggaagagctgcacccgcatcgcacgaaacgcgaggctggagccatggaatgttaccaggttcctgtcacataccagaacgccatgtccggcggtgccccttactacttcgccgccgagttgccacccgggaatctccctgagccagcaccatttacagtgggcgataacaggacctaccaagggttctggaatcctccactcgcccctcgcaagggttataatatttattttcaggcaatgtccagtgtggagaaagaaaccaagacgcagtgcgtacgcatcgctacaaaggcggcggccacagaagagccagaggtaattcccgacccagccaaacaaaccgatcgggttgttaaaatcgccgggatctctgctggtattctggtctttattttattgctcttagtggttatcttgatcgtcaaaaaacggtacatttgttggcggaggcacatctgtatccgaaacatacgacgttcttattactcttattcctactaccttaagctggccaagaaaagaaaagacgccatgggtaacacgcgccaagagatgacccacatggttaacgccatggatcgaagctacgctgaccagtcgacgcttcacgcagaagacccactgagcatcacttttatggaccaacacaacttctcacccagactgccaaatgacccgctcgtacctacggctgtactggttccttcgcccggacgaaaaaacgtctaccatggcgataataactcattcttcgcgatatcctacctttag

SEQ ID NO: 201755 - DNA, 4389 bp, synthetic construct
  misc_feature 1..4389: note = Description of Artificial Sequence: Synthetic coding sequence
  source 1..4389: mol_type = other DNA
atggacaccaccgccgccgccgccctgcccgccttcgtggccctgctgctcctgtcaccctggccattgctgggaagcgcccagggccagttttcagccggcggatgcacgttcgacgatgggcctggagcttgtgattatcatcaggacctgtacgatgacttcgagtgggtccacgtgtccgcccaagagcctcactacctccccccagagatgccacagggctcttacatgatagtggatagctccgatcacgacccaggggaaaaagcacggctccagctgcctaccatgaaggagaacgacactcattgcatcgacttctcatatctgttgtactctcagaaaggtttgaatccaggtacattgaacatcctggtgcgggttaacaaaggtcccctggctaatccgatttggaacgtaaccggctttaccggcagggattggttgagagccgagctggccgtatctacgttctggccgaacgaataccaggtgatttttgaggctgaggtctccggaggaaggagcggatatatcgctattgacgacattcaggtgctctcatacccatgtgataagtccccccacttcctacggctaggcgatgttgaagtaaacgccggtcagaacgccacgtttcaatgtattgcgactggcagagacgctgtgcacaacaaactgtggttgcagagacgcaatggcgaggatataccggtggcacaaactaaaaacataaaccaccggagatttgccgcatcattcagattgcaggaggtgactaagaccgatcaggatttgtaccgctgtgtgacacaatcggaaaggggttctggagtctccaatttcgcccagctgattgtgcgcgagccaccaaggcccatcgctccgccccaactgctgggagtaggacccacctacctgctgattcagctgaatgcgaacagtatcattggggacggaccgatcatccttaaagaagtcgaatatagaatgacgagcggcagctggaccgaaacacatgctgtgaatgctcctacctacaagttatggcacctcgacccagataccgagtacgagatacgagtgctcctgacccggcccggggagggcggcacaggcctcccagggccaccacttatcacccgcacgaagtgcgccgagcccatgcgaacccccaaaacacttaaaattgcagagatacaggccaggcggattgccgtggactgggaatccttgggatacaatatcacgaggtgccatacttttaacgtgacaatctgctaccattacttcagaggtcacaatgaatctaaggccgactgtttggacatggaccctaaggctccgcagcatgtcgttaatcacttgcccccttacactaatgtgagccttaagatgatcctaacaaacccagagggaaggaaggagtctgaagagaccattatccagaccgatgaagatgtccccggccctgtaccagtgaaatcactccaggggacatctttcgaaaacaagatattcttgaactggaaagagccgcttgaccccaacggaatcattactcagtatgagatctcatacagctccattcgctcgttcgatcctgccgtccctgtggctggccctccacagaccgtgagcaatctctggaatagcacccatcacgtttttatgcacctgcaccctggcaccacataccagttttttatccgcgcctcgactgttaaggggtttggtcccgccacagccatcaatgtgacgactaacattagcgctccaactctgcctgattatgagggtgtcgatgcatctctgaacgagaccgcgactacaattaccgtccttctgagacctgcccaggccaagggtgctcccattagtgcataccaaatcgtcgttgaagagttgcatcctcacaggacaaaacgagaggccggcgctatggagtgctaccaggtccccgtcacgtaccaaaacgcaatgagtggaggagcaccatattatttcgccgctgagctcccccctggcaacttaccggagcctgcccctttcacagttggcgacaatcggacgtaccaggggttctggaatccacctttggccccaagaaaaggctataatatctacttccaggccatgagctcggtggagaaggaaacgaagacacagtgtgtcagaattgcaactaaagcagcagcaacagaagagccggaagtgatacctgatcccgccaaacaaacagaccgcgtcgtcaagatagccgggatcagtgctggtattctagtttttattctcctgctgctcgttgtaatcctcattgtgaagaagtctaagctggctaagaagaggaaagacgccatgggcaatactagacaggagatgacacatatggtgaatgcgatggatcgttcatatgcagaccaatctacactgcatgccgaggaccctctgtctattacctttatggaccagcacaactttagccctaggctcccgaacgaccccctcgtgcccaccgcggttctcgttccaattacggatgaaaatcactcggctaccgcagaaagtagtaggctgcttgacgtgcctaggtatctctgcgaaggaacagagtccccctatcagactggtcaactgcacccggcaatcagggtggccgacctgttgcagcacatcaacctcatgaaaactagcgactcatacggctttaaagaggagtatgagtcattttttgaggggcagagtgcctcatgggatgtggccaagaaggatcagaacagggcgaagaatcggtacggcaatatcatcgcttatgatcactcgcgggtcatcctacagcccgtggaggacgatccatcctccgactatataaatgccaattacatcgacatatggctttaccgggatggttaccagcgtccctcccactacatcgctacccaggggccagtgcacgaaactgtgtatgacttctggcggatgatttggcaagaacagtccgcctgtatcgtgatggttactaacctggtcgaagttgggcgggtcaaatgctacaaatactggccagacgataccgaagtttacggggacttcaaggtgacttgtgtggagatggaacctctcgcagagtatgtcgttcgtacattcaccctggaacggcgcggatataatgagattcgtgaggtgaaacaatttcactttactgggtggccagaccacggggttccttaccatgccacagggctcctaagcttcattcgcagggttaagctgagcaacccccccagtgccggaccgattgtggtgcattgtagcgctggagcaggtcggaccgggtgttatatagtgatcgatattatgctcgacatggccgaacgggaaggggtggtagatatatacaattgtgtcaaggctctacgatcccgcagaatcaacatggtgcaaactgaggagcagtatatctttattcatgatgcaattctggaggcctgcctgtgtggggagaccgcaattcccgtgtgtgaattcaaggcagcctacttcgatatgatacgtatcgattcccagaccaattcttcccacctgaaagacgaatttcagaccttgaatagcgtgacgccccgattacaggctgaagactgctccattgcgtgtctgcctagaaatcatgataagaacaggtttatggacatgctgccccccgacagatgcctccctttcctgattacaatcgatggcgaatctagtaattatatcaatgccgccctgatggattcgtataggcagcccgccgcttttattgtgacacagtacccactgcccaacaccgtgaaggatttttggcggctggtgtatgactacggatgcacctccattgtgatgctgaacgaagttgatttaagtcagggatgtccccagtattggcctgaggaagggatgctgcgctacggacccatccaggtagaatgcatgagctgctctatggactgtgatgtcattaatcgtatatttcgaatctgcaatttaacacgcccccaggaaggttacttaatggtgcagcagttccaatacctgggctgggcctcccaccgggaggtgccaggaagtaaacggtcatttttgaaattgattctccaggtggagaaatggcaggaggaatgtgaggagggagagggccgcaccattatacactgtctgaacggagggggcaggtccggtatgttttgtgctatcggaattgtggttgagatggtcaagcgccagaacgtggtcgacgtttttcacgccgtcaagaccctgcggaattctaaacctaacatggtggaggcccctgaacagtaccggttctgttacgatgtcgcgctggagtatcttgaaagcagctag

SEQ ID NO: 201756 - DNA, 4359 bp, synthetic construct
  misc_feature 1..4359: note = Description of Artificial Sequence: Synthetic coding sequence
  source 1..4359: mol_type = other DNA
atgcggggcctgggcacctgcctggccaccctggccggcctgctgctcacagcagccggggagacgttctcaggaggctgtctattcgatgagccctattctacatgcggctactcccagtccgaaggagatgacttcaattgggagcaagtgaatactctgacgaagcccactagtgacccctggatgccgagcgggtcctttatgctggtgaacgctagcggtcgccctgaggggcagcgggcccacctcctgctcccccagctgaaggaaaacgacacccattgcatcgacttccactactttgtgtcatctaagtctaattcaccacctggtttgctcaatgtgtatgtgaaagtgaataacggcccacttggtaaccccatttggaatataagcggggatcccactaggacatggaacagagcagagctcgcaatcagtacgttctggcccaacttctaccaggtaatatttgaggtgattacatctggacatcaagggtacttagctatcgatgaggtgaaggtacttggccatccctgcaccaggacccctcattttcttcgaattcagaatgtggaggtcaatgccggccagttcgctacttttcaatgctccgccatcgggcgcaccgttgccggggatcggctttggctacagggtattgatgtcagagatgccccactgaaagagatcaaagtgacttcctctcgtcgatttatcgcctcctttaacgtagtgaataccacaaaaagagacgccggtaagtaccgatgcatgattcgcacagaaggaggtgtgggtatcagtaactacgctgagctcgtggtcaaagagcctcccgtgccaattgcaccaccgcaactcgctagcgtgggcgcgacttatctctggatccagctgaacgccaattctatcaatggggacggccctattgtcgcccgcgaagttgagtactgtacagctagtggctcttggaatgacagacagccagtggattcaacctcttacaaaatcggtcatctcgaccctgacaccgagtatgagatcagcgtgctccttacacgaccaggtgagggaggaacaggcagcccagggccagctcttcggaccaggacaaagtgcgctgacccaatgcgcggccccagaaagcttgaggtcgttgaggtcaagtctcggcagattactataaggtgggagccattcggctacaatgtgacaaggtgtcattcctataatctaaccgtacactattgctaccaggtcggtggtcaggagcaggtgcgagaagaggtcagctgggacaccgaaaactctcaccctcagcataccattacaaatctctccccctatacgaacgttagcgtcaaactcattttgatgaatcctgaaggtaggaaggaaagccaagaactcatcgtccaaaccgacgaggatttaccgggcgcggtgccaactgaatctattcagggttccacgttcgaagaaaagatatttctccaatggcgggagcccactcagacctatggagttatcaccctgtacgaaattacctacaaggccgtttcttcctttgatcccgagatcgacctgtccaatcagtccggcagagtcagtaagctcggtaatgaaactcattttctgttctttggactgtaccctggcaccacgtacagcttcactatcagggctagcacagcaaaggggttcgggccacccgccactaaccagttcactaccaagatttcggctccttccatgccagcctatgaacttgagactccacttaaccaaactgacaacaccgtaaccgttatgctcaagcctgcccacagtagaggggcacccgtgtctgtgtaccagatcgtcgtggaagaagagcgtcccaggagaaccaaaaaaacaaccgagatcctgaaatgttacccagtcccaatccatttccagaatgcttcacttctgaacagtcagtattacttcgctgccgagttccccgctgattccctccaggccgcacaaccctttactatcggggataacaaaacttacaacgggtactggaatactcccttgctcccttataagagctacaggatctactttcaggccgccagccgtgctaacggtgaaactaaaatagattgtgtgcaagtggccaccaagggggcggccacaccaaaacctgtgcctgaacctgaaaaacagactgatcatacagtcaaaatagcgggagtgatcgctgggattctgctattcgtgatcatattcctgggggtggtgctagtaatgaaaaagaggaagcttgccaagaagagaaaagaaaccatgagtagtacacggcaggagatgacggtgatggtgaatagtatggataagtcctacgcggaacagggaaccaactgtgatgaggctttcagttttatggatactcacaaccttaatggcaggtcggttagcagcccgtcgtctttcacgatgaaaacaaacactctctctactagcgtgcccaattcttattatcccgacgaaacccataccatggctagcgacaccagcagtctcgtccagagccacacgtacaaaaagagggagcccgctgacgttccctatcagaccggtcagctccaccccgcaatcagagtggctgacttactgcagcacattacacagatgaagtgcgctgagggctacgggttcaaagaggaatacgagtctttcttcgagggacagtccgccccatgggactctgctaagaaggatgaaaatcgcatgaaaaaccgctacggcaacattattgcctatgaccactcgcgagtgcgactgcagacgattgaaggtgatactaattccgattacattaatggcaattacattgacggctaccacaggccgaaccattatattgccacgcagggccctatgcaggagactatatatgacttctggcgcatggtctggcatgagaatacggcgtcaatcattatggtgacgaacctggtcgaggtgggccgggttaagtgctgcaagtattggcccgacgatacagagatatacaaagatattaaagtgacattgattgaaactgaattgctggccgaatatgttatcaggacatttgctgtagagaaacggggcgttcacgaaatccgggaaattcgccagtttcattttaccggatggcccgaccacggagtcccttaccatgctacgggtctgttgggatttgtccgccaagtgaagtctaagtcaccgcctagcgccggaccactcgtggtccactgtagcgccggggcaggcagaacaggatgctttatcgtcattgacatcatgctcgatatggcagaacgggagggagtcgtggacatctataattgtgtgcgcgagctcaggagcagacgcgttaatatggtccagaccgaggagcagtatgtcttcatacatgacgccattttggaggcttgtctttgcggtgatacaagtgtgcctgcatcgcaggtaaggagcctttattacgatatgaataagctggacccacaaaccaacagctcgcagatcaaggaggaatttcggacacttaatatggtcacccctaccttgagggtggaggactgttccattgcccttttgccgcgtaatcacgaaaagaatcgctgcatggatatcctgcccccagatagatgtctccctttcctgataaccattgacggggagagctccaactacattaacgccgcactgatggacagttacaagcagccctcagcgttcattgttacccagcaccccctacctaataccgtgaaagatttttggaggctggtcctggactaccactgtacttcagtggtgatgcttaatgacgttgacccagcccaactttgtcctcagtattggccagagaatggcgttcacagacacgggccgattcaagtagagttcgtatctgccgacctggaggaggatatcatttcgagaatctttcggatttacaatgccgcacgcccacaggacggatacaggatggtgcagcaattccaatttttgggatggcccatgtaccgggacacccccgtttcaaagcgctcttttttgaagctcattaggcaggtagacaagtggcaagaggaatataacggcggagaggggcgcactgtggttcactgtctcaatggtgggggtcgctccggcactttctgcgccatctccatcgtgtgcgagatgctgcgccaccagagaacggtggacgtctttcacgctgttaagactctgcgtaataataaaccgaacatggttgacctcctggatcagtataaattctgctacgaggtggctttggagtatcttaattctggctag

SEQ ID NO: 201757 - DNA, 4173 bp, synthetic construct
  misc_feature 1..4173: note = Description of Artificial Sequence: Synthetic coding sequence
  source 1..4173: mol_type = other DNA
atgcccagcggcagcttcatgctggtgaacgccagcggccggcccgagggccagagagctcacctgttactgcctcaactgaaggagaatgatacacactgcattgacttccactatttcgtcagctctaagtccaatagcccacctggactgctcaacgtgtatgtcaaagttaacaatgggcccctaggtaatccaatctggaacatctccggggatccaacacggacctggaacagggcagagctagcaatttcaaccttctggccgaacttctaccaggtaatatttgaggtgatcacatcgggtcatcaaggttacctggccatcgacgaggtgaaagtccttggccacccctgtacaaggaccccgcacttcttaaggattcaaaatgtagaagtgaacgctggccagttcgcaacttttcagtgcagcgccattgggagaacagtggctggggaccgtctgtggctgcaggggattgacgtccgcgacgctcctctcaaagaaattaaagtgacttccagtaggcgcttcatcgcttcctttaacgtggtgaacacaactaagagggacgccggcaagtaccgctgcatgattcgaacagaagggggcgtgggtatctccaattacgcggagctggtcgtaaaggagcccccagtcccaatagccccccctcagttggcctctgtgggagcgacctatctatggattcagctaaacgccaattccattaacggcgatggtcccatcgtggctcgggaagttgaatactgtactgcgagcggctcctggaacgatagacaacccgttgattccaccagctataagattggacatttagacccagatacggaatacgaaatcagcgtgctgcttactagacctggcgaaggcggcacaggatcacctgggcctgctctccggacacgtaccaaatgtgccgatcccatgaggggaccaagaaaattagaggtagtcgaagtgaaatccaggcaaatcactatacggtgggagccatttggatacaacgtgacaaggtgtcacagctataacctaactgtgcactactgctatcaggttggcgggcaggaacaagtgcgcgaggaagtctcatgggatactgagaactcacaccctcaacataccattactaacctctccccgtacaccaacgtctccgttaagctgattctgatgaacccagagggacgtaaggaatcccaggagctgatcgtacagactgatgaggatctcccgggagctgttccgacggagagcattcagggatcaacattcgaagagaaaatatttcttcaatggagggagccaactcagacatacggagtaatcacactgtacgagataacctataaagctgtgtcctcctttgacccagagatcgatctgtccaatcagagtggtagagtttctaaactgggcaacgagacccacttcttatttttcggcctttatcctgggaccacatattcttttactatcagggcttccacggctaaaggatttgggccaccggcaaccaaccagttcacgaccaagataagcgcccccagtatgcctgcctatgagttggagacacctctaaatcagacagataacaccgtgactgtaatgctgaaacctgcccacagcagaggcgctcctgtctcagtgtatcagatcgtggtcgaggaggagcgtccgaggcggacgaagaagacaactgaaattctaaagtgctatcctgtgccgatccattttcagaacgctagtctactgaattctcagtactatttcgcggcagagttccccgctgatagtctccaagcggcacagccttttactatcggtgataacaaaacatacaatggatactggaatacacccttgttaccttacaagagttatagaatttactttcaggcagcatctagagccaacggtgagacaaaaatcgactgtgtgcaggtggctaccaagggtgctgcaacccccaaacccgtccctgaacccgaaaagcagacagatcacacggttaagatcgccggcgtgatcgcaggcattttgctatttgtcatcatatttcttggcgtggtgctggtgatgaagaaaaggaagctagcaaaaaagaggaaggagaccatgagctctacacgccaggagatgactgtgatggtcaattcaatggataagtcttatgctgagcagggcactaactgcgacgaggccttctcctttatggacacccacaatctgaacggacgctcagtgtcttcaccctcatcttttacaatgaagacaaacacgctgtcaaccagcgtgccaaacagctactacccggacgaaacccatactatggcgagcgataccagcagtttagtccaatcgcacacttataaaaagcgcgaacccgccgacgtgccctatcagacaggccagttacatccagccatcagagtagccgatctactccaacacatcacacagatgaagtgtgccgagggatacggcttcaaggaagagtatgaaagcttctttgaggggcagtccgccccctgggactcagctaaaaaggacgagaacagaatgaagaacagatatgggaacattattgcctatgaccatagccgcgttagactccagactattgaaggggacaccaacagcgattatattaacggaaattacatcgatgggtaccacagacccaatcattacattgctacccagggccctatgcaagaaaccatatatgacttttggcgtatggtgtggcacgagaatacagctagcataatcatggtgaccaacctcgtggaagttggcagagtgaagtgttgcaagtattggcctgacgacacagaaatatacaaagatattaaagtgaccctgatcgaaacagaacttctggcggaatacgtgatcagaacctttgccgtggagaaacgcggtgtccacgaaatccgggagattagacagttccactttaccggttggccagaccacggggtcccttatcatgctacgggcctcctgggcttcgtccggcaggtcaagtccaagagtcctccaagcgcgggtcctcttgtcgtgcattgtagcgcaggcgcggggcgaacagggtgttttattgtcattgatataatgcttgacatggccgagagagaaggcgtggttgatatttataattgtgtcagagaactgcggtctaggagggtgaatatggttcaaactgaggagcagtatgtgtttattcacgacgctatcctggaggcatgcctgtgcggcgacacttctgtgcccgctagccaagtgagaagtctgtactacgacatgaataagctcgatccccagaccaactcatcccagataaaagaagagttccgcacactcaatatggttacgcctacattaagagtcgaggattgcagcattgcactcctacctagaaaccacgaaaagaacaggtgcatggacatactgcccccagaccgatgccttccattcttaattactattgacggagagagcagtaattatataaatgctgctctcatggatagttacaaacaaccttcagcgtttattgtgacccagcaccccttacctaatacagtcaaagacttctggcgcctggtgctggactaccattgtacttctgtggtgatgctgaatgatgtggatcccgcccagttgtgccctcagtactggcctgaaaatggcgtgcacagacatggtccgatacaagtggagttcgtgagtgctgacttagaggaagacatcataagcagaatctttcggatttacaacgccgcgcggccacaagacggctacagaatggtccagcaatttcagtttctgggttggccgatgtacagggatacccctgtgtcaaaacgatccttccttaagttgattcgccaggtggacaaatggcaggaggagtataacgggggggaggggaggactgtcgtgcactgccttaacggaggcggcagaagcgggaccttttgcgcaatctctattgtatgcgagatgttgcgtcaccagcggaccgtggacgtttttcatgccgtgaaaacgctgcgtaataataagccaaatatggttgacctgctggatcaatataaattctgctatgaggtggctcttgaatatctaaatagtggttag

SEQ ID NO: 201758 - DNA, 4401 bp, synthetic construct
  misc_feature 1..4401: note = Description of Artificial Sequence: Synthetic coding sequence
  source 1..4401: mol_type = other DNA
atgcggggcctgggcacctgcctggccaccctggccggcctgctgcttaccgcagccggcgaaactttttccggaggatgcttgtttgacgagccttacagcacttgcgggtatagtcagtccgagggcgacgacttcaattgggagcaagtaaacacattaacgaagccaacaagtgatccttggatgccatcaggttcattcatgcttgttaatgcgtccgggagacccgaaggacagagagctcatcttcttttgccccagctgaaagagaatgacacccactgcatcgacttccattactttgtgtcaagcaagtctaatagcccacccggtctactgaacgtgtatgtgaaggttaacaatgggcccctgggaaatccaatttggaacatctccggggatccaactagaacgtggaaccgagccgagctggcaatcagtacattctggccgaacttttaccaggtgattttcgaggtcattacttctggtcaccaagggtatctggctatcgacgaggtgaaggtcttagggcacccttgtacccgaacaccccactttctcaggattcagaacgtggaagtgaacgccgggcagttcgccaccttccagtgctccgcaattgggagaacagtcgctggggatcgcctttggcttcaggggatcgatgtccgagatgccccgctgaaagaaattaaagtgacttcaagccggcgctttatagccagtttcaatgtcgttaacactacaaagagagacgcaggaaagtatcggtgtatgataaggactgagggtggggtagggatatcgaattacgcagagctggtggtgaaggagccaccagtacccatcgccccccctcaactggcatccgtgggagctacctacctgtggattcagctgaatgcaaattcaattaatggcgacggtcctatcgtcgcccgagaagtggagtactgcaccgcatcaggaagctggaatgatcgtcagcctgtggattctacaagctataagatcggccacctggaccctgatacagagtacgaaatttccgtgctgctcacccgccccggagagggaggtacaggatcgcctgggcccgcactccgaaccagaacaaaatgtgccgatcccatgcggggcccaaggaaacttgaggttgttgaggtgaaaagtaggcaaatcactattaggtgggaaccattcggctacaatgtcactagatgccattcatataatctgactgtccactattgttatcaggtgggaggccaagaacaggtgagagaagaggtgagctgggataccgagaactcacacccacaacacacgattaccaacctatccccctacaccaacgtctccgtgaagctgatcctgatgaatccagagggccgtaaagagagtcaagagctgatcgtccagacggatgaagatctcccaggtgctgtcccaacagagtcaattcagggttctacgtttgaagagaagatcttcttgcagtggagagaaccaacacagacctatggggtcataactctctatgagatcacctataaggccgtaagcagctttgacccagagatcgacctttctaatcagtcgggccgagtcagcaaactgggcaatgaaacgcactttttattcttcggcctgtaccccggcactacctattctttcactatccgagcctccaccgcaaaaggcttcggtccacccgctaccaaccagttcactaccaaaatatctgcaccgtctatgccggcgtacgaactggaaaccccattaaatcagactgacaatacagttaccgtgatgcttaaacctgcccatagcagaggggcaccagtttctgtttaccaaattgtggtggaggaggagagacccaggcgaactaaaaaaactaccgagattttgaaatgttatcccgtccctatccattttcagaatgcgtctctgttaaactcacagtattatttcgcggctgagttcccggccgacagcctgcaggcagctcagcccttcactattggcgacaataaaacctacaacgggtactggaacacgcctctgctgccttacaaaagttatcgcatatacttccaggcagcatccagggccaacggggaaacgaagatcgattgcgtccaggtggccaccaagggggcagctactccaaagccagtgcccgagcccgaaaagcagacagaccacactgtcaaaattgcgggggttatcgcaggcatcttactcttcgtcatcatttttctaggagtggtcttggtgatgaaaaagcgaaaactcgccaagaagagaaaggaaacgatgtcctcaactcggcaggagatgaccgtcatggtgaattctatggacaaatcatacgcagaacaggggaccaattgtgacgaggctttttcctttatggacacccataacttgaacggacgttcagtctcttccccttcctcctttacaatgaagacgaacactttgagtacatcggtgccgaattcctactatcctgatccatttgtaccgacggctattctcgatttcagtctcaataatgagacacataccatggcttccgatacaagttccctggtccagtctcacacctacaagaagagagagccagctgatgtcccctatcagaccgggcagctccacccagctattcgggtggccgatttgcttcaacatataacgcagatgaaatgcgccgaggggtacgggttcaaggaagagtatgagtcgttttttgaaggacagtcagcaccatgggactccgcaaagaaggatgaaaaccgtatgaaaaacagatacgggaatatcatcgcttatgaccactcccgagtccggcttcagacgatcgagggtgacacgaacagcgattacattaatgggaactatattgacgggtaccatagaccgaatcactacattgccacacagggtcctatgcaggagactatctatgacttctggaggatggtctggcatgaaaacactgcttctatcatcatggtgaccaatctggtcgaggtgggccgtgttaagtgctgtaagtattggccagacgatacggaaatctacaaggatatcaaagttacgctcatcgagaccgaattgctggcagagtacgtcatccgaacttttgcggtggaaaagaggggcgtgcacgagatccgcgaaatccggcagtttcactttacagggtggcccgaccacggggtaccctatcatgcgactggactcctgggctttgtccggcaggtgaagagcaaatctccccctagtgctggccccctcgtggttcactgtagcgccggagctggaaggaccggctgtttcattgtgattgatattatgctagatatggccgaaagggagggggtggtggacatctataactgtgtgcgggaattgagatcccggcgtgtgaatatggttcagactgaggagcagtacgttttcatacacgatgccattttggaagcctgtctttgcggtgatacgtctgtacccgcgtcacaggtgcgctccttgtactatgatatgaataagctcgacccccagaccaacagctcccaaatcaaggaagagttcaggaccctgaacatggttacacctaccctcagagtagaggactgctctatcgcactgctgccccgcaatcacgagaagaaccgatgcatggacattctgccccccgaccgctgccttccttttctcattaccatcgatggcgaatcatccaactatatcaacgccgcactgatggattcttataaacagccctctgctttcattgtgacacagcaccctcttccgaataccgtgaaagatttttggcgcctggtcctcgattatcattgtacctcggttgtcatgttgaatgacgtggatcccgcacagctgtgcccccagtattggccagagaacggcgtccaccgacatggaccgattcaggtcgagttcgtatccgccgatcttgaggaggatattatcagtaggatctttagaatctacaacgctgctcgcccccaagacggttataggatggtgcagcaatttcaatttcttggctggccaatgtatcgtgacacccccgtgtctaagaggtctttcctcaagctgataagacaggtggataaatggcaagaagagtataatgggggagagggaagaaccgtcgtgcactgtctgaatggcgggggaagaagcggcaccttctgcgcgattagcattgtatgcgagatgctacgccatcaacggaccgtggacgtgttccacgccgtgaagacccttagaaacaataagcccaacatggtggacctactggaccagtacaagttttgttacgaggtcgccctagagtatctgaatagtgggtag

SEQ ID NO: 201759 - DNA, 3720 bp, synthetic construct
  misc_feature 1..3720: note = Description of Artificial Sequence: Synthetic coding sequence
  source 1..3720: mol_type = other DNA
atgggcaccctgagcctgcaccccggcatcgacgtgcgggacgcccctctcaaggagatcaaggtcacatcatctcgaaggttcatcgcaagcttcaacgtcgtaaacacaaccaagagagatgctggcaagtacaggtgtatgattcgcactgaaggtggagtgggcatttctaactacgcggaactcgtcgtgaaagagcctcctgttcctatagccccaccacagcttgccagtgtcggggcaacgtacctttggattcagcttaacgcaaactcaataaacggcgacgggcctatcgtggcaagggaggtggagtactgcacagcctccggctcatggaatgacaggcagccagtggactcaaccagctacaaaataggccatctggatcctgacaccgaatacgagataagcgtactcctgacacgcccgggagaaggaggtaccggctctcccggacctgcgctcagaacacgcacaaagtgtgcagaccccatgcgaggtccccggaagctggaggttgtcgaggttaagtcacggcagattaccatccgctgggagcccttcgggtataacgtcacgcgatgccactcctacaacctcactgtgcactactgctaccaggtgggcgggcaggagcaagttcgtgaagaggtatcatgggacacggagaactcacacccgcagcacaccattacgaacctcagcccctacaccaacgtgtctgtaaagttaattttgatgaaccccgaaggtagaaaggaaagtcaggagctgatcgtccagactgacgaggaccttccaggagctgtgccgacagaatcaatacaggggagtacattcgaggaaaagatttttctacagtggcgcgagccgacacagacgtacggcgtcattacactgtacgagattacatacaaggccgtgagttcattcgatccggagattgatttatctaatcagtccggacgtgtgtccaaactggggaatgagacgcacttcctcttctttggactgtacccgggaacgacatattcttttaccattagggccagtaccgcgaagggtttcggcccccctgccaccaatcagttcactacaaaaatatccgccccctccatgccggcctacgagcttgagacccccctgaatcagaccgacaacacggtgaccgtgatgctgaagcccgcccactcacgcggcgcgccagttagcgtgtaccagattgtggtggaggaagagagaccccgccggactaaaaaaacgaccgagatattgaagtgttaccccgtcccgatccatttccagaatgctagcctcctcaactcccaatactattttgctgccgagttccccgctgactccctccaggccgcgcagccatttaccatcggcgacaataagacctacaatggatattggaacacaccgctcttaccatataaaagctacagaatctattttcaggccgcttccagagcaaatggcgagactaagatcgactgtgtgcaggtcgctacaaagggtgccgctactcctaagcccgtgcccgagcccgaaaagcagactgatcacacggttaaaattgcgggtgtgatcgctggcatactgctgttcgtgattattttcctgggggtggtattagtcatgaagaagcgaaaattggccaagaagcggaaagaaaccatgtccagcactcggcaggaaatgactgtgatggttaacagcatggacaaatcctacgctgaacaggggacaaattgtgatgaagccttttcattcatggacacgcataacctgaatggacggagtgtgagcagcccttcgtcctttaccatgaagacaaataccctcagtacctcagtccctaattcatactatcccgacgagacccatactatggcctccgacacgagctccttagtgcagagtcacacctacaagaaaagggaacccgcggacgttccctatcagacaggtcagctacatcctgccatccgggtggccgaccttttgcagcacattacccagatgaaatgtgcagaaggttatggttttaaagaggaatatgagagtttttttgagggacagagcgcaccatgggacagtgcaaaaaaagatgagaaccgcatgaagaaccgctatggcaatattattgcctacgatcacagccgcgtaaggctccagacaatcgagggggatacaaacagcgattatatcaacggtaactacatcgatggataccacagacccaatcactacattgcaacacaaggaccgatgcaggagactatttacgatttctggcgtatggtgtggcacgagaatactgctagcattatcatggtgacgaacctggtggaagtaggcagggtgaaatgttgtaagtactggcctgacgacactgagatatacaaagacattaaggtgactctgatcgagaccgaactgttagctgaatatgttattcgtacatttgccgtcgaaaagcgcggtgttcacgagatccgagagatcagacagttccacttcaccgggtggccagatcacggggtgccatatcacgctaccggacttctgggcttcgtccggcaagtgaaatccaagagccccccctctgctggtcccctcgtggtgcactgcagcgccggtgctgggcggacaggctgtttcatagtcatcgacatcatgttagacatggcggaaagagagggagtggtcgacatctacaactgtgttcgggaacttcgtagccgaagggtcaacatggtacagacagaggagcagtatgtctttatccacgatgccatattggaggcatgtctgtgcggtgacacaagtgtccccgcctctcaggtgcgatctctatattatgacatgaacaagttggatccccagacaaattcttcccagatcaaggaagagttcaggacactcaatatggtgactcccactctgcgggtggaggattgcagcatagcactccttccacgtaatcacgagaaaaacaggtgcatggacatcctccctccagaccgctgcctgccctttctgattacgattgacggagagtcttcaaactatatcaatgccgcactgatggatagctacaagcagcccagtgcctttattgtcacccagcatccactgcctaacacagtgaaagatttttggcggctcgtcctcgattaccactgtactagcgttgtgatgctgaatgacgtggaccctgcacagttgtgcccccagtattggcccgagaatggagtgcacagacatggaccaatccaggtagaattcgtcagtgccgacctggaagaagatatcatatccaggatctttcgcatctacaacgcagctcgtcctcaggacggctacaggatggtgcagcagttccaattcctgggctggcccatgtacagggataccccagtctccaagagatccttcctcaagcttatccgccaggttgataaatggcaggaagaatacaacggcggtgaaggaaggacagttgtgcattgcctgaacgggggtggaagatccggaacattttgcgcgatctccatcgtatgtgagatgctgcggcaccagcggaccgtcgacgttttccacgcagtgaaaacactgcgaaataataagcctaacatggtcgatctcctggaccagtacaagttctgctacgaggttgcgcttgagtaccttaacagcggttag

SEQ ID NO: 201760 - DNA, 2940 bp, synthetic construct
  misc_feature 1..2940: note = Description of Artificial Sequence: Synthetic coding sequence
  source 1..2940: mol_type = other DNA
atgcggcggccccggcggcccggcggcctgggcggcagcggcggccttcgactcctgttgtgcttactgctgttgagttctcggcctggaggttgctccgcggtgagcgcacacggctgccttttcgaccggagactgtgcagccacctggaggtctgcatccaggacggactgttcggccaatgtcaggttggcgtaggtcaggccagacccttactgcaggtcacgagcccagtgctgcagcggctgcagggggttcttcgacagctcatgagccagggcctatcttggcacgatgatctgacacagtacgtgatctctcaagagatggagcggattcccaggctccgccctccagagcctcgccctcgggatcgaagcggactggcgccgaagcgcccaggccccgctggtgaattattattacaagacatccctacaggtagcgctcctgctgcgcaacaccgtttaccgcaaccaccggtgggcaagggcggagcaggggcttcttcctcgctcagtccccttcaagccgaactcctcccacctctgctcgaacacctcctgctgcccccccagcctccccatccgtctcttagctacgagcctgcccttttgcagccatacctcttccatcagtttggatctcgcgatggctctagagtgtcagagggatcacccggaatggtgtccgtaggcccgttacctaaggcagaagctccggcactattttctcgtactgcgagtaaagggattttcggtgatcaccctggtcattcctacggggacctgcccggccctagtcccgcccagctgttccaggactctggtctgctttacctggcacaggaactccctgccccgagtagagccagggtgccgcggttgccagagcagggctcttcatccagggcggaagactcacctgaagggtacgagaaggagggactgggtgaccgcggcgaaaaacctgcgagtccggcagtgcagccagacgccgcccttcaaagactcgccgccgtgctggccgggtatggcgttgagctaaggcagttgaccccagaacaactctcaactctgctgaccctgttgcagctgcttccgaaaggtgccggaaggaaccctggcggagttgtgaatgtaggcgccgacattaaaaagacaatggagggccctgtggagggaagggacactgctgagctaccagctcggactagccccatgcccggccatcctacagcaagtccgacaagcagtgaagtgcagcaggtcccttctccagtgtcttccgaaccgcccaaagctgccagacccccagtcactcccgtgctgctggagaaaaaatctcctctgggacagagccagccgaccgtcgccggtcagccctctgcgcgccccgccgcagaggaatacggatatatagtgactgaccaaaaaccactctctctcgccgcaggtgtcaagcttttggagattcttgccgaacatgtgcacatgtcttctggcagttttatcaacatctcggtggtgggacccgcgctcactttcagaatccgacataacgagcagaacttgagcctggctgatgtcacccagcaggcgggactggtgaaaagcgagcttgaggcccagacaggcctgcagattttacagactggagtgggacaaagagaagaggctgctgctgtgctgccccagacggcgcacagtaccagccctatgaggagcgttcttctaacgctggtggcccttgccggtgtggcgggactgctggtcgccctagccgtggcgctctgtgtcagacaacatgctagacagcaggataaagagcgccttgctgccctgggaccggagggggcccacggagacacaacttttgaatatcaagatttgtgcaggcagcacatggccaccaaatcactgtttaaccgtgccgagggtccgcctgaaccttctcgggtgagtagcgtatcaagccaattttctgacgccgcgcaagctagcccgagttcacattctagtaccccatcctggtgtgaagagcctgcgcaggcgaatatggacatttccacgggacatatgatcctggcctatatggaagaccacctgaggaatcgggatcggctggctaaagaatggcaggctctgtgcgcctaccaagcagagcccaacacctgcgccaccgcccaaggagaggggaacatcaagaagaatcgccatccggacttcctgccttatgatcatgctaggatcaaactgaaggtcgagtcctctcctagcaggagcgattacatcaatgccagccctatcatcgaacacgaccctcggatgcctgcttatattgccacacagggtcctctaagccatactatcgccgatttttggcagatggtgtgggaatccgggtgtacagttattgtgatgttgactcccctggtggaggatggggtcaagcagtgcgataggtattggccggatgaaggcgcctcactttatcacgtgtatgaggtgaatcttgtgtccgaacacatttggtgtgaggatttcttggttagaagtttttatttgaaaaatgtgcagacccaggagacgcggacactcacccagttccatttcctgtcctggccagcggagggaactcctgccagtaccagacctctccttgactttaggaggaaagtaaacaagtgctatagaggcaggtcgtgtcctatcatagtccattgttctgatggcgctgggagaactggtacgtatatcctgattgatatggtgttgaatcgcatggccaagggggttaaggagattgatatcgctgctacgttagagcacgtccgggatcagagacctggtctagttcgtagtaaggaccaattcgagttcgcgctgaccgccgttgccgaggaggtgaatgccattttgaaggctctcccacagtag

SEQ ID NO: 201761 - DNA, 2853 bp, synthetic construct
  misc_feature 1..2853: note = Description of Artificial Sequence: Synthetic coding sequence
  source 1..2853: mol_type = other DNA
atgcggcggccccggcggcccggcggcctgggcggcagcggcggcctgagactcttactgtgtctcctgctgctgtcaagcaggcccggcggatgcagtgcagttagcgcacacggatgcttgttcgatcggagattgtgctctcatctggaggtgtgtatccaagacggactcttcggtcagtgccaggtgggagtggggcaggcgcgcccgttgctccaggtaacctcacccgttctgcagaggctccagggggtgctgcgtcagttgatgtcacagggcctgtcttggcacgacgacctgacccaatacgtgatctcgcaggagatggaaaggatacctaggctcagacctccggagccccgccctcgggatcgatccggcctggcccccaagcgccccggtcccgccggcgagctcctgctgcaggacatccccactggcagcgcaccagctgcacagcatcgcttacctcagccccccgtcggcaaaggcggtgccggcgcctcgtccagcctgtctccacttcaggcagagctcttgccccccctgctggagcatttgctcctgcctccgcagcctccgcaccctagcttgtcttatgagccagcccttctacagccctatctctttcaccagttcggaagtcgggacggctcacgggtgagtgaaggttcccctggaatggtatcagtcgggcccctgcccaaggccgaggcgccagccctgttttcccgcacagcaagcaaggggattttcggtgatcaccccggacatagctatggggatcttccagggccttcccccgctcaacttttccaagatagcggcctgctatacctggcccaagaactgccagctcctagccgcgctagggtgccacgcctgcctgagcagggctcctcttctagagcagaggattctccggaaggatatgagaaagagggtctaggtgatcgaggggagaagcccgcgagccctgcggttcagcctgatgccgcgctccagcgtctcgccgccgttctggctgggtacggcgtggaactccggcagctgactccggaacaactgtccaccctgctaacccttctgcagcttctgccaaaaggagccgggaggaaccctggcggagtggtgaatgtcggtgccgacatcaagaaaaccatggagggacctgtggaaggccgagacaccgccgagctccctgcaagaacctcccctatgccgggtcatcccacagctagtcccactagctcagaagttcagcaggttccaagtcctgtgagctcagagcctcctaaagccgctcggcctcctgttacaccagtactgctggaaaaaaagtctcctttgggccagagtcagcccactgtcgccgggcagcctagtgctcggcctgcggctgaggagtatggatacatcgtcacagatcagaacgtggtcggtcccgctctgacttttcggatccggcataatgaacagaatttgtcattggcagacgtaactcaacaggctggcctcgtgaagtctgaattggaagcccagactggcctccaaatcttacagaccggagtggggcaacgcgaggaagcagccgcagttttaccacagaccgctcacagcacatctcctatgcggtcagtcctgctcacactggttgctctggctggtgtggcaggcttactggtggctctcgccgtggccctttgtgtacggcagcatgccaggcagcaggacaaagaacgccttgctgcacttggccctgaaggagcccacggcgacaccacgtttgaatatcaggacctctgtcggcagcatatggccaccaagtctctcttcaaccgggctgaagggccccctgagccgagccgcgtgtcttcagtcagctcgcagttttccgacgccgcccaggcatcgccttcctcccactcgtctaccccttcctggtgtgaagaacctgcccaagccaacatggatattagcactggccacatgatccttgcttacatggaagatcacctgagaaaccgcgaccggcttgctaaggaatggcaagctctgtgcgcctatcaggccgagcccaatacatgtgccacagcccagggcgaaggcaatataaagaaaaacagacatcccgattttcttccgtatgatcacgcaagaatcaagctgaaggtggaatcctctccaagcagatccgattatatcaacgcctcccctatcattgagcatgatcctcgaatgcccgcctatattgccacccagggtcccctttcacacactatcgccgacttttggcagatggtatgggagtccggctgtaccgttatcgttatgctcacccccctggtagaagacggtgtgaaacaatgcgaccggtactggccggacgagggagcctctctgtaccacgtgtacgaagtgaacctcgtgtccgaacacatctggtgcgaagattttcttgtgcgctcattttacttaaaaaacgtgcagacacaggagactcggacattaacccagtttcacttcctcagctggcctgccgagggaaccccagctagcacacgacccttgttggatttcagaagaaaggttaataagtgttaccgcggtaggtcctgccccattatcgtgcattgcagtgatggagccggaaggactgggacgtacatcctcatcgatatggttctcaatagaatggccaagggagtgaaagagatcgacatcgcagccactttggagcatgtcagagaccaacgcccaggtctggttcggtctaaggatcaatttgaattcgcactcacagcagtggccgaagaggtgaacgccattctcaaggctctaccacagtag

SEQ ID NO: 201762 - DNA, 489 bp, synthetic construct
  misc_feature 1..489: note = Description of Artificial Sequence: Synthetic coding sequence
  source 1..489: mol_type = other DNA
atgcggcggccccggcggcccggcggcctgggcggcagcggcggcttaaggcttctgctgtgcctcttgcttctatcgtctcggcctggaggctgcagtgccgtctccgctcacggttgtctctttgataggcgcctgtgttcccacctcgaagtatgcattcaggatgggctctttgggcagtgtcaggttggtgtgggccaagcccgcccactcctccaagttacaagcccagtactccagcgcttacagggagtcctcaggcagcttatgtcccaggggctgtcatggcacgacgacctgacgcagtatgtgatttctcaagagatggaacgtatcccgcggcttcgccccccggagcctcgtccgcgggatcgcagcgggttagcccccaagcgtcccggtcctgctggggagctcctgctgcaagacatacccacgggaagcgcccctgcagcccaattgctctcagtcccgtccgccggatag

SEQ ID NO: 201763 - DNA, 2670 bp, synthetic construct
  misc_feature 1..2670: note = Description of Artificial Sequence: Synthetic coding sequence
  source 1..2670: mol_type = other DNA
atgagccagggcctgagctggcacgacgacctgacccagtacgtgatcagtcaagaaatggagaggatacctcgtttacgcccccccgaaccgagacccagggatcgctcgggcttggcccctaagcgaccaggccccgcgggagagttactccttcaagacatcccgaccggatccgctccagccgcccagcaccgccttccccagccccccgtgggaaagggcggagctggagcctccagctctttgtccccgcttcaggccgagcttctgcctcccctcctcgaacacctgctgctgcccccacagcccccacatcctagcctgagctatgaacctgccttgttacagccatacctgtttcaccaatttggtagccgggacggatctagggttagtgagggctcccctggcatggttagtgttgggccgctgcctaaggcagaagcacccgctttattctcccgaacagcaagcaagggaatattcggggatcatcctgggcactcgtatggagacttgcctggcccaagccccgctcaactatttcaggattctggcctgctgtacttagctcaggagctgcctgcaccctcgcgggctcgagtgccgagattgcctgagcagggttcaagctccagggccgaggactcccctgaggggtatgaaaaggaggggctaggagataggggcgaaaagcccgcctcacctgctgtgcagcctgacgctgcgctgcagcgtctggccgccgtgttggctggctacggagtcgagctgcgccagctcacgcccgagcagctgagtacactccttaccctgcttcagcttctccccaagggcgccgggcgcaatccaggtggggttgtgaacgtcggagccgatattaagaaaaccatggaaggccccgtggagggacgggatacagcagaactccctgctagaacctctccaatgcctggtcatccaacagcgagccctacaagctctgaggtgcagcaggttcccagtccagtctcatccgagccacccaaagctgccagacccccagtgactcctgtacttctcgaaaaaaagtcccccttgggacagtctcagccaaccgtggccggtcagccgtccgcaagaccagccgccgaagagtacggctatatcgttactgaccagaagcctctgagccttgctgccggcgtgaaactgctagagatacttgctgaacacgtccacatgtcctcagggagctttatcaacatttccgttgtaggccccgctctgacttttaggatccgccataacgaacagaacttgagcctcgctgacgtaactcagcaggctggactggtcaagtcagaactggaggcacaaaccggattgcaaatcctccagactggcgtcggacagcgtgaggaagccgctgcagttctgccacagaccgctcacagtacttctcctatgcgaagcgttctgctgactctcgtcgccctggcaggtgtcgctgggcttcttgtcgcattggcagtggctctctgtgtgagacaacacgcccggcaacaggataaagaacggctggccgctttgggacccgaaggagctcacggggataccaccttcgagtatcaggatctgtgccgtcagcacatggccacaaaatctttatttaacagggctgaagggccccctgaaccctccagggtgagctccgtgtcctctcaattcagcgatgctgcccaggcttccccgagttcacacagctcaaccccctcttggtgcgaagagccggcccaggccaatatggacatctcaacggggcatatgatcctcgcatatatggaggaccatctaagaaaccgggatcggcttgcgaaggagtggcaggccctctgcgcctaccaggcggagcctaatacatgtgcaacagcccaaggagaaggtaatataaaaaaaaaccggcaccccgatttcctgccttacgatcatgcccgaattaagctgaaggtcgagtcttccccaagccgctctgactacatcaacgcatcaccgatcatcgaacacgatcctcggatgcctgcttacatcgctacacagggacccctttctcataccatagccgatttctggcagatggtttgggaatcaggttgcactgtcatcgtcatgttaacccctctggttgaagacggagtgaaacagtgtgatcgttactggcctgatgaaggcgccagtctctaccatgtatacgaggtgaatctggtcagtgaacacatatggtgcgaggatttcctcgtgcgttccttctacttaaagaacgtacagactcaggagacaaggacactgacgcagttccactttctgtcctggccggccgagggaactcccgcgtctactcgccctctgctggacttcagaaggaaggtgaataagtgttaccgaggacggagttgccccattatagtgcactgctctgacggggctggcaggaccggaacgtacattttgatcgacatggttctaaacaggatggccaaaggcgtgaaagaaatcgacattgctgctaccctggaacacgtcagagatcaaaggcccggactggttcggtctaaagaccaattcgagttcgcgctaaccgccgtggccgaggaggtgaatgcaatactcaaggcccttccccaatag

SEQ ID NO: 201764 - DNA, 2853 bp, synthetic construct
  misc_feature 1..2853: note = Description of Artificial Sequence: Synthetic coding sequence
  source 1..2853: mol_type = other DNA
atgcggcggccccggcggcccggcggcctgggcggcagcggcggcctgcgccttctgttatgcctgctcctgctctcttctaggcccggtggatgctctgcggtcagtgcgcatgggtgcctgttcgaccggagattatgcagccacctcgaggtttgtatccaggatggtttgttcggccagtgtcaagtcggagtcggccaggcccgacctcttctccaggtgacaagtcccgtgctgcaacggctgcagggtgtgcttcggcaactcatgagtcaaggcctttcttggcacgacgaccttacgcagtatgtaatatcgcaagagatggagaggatccctcgccttcggccgcccgaacccaggcctcgggaccgctccggtctggctccaaaacgacctgggccagctggggagctgctcctgcaagacattcctaccggatcagctccggcagcccaacaccgcctgccgcaacctcccgttgggaagggcggagccggggcgtccagtagcctgtcccccctgcaggccgagctcctccctccactcttggagcacctgctgctccctcctcagcccccccacccaagcctgtcctatgagcccgccctccttcagccctatctgtttcatcaattcgggtcaagagatggaagccgggtcagtgaaggctccccgggtatggtctcagtgggcccactgcccaaggctgaggctcctgccctgttttcccggacagcgagtaagggaatcttcggggatcatcctggtcacagctacggcgacctgcccggcccctccccggcacagctgtttcaagatagcgggctcctttatctcgcacaggagctgccggccccttccagggctcgcgtgccaagacttcccgagcagggaagctcttccagagccgaggactcccccgaaggctatgaaaaggaaggactgggagaccggggggagaagccagcatccccagcagtgcagcctgatgcagccctgcagcgattagcggcagtgttagccggttacggagttgaattgaggcagctgaccccagagcagctatctacactgctgacacttcttcaactgttgccaaagggggctgggagaaatcctggaggtgtggtgaacgtgggcgcagacatcaaaaaaactatggaaggtccggttgaaggccgtgacactgcagagctccccgcaagaactagtcctatgcccgggcaccccactgcctctcccacgtccagtgaggttcagcaggtgcctagccccgtctcctccgagccaccaaaggctgcaagaccccccgtgacgccagtcctactggagaagaaaagcccattaggtcagagtcagcctacggttgcaggccaaccatccgcaagacctgccgcagaggagtacggatacattgtaacagatcagaatgttgtaggtcctgcccttacattcagaatccgtcataatgagcagaacttgagcttggctgatgtgacccagcaagctgggttagtgaagtcagaactggaagcccagacaggcctgcagattctgcagaccggcgtcgggcaaagagaggaggccgctgcagttctgccccagactgcccacagtacctcacctatgcgaagtgtccttctcaccctggtggctctggctggcgtggctgggctcctcgttgctctggctgtggcactgtgtgtacgccagcacgcacgacaacaggacaaggaacgcctggctgcccttggccccgaaggtgcccatggagacacaacattcgagtaccaggacttgtgccggcagcatatggccacaaagagtttattcaatcgggccgaaggcccccctgagccctctcgcgtgagcagtgtatcttcccagttcagcgatgcagcccaagcatccccttccagccatagttccacccctagctggtgtgaggaacctgctcaagctaatatggacatctccacaggacacatgatactggcttatatggaagatcacttaaggaacagagatagacttgccaaagagtggcaggctctgtgcgcctatcaggccgagccaaacacttgcgcaaccgcgcagggcgaaggcaatatcaagaagaatagacatccagatttcttaccatacgatcacgcccgtatcaagctgaaggttgagtctagtccatctcgctctgactatatcaatgcctctccaattatcgagcacgatccccgtatgcccgcctatatcgctacccagggaccattgagccacaccatcgccgatttttggcagatggtgtgggagagtggatgcacagtgattgttatgcttaccccactggtggaggatggtgtcaaacagtgcgatcgttactggcctgacgagggggcttccttataccacgtgtatgaagtcaatctcgtaagcgagcacatttggtgtgaggatttcctagtgcgctccttttacctgaagaacgttcagacccaagagacgcgtaccctcacacagtttcacttcctctcctggcccgctgaaggcacgcccgctagcactcgaccgctcctggacttccggcggaaagtcaacaagtgctaccgcgggcggtcatgtcctatcattgtccactgcagcgacggagcgggacggaccggcacctacatcctaatcgacatggtgctaaaccggatggcaaaaggggtgaaggaaatagacatagctgcgacgctagagcatgtgcgggaccagcgacctgggctagtcaggagtaaagatcagttcgagttcgccctcactgctgtagccgaagaagttaatgcgattctgaaggcactgccacaatag

SEQ ID NO: 201765 - DNA, 2961 bp, synthetic construct
  misc_feature 1..2961: note = Description of Artificial Sequence: Synthetic coding sequence
  source 1..2961: mol_type = other DNA
atgggcccccccctgcccctgctgctgctgctgctgctgctgctgccgccacgagtgttgcccgctgccccaagctcagtgccccgtggcaggcagctgcccggcagactaggatgtctcctggaggaggggctctgcggagcgtccgaggcttgcgtgaatgacggggtatttggcaggtgccagaaggttcccgccatggatttttacagatacgaggtttctcctgttgccctacaacggttacgggtggcacttcagaaactgtcaggaacaggttttacctggcaagatgactacactcagtacgtcatggaccaggaactggctgacctccctaaaacatatctccggaggcctgaggccagttcccccgctagacccagtaagcacagcgttgggtctgaacggaggtacagtcgcgaaggcggcgcagccctagccaacgctttgaggaggcacctaccctttctggaagctctttcccaggctcccgcctccgatgtgctagcccgaactcacaccgcccaggaccgcccacctgccgagggggacgatcggttcagcgagtccatcctcacttacgttgcccacacgagtgcccttacataccctccagggagtcggacacaactccgagaggatctactccctcgcaccctgggacagctgcagcccgacgaactcagcccaaaggtagactcaggcgttgatcgccatcatttgatggcggcactgtccgcttacgccgcccagagaccccctgccccgccaggagagggatcactagaaccacagtaccttctgagagctccttcaagaatgccaagacctctgctggccccggcggcaccacagaaatggccttcacctttgggagatagcgaggacccatcaagcacaggcgatggcgctaggattcacacactgctgaaagacctgcagagacagcctgcggaggtccggggactgagcggcctggaactcgacggcatggccgagctgatggccggtcttatgcagggcgtcgatcacggcgtggctagaggctctccgggcagagctgctctaggcgagtcaggggaacaggctgacgggcctaaggctactctcagaggagactcctttccggatgatggtgtgcaggatgacgatgacaggttgtaccaggaggttcaccgccttagcgctacgctgggggggctgctgcaggaccacggctcgcgcctcctcccaggagctctaccattcgcccgcccactcgatatggaacggaagaaaagcgaacatcccgagtcatcactcagtagtgaggaggagactgccggcgtagaaaacgtgaagtctcagacatatagcaaggacctcctgggacagcagccacatagcgaacctggcgccgctgcattcggcgaacttcagaaccagatgccaggcccatccaaagaggaacaatctctcccagccggtgcccaggaggcactgtctgacggtctccagctggaggtccagccctctgaggaggaagccaggggatatatcgttaccgatagggaggtcctagggcctgcagtgacatttaaggtctcagcgaacgtccaaaacgttactacagaggacgtggagaaagccaccgtggataacaaggacaaactggaggagacctcaggccttaagatcctccagacaggcgtggggtcaaagtcaaaattgaagttcctgccgccccaggccgagcaagaagactctaccaaattcattgccctcaccctcgtgtccttggcctgtatccttggcgtgctcctcgctagcggcctaatttactgtctgcgccacagtagccagcaccgacttaaagaaaaactgtccggcctaggcggagaccccggcgcagacgctactgcagcctatcaggagctgtgcaggcagcgaatggcaactcggcctcccgaccgaccagagggcccacataccagcaggatctccagcgtttcatcacagttctctgacggtcctataccttcaccttctgctcgttcctcggcctcctcgtggtctgaagagccggtgcaatccaatatggatatctctacaggacacatgatcctctcatacatggaggatcacctgaaaaacaagaatcggctggagaaggagtgggaggctctctgtgcttaccaagctgagcccaacagttctttcgtcgctcagcgcgaggaaaacgtccctaaaaaccggagccttgccgtgctaacctacgaccattcacgcgtccttctgaaggccgagaacagtcacagtcactccgactacatcaatgcctctcctatcatggatcacgatccacgcaaccccgcttatatcgccacccaggggcccctgcctgcaacggtagccgacttctggcagatggtctgggaaagcggttgtgtcgtcattgtaatgctcacaccactggctgaaaatggagtgagacagtgttatcactactggcctgacgaaggctccaacctgtatcatatctacgaggtaaatctggtgagcgaacatatctggtgtgaagactttctggtgaggtcattttacctcaagaatctgcagacgaacgagacacgtacagtgacccagttccacttcctgagttggtatgaccgcggagttccaagctctagtcgctctttgctcgacttcaggcgtaaggtgaataagtgctacaggggccgatcgtgtcctattatcgttcactgttctgacggtgcagggagaagcggaacgtacgtgcttatcgatatggtgctcaacaagatggccaaaggggccaaggaaattgatattgcggccactctcgaacatctgagggatcagcgacccggcatggtccaaacaaaagaacagttcgaattcgctctgactgcggtagccgaggaagtgaatgccatcctgaaggcattgccacagtag

SEQ ID NO: 201766 - DNA, 2997 bp, synthetic construct
  misc_feature 1..2997: note = Description of Artificial Sequence: Synthetic coding sequence
  source 1..2997: mol_type = other DNA
atgggcccccccctgcccctgctgctgctgctgctgctgctgctgcctccccgtgtgctcccagctgctccttcctcggtgccgagaggacggcagttgccgggtcgcctcgatggcgtttttggaagatgccagaaagtgcccgctatggacttctataggtacgaggttagtcccgtcgccctgcagcggctgagggtggcactccaaaagctcagtggtactggttttacatggcaggatgactatacacagtatgtgatggatcaggagctggccgacctgcctaaaacatatctgcgcagacctgaggcttccagccccgcccgcccatccaagcactccgtcggctctgaaaggcggtactcccgggaaggtggggccgccttagcgaatgctttgagacgccatttacccttcctggaggctctcagccaggctccagcctctgacgttctggcaaggacgcatacagcacaggacaggccacctgcagagggggacgatcggttcagtgagtcaattcttacctacgtggctcacaccagcgctcttacctacccccccggttcccggacacagctacgcgaagatctgctgccacggacattaggtcagctgcagcccgatgagcttagtccgaaggtggattccggagtcgatcgccaccatctcatggcagctctgagtgcctatgctgcccaaagacctcccgcgccaccaggagaagggagtctggaacctcagtacctcctaagagctccctcccgtatgccaaggcctcttttggcaccagctgcaccgcagaagtggccaagccccttaggagacagcgaagacccatccagcactggggacggcgcccgcatacataccctgctgaaagacttgcagcgtcagcccgccgaggtccgggggctgtccggcctcgagttggacggcatggccgagcttatggcaggactcatgcagggcgtggatcacggggtggccagaggtagtcccgggcgcgcagctctgggtgagtctggcgagcaagcagatggtccaaaggccacactgagaggagattcctttccagacgatggcgtccaagacgacgacgacaggctctaccaggaggtccatcgcttgagtgcgacactaggcgggttgctgcaggatcatggctctaggctgctgccaggagcacttcccttcgccagaccgctggacatggagcgcaagaaaagtgagcatccagagtcctccctgtcctctgaggaggaaaccgccggtgtcgagaacgtgaaatctcagacctactctaaagatctcctgggtcagcaaccgcattctgagccaggagccgccgcattcggcgagcttcagaatcagatgcctgggccttcaaaagaggagcagtccctgcccgctggagctcaagaggccctgtccgacggcctccagctggaagtgcagccttccgaagaggaggcacggggctatattgtgaccgacagagaccctcttaggccagaagagggcagaaggctggtagaagatgttgctagactgcttcaggtacccagctcagcgtttgctgacgtagaagtgctcggtccagccgtcactttcaaagtctcagccaatgtgcagaatgtcacaaccgaagatgttgagaaagcaacggtcgacaacaaggacaagttagaggagacctcgggattgaaaatcctccagacaggggtaggatctaaatctaaattgaaatttcttcctccccaggccgagcaggaagactccaccaaatttattgccctaacccttgtcagcctcgcatgtattttgggagtgctgctggccagtggtcttatttattgtctgagacatagctcacagcacaggttaaaagagaagctgagcgggcttggcggcgatcctggcgccgatgccacagccgcctaccaggaactctgcaggcagcggatggccaccaggccaccagatcgcccagaaggcccacatacgtctagaatcagctccgtgagcagccagttcagtgatgggcctattcctagccctagtgctaggagttctgcttcgagctggagcgaggagcccgttcagagcaatatggacatctccaccggtcacatgatcctatcctatatggaagatcacctgaagaacaagaatcgattagagaaggagtgggaagcactgtgtgcataccaggcagagccaaattcctcattcgtcgcacagagagaggaaaatgttcctaagaatagaagcctggccgtgctgacttacgaccacagccgggtgctcctgaaggcagagaactcccacagtcacagcgactacatcaatgctagcccaatcatggatcatgatcctaggaatccagcttacattgcgacacaaggacccttacctgccactgtagctgacttttggcagatggtctgggagtccggatgcgttgttatcgtgatgctgactccactggctgaaaatggcgtacgccagtgttaccactattggccagacgaagggtccaacctctaccacatttatgaggtgaatctagtatctgagcacatctggtgtgaagacttcttggtcagaagtttttacctgaagaatctgcagacaaatgaaactaggactgtgactcagtttcacttcctgagctggtatgatcgaggggtgccctcatccagtagatccttgctggacttccggcgtaaagtaaacaagtgttatagagggagatcctgtcctattattgtccattgcagtgacggggccggccgtagcggtacctacgtgcttatcgacatggttcttaacaagatggcaaagggcgccaaagagattgatatagctgcaaccttagaacacctgcgcgaccagcggcctggcatggtgcagacgaaggagcagtttgagtttgcgctgactgccgtcgccgaagaggtgaatgcgattctgaaggccctcccgcagtag

SEQ ID NO: 201767 - DNA, 3048 bp, synthetic construct
  misc_feature 1..3048: note = Description of Artificial Sequence: Synthetic coding sequence
  source 1..3048: mol_type = other DNA
atgggcccccccctgcccctgctgctgctgctgctgctgctgctgcctccgagagtgctacctgccgctcccagctccgtgcccaggggtaggcaactgcccgggcgcctcggctgcctcctagaagaagggctgtgtggggcaagcgaggcatgtgtgaacgatggcgtgtttggtaggtgccagaaggtgccggccatggacttttataggtatgaagtatccccagtcgccctgcagcggcttagggtggctctgcagaagctgagtgggacgggattcacttggcaggacgattatacgcagtacgttatggaccaagagctggcagacctgccaaaaacgtatctccgacgccctgaggcttcctccccggcaaggccatcaaaacacagcgtgggatcagaacggagatacagtcgggagggaggggccgcgctggctaacgcactccgcagacatttgccattcctggaggccctgagccaagcgccggcttcagatgtgttggcccgcacacatactgcccaggatcgaccccccgctgaaggcgacgatagattctctgagagtattctgacttatgtggcacacaccagcgccctcacctatccacccggctccagaactcagcttcgcgaggatctgctgccaaggacactggggcaattgcagcccgatgaattatcccccaaagtggattctggagtcgatcgacaccatctcatggctgctctcagcgcgtatgccgcgcagcgaccccccgccccccccggtgaaggctcactagagccacagtatctacttcgggccccaagtcgaatgccacggccactgctcgcgcctgccgcacctcagaaatggccatctccccttggcgactccgaagacccgtcgtcaactggggacggcgcccggatccacaccttgctgaaggacctgcagcgtcagcccgccgaagtgcgaggccttagcgggttagagctcgatggcatggccgagctcatggcgggcctaatgcagggtgtcgaccacggtgtcgcaagagggagtcccggcagagccgctctgggggagtcaggggagcaggcagacgggccaaaggccaccctgaggggggattcattccccgatgacggggtgcaagacgacgatgacagactatatcaggaggtacatcgcctctcagcaaccctggggggtcttctacaggaccacggatccagattattacccggcgccctgccatttgctcgccctctggatatggagagaaagaaaagcgagcacccagagtccagccttagtagcgaagaagagacggctggagtggagaacgttaaatcgcaaacctactcaaaagacctgttaggtcagcagcctcatagtgaacccggtgccgcagccttcggtgagctacagaaccaaatgcccggcccatctaaagaagaacagagtctgccagcaggagcccaagaagccctttcagacggactacaactggaggtgcaacccagtgaggaagaagccagaggctatatagttaccgaccgagatcctctccgacctgaggaagggaggagactcgtggaggatgtcgcccgacttttgcaagtgccatctagtgcctttgccgatgtcgaagtcttgggtccagccgtgacctttaaggtgtccgcaaacgtgcagaatgttacgaccgaagatgtcgagaaagccaccgttgacaataaggacaaactggaggagacgtctggtctcaaaattctccaaacaggggtgggttccaagtcaaagctgaaattcctccctccacaagccgaacaggaagattccactaagtttatagcccttactttggtgagccttgcctgcatcctgggagtgctgctggccagcggcctaatctactgcctgagacattcttctcagcatagactaaaagagaagctcagcggcctggggggcgaccccggcgccgacgccacagccgcctaccaggagttgtgtcggcaacgaatggcaacacgcccacctgacagacctgagggacctcatacttcaagaatctcaagcgtctcatctcaattttcggatggaccaatcccctctccgagcgctcgaagctctgcctcgagttggtccgaggaacctgtgcagtctaacatggatatcagtaccgggcatatgatcctctcgtatatggaggatcacctgaaaaataaaaataggttggaaaaagaatgggaagccctgtgtgcctatcaggcagagccgaactcctcctttgtagcccagcgcgaagaaaatgtgccaaaaaaccgatcactggccgtactaacatatgaccactctcgcgtcctattgaaggccgaaaactcacacagtcatagtgactacattaatgcatccccaatcatggaccatgatccacggaaccctgcctatatcgccactcagggccctctcccagccacagtagccgatttctggcagatggtctgggagagtgggtgcgtggtgattgtgatgctgacccctctggctgagaatggagtgaggcagtgctatcactactggcccgacgaggggagtaacttgtatcatatatatgaagtgaatctcgtaagcgagcatatctggtgcgaagattttctggtgcggtcattctacctgaaaaacctgcagaccaatgagacacggacagtcacccagttccattttctttcatggtatgacagaggggtgccatcatcatccaggtcattgcttgatttccggcgaaaggttaacaagtgttaccggggacggtcgtgtccgattatcgtacactgctcggatggggcgggcagaagtggaacgtacgtgctgatcgacatggtattgaataaaatggcaaagggggccaaggaaatagacatcgcagcaactcttgaacatctccgagatcaaaggcccggcatggtgcagaccaaagagcagtttgagtttgctctgaccgccgtggctgaggaggtcaatgccattctgaaagccctccctcaatag

SEQ ID NO: 201768 - DNA, 3117 bp, synthetic construct
  misc_feature 1..3117: note = Description of Artificial Sequence: Synthetic coding sequence
  source 1..3117: mol_type = other DNA
atggccgtggagagcgagtacagcctgctgcggaccgaggccagcttcccaacaatgaagatgttctgcgtgagccatacattgccaagggtcgaggttatgttcgtcagtgggcctcagaccagagaacgcactgagcctgtggatccacgctggcagtgtttggtgcaaatgtgggcgggctgtctcctggaggaagggctgtgtggggcatccgaggcgtgtgtcaatgatggcgtgttcggccgatgccagaaagtgcccgctatggacttctatcgctatgaggtcagccccgtggccctccagcgtcttcgtgtcgcgctacaaaaactgtcagggacaggattcacctggcaggatgattacacccagtatgtcatggaccaggagttggccgacttgcccaagacctacctgaggagaccagaggcgtcttcccctgccaggccaagcaagcactctgtcggctccgagaggaggtactcccgtgaagggggggctgccctggcgaatgcactgagaaggcacctgcctttcctggaggccctttcacaggcgcctgctagcgacgttctggctcgaacacacactgctcaagaccggccacccgcagagggggacgacaggttcagcgaaagcatccttacgtacgttgcccatacatctgcactcacatacccacccgggagcagaactcagctacgggaagacctgttgccacggactctgggccagttacagccggacgagctttccccaaaagtggatagtggggtggacaggcaccaccttatggcagccctgtccgcatacgctgcacagcgcccccctgctcctcctggcgagggttctctggagccccaatatttgctgcgcgctccatctcggatgcctagacctcttctcgcacccgccgctccccagaagtggccaagtccactgggcgatagcgaagacccatctagcacaggggacggagccaggattcacacactgctgaaagatctccaacgacagcctgcagaggtgcggggcttgtctggcctagaattagatggaatggccgagctgatggcgggactcatgcagggcgtcgaccacggagttgctaggggctctcccggaagggccgccttgggggagtcaggtgagcaggccgacgggcctaaggctacattgagaggggactccttccccgacgacggcgtacaagatgatgacgaccggctctatcaagaggttcatcgcttgtccgctaccctaggagggctgctgcaggaccatggaagcaggctgctgccaggcgctctgccctttgctcggccattggacatggaaaggaaaaaatccgagcaccccgagagtagcctctcctcggaggaagaaacagctggcgtcgagaatgtcaagtctcagacatatagtaaagacctgttgggccagcagcctcatagtgagccgggcgctgccgccttcggagagctccagaatcagatgcctggaccatccaaggaagagcagtctctcccagcaggagcacaggaagcactttcagatggccttcaactagaggtgcagcctagcgaggaagaagcccggggctacattgtgaccgaccgtgacccgctacgtcctgaggaaggcaggcgcttggtcgaggatgtggctagactgcttcaggtccccagcagcgcctttgccgacgtcgaagtgttagggccagccgtcaccttcaaagtgagcgcaaatgttcagaacgtgactactgaggatgtggagaaagccaccgtcgataataaggataagctggaggagacatccggcttaaagattctgcagaccggagtcgggtccaaatctaagttgaaatttctgcctccccaggccgagcaggaggattccaccaaatttatagcgcttactctggtgagtctagcctgtatccttggggtcctgctagcgtccggcctcatttattgtctgagacacagttctcagcacaggttaaaggagaagctgtccggcctgggcggggatcccggtgccgatgctaccgcggcgtatcaggagctgtgcaggcagaggatggctacccggccaccagacagacccgaaggaccacacacctccaggatctcctccgtctccagccagtttagcgatggtccgataccaagccccagcgcacgatctagcgcttcaagctggagcgaggagccagtgcagtctaatatggatatatccacaggccacatgatcctatcatatatggaggaccacctcaagaataagaaccggttggagaaagagtgggaggccctgtgcgcttaccaggcagaacctaacagttcttttgtagcacaacgcgaggaaaacgtgcctaaaaacagaagtctcgcggtgctcacttatgatcactcccgagttttgctcaaagcagagaattcccacagtcactccgattacataaatgcctccccaataatggaccatgatcccagaaacccagcatacatcgccacacaaggccccttacctgcaacagtcgctgatttttggcagatggtctgggaaagtggctgcgttgtaatcgtgatgctaactcccctcgcagaaaacggtgtgaggcagtgctatcactactggccagatgaaggatctaatctgtatcatatctacgaggttaacttagtgtctgaacacatttggtgtgaagactttttggtacgatccttctatctgaagaatctgcagacaaatgagacacgaacagtaactcagtttcactttctgtcctggtatgaccgcggggtcccgagcagctcaagaagcctgctggacttcaggcggaaggtgaacaaatgttacagaggtcgtagttgcccgattatagtgcattgttctgatggcgctggacggtcaggaacctacgtgctgatcgatatggttctgaataaaatggctaagggagccaaggagattgacattgccgcgacactggagcacctaagggaccaacgcccaggaatggtgcagacgaaggaacaatttgagtttgccctgactgcagtcgctgaagaagttaatgccatcctaaaggctttgcctcagtag

SEQ ID NO: 201769 - DNA, 2934 bp, synthetic construct
  misc_feature 1..2934: note = Description of Artificial Sequence: Synthetic coding sequence
  source 1..2934: mol_type = other DNA
atgggcccccccctgcccctgctgctgctgctgctgctgctgctgccaccaagagtgctccctgcggccccatcctcagtgccccgcggacgacagttaccagggcggcttggatgcttgctcgaggaaggtctgtgcggagcgtctgaggcatgcgtgaacgggtttacttggcaggacgactacacccagtatgtcatggatcaggaactcgccgacctccctaagacatatctgcggaggccagaagctagctccccagctcgccccagcaaacattcagtcggctccgagcgacggtattccagggaaggaggagcagccctagccaatgccctgaggcgacacctgccatttctggaagccctgtcacaggctccagccagtgacgtgctggcaagaactcacactgcacaggataggccccccgccgagggtgacgacaggtttagcgaatcaatcctgacgtacgtggcccatacatcagctttgacttacccccctggcagccgaacccagttgagggaggatctcctgcctaggacacttggtcagctgcagcccgatgaactgtcacccaaggtggattcaggtgtggatagacatcatctgatggccgccttatcggcttacgccgcccagcgaccccctgccccccctggggaaggctctctggagccccaatacttactacgcgctccaagcaggatgccaagacctctcctggccccagccgccccacagaaatggcctagtcctttgggcgactccgaggatccatccagcaccggagatggggctaggatccacacactgttgaaggacctccagcgacagcccgccgaagttaggggactgtcagggctcgaactggacggaatggctgaactaatggctggactaatgcagggcgtggaccacggggtcgcaagggggtctcccgggcgagctgccttgggggaatctggagaacaggccgatggtccaaaagcaacactgcgaggcgatagtttccctgatgatggggtccaggacgatgacgatagactgtaccaggaagtgcacagactctccgcaactcttggcggactgctgcaggaccacgggtcacggcttctccctggcgctctcccctttgctagaccacttgacatggagaggaagaagagcgaacacccagagagctctctctcctcggaagaagagacagccggcgtcgagaatgttaagagccagacttacagcaaagatctccttggccagcagccgcacagtgagccaggtgccgctgcttttggggagcttcagaatcagatgccgggacccagcaaggaggagcagagcctgcctgccggggcccaggaagctcttagtgacggtctccaactggaagtgcagccatcggaggaggaagctaggggctacatcgttaccgaccgggacccacttcggccagaggaggggcgccgcctggtcgaggatgtagctcgattgttgcaggtgcccagctctgctttcgccgacgtagaggtgctaggtcctgctgtgacatttaaggtgtccgcaaacgtccagaacgtgaccacggaagatgttgagaaggctacagttgacaataaagacaaacttgaagaaaccagcggcctgaagatcttgcagacaggagtggggtcaaaaagcaagttaaagtttcttccccctcaggccgagcaggaggactccaccaaattcatcgctcttactctggtttcactcgcatgcattttgggagtactgctcgcaagcgggctcatctattgcctccgacattcttcccagcatcgcttgaaagaaaaacttagcgggctgggcggtgatccaggagccgacgccactgccgcttatcaggagctgtgtaggcagcgcatggccacccggcccccagatcgacctgaggggccccacacgtccaggataagcagtgtgtcctcccagttctcggacgggccaattccaagtccatctgccaggtcctctgcatccagctggtcagaggagcctgtccagtccaacatggacattagtactggccatatgattttaagctacatggaggatcacctgaaaaataaaaatcgcctggaaaaagaatgggaggcactgtgtgcttatcaggccgaaccaaactccagttttgtagcccagcgtgaggaaaacgtgcccaaaaatcgctccctggcagtcttaacatacgatcattcaagggtgctgctgaaggcagaaaactcccactcacatagtgattacattaatgcttcccccattatggatcatgaccccagaaatccagcctatattgctacgcagggcccgctaccggcaacagtagccgatttttggcaaatggtctgggagtctggctgcgtcgtcattgtgatgttaacccctcttgcagagaatggcgttcgccagtgttatcactactggcctgacgaaggatcaaacctataccatatctatgaggtcaacctggtttcagaacacatttggtgtgaggacttcttagtgcggtcgttttatttaaaaaatctgcaaacaaacgaaactaggaccgtaacccagtttcatttcttgtcttggtacgacagaggagtaccatcctcttcgcgctccctactcgattttagacgaaaagtcaataaatgttatcgcggcagaagttgtcccatcattgtgcattgttctgacggggctggtagaagtgggacctatgtgctgatcgatatggtcctgaacaaaatggctaaaggagccaaggagatcgacatagctgccacactggagcatttgagggaccaaagacctggcatggtacagacaaaggaacaatttgaattcgctctaactgccgtggctgaggaggtgaacgctatcttgaaggcactgccccaatag

SEQ ID NO: 201770 - DNA, 3651 bp, synthetic construct
  misc_feature 1..3651: note = Description of Artificial Sequence: Synthetic coding sequence
  source 1..3651: mol_type = other DNA
atgggccacctgcccaccggcatccacggcgcccggcggctgctgcccttactgtggctctttgtgctgttcaagaacgctaccgcctttcacgtgactgtccaggatgataataatattgtcgtgtccttggaggctagcgacgtgatctcgccagcgtcagtctatgtcgtcaaaattacaggagaaagcaaaaactactttttcgaatttgaggagttcaacagtacactgccccctcccgtcatattcaaagcctcgtaccatggcttgtattatatcataactctggtagtggttaacggaaacgtggtcaccaaaccgtcccgctcgatcactgtgctgactaaacccctgcccgttacgtccgtgagcatatacgactacaagccgagccccgaaaccggggtgctatttgagattcactacccagagaagtacaacgtgttcactcgggtgaacatatcttactgggagggaaaagacttccgaacaatgctgtataaggacttcttcaaaggcaaaaccgtttttaaccactggctgcccggcatgtgttactctaacatcaccttccagttggtttcggaggctaccttcaataagtctactctggttgagtatagtggtgtttcacacgagccaaaacagcataggactgcaccctacccacctcagaacatttcagtaaggatcgtaaacctgaacaagaataattgggaggaacaatccggaaactttcctgaagagtcgttcatgagatcacaggatacaatcggtaaggagaaactgtttcactttactgaggaaacccctgagatccccagcggcaacatctcttccggatggcctgattttaatagttccgattatgagacaacatcacagccatactggtgggatagcgcatcagcggcacccgagagcgaagatgaattcgtctccgtcttgcccatggagtacgaaaataactcaacactgagcgagacagagaagtcaacctctgggtccttttccttttttcccgtccagatgattctaacttggctcccccccaaaccccctacggcattcgatggattccacattcatatcgagcgagaagagaattttacagaatatctgatggtcgacgaagaggcacacgagtttgtcgcagagctcaaagaaccaggtaagtataagctgagcgtgacaacattttcatcctcaggctcatgcgaaacaaggaaatcgcagagtgcgaaatcactcagcttttacatttccccctcaggtgagtggatcgaggagctgacagaaaagcctcaacatgtctctgtgcacgttctgtcctctactactgccctcatgtcctggacctccagccaagagaactacaatagcactattgtgtctgtagtttccttaacctgtcagaagcaaaaagagagtcagcggctcgaaaaacaatattgtacccaagtcaatagctccaagcccatcatcgagaacttggtaccaggggctcagtatcaagttgttatatatcttcgcaaaggacctctgattggccccccaagcgatcctgtcacgttcgccatcgtccccaccggcattaaggaccttatgctttaccccctaggccccactgccgtcgtgcttagctggacgagaccttatttaggtgttttccggaaatacgtagtggagatgttttattttaacccggcaaccatgaccagcgaatggacaacatattatgagattgcggctactgttagtctaactgccagcgtgagaattgccaatctgctgcctgcatggtattataatttccgtgttaccatggttacatggggcgaccctgagctatcatgctgcgactcctctaccatatcttttatcaccgcacccgtagcaccggaaattacatcagtggaatatttcaacagtctcctgtacatctcatggacgtacggcgatgacacgacggatctcagtcactcacggatgctccattggatggtggtcgctgaggggaaaaagaagatcaagaagtctgtgacaaggaatgtgatgacagccatcctgtccttacctccgggcgacatttataacttatcagtcacagcttgcaccgaacgcggaagtaatacttccatgcttcgattggtcaaactcgaacccgcaccccccaaaagcctgtttgccgttaataagactcaaacctccgttaccttactgtgggtagaggagggtgtcgccgacttcttcgaggttttttgtcagcaggtcggttcttcccagaagaccaagcttcaggagcctgtggctgtttcctcgcatgtcgtgacgatttcttccttgctgcccgcgaccgcatataattgcagcgtgacatccttttcccatgatagccctagcgtgcctacgttcattgcagtttccacgatggtgacggagatgaacccaaacgtagtggtcatctcagtcttagccatcctctctacattgcttatagggctattgctggtgaccctgatcatcttgagaaagaagcatttgcaaatggcacgcgagtgtggtgccgggacgtttgtgaatttcgcgtctctggagagagatggcaaactaccatataactggcgcagatctatcttcgcattcctgacattactcccttcatgcctttggactgactacttgctcgccttttatatcaacccctggtcaaaaaacgggctgaaaaaaagaaagttaacgaatcctgtgcaactggacgatttcgatgcctatattaaggatatggctaaagactccgactataaatttagcttgcagtttgaggagctgaagctgattgggctggacattccacactttgccgcagaccttccgttaaaccgctgcaaaaacaggtacaccaatatactaccttacgacttcagcagggtgcgcctggtgtccatgaacgaagaagaaggagcagattacattaatgcgaactacatccccgggtataacagcccccaagaatacattgcgactcaggggccacttccggaaactcggaacgacttctggaaaatggtgttacaacagaagtcccaaatcatcgttatgctgactcagtgcaacgagaaacgccgagtgaaatgcgaccactattggccatttacggaggagccaatcgcatacggcgacattactgttgagatgatttccgaggaagaacaggatgattgggcgtgccgccattttagaataaactatgccgacgaaatgcaggacgtgatgcacttcaattataccgcttggcccgaccacggcgtgcccacagccaacgccgcggaatctatactgcagttcgtgcacatggtgcgacagcaggcaacaaaatctaaggggcccatgataattcattgctctgctggggttggtagaacagggacctttatcgccctggatcgtctcttacaacacatcagggaccacgagttcgtggatatacttggcctggtgagcgagatgagatcctatcgcatgagcatggtgcagactgaagagcaatacattttcatccatcagtgtgtacagctcatgtggatgaagaaaaaacaacagttttgtatctccgacgtgatatatgagaacgtgagcaaaagttag

SEQ ID NO: 201771 - DNA, 3567 bp, synthetic construct
  misc_feature 1..3567: note = Description of Artificial Sequence: Synthetic coding sequence
  source 1..3567: mol_type = other DNA
atgggccacctgcccaccggcatccacggcgcccggcggctgctgcctctcctgtggcttttcgtgctgttcaaaaacgccaccgcattccacgtaaccgtccaggatgataacaacattgtcgtcagcctggaggcctcagatgttatctcccctgcaagcgtatacgtggtgaaaattacaggcgagtctaagaactactttttcgagttcgaagagttcaactccactctgccaccgcccgtgatctttaaggcctcataccacgggctatactacatcattactcttgtggttgtgaacggcaacgtggtgactaagccatccagatctattaccgtgctgacaaagccacttcctgtgactagtgtgtcaatctatgattataagccaagtcctgagacaggcgtcctcttcgaaattcactatcctgagaagtataatgttttcacaagagtgaacatatcttactgggaggggaaagacttccgtacaatgctgtacaaagacttcttcaaagggaaaaccgtcttcaaccactggttgccgggtatgtgctattccaacatcaccttccagttggtgtctgaagccacttttaacaagagcaccctggtggaatactctggagtgagtcacgagccgaaacagcacaggaccgccccctacccaccacagaatatatctgtgcgcatcgtgaacctgaataagaataactgggaggaacaatctggtaacttcccagaggaatcctttatgcggagtcaggataccatcggaaaagaaaaacttttccattttactgaggaaacccccgagatcccatcgggtaacattagcagcgggtggcccgattttaacagcagtgactacgagaccacttcgcagccatactggtgggacagcgcctccgccgcccctgaaagtgaagatgagttcgtttctgtattgcccatggaatatgagaataattcaactctgagtgaaaccgaaaagtctaccagtggaagcttcagtttctttccagtccagatgatcctgacttggcttccccctaagccacctacagccttcgacggcttccatattcacatagaacgtgaggagaatttcaccgaatatctgatggttgacgaggaagctcacgagtttgttgctgagctcaaggaacccggtaaatacaaactgtccgtgactacatttagctcgtctggctcctgcgaaacacggaaatcccaaagcgcaaaatccttgtccttctacatcagcccttccggcgagtggattgaagaactgaccgagaaacctcaacacgtgtccgtccacgtgctgagttcaacgactgccctcatgtcatggacgagtagccaggaaaactacaactccacgatcgtgtccgttgtctctctgacctgtcaaaagcagaaagagagtcagcggctggaaaagcagtattgcacacaagtgaatagttccaagcccattatcgagaacctcgtgcctggggctcaatatcaggttgtcatttatctccggaaaggcccgctgattggcccaccaagcgacccagtgacttttgcaatcgtgccaacaggcattaaggacttaatgctttaccccttggggccaaccgcagtggtgttgtcttggaccaggccctatctaggggtatttcgtaagtatgtagttgagatgttctactttaatccggcaactatgacttcagagtggactacatattacgaaatcgcagcaacggtgagtctaaccgcttccgtccgtattgccaacctgctccccgcatggtattacaacttccgcgtgactatggtgacctggggggacccagaactttcttgttgcgactcctccacaatatcatttatcactgcgccagtcgcaccggagatcacaagtgtagagtattttaatagcctgctttacatatcttggacctacggagacgacactacggacttgtctcattcccggatgctgcactggatggtggtcgccgagggaaagaagaagattaaaaaaagtgtgactcgtaatgtgatgacagcaatcttgagtctgcccccaggcgacatttacaacctgtcagtgacagcctgcacagagcggggatctaatacatctatgctgagactggttaagttagagcccgcgcccccaaaatctcttttcgctgttaataagacccagactagtgttaccctgctctgggtcgaggagggtgtggccgatttcttcgaagtgttttgccagcaagtgggcagctcgcagaaaaccaaactccaggaacccgtggcagtatcatcccatgtagtgacaattagcagcctgctccctgcaacagcttataactgcagtgtgacctccttctcacacgacagcccgtccgtcccaacgttcatcgcagtctcaacgatggttacggagatgaatcccaacgtcgtggttatcagtgtattagccatactgtcgacactgctcataggactgttactcgtcactttaatcattttgcgtaagaaacacctccagatggccagggagtgtggcgctggcactttcgtaaacttcgccagcttagaacgggacggcaagctgccttacaactggtctaagaacgggctcaagaagaggaagttaactaacccggtgcaattggacgatttcgatgcatatatcaaggacatggctaaagactctgactacaagttctccctgcagtttgaagagctcaagctgattgggctcgacataccacattttgctgctgatcttcctcttaaccgctgtaagaaccgttatactaacattctcccatacgatttcagtcgcgtgagactggtttcaatgaatgaggaagagggggctgactacataaatgcaaattatatacccggatacaatagtcctcaggagtatattgctacccaggggcctcttcccgagacgcgaaacgacttctggaaaatggtgcttcagcagaagtcccagatcattgtaatgctcacacagtgcaatgagaaacgtcgggtaaaatgcgaccactattggccttttaccgaggagcccattgcttatggagatatcaccgtggaaatgatttcggaggaggagcaggacgattgggcctgccgacatttcagaatcaactacgctgatgaaatgcaagatgtgatgcactttaattacacagcgtggcccgaccatggagtaccaaccgccaatgctgccgaaagtattctccagttcgtccacatggtgaggcagcaagcaactaaatccaaaggtcccatgatcatccactgctctgctggggtgggcaggaccgggactttcattgctctcgatcgtctccttcaacatataagagaccatgagttcgtggatatccttgggttagtgtccgaaatgaggagctaccgtatgtcaatggtgcagaccgaggaacagtacattttcattcaccagtgcgtgcagctcatgtggatgaagaagaagcaacagttttgcatcagcgacgtgatctacgagaacgtctctaagagctag

SEQ ID NO: 201772 - DNA, 1218 bp, synthetic construct
  misc_feature 1..1218: note = Description of Artificial Sequence: Synthetic coding sequence
  source 1..1218: mol_type = other DNA
atggtgaccgagatgaaccccaacgtggtggtgatcagcgtgctggccatcctgtcaacactacttattggcctcctgctggtaactctgatcattctgcggaagaaacatttgcagatggccagggagtgtggtgcgggcactttcgtgaattttgcgagcctggaaagggacggaaagctgccctacaattggcgcagatctattttcgcatttctgacactcctgcccagttgtctgtggaccgactacctcctagctttttacatcaacccttggagtaagaatgggctcaagaaacggaaactgaccaatcctgtgcaactagatgactttgacgcttatataaaagacatggctaaagacagtgattacaaattttcactgcagttcgaggaactcaagctgatcggactcgatatcccccatttcgccgctgatctgcctttaaatcgttgcaaaaacaggtatacaaatattctgccgtacgacttcagtcgtgtccggttggtgtctatgaatgaggaggaaggggctgattacatcaacgctaactacattcctggatacaattccccgcaggagtacattgcaacacaggggcccttaccagagacccgaaatgacttctggaagatggtgctgcaacaaaaaagtcagatcatcgtcatgctgactcagtgcaacgagaaacgaagggtcaaatgcgaccactattggcccttcaccgaagagcctattgcctacggcgatatcaccgtagaaatgatctctgaggaagagcaggatgattgggcttgccggcattttagaattaattacgcagatgagatgcaggacgttatgcattttaactatacagcctggcccgaccatggcgtccctaccgctaatgccgctgagagtattttgcaatttgtgcacatggtgcggcagcaggctaccaagagcaaggggccaatgatcattcattgctccgcaggcgtgggtagaacaggcactttcatcgccctagaccgcctactccaacatatccgggaccatgaatttgttgacatcctgggcctcgtgagcgaaatgagatcctatagaatgtcgatggtccagacagaggaacaatacatcttcatccaccagtgcgtacaactaatgtggatgaagaagaagcagcagttctgcatatcagatgtgatttacgaaaacgtttcgaaatcttag

SEQ ID NO: 201773 - DNA, 1218 bp, synthetic construct
  misc_feature 1..1218: note = Description of Artificial Sequence: Synthetic coding sequence
  source 1..1218: mol_type = other DNA
atggtgaccgagatgaaccccaacgtggtggtgatcagcgtgctggctattctgtccactctgttaataggtctgctactggtcacgctgatcatactgagaaagaaacaccttcagatggccagagaatgcggcgccgggacctttgtaaacttcgcctcacttgaacgtgacggaaaactcccatataactggagacgctcaatcttcgccttcctcaccctgttgccttcatgcctgtggacagactaccttcttgccttttatatcaatccttggagcaaaaacggactgaaaaaacgaaagttgactaacccagtgcaactggatgacttcgatgcatatatcaaggatatggcaaaagacagcgattacaagttctccctgcaattcgaagaactgaagctgatcggactggacattcctcacttcgcagcagatctgccacttaacaggtgtaagaacagatacaccaatatactgccgtacgacttctctcgcgtaagactagtgtcaatgaacgaggaggaaggcgcagactacataaatgcaaattatattccggggtacaacagccctcaggagtacattgccacccaaggacccctgcctgaaacccgcaatgatttttggaagatggtgctccagcagaagtctcagattatcgtcatgcttactcagtgtaatgagaaaaggagggtcaagtgcgatcattactggccgttcaccgaggagcctattgcatatggcgatattactgtcgaaatgatttctgaagaagaacaggacgactgggcttgtaggcacttcagaattaactacgctgacgagatgcaggacgtcatgcatttcaactacactgcctggcctgaccacggcgttcctaccgcgaatgcggccgagagtattttacagttcgtgcacatggtgaggcaacaagctaccaagtccaagggcccgatgatcatacattgctcagccggcgtgggtcgcacaggaacatttatcgccctagacagactgttgcagcacattagggatcatgagttcgtggacatactgggactagtgtcagagatgcggagctaccggatgtctatggtgcagactgaagaacagtatatctttattcaccagtgcgtccaactgatgtggatgaagaaaaagcagcagttctgtatatccgacgtgatatacgagaatgtgtcaaaatcctag

SEQ ID NO: 201774 - DNA, 1134 bp, synthetic construct
  misc_feature 1..1134: note = Description of Artificial Sequence: Synthetic coding sequence
  source 1..1134: mol_type = other DNA
atggtgaccgagatgaaccccaacgtggtggtgatcagcgtgctggccatcctgtctactctgctgatcggacttctgctggtcacactgatcattcttaggaaaaagcacctccagatggctagggagtgcggcgcagggacctttgttaactttgcaagccttgagagggacggtaaattgccatataattggagtaagaatggcctgaagaaacggaaactcacaaatcccgtgcagctcgacgatttcgatgcttatatcaaggacatggccaaagacagtgattacaagttctcattgcaattcgaagaacttaagctgattggcctggacatcccacattttgcggcggacttacccctgaaccgttgtaaaaataggtacactaacattctgccctatgactttagccgcgttcggctcgtttccatgaatgaggaagagggagccgattacattaacgcaaactacattcctggatataattctccccaggagtacatcgccactcagggtccacttccggagactaggaacgacttctggaaaatggtgctccagcagaagagccagattatcgtgatgctgacccaatgcaacgagaaaaggagagtcaagtgtgatcattactggccattcactgaagagccaatagcttatggcgatatcacagtggagatgatttctgaggaggagcaggatgactgggcttgccggcacttccgcatcaactacgctgatgagatgcaagacgtgatgcattttaactataccgcctggcccgaccacggcgtgcctaccgctaatgcagcagaatcaatcctccagttcgtacatatggtacgccaacaggcaacaaaatccaaaggtccaatgataatacattgctccgcaggagtgggcaggacaggcactttcatcgccctcgatcgcctgctgcaacatatccgtgaccatgaattcgtcgacatcctaggactcgtctctgagatgaggagctatcgaatgtccatggtgcagaccgaagagcagtacattttcatacatcagtgtgtgcaattgatgtggatgaagaagaaacagcagttctgtatcagcgacgttatttacgagaacgtttcaaagtcctag

SEQ ID NO: 201775 - DNA, 1134 bp, synthetic construct
  misc_feature 1..1134: note = Description of Artificial Sequence: Synthetic coding sequence
  source 1..1134: mol_type = other DNA
atggtgaccgagatgaaccccaacgtggtggtgatcagcgtgctggccatcctttcgacactgctcataggccttctactggtgactctgataatcttgcgcaaaaagcatctgcagatggcaagggagtgtggggctggtacatttgtaaactttgccagtctagaacgggacgggaagttaccctacaactggagcaaaaacggcctcaaaaagcgcaaattaactaacccagtgcagctcgacgacttcgacgcgtatattaaggacatggcgaaggactctgactacaagttttccctgcagttcgaggagctcaagcttatcggtctggatatccctcattttgccgcagacctccctctgaatcgttgtaagaacaggtacaccaacattctgccttatgacttcagcagggtccgtttggtgtctatgaacgaagaagaaggcgcagactatatcaatgcaaactacatacccggatacaacagcccccaggagtacattgccactcagggaccactgccagagacaagaaatgacttttggaagatggtactccagcagaagtctcagatcattgtgatgctgactcagtgtaatgaaaaaagacgagtgaaatgcgaccattactggcccttcacggaagagcccattgcttacggtgatatcacggtcgaaatgatctccgaggaggaacaggacgattgggcgtgtcggcatttcaggattaactatgcggatgagatgcaggatgtgatgcactttaactacaccgcctggccggatcacggagtgcccactgctaatgctgccgaatccatcttgcagtttgtgcatatggttagacagcaggctaccaagtctaagggacccatgattatccattgctcagccggggtgggtaggaccggcaccttcatcgcgcttgaccggcttttgcagcatatccgcgaccacgagttcgtggatatcctgggccttgtatccgagatgaggagttacagaatgtcgatggtgcagacagaagagcagtacatctttattcaccagtgtgtgcagctgatgtggatgaaaaagaagcagcagttttgtatctcggatgtgatctacgaaaatgtatcaaaatcctag

SEQ ID NO: 201776 - DNA, 6888 bp, synthetic construct
  misc_feature 1..6888: note = Description of Artificial Sequence: Synthetic coding sequence
  source 1..6888: mol_type = other DNA
atggacttcctgatcatcttcctgctgctgttcatcggcaccagcgagacccaggtcgatgtgtccaacgtggtgccgggaaccagatatgacatcaccatcagcagcattagcaccacgtatacatctcccgtgacccggatcgtaactacaaacgtgacaaagcctggaccccccgtttttcttgccggggagcgcgtaggctctgcggggatcctgctcagctggaataccccccctaacccaaatggaaggattatctcatacattgtgaagtataaagaggtgtgcccttggatgcagactgtatacacacaagtgaggtctaaaccagattctctcgaagttctgttaacaaatctgaatccaggtactacttatgagattaaagtcatcattttaaacgccactaaggtaggatgtctgctgagcccaattcttctgaataccgttttagagggcctcgctcgcgctattaacctgacaagagagtgtcagaccgtggacgcaggccagtgcgtgcaatgtgcggttcgggaacccaaacaggggtctacttctggcggtagggcacagactaacaaaaaaacggcagtgacatcggccgatctaaatcatactgcaggcgatcttcgtacgggacgtcttccccctcaacctctaacggccgagcagcccaattgggaggctcctcctagccgaggccggctcacgccacataaagcggggtatagctccgctacggccgccggcacgcaggctaaccgggtgtggtctcggccactggctaagatccagactacgattagagaatattataaacatctctacgcaaagaaggaagggatcctgccaaatagtttttacgaagcttctataattttgattccgaagccggttcctgaaggccccccacagaactgcgtgacaggaaacattactgggaagtctttctccattctgtgggacccacctactatcgttaccggtaagttttcatatagagtggaactttatggccccagtggtaggatcttggacaattccaccaaggaccttaagttcgcattcacaaacctcaccccttttacaatgtatgatgtctacatagctgccgagaccagcgccggaactgggccaaagagcaatatttcagtcttcacccctccagatgtgccgggagctgtcttcgatctccagttagcagaggtggagtccacccaagtgaggataacttggaaaaagccacgccagcccaatggcatcattaatcagtatcgcgtcaaagtgctagttcctgagactggcatcattttagaaaataccctattgacggggaataacgagtatattaatgatcctatggcaccagagatcgtgaacatagtggaacctatggtcggactctacgagggttccgctgagatgtcttctgatctacactcgctggcaaccttcatttacaatagccaccccgataaaaatttcccagcaaggaaccgggccgaggatcagacaagcccagttgttacgactagaaatcagtatataacagacatcgccgcagagcagctgagttacgtgatccgtaggcttgttccgttcaccgagcacatgatctctgtatctgcgttcacaattatgggcgaaggacctccaactgttttgagcgtgagaaccaggcagcaggtccccagcagtataaagatcatcaattataagaacatcagttccagcagtatcttgctgtactgggacccgcccgagtatcccaacggaaaaattacccactacacgatatacgctatggagctggacactaacagagccttccaaattacaaccattgacaacagtttcttaattactgggctgaaaaagtacacgaaatataagatgcgcgttgccgcctctactcacgttggtgaatcctcgctctcagaagagaacgacattttcgtacgtacctccgaggacgagccagaaagcagcccacaggacgtggaggtgatcgatgtgacagcagatgagatacgtctgaagtggtctccgccggaaaagccgaacggaatcatcattgcgtatgaagtcctctacaaaaacatcgatacattgtacatgaaaaacactagcacaaccgatatcatccttagaaacttgcgccctcacacactatacaacattagtgtgcgctcctatactagattcggtcacggaaatcaggtaagcagtctgctgtcagtaagaacttctgagacagtgccggattctgcgcccgaaaacattacctacaaaaatatctcttctggagagatagaactgagtttcctccctccatccagtccaaatggtatcatccagaagtacactatctatctgaaacgcagtaacggaaacgaagagaggacaatcaatacaacatcactgacccaaaatattaaagtgctcaaaaagtacacacagtacattattgaggtgagtgccagtacgttgaaaggggagggtgtcaggagcgcccccatcagcattctgacagaagaggatgcacctgacagtccaccacaggacttttctgtgaaacagttgtccggcgtgaccgtgaagctcagttggcagcccccgctggagccgaatggcattatcctgtactacacggtgtacgtctggaaccgctctagccttaagacaattaacgtgacggagacaagcctagaattgagtgatttagactataatgtggaatattcggcatacgtgactgcctctactaggttcggcgatgggaagacgagatccaatatcatctcttttcagacaccagaaggagctccctccgacccgcctaaggatgtctactatgccaacctgtccagcagttctatcattctgttctggacaccccctagtaagcccaatggcatcattcagtattacagcgtgtattaccggaatactagcggcaccttcatgcaaaacttcactctgcatgaggtcacaaacgactttgacaacatgacagtatctacgattatcgataagctcacaattttttcctattataccttctggctcacagcttccacttcagtggggaatgggaacaagtctagcgatattattgaagtgtacactgaccaggacataccagagggctttgtaggcaacttaacatatgaatccatcagcagcaccgcaatcaatgtgtcttgggttcctcccgcccagccaaatggcctggtcttttactacgtaagcctgatcttgcagcagaccccccgtcatgtaagaccccctctggtcacctacgagcgctccatctattttgacaacctggaaaagtatactgattacatcctcaaaatcaccccttcaactgaaaagggcttctccgatacttatactgcacaactatacattaaaactgaagaagatgtccccgagaccagccctattattaacactttcaagaatctgagttcaacctccgtgctacttagctgggaccccccagtgaagcctaacggggccattatcagctatgatctgaccctgcaaggccctaatgagaattacagttttattacatccgataattatatcattctagaagagcttagtccgttcacattgtacagctttttcgcggctgccagaacccggaaaggactgggaccttctagcatcttattcttttacactgatgaatccgtacctctagcccctccccagaatttaacattaatcaattgcacctctgatttcgtgtggctcaaatggtccccttcccctttgccaggcgggattgttaaagtgtatagtttcaagatacatgagcatgaaaccgacaccatctactacaaaaatatatcagggttcaaaaccgaggccaaattagtgggactggagcccgttagtacatactccataagggtatctgcctttacaaaggtcggcaatggaaatcagttttctaacgtggtcaaattcacgactcaagaatccgtgcctgacgtggtgcagaacatgcagtgcatggccacatcttggcagagcgtactggttaaatgggacccacccaaaaaagctaatggaattataacacagtacatggtgaccgtggagcgcaatagcaccaaagtttcacctcaggatcacatgtacacgttcataaaactgctggcaaatactagctacgtctttaaggtacgagcctctactagcgctggcgaaggagatgaatcaacctgccacgtgtctacattgccagagaccgtgccatcggtccctaccaatattgctttttcggacgtgcaatctacctcggcaactcttacctggatccggcccgacactatcttgggatattttcaaaattataaaataactacccagctaagagcccagaagtgcaaagaatgggagtctgaagagtgtgtcgaataccagaagattcagtacctctatgaagcacacctcacagaggaaactgtgtacggacttaagaagttcaggtggtaccggttccaggttgctgccagtaccaacgctggctatggaaacgcaagtaattggatctctaccaagaccctgcccgggcctcctgacggcccgcctgaaaatgtgcatgttgtggctacctcacccttcagtatatccatatcatggagcgaacctgccgtgatcactggacctacctgttatctgatcgatgtcaaaagtgtggataatgatgaatttaatataagtttcatcaaatcaaatgaggaaaataagacgatcgaaatcaaagatctcgaaatatttacacgttacagtgtggtcattactgcattcacgggcaatatcagcgcggcttatgtggaggggaaaagtagcgccgagatgatcgtcaccacgctggagagcgctcctaaagatccccctaataatatgaccttccagaagattccagacgaggtcaccaaatttcaattgaccttcctcccacccagtcaacccaacggcaatatccaggtgtaccaggccctggtctaccgggaggacgatcctaccgccgtacagattcacaatctcagtattattcaaaagaccaatacttttgtcatcgcaatgctcgagggtctaaagggcgggcatacctacaatattagcgtgtatgccgtgaactccgctggtgccgggcctaaggtcccaatgcgtatcacaatggacatcaaagccccggcaaggccgaagacaaaaccgaccccaatctatgatgcaacagggaagctgttagtcacaagcaccaccattacaatcagaatgcctatttgctactatagcgatgaccatggcccaatcaagaatgtgcaagtgttggtgacagagaccggcgcccaacacgatggtaacgtgaccaagtggtacgatgcctacttcaataaggctcgaccatactttaccaatgagggtttccctaatccgccctgcacagaagggaagacaaagttctcagggaacgaggaaatctatatcataggcgcggacaacgcctgcatgattcccgggaatgaggataagatctgcaatggccccctcaagcccaagaaacagtaccttttcaaattccgcgcaaccaacattatgggacagttcacagattccgattattctgacccggttaaaacccttggtgagggattgagcgaacgaaccgtggagattatcctatcagtgactttatgcatcctctctattatcctgcttggcacagcaatcttcgctttcgctcggatccggcagaagcagaaagaaggcggaacatattcccctcaagacgccgaaatcattgacacaaagctcaaactcgatcaacttattactgtggctgatctcgagctaaaagatgagcgcctgacaaggttgctgtcatacagaaaatccattaagccgatcagtaagaagagtttcttacagcacgtggaggaattgtgtaccaataacaacctgaagttccaggaggaattctccgaacttccaaagttcctgcaggacctgtcctccacagacgctgatctgccttggaaccgagccaaaaaccggttccctaatataaagccttataacaataatcgggttaagctgattgctgacgcttctgtccccggcagcgactatattaacgcatcatacatcagcgggtacttatgccccaatgagtttatcgccacacagggaccgctacccggcacagtaggcgatttctggagaatggtgtgggagacaagagccaagacactggtgatgctgacacagtgtttcgagaaaggaagaatacgctgtcaccagtactggccagaggacaataagcccgtgacagtgttcggagatatcgtaatcaccaaactgatggaagacgtgcagattgattggactattagagacttgaaaattgaaaggcacggggactgcatgactgtcagacaatgtaatttcacggcctggccagaacacggagtgcctgaaaattccgctcctctcattcacttcgttaaactggtccgagccagcagagcccacgatacgacccccatgattgtacattgctcggctggagtaggacggacaggtgtcttcattgcactcgaccatctcacccaacatatcaatgatcatgactttgtagatatttacggcttagtggccgaactaagatcagaaaggatgtgcatggttcaaaatctggcacagtatatctttcttcatcagtgcatcctggatctgttatcaaacaagggctctaaccagccaatttgctttgtaaattatagcgcactacagaaaatggactcgctggatgcgatggagggagatgtggaactcgaatgggaagaaactacgatgtag

SEQ ID NO: 201777 - DNA, 5787 bp, synthetic construct
  misc_feature 1..5787: note = Description of Artificial Sequence: Synthetic coding sequence
  source 1..5787: mol_type = other DNA
atggcccccacctggggccccggcatggtgagcgtggtgggccccatgggcctcctggtcgttcttctggtaggaggctgcgctgccgaggagcccccgcgattcattaaggagccaaaggatcagatcggcgtgagcggaggagttgcatccttcgtgtgccaagccaccggggacccaaagccgcgggtgacgtggaataagaaaggcaagaaagtgaactctcagcgttttgagaccattgagtttgatgaatccgccggggccgtgttacgtatccagcctttgagaacacctcgtgatgaaaatgtctatgagtgcgtggcccaaaacagtgtaggcgaaataacagtacatgcgaagctgaccgtacttagggaggatcagctgccgagcggctttccaaacatagatatgggaccgcagcttaaggtggtcgagaggactcggactgctactatgctctgtgccgcaagtggcaacccggaccccgagattacatggtttaaagacttcctgcctgtggacccctccgccagtaatgggcgaataaaacaactgcgatctgaccaggccttcagtcacctgccaacaggcgctctccaaatcgaaagctccgaggagaccgatcagggtaagtatgaatgcgtggctactaacagtgctggagtccgctattcgtctccagctaacctctatgtgagagtgcgacgcgtggccccacggttttccatccttcctatgtcacacgagatcatgcctggcggcaatgtgaatatcacctgtgtggcagtgggctcgcctatgccttatgtgaagtggatgcagggagcagaggacctgactccagaagatgacatgccggtgggacggaacgtgctggaactcaccgacgttaaagactccgccaattatacctgcgtggctatgtcctccctgggcgtgattgaggctgttgcacagataactgtaaaatcccttcccaaggctcctggcactcccatggtgaccgaaaatacagccacatcgattaccatcacctgggactccggaaatccagatcctgtgagctactacgtcatcgaatataaaagcaaaagtcaagacggtccctaccagataaaggaggacattaccacaacccgctattcaattgggggtttgagtcccaacagtgaatatgagatctgggtttccgctgttaatagcatcggccagggacccccaagcgagtctgttgtgacgcgaacaggtgaacaggctcctgctagcgcccctagaaacgttcaggctagaatgcttagcgcaaccaccatgattgtccagtgggaagagcccgtggagcctaacggtcttatcagaggttatagggtgtactacacaatggagcccgagcatcctgtaggtaattggcaaaaacacaatgtggatgattctctactgactactgtaggaagcctgttggaggacgaaacgtataccgtccgggtgcttgctttcacttccgtgggtgatggtccactgagcgatcctatccaagtcaagacacaacaaggcgttccaggtcaacccatgaatctgcgagcagaggcgcgttcggagacaagtattactctatcctggtcccccccccgacaggaatcaattatcaagtatgagctgctgttcagggagggcgaccacggccgtgaggtgggacggacattcgacccaactaccagctacgtcgtagaagatctgaagcccaataccgagtacgcctttagactcgccgcccgatctccccagggccttggagcatttacaccagttgtcaggcagcggaccctgcagtcaaagccatctgcacctccccaagacgttaaatgcgtctctgtgagatctacagctatcctcgtgtcctggcgacctcctcctcctgaaactcataatggggcactggtcgggtactctgtaaggtaccggccacttgggtctgaggatccagaacccaaagaagtaaacggaatcccaccgacaactacccagatacttctggaagctctggaaaagtggacacagtatagaatcaccacagtggcacatactgaggtgggaccaggccccgagtcttcaccggtcgtggtcagaaccgatgaggacgtgccctctgccccgcccagaaaagtcgaggccgaggctttgaacgcgaccgcgatccgagtgctgtggagaagtcctgcgccgggccggcaacacggccagattaggggttaccaggtacattacgtacggatggagggggcggaggccagggggccaccaaggattaaggatgtcatgttggcagatgctcagtgggaaacagatgataccgctgaatacgaaatggtgattacgaacctgcagccagagacagcttattcgattaccgtagctgcatacaccatgaaaggagacggggcgcgttcaaaacctaaagtggttgtcaccaaaggcgcagtgctaggccgccccacgctgagtgttcaacagactcctgagggatcgctgcttgcaaggtgggagccccccgccggaaccgcagaggaccaagtgttggggtaccgtctccaattcggtagagaggacagcacccccctggcaacgcttgagtttcccccatccgaagataggtacaccgcttcaggggtccacaagggtgcaacttacgtattcaggctggctgccagaagccgtggcggcctgggtgaagaagcagccgaagtgctttcaatcccagaggacactcctcgaggacacccccagattttggaggctgccgggaacgcatcagccgggaccgtgctgctccgctggttgcccccggtccccgcagagagaaacggcgccatcgtgaaatatactgtagccgtgagggaggcaggggctctgggacctgcgcgggaaactgaactcccagccgcggccgaacctggagccgaaaatgcactcacactgcagggtctgaagcccgataccgcttacgacttgcaggtcagagcccacacaaggagaggtcccggtcctttctcaccgcccgtgaggtacagaacctttctaagagatcaggtttctccaaagaacttcaaagttaaaatgattatgaagaccagtgtgctcctttcttgggagttcccggacaattataactctccaacaccatacaagatccagtataacggattgaccctggatgtggacggcaggacgaccaagaagctgattacacatctcaaaccgcataccttctataattttgtgttgacaaacagaggctccagtctcggaggcctacagcagactgtgacagcctggactgcctttaatcttctgaacgggaagccatctgttgcaccaaagccggatgccgatggcttcatcatggtatacttgcccgatggccaaagtcccgtcccagtccagagctattttatcgtgatggtcccgctgcggaaatcccggggcggccagttcctcacccctctgggatcccccgaggatatggatctagaagaactaattcaagacatctctaggttgcagcgtcgtagcctgagacactctcggcagcttgaggtaccccgtccatacatcgctgctaggttctcagtcctgccacctactttccaccccggtgaccagaagcagtatggcggcttcgataaccgcggactcgagcccgggcaccggtatgtcctgttcgtactcgcagtgctccagaaatctgagcctactttcgccgcttccccgttttccgatccgtttcaactcgataatcctgatccccagcccatcgtcgacggggaggaagggctcatctgggttataggtccagtgctcgccgtggtttttattatctgtattgtcattgctatcttgctctacaaaaacaagccagacagtaagaggaaggacagcgaaccacggacaaaatgcttgttgaacaatgccgaccttgctccacaccatccaaaggacccagtcgagatgaggcgcattaactttcagacacccggaatgttgagccaccctcctataccaatagccgacatggctgagcatactgagcgtttgaaggccaacgatagcttgaagctcagccaagaatatgaatccatcgaccccggacagcaattcacctgggaacactccaatctggaagtgaataaacccaagaatcgctatgctaacgttatcgcatatgaccattcaagggtgatcctccagcctatagaagggatcatgggttctgattatatcaacgctaattacgtggatggctatcggtgtcagaatgcgtacatcgcaacgcagggccccctccctgaaacatttggagacttctggcgcatggtctgggagcagaggtcagcgactattgtgatgatgacacgattagaggaaaagagtcgcatcaagtgcgatcagtattggccaaatcgaggcacggagacatacggattcatccaggtcacactgttagacacaatcgaacttgccaccttctgtgttaggacttttagtttgcacaagaatggctcaagcgagaaaagggaggttcgacagtttcagttcaccgcttggcccgaccacggtgtgcctgagtatccgacacctttcctcgctttcctgaggcgggttaagacctgcaatccgccagacgcaggtccaatagtggtgcattgctcagcgggggttggccggacagggtgcttcattgtcatcgacgccatgctggaacggatcaaacctgaaaagaccgtggatgtgtatggccatgtgacattaatgagatcccagcggaattacatggtccaaactgaagaccaatatagcttcatacacgaagcacttctcgaagctgtgggctgtggtaacacggaagttccagcgaggagcctgtatgcttacatccagaagctggcccaggtcgaaccgggagagcacgtgactgggatggagctggaattcaaacgcctggcaaacagcaaggcccacaccagtaggttcatttccgctaacctcccatgcaataaatttaagaaccggttggtaaacatcatgccctatgagagcacccgcgtctgtttgcagccaatccgaggcgtcgaggggagcgactacatcaacgcaagcttcatagatgggtataggcagcagaaggcatacatagccacgcaggggccactcgccgaaactacagaagacttttggaggatgctttgggagaataattcaacaatcgtggtgatgctcaccaaactgcgggaaatgggtagggaaaagtgtcaccagtattggccggctgaacggagtgctagataccagtacttcgtcgttgaccccatggcagagtacaatatgccacagtatatccttagagaatttaaggtcacagatgcacgcgatggtcaaagtaggactgtcagacagtttcagttcacagactggccagaacagggcgtgcccaaatctggcgaggggtttatcgatttcattggtcaggtgcacaaaaccaaggagcagttcgggcaggatggtcccatcagcgttcactgctccgccggagttgggagaacaggagttttcatcacccttagcatagtgctggaaagaatgcgctacgagggagtagtggacatttttcagacagtgaagatgctgagaacccagaggcctgcaatggtccagaccgaggatgagtatcagttctgctaccaagccgcactggaatatctgggatcctttgatcactacgccacttag

SEQ ID NO: 201778 - DNA, 5733 bp, synthetic construct
  misc_feature 1..5733: note = Description of Artificial Sequence: Synthetic coding sequence
  source 1..5733: mol_type = other DNA
atggcccccacctggggccccggcatggtgagcgtggtgggccccatgggcctcctcgtagtgctgcttgtcggcggctgtgccgcagaggagcctcccaggtttataaaggagccaaaagaccaaattggcgttagtggcggagtggcctcttttgtttgccaagctactggagatcccaaaccacgagttacatggaacaaaaagggaaagaaagttaatagccaaagatttgaaaccattgaatttgatgagagcgctggcgccgtcctccggattcagccacttaggaccccgcgcgatgaaaatgtgtacgaatgtgtggcccagaactctgtaggcgaaatcaccgtgcatgcaaagctcaccgtgctacgggaagaccagcttcctagtggattccctaatatcgatatgggaccccagttaaaagtcgtcgagaggacaagaaccgctaccatgctgtgtgctgctagcgggaacccggacccagagataacctggtttaaggacttcctcccagtggaccctagtgcatcaaatgggagaatcaagcaattacggagcggagccttacaaatcgaaagctctgaagagacagaccagggcaagtatgaatgcgtggccacaaattcggctggtgtgaggtatagtagcccggccaatctgtacgtgcgtgttagacgcgtcgcgcctcggttcagcattttaccgatgtcacacgaaattatgcctggcggtaacgtgaacatcacctgtgtcgcagtgggatctccaatgccctatgtaaagtggatgcaaggggcagaagacttgactcctgaagatgacatgcctgttggaaggaacgtgctggaactaactgacgtgaaagatagtgcaaattatacgtgcgtagctatgtctagtttgggagtcatcgaggcagtcgcacagattaccgtgaagtcactgccaaaagcccccggtacacccatggtaactgagaacaccgccacctccatcactattacgtgggattctggcaatccagaccccgtatcctattatgtaatagagtacaaatctaaaagccaggacggcccatatcagatcaaggaggatattaccacaaccaggtattcaatcggggggttatcacccaactccgaatacgaaatatgggtctcagctgtaaacagcatcgggcaggggccccccagcgaaagcgtggtcactaggactggtgaacaggcaccagcaagcgctccaagaaatgtccaggcgagaatgttgtcagccaccacgatgatagtacagtgggaggagcccgtggagccaaatggactcatccgtggctatagagtctattatacaatggagccggaacaccccgttggaaattggcaaaagcacaacgtggatgactccctgctcactactgtcggctcccttctggaggacgaaacttatacagtaagagtcctggcatttacctccgttggtgacgggcccctcagcgacccaatccaggtgaaaacccaacaaggtgtgcccggccagccgatgaacctcagggccgaggcgaggagcgagacaagcattacgctaagttggtctcccccacgccaagaatcgatcatcaagtacgagctgttgtttcgggagggcgaccatgggcgcgaggttgggaggacatttgatcccaccacgagctatgtagttgaagatctcaagccgaacaccgagtatgccttccgcctggctgcgcggtctcctcaggggctgggggcatttacaccggtcgtgaggcagagaacgctgcaatcaaaaccctcagctccccctcaggacgtgaaatgcgtgagcgtgcgatctactgctattctggtatcttggaggccaccgccccctgaaacacacaatggagcgttagtcggctattcagtgcggtacaggccactggggtcagaggatcccgaaccgaaggaagtgaacggcattcccccgactacaacccagatcctgctagaagcccttgagaaatggacccagtaccgcattaccactgttgcccacaccgaagttgggccgggcccggagtcctcaccagtcgtcgtgcggacagacgaagacgttccaagcgcaccaccccgcaaagtggaggccgaagctctcaatgctacggctatccgtgtgctgtggcgcagcccagcccccggccgccagcacggacaaattcgcggctaccaggtgcattacgtcaggatggaaggtgctgaggctaggggtcctccacgaatcaaggatgtgatgttagccgatgcccaggaaatggttatcaccaacctccagccagagacagcctatagcatcacagtggccgcatataccatgaaaggagatggcgcccgctctaagcctaaggtcgtggtcaccaagggagcagtgcttggtaggcctacattgagtgtgcagcagactcctgaaggtagcctccttgcacgctgggaaccgccagccggcaccgcagaggatcaggtgctgggttacagattgcagttcggaagggaggacagtactcccctcgccactctcgagtttccaccttcggaggacaggtataccgcctcgggagtacataaaggcgctacctacgtttttagattggccgcaaggtctcggggcggtctgggcgaggaagcggctgaggttttatcaattcctgaggatacaccacggggtcatcctcaaatcctggaagccgccgggaatgcatccgccggcaccgtgctgctgagatggctgccacctgttccggccgagagaaatggcgccatcgtcaaatacacagtggccgttagggaggccggcgctttggggcccgctagagagacagaactccccgctgcagctgagcctggagcggagaatgcattaacacttcagggcctaaagccggacaccgcttatgacctgcaggttagggcgcacacccggcgggggccaggccccttcagtccgccagtgcgataccgtacattcttgcgggaccaggtgtcccctaagaacttcaaggtgaagatgattatgaaaacctccgtattattgtcctgggagtttcccgataactacaatagcccgacaccttacaaaatccagtataacgggctgaccctggacgttgatggcagaaccaccaagaagctgatcacacacctgaaaccgcacaccttctacaatttcgtccttacaaatcggggatctagcctgggcggactgcagcagactgtgaccgcttggactgccttcaacctcctaaatggtaagccatcagtcgctccgaaacccgatgcagacggcttcataatggtgtacctgccagacgggcagtcccccgtgcccgttcagtcttatttcatcgtcatggttcccctgagaaaaagcaggggaggccaattcctaacccctctgggctcgcctgaagatatggacctggaagaactgatacaagatatttcgagactgcagcggcgcagcttgcgtcatagtaggcagctggaggtacccagaccctacatagccgcacggtttagcgtgcttccccctacatttcatcctggagatcaaaaacaatatggtggattcgataaccgcgggttagaacctgggcacagatatgtcctgttcgttctggccgttctgcagaaatccgagcccactttcgctgcaagcccattctcagaccccttccagctggataatcccgacccccagccaatagtcgacggcgaagagggcctaatttgggtgatcggacctgtgctcgctgtggtgttcattatctgcattgtgattgctatactgctgtacaagaacaaaccagattcaaaaagaaaggattcagagcccaggacaaagtgtctgctcaataatgccgacctggcaccccatcatcccaaagatccagtggagatgaggcggattaattttcaaactcctgggatgttgagccacccgcctatcccaatcgccgatatggccgagcacacagaacgcctgaaagcaaatgacagcctgaagctcagccaggaatatgagagtatagacccaggccagcagttcacttgggaacactccaatttagaagtgaataagcccaagaatagatatgccaacgttattgcgtacgatcactcaagagtgatcttacagcccattgagggcattatggggtccgactatataaatgcaaactacgttgatgggtatagatgtcaaaatgcctacatcgccacccagggacccctgccagaaacatttggcgacttctggcgtatggtgtgggaacagcggagcgccacgattgttatgatgactcgccttgaggagaaatcaaggatcaagtgcgatcaatattggccaaataggggaacagagacctacgggttcatccaggttacgcttctagataccatagagttggcaaccttctgcgtaagaactttcagtctccacaaaaatggcagctctgagaaacgcgaggtcaggcagttccagttcacggcctggccagaccatggagtgcctgagtacccaacaccctttctcgcatttctgcgcagggtcaagacatgcaacccccccgacgccggcccaatcgtagtgcattgttccgccggggtggggagaaccggctgctttatcgtgatcgacgcaatgttagaaagaatcaaacctgaaaaaacagtcgacgtgtatggccatgttactttaatgaggagtcagcggaattacatggtacagactgaagatcaatacagcttcatccatgaggcgctgctggaagccgtggggtgtggcaacaccgaagttcccgccagaagcctctacgcttatattcaaaagcttgcccaagtggaaccaggagagcacgtgactggcatggaactggaatttaagcggctggccaatagcaaggcccataccagccggtttatttctgccaacctgccctgcaataaatttaagaacaggctggtcaacattatgccatatgaaagtaccagagtgtgtctgcagcccataagaggtgtcgaaggctcagactacattaacgccagcttcatagatggatatcgccagcagaaagcatacatcgccacacagggacctttggcggagactaccgaggacttttggaggatgttgtgggagaataatagtacgatcgtggtgatgctgaccaaactccgggagatggggagggagaagtgccatcagtattggccggccgagcgctcagcccgatatcaatacttcgttgtggatcctatggcggagtataacatgccccagtatattctgagggagttcaaagttaccgacgccagggacgggcagtccagaacagtgaggcagttccagttcactgactggccagagcagggagtccctaaaagcggcgagggattcattgactttataggacaggtgcacaagacaaaggagcagtttggtcaagacggacctattagtgtccattgcagcgcaggtgttggaagaaccggcgttttcattacactttccatcgtcctggaacgcatgaggtatgaaggcgtggtggatatttttcagactgtcaaaatgctgcgcacacaaaggccggccatggtgcaaaccgaagatgaataccagttctgctatcaggcagccctggagtacctgggctctttcgaccactacgccacatag

SEQ ID NO: 201779 - DNA, 4506 bp, synthetic construct
  misc_feature 1..4506: note = Description of Artificial Sequence: Synthetic coding sequence
  source 1..4506: mol_type = other DNA
atggcccccacctggggccccggcatggtgagcgtggtgggccccatggggctccttgtcgtccttttggtcgggggttgcgccgctgaagagccccctaggttcatcaaagagccgaaggatcagatcggggtgtccggaggagtcgccagcttcgtgtgccaggccacaggggatccaaaaccccgggtcacttggaataagaagggcaagaaggttaatagccagcggttcgagactattgagttcgacgagagcgctggagcagtcctccgcattcagccacttaggaccccgcgcgacgagaatgtctacgaatgcgtggcacaaaatagtgttggggagatcaccgtgcacgccaagctcaccgtgctgcgggaagaccaactccccagtggctttcccaatatagacatgggcccgcaattaaaagtggtcgaaaggactcggacagccacaatgctgtgtgccgctagtggcaaccccgatcccgaaatcacctggttcaaagatttcctacctgttgacccctccgcttcaaatgggcgaataaagcagctccggtctggggccttgcagattgaatccagcgaggagaccgaccaggggaagtacgagtgcgtggccacgaattctgccggggttcgatattcaagcccagcgaatctgtatgttcgtgtccgtagagtggctccacgattttccatcctgccgatgtcacacgagatcatgcccggagggaatgttaacattacttgcgtggccgtaggaagtccaatgccttacgtgaagtggatgcagggggccgaagatctgacaccagaggacgatatgcctgtggggcggaatgttctggagctcaccgatgtaaaggacagcgcaaattacacttgtgtagccatgtcctcactgggcgtgatagaagcggtcgcacagatcacagtcaagtccttgcctaaggcccctgggacgcccatggtgaccgagaatacggccacctcaattacaatcacatgggatagcggtaatccagaccccgtgagttattacgtaattgagtacaaatcgaagtcccaggacggcccttatcagatcaaagaggacatcacaacaacgcgctacagcatcgggggtctctcccccaacagcgagtatgagatctgggtgagcgccgtcaattctattggacagggcccaccgtctgagagcgtcgtgactcgtacgggcgagcaggcgccagcctctgcccctcgcaacgtgcaggcaagaatgttgtccgctacaactatgatcgtgcagtgggaagagccggtggagcccaacggactcatacggggctatcgcgtctactacactatggaacccgaacatcccgtgggaaactggcagaaacataatgtcgacgactccttactgaccacagtgggaagcctcctcgaggacgaaacctacaccgtgagagtcctcgcttttacctccgtcggtgatggacctctctcagatcctatccaagttaagactcagcagggagtccctgggcaaccaatgaatctgagggcggaggcccgctctgaaaccagcataaccctttcatggtcgcctccacggcaggagagcataatcaagtacgagttgctgttcagggagggggaccacggacgagaagtggggaggacatttgacccaactacatcttacgtggttgaggacctgaagcctaacactgagtatgccttcagactggcagcgcgctctccccagggcctgggagccttcactcctgtggtccggcaacgtacacttcagtccatttcgcccaaaaacttcaaagtcaagatgattatgaaaacatctgtcctgctgtcatgggagttcccggataattacaacagccccacgccttataagattcagtacaacgggttgacgctggacgttgatggacgtactacaaagaaactgataactcatctcaagccccacactttctacaattttgtcctgaccaacagggggtctagcttaggtggactgcagcaaacggtgaccgcctggaccgcctttaacctcctgaatggcaagccatccgtcgcacccaaaccagacgcagatggcttcattatggtgtacctgccagatggccagagccccgtgcctgtgcagtcttatttcattgtgatggttccacttcgtaagagtagaggcggtcagtttctaactcctttgggcagtcctgaggatatggacctcgaggaactgattcaggacatttcccgactgcagagaagatcactgcgccattccaggcagttggaggtgcctcggccatacattgctgcaagattctctgtgttaccccctacctttcaccccggagatcagaagcagtacgggggattcgacaacagaggcctggaaccagggcaccggtacgtactttttgtgctggccgtgttacagaaatccgaaccaacgtttgccgcatcaccgttttcggatcccttccagctggacaatcctgatccacagcctattgttgatggtgaagaggggttgatctgggtgatcggtccagtgttggcggtggtgtttatcatatgcatagtgatagccattctgctttacaagaataaacccgacagtaaacggaaggacagcgaaccacgcaccaaatgcttactaaataacgccgacctggctcctcaccaccccaaagatcctgttgaaatgcgccggattaattttcagacccccggtatgctatcccacccaccaatccctatagctgatatggcagagcatactgagagactgaaggccaacgactccctgaagctgagccaggaatatgagtctatcgacccaggccagcagtttacttgggaacattcgaacctggaggtcaataaacccaagaaccgatacgcaaacgtcattgcatatgatcatagtagggttatactgcagcctattgaaggaatcatgggaagcgactacataaatgccaactatgtggacggatatcgctgtcagaacgcttacatcgccacccaggggccactgcccgagacctttggagatttctggagaatggtgtgggaacaacgcagcgccaccatcgtgatgatgactagattggaggagaaatcccggattaaatgcgaccaatactggcctaatcggggcaccgagacatacgggttcatccaggttacactgcttgatacaattgagctggcaacattttgcgtgaggactttttccctccataagaatggctcctccgaaaagcgagaggtgcgtcagttccagtttaccgcatggcccgaccacggcgtccccgagtaccccactccctttctggccttcttgagacgtgtaaaaacatgcaacccccctgatgctggacccattgtagttcactgttctgctggagtgggtcgaaccggctgttttatcgtgattgatgcgatgctggagcgaattaagccggagaagacagtggatgtctacggccacgtcacactcatgaggtcccaaagaaactacatggttcaaaccgaggaccagtattcttttattcacgaggcattgctcgaggcggtcggctgcggcaacacagaagtgccagcaaggtccctttacgcatacatacaaaagcttgcacaggtcgaacctggtgaacacgtcactggaatggagttggagttcaagaggctggcaaactctaaggctcacactagtaggttcattagcgctaacttgccttgtaataaattcaaaaaccgcctagtcaatattatgccatacgagtccacccgtgtctgtctccagcccattcgtggcgtcgaggggagcgattacatcaacgcatcatttatcgatggataccgccagcagaaggcctatatcgcgacacagggacctctcgccgagaccactgaagatttctggcggatgctgtgggaaaacaatagcactatagttgtgatgctcacaaagttgcgtgaaatgggtagagaaaaatgtcaccagtattggccagcggaacggtcagcccgataccaatactttgtggtcgatcccatggcagaatataacatgccccagtacattttacgtgaattcaaagtgactgacgcccgggatggccagtccagaaccgtgagacagtttcaattcactgattggcccgagcaaggagttcctaagagcggcgagggctttatagacttcatcgggcaggtgcacaagacaaaggaacagttcggtcaggatggccctatctcagtgcactgttctgctggggtcggccggacaggtgtgttcattaccctgagcattgtgctcgaacgaatgaggtatgaaggagtggtagatattttccagactgtgaaaatgctcaggacacagcgtcctgcaatggtgcagacagaagacgaatatcagttttgctaccaggctgctttagagtacttaggatctttcgaccattacgccacttag

SEQ ID NO: 201780 - DNA, 5847 bp, synthetic construct
  misc_feature 1..5847: note = Description of Artificial Sequence: Synthetic coding sequence
  source 1..5847: mol_type = other DNA
atggcccccacctggggccccggcatggtgagcgtggtgggccccatgggcctgttggtggtacttctagtggggggctgcgcagctgaggagccccctaggtttattaaggaacccaaggaccagataggagtgtcaggcggcgtggcttcttttgtgtgtcaagccacgggcgacccaaaacctcgcgtgacctggaacaagaaaggcaagaaggttaactcacaacgattcgaaacgattgagtttgacgagtcagctggcgccgtgctccgtattcagcctttgaggactccacgggacgagaatgtctacgagtgtgtggctcaaaacagtgtcggagagatcaccgtgcacgctaagcttacagtcctgagagaggaccagctgccatccggattcccaaacatcgacatgggcccacagctgaaggtggtcgaaagaaccaggacagccactatgctgtgcgctgcttcaggaaaccctgaccctgagatcacctggtttaaggatttcctgcctgtggatccttctgcctccaatggaagaattaagcagcttcgctccgatcaggctttctctcatcttccgaccggagcactccagattgaatcttccgaagaaactgaccaaggcaaatacgagtgtgttgccactaacagcgcgggggtccgatactctagtccagccaatctctatgttcgtgtgtggcggactgtgcggagagtcgcgcctcgcttttccatcctacctatgagccacgagattatgccagggggtaacgtgaacattacatgcgtcgcggtcgggagcccaatgccatacgtgaaatggatgcagggcgctgaggacctgacccctgaggacgacatgcctgtcggaaggaatgttttagaacttaccgacgtcaaggattccgccaactacacctgtgtggccatgtcatcactaggagttattgaggccgttgcccagatcactgtcaaaagcctgcccaaggccccaggcacacccatggtaacagagaatacagccacgtctattacaatcacttgggattctggtaacccagacccagtgagctattacgtcattgaatataagtccaaatcccaggacggtccctatcaaatcaaagaagacattactaccacccgctacagcattggaggcctgtctcctaattctgagtatgagatttgggtgagcgctgtgaactcaatcggtcagggccccccgtcagagtcggtagtaactcgcaccggcgagcaggcgcccgccagtgcaccccgaaatgtacaagccagaatgctaagtgctacgaccatgatagtccaatgggaagaacccgtggaaccaaatgggctgatccgggggtatagagtctattataccatggagccagaacacccagtcgggaactggcaaaagcacaatgtagacgacagcctacttactaccgtcggctctctgcttgaggacgagacttacaccgtcagagtgctggctttcacgtccgtgggggatggccctctgtcagatcccatccaagttaaaacacagcagggggtgcccgggcagccaatgaatctgcgtgccgaggcaagatccgaaacctcaattactctgtcatggtccccccctcggcaggaatctatcatcaagtacgaactgctattccgtgagggagatcacgggcgagaggtggggcgcacgttcgatcctactaccagctacgtggttgaggacctgaaaccgaatactgaatatgcatttcgtctggcagctcgctccccacaagggttgggagctttcactcctgtagtgcgacagaggacattgcaaagcaaaccttctgctcctcctcaggacgttaagtgtgtctcagtgagatccacagccattcttgtgtcttggcgaccaccgcctccagaaacacataacggcgccttggtcggctattccgttagatataggcccctcggctctgaggacccagagccaaaagaggtaaatggaattccaccaaccaccacccagattctcctggaagcccttgaaaagtggacacagtataggataactaccgtggcacacacggaagtgggtcccggacctgagagtagtccagtcgtggtaagaacggacgaggatgtgccctctgcccccccccggaaggtggaagccgaggcactcaacgctactgcaatccgagtgctgtggagatctccggcaccggggcgtcaacatggccagattcggggatatcaagtgcactatgtaaggatggaaggggctgaagctagaggtcccccccgtattaaggatgttatgttagctgacgcgcagtgggagacggatgacactgccgagtacgagatggttatcaccaacttgcagcccgaaacagcctacagtattactgtggcagcctacacaatgaagggcgacggcgcccgcagcaaacctaaggttgttgtgactaaaggcgctgttctcggccggccaacgttatcagtccagcagacgccggagggaagcttgctggctcgctgggagccgcccgcaggcacagcagaggatcaggtcctgggatacaggctccagtttggtcgagaggacagtacccctctagctacactggaatttccacctagtgaagatcgttacacagcttccggtgttcataagggagccacgtatgttttccggctagctgcgagatcccgggggggcctgggagaagaggctgccgaggtgctatctattcccgaggataccccacgggggcatccacagattctggaggctgcaggcaacgccagcgccggaaccgtgctgctaagatggctcccacccgtcccggctgaacggaatggcgccatcgttaagtacaccgtggcagtcagggaggctggggcccttggtccagctcgtgagaccgaactgccagctgcggccgagcccggagccgagaatgccctcacgctgcagggactcaagccggataccgcttacgatctacaggtaagagctcacacgaggcgcggaccaggaccattttctcctccggtgagatacagaacctttctacgtgatcaggtgagccccaaaaattttaaggttaagatgataatgaagacctctgtcttgcttagttgggaatttccggacaattacaactcacccaccccatacaagatccaatataacggactgacactggacgtggacggcagaaccacaaagaaactgattacccatcttaagccacacacattttacaactttgtactgactaaccgagggagctctctgggcgggctgcaacagacagtcaccgcgtggaccgccttcaacttgctgaacggaaagcccagtgtcgcacccaaaccagacgccgatggatttattatggtctatctccccgatggacagtcacctgtgcctgtgcagagctacttcatcgtgatggtgccactccggaagagccgcggtggacagttcttgacccctctgggtagccccgaagacatggacctcgaggaattgatacaggatatttccagactgcagcgccgatcactgagacatagcaggcagctggaagttcctcgcccttatattgcggctcgctttagcgtattgccaccaaccttccatcccggcgaccagaagcagtatggcggcttcgacaatcgtggcctggagccgggccaccgatatgtgcttttcgtgttggccgtactccaaaaaagtgaacccacattcgccgcctctcccttcagcgacccctttcaactcgacaacccggacccccagcctattgtagacggggaagagggtttaatctgggtgataggacctgtcctggctgtcgtgtttattatttgtatcgttatcgccattctgttgtataagaacaaaccagatagtaagcgaaaggatagcgagccaagaactaagtgcttattgaacaacgccgatctggccccccatcaccccaaggaccctgtggagatgagacgcatcaattttcagaccccagacagcgggctgcgctctccactacgcgaacccggtttccattttgagtcaatgctgtctcacccacctatccccatagcagatatggccgagcatacagaacgcctgaaggctaatgactcactcaaactgtcacaggagtacgagtctatagatcctggtcagcagttcacctgggagcattcaaatcttgaggtgaacaagcccaagaatcgctacgccaacgttatagcttatgatcactccagagttattttgcagccaatcgagggtatcatgggctccgattacattaatgcgaactatgtggacggatatcgatgccaaaatgcctacatcgcgacccaaggacctttaccagagacattcggtgatttctggcggatggtgtgggaacagagatctgcaaccatagtgatgatgacgcgcctggaggaaaaaagccgaataaagtgcgatcagtactggcccaatcgcgggaccgaaacatatggattcattcaggttacacttctcgatacaattgagctggccaccttctgcgttcgaaccttctcacttcataaaaacggctccagcgaaaaacgggaagttcgtcagtttcagtttacggcatggcccgaccacggtgtgccggagtatccaaccccattcctggcttttctgaggcgggtcaaaacttgcaatccacctgacgctgggcctatcgtggtgcactgttcagcaggagtcggccgaactggctgcttcatcgtcattgacgcgatgttggagcgcatcaagcctgagaaaacagtcgacgtctacgggcacgtcactctgatgcgcagccagcgaaactacatggtgcaaaccgaggatcagtattcctttatccacgaggccttactcgaggcggttggatgtgggaacacggaggtaccagcgcgaagtctgtacgcgtacattcagaaactggctcaggttgaaccaggggaacatgtgacaggaatggagctcgaatttaagcgactcgctaattctaaggcccataccagtcgtttcatcagcgcaaatctgccttgcaacaagtttaaaaatcgcctggtgaacattatgccctatgaaagcactcgggtctgcctccagccaatccgcggagtggagggatccgactacattaatgcaagcttcatcgacgggtacaggcagcagaaggcatacattgcaacgcaaggccctttggccgaaacaaccgaagatttctggagaatgctttgggaaaataactccaccattgtggtgatgcttacaaaactgcgcgaaatgggtagagaaaaatgtcaccagtactggccggcagagcgcagtgcaagatatcagtacttcgttgttgatcctatggctgaatacaacatgcctcagtacatattgcgtgaattcaaggttacggacgctagagatggtcagagtcgcactgtccggcagttccagttcactgattggcctgagcaaggcgtgcctaaatccggagagggctttattgactttatcggtcaggtgcacaagaccaaggagcagttcgggcaggatggccctattagcgtgcattgtagcgccggggtggggcgtacaggtgttttcatcaccctgtctattgtgctggagagaatgcggtatgagggagtggtggacattttccagaccgtgaaaatgttgcgtacccagcgccctgcgatggttcagacggaggatgaataccagttctgctaccaggctgccctcgagtatctgggaagtttcgaccattatgccacatag

SEQ ID NO: 201781 - DNA, 4593 bp, synthetic construct
  misc_feature 1..4593: note = Description of Artificial Sequence: Synthetic coding sequence
  source 1..4593: mol_type = other DNA
atggcccccacctggggccccggcatggtgagcgtggtgggccccatgggcctgttggttgtccttctggtcgggggttgtgccgccgaggagcctccccggtttatcaaagagcccaaagaccagataggagtgagcgggggcgttgcttcgttcgtttgtcaggccacaggcgaccctaagcctcgggtgacatggaataagaagggcaagaaggtgaacagccaaaggtttgagacaatcgagttcgatgagagtgcaggcgcagttctgcggatccaaccccttcgaacacccagagacgagaatgtatacgagtgtgtggcccagaattcagttggagaaattactgtccatgcgaaactgacagtgttacgtgaggatcaactgccttccggtttcccaaacatagatatggggccacagctcaaagttgtggaaagaaccagaacggccaccatgctttgcgcagcctcaggtaacccagatccagagattacttggtttaaagatttcctccccgtggacccatcagctagcaatggccgcatcaagcaactcaggtctgatcaggccttcagccacctgcctacaggagccctgcagatcgagtcttccgaagaaaccgatcagggaaaatacgagtgcgtggccaccaattcggccggcgtacggtattcttcaccagccaatctctatgttagggtctggcgtacagtccgacgggtcgccccacgcttctctatacttcccatgagtcatgagattatgccagggggcaatgtcaacattacatgcgtagcagtgggcagccccatgccttatgtgaaatggatgcagggtgcggaagatctgacacctgaggacgatatgccagtgggcagaaatgtacttgaactaaccgacgtgaaagacagtgcaaactatacatgcgtagctatgtcttctctcggcgtcatcgaagccgtagctcagattaccgtgaagagcctccccaaggcccctggaacacccatggtgaccgaaaacaccgccacatcaattactatcacctgggactctgggaatcctgaccctgtgagctactacgtgatcgagtataaatccaagagccaggacggaccttatcagatcaaagaagatataaccactactcgttattctatcggtggcttaagcccaaattctgagtacgagatatgggtcagcgcggtcaatagcattggtcagggacccccaagcgaatcagtggtcacaagaacaggagagcaagcacccgccagcgctccgcggaatgttcaggcccggatgctctctgctactacaatgattgtgcaatgggaggaaccagtggaacccaacgggctcattcgtgggtatagagtgtattacaccatggagccagaacacccagtgggaaattggcagaagcataatgtcgacgattctttgctaactacggttggatcccttcttgaagacgaaacctacaccgttcgagttctggcgttcacctctgtcggagacgggccgctctcagaccctatccaggtcaaaacgcagcagggcgtacccggtcagcccatgaatctccgagccgaagctcgatctgagacctccatcaccctttcttggtctccacctcgccaggaaagcatcatcaaatatgagctcctgttcagagagggggatcacggacgcgaggtgggtcggaccttcgatcctacaacttcctatgttgtggaggacctcaaacctaataccgaatatgcctttcgcttggccgcaaggtcacctcagggactgggggcctttactccagtcgtgcgccagaggacactgcaatctattagccctaaaaactttaaggttaagatgatcatgaaaaccagcgtgctcctgagttgggagtttcctgacaactataactctccaactccatataaaatccagtacaacggtctgactttggacgttgatggccggactaccaaaaaacttatcacacatcttaagcctcacacattctataactttgtgctaaccaatcgaggcagctccctcggtggactccagcaaaccgttacagcttggactgcctttaatctcctcaatggcaagccaagtgtggctcctaagcccgatgctgacggctttattatggtgtacctccctgacggccaatctcctgtgcccgtgcagtcttactttatcgtgatggtgccgttgcgaaaatctagaggaggtcaattcctcacaccgctcggctcgcccgaggacatggacctggaggaactgatccaagatatcagccgactgcaacgtcgctctcttcggcactctagacaacttgaagtgccaagaccttacatagccgccagattctcggtcctaccaccgaccttccaccccggcgatcaaaagcagtacggagggtttgacaacagaggtctcgagccaggccataggtacgtcttgtttgtgcttgccgtcttacagaagagcgaacctacatttgcagcatctcctttttctgacccattccagctggataatccagacccacagccaattgtcgatggcgaggagggtctgatctgggtaatcgggcctgtgctggcagtcgtcttcatcatctgcattgtaattgcaatcctactgtataaaaacaaacccgacagcaagcgcaaagattccgagcctaggacaaaatgtctcctgaataacgccgatctggctccccatcaccccaaagacccggttgaaatgaggagaattaactttcagacccctgactcaggccttagatctcctcttagagagcccgggtttcactttgagtccatgcttagccaccccccaatccctatagcagatatggcggaacacacagaaagattgaaagcgaatgattcacttaaattgtctcaggagtacgagtcaatcgacccaggtcagcagtttacttgggagcattccaatctcgaggtcaataaacccaaaaaccgctacgcaaatgtcatagcatatgaccacagccgggtcattttgcaacctattgaggggatcatggggagcgactacattaacgccaattatgtggatgggtaccgctgtcaaaacgcttacatcgccactcagggccccttacccgaaacgttcggcgacttttggcgtatggtatgggaacagcgatctgccacgattgtcatgatgaccagactcgaggaaaagtcgagaatcaagtgtgatcagtactggccgaatcgtggtactgaaacctatgggtttatccaagtgaccttgctcgacaccatcgagttggccacattctgtgtgcgtaccttttctctccacaaaaatgggtcatcagagaaacgggaagtaagacagtttcaattcacagcatggccagatcatggcgtccctgagtaccccacgcctttcctggcattcctaagacgagtcaagacctgcaaccctcctgatgccggcccaattgtggtccattgcagtgcgggagtgggcaggacaggctgttttatagtgattgacgcgatgctggagcggattaagccagaaaaaactgtagacgtgtatggacatgtaaccctgatgcgctcccagcgcaattatatggtgcagaccgaggaccagtactccttcattcatgaggccttgctggaggcagttggctgtggaaataccgaggtgccggcgagatctttgtacgcctacattcaaaagctcgctcaagttgaaccaggcgaacacgttaccggtatggagctcgagtttaaaaggctcgccaattccaaggcccatacctcccggtttatctcagccaatctaccatgcaacaagttcaagaaccgcctggtgaacattatgccttatgaatctacccgagtctgcctccaacctattaggggcgtggagggttctgattatatcaacgcgagctttatcgacggctaccgacaacaaaaagcctatatagctacgcagggacctctcgccgaaacaaccgaggacttctggcggatgctatgggagaacaattccacaatcgtggtcatgctgaccaagctccgggagatgggtagagagaagtgccaccaatattggcccgctgagcggtccgcgcgctaccagtatttcgtggttgacccaatggctgagtacaacatgccgcaatatatattgcgagaatttaaggttactgacgctcgagatggccaatctcggactgtgcgacagttccagtttaccgactggccagaacagggcgtgcccaagagcggagagggcttcatcgatttcatcggccaggtgcacaagacaaaagaacagttcgggcaagacggccccatctccgtccactgttccgctggcgtgggtagaacgggggtgtttataactttgtctattgtcttggagaggatgcgatacgaaggggttgtggacatcttccagaccgttaagatgctgcgtactcagaggcccgccatggtgcagactgaagacgagtaccaattctgttaccaggctgccctggaatacctcggcagctttgaccactatgccacgtag

SEQ ID NO: 201782 - DNA, 5820 bp, synthetic construct
  misc_feature 1..5820: note = Description of Artificial Sequence: Synthetic coding sequence
  source 1..5820: mol_type = other DNA
atggcccccacctggggccccggcatggtgagcgtggtgggccccatgggtctccttgttgtgttgttggttggcggctgtgccgccgaagagccacctcgtttcattaaggaaccaaaagatcaaatcggtgtatcaggcggtgtggcatcgttcgtctgccaagccactggtgacccgaagccacgggtcacatggaacaagaagggcaaaaaggtcaatagtcaaagatttgagacgatagaattcgatgagtctgccggcgcagtgcttcgaatacagcctttgcggacgccgagagacgaaaatgtgtatgaatgcgttgctcaaaactccgtgggcgagataacagtccatgccaagctgacagtgctccgcgaggatcagctgccatctggctttccaaacatcgacatgggacctcaactgaaagtggttgaacgcactcgaacagctaccatgctgtgtgccgcctctggcaaccctgatcccgagattacttggttcaaggatttcctcccagtggacccatcggcttccaacgggcgcatcaaacaactccggtcggatcaggcctttagtcacttacccacaggggcattgcagatcgaatctagcgaagagaccgatcaaggaaagtacgaatgcgtcgcaactaactcagccggtgtgaggtacagttcaccagccaacctgtacgtgcgggtttggcgcaccgtgagacgtgtggccccacggttttccatcctccctatgtctcatgagataatgccaggaggtaacgtaaacataacgtgtgttgccgtaggttctcccatgccctatgttaagtggatgcaaggcgctgaagaccttacgccggaggatgatatgccggttggtcgcaatgtgctagaactgaccgatgtgaaggattccgcgaactacacttgtgtcgccatgagcagtttgggcgtgatcgaggccgtggcccagatcactgtaaaatctctgcctaaagcccccggcactcctatggtgactgaaaacaccgcaacatctattaccatcacctgggactccggcaaccccgatcctgtgagctattacgtgattgaatacaaatctaaatcacaggacggcccataccaaattaaagaggacatcaccacaacgcggtactcaatcggcggcctttcacctaacagtgagtatgagatttgggtcagcgctgtgaattcaataggccagggtcctcctagtgaatctgttgtgactagaactggagagcaggctccagcttccgcacccaggaatgtccaggccaggatgctctccgccactaccatgattgtacagtgggaagaaccggtggaaccaaatggcctgatccgcggatacagagtttattatactatggagccagaacatcccgtcggtaattggcagaaacataacgtagacgactccttgctcacaacagtgggcagcttgctggaagatgagacatacactgtgcgagtgctcgcatttaccagcgtcggagatggacctctaagcgatccaatacaggtgaagacacagcagggcgtacctggccaaccgatgaacctgcgggcagaagcacgctcagaaacctcaatcaccctgtcatggtcccctccgcggcaggaatctatcattaagtatgaactgctcttcagggaaggcgaccatggcagagaagtagggaggacgtttgatccaaccacctcctacgtcgttgaggacctcaagcccaatacagaatatgccttcaggctggcggccagatcaccacaaggtctgggcgccttcactccagtggtccggcaacgcacgcttcagtctaaaccatctgctcctcctcaggacgttaaatgtgtgtccgtccggagcacagctatcttagtatcatggagaccacccccacctgagacccacaacggcgctcttgtgggctactccgtaaggtacagaccactgggtagtgaggatcccgaacccaaagaagtgaatggcattccccccacaactactcagattttactcgaggcccttgaaaagtggacacagtaccggattactaccgtggctcatacagaggtgggcccaggaccagagagttctccagtagttgtgcgtaccgacgaggatgtgccttcggcaccacctcggaaggttgaagctgaggctctgaatgcaacagccattagggtgctgtggcggagccctgctcctgggcggcaacatggacagataagggggtatcaagtgcattacgttcgcatggagggggccgaagcacggggaccaccccggattaaagacgtcatgctcgcagatgcacaagaaatggtgatcaccaatctgcagcccgaaaccgcttactccattaccgtcgcagcctacacaatgaagggtgatggcgctagatctaagccaaaggtcgtcgtgactaaaggcgcagtgctgggacgcccgacgctctccgtccagcagacacctgaaggtagcctgcttgcccgctgggagcccccagctggcaccgctgaggaccaagtcctgggctaccgactgcagtttgggcgggaagactccactcccttagccaccctcgagtttcctcccagcgaggaccgctacacagcctctggtgtgcataagggggctacgtacgtgttccgactggccgcccggtcacggggcggtctcggcgaggaggcagccgaagtcttatccattccagaggacacgccccgggggcatcctcaaattctggaggctgccggcaacgcttccgcaggaaccgtcctgctcaggtggctaccccccgtaccagctgagcggaatggcgctatagtcaaatacaccgttgctgttcgtgaagccggcgctctcggccctgcgcgtgaaactgagctgcccgccgccgccgagcccggcgcagagaacgccttgaccctccagggactaaaacccgacacagcgtacgatctgcaggtcagagctcacactcggcgggggccaggccctttcagcccccctgtacggtaccgtacatttttgagagaccaggtgtctcccaagaatttcaaagtgaagatgatcatgaagacttcagtgctgctttcctgggagtttccagataattataactcgcccaccccatacaaaattcagtacaatggactcaccctcgatgtggacggccgcacaaccaagaagctcattacccatctgaagccccacactttctacaatttcgtcctgacgaatcggggttcctcattaggcggcttacagcaaactgtcacagcctggactgcatttaatttgctgaatggaaaaccgagcgttgctcccaagcctgacgccgacgggtttataatggtctacctgccagacggacagtcaccagtccctgtgcagagctacttcatcgtcatggttcctttacggaaaagcaggggagggcagttcctcacacctttggggagccccgaggatatggacctggaggaactcatccaggacatttccagactacagcgcagatctctccgccactcaaggcagcttgaagtgcctaggccttatatagccgcgaggtttagtgtgctgccacctactttccacccgggggaccaaaaacagtacggtgggttcgacaacagggggctggaaccaggccataggtacgtgctctttgtcctggctgttctgcaaaaatcagaacctacatttgcagcttccccattttcagatccatttcagctggacaacccagatccacaaccaatcgtcgacggagaggaagggctgatctgggtgattggtcccgtgctggccgtggtgtttatcatatgcatcgtaatcgctatactactttataagaacaaaccggattcaaaacgtaaggatagcgagccccgaaccaaatgcctgcttaacaatgccgatctggcaccccatcatcccaaggatcctgttgaaatgcggaggatcaacttccagacaccagactctgggctgcgatcacctctgagagaacctggtttccatttcgagtctatgctgtctcatccgcctattcccatcgccgatatggccgaacacaccgaacgactaaaggcgaacgattcactgaaattgtcccaggaatatgaaagtatcgatccgggccagcagttcacgtgggagcattctaatctggaggtcaacaaaccaaaaaacagatacgcaaatgtgatagcctacgatcattcccgagtcattctgcagccaatcgagggtatcatggggagcgactatattaatgcaaactatgtagacggctatagatgtcaaaacgcatatatcgctactcaggggccattgcccgaaacctttggcgacttttggaggatggtttgggaacagagaagcgctacaattgtaatgatgacccgacttgaggagaaaagtcggatcaagtgtgaccaatactggccaaatcgcggtaccgaaacatacggcttcattcaggtcaccttacttgacaccatcgagttagctacattttgtgtgcggactttctccctgcataagaacggcagttcagagaaacgcgaggtgcgccagttccagttcacagcatggcccgaccacggcgtaccagaatatcctaccccgttcttagcattcttaagacgggttaaaacttgtaatccacccgacgccggacctatcgttgtacactgctccgcaggcgtgggcaggaccgggtgctttattgtgatagacgccatgctagaaaggatcaaacctgagaaaactgttgatgtgtatggccatgttacactcatgagaagccaaagaaactatatggtccagactgaggaccagtattcctttattcacgaggccctgctcgaggccgtaggatgtggaaataccgaggtccctgcccgcagcttgtacgcctacatacagaagctcgcacaggttgaaccgggtgaacacgtcactggaatggagctggagttcaaaaggttagcaaattcaaaagcccacacaagccggttcatatctgctaacctgccttgcaataaattcaagaaccgattagtcaatattatgccatacgaaagcaccagagtgtgcctgcagccaataaggggggtggaaggctcagactatatcaatgcttcttttattgatggttaccggcaacagaaagcctacatagccacccaggggcctctcgctgaaactactgaagacttttggcggatgctgtgggagaataatagcacaatcgttgtgatgctgaccaaactgcgtgagatggggcgtgagaaatgccaccaatactggccagctgagaggtctgcacggtaccagtacttcgttgttgatcccatggcggaatataacatgccccaatacattctaagggaatttaaagtgaccgacgcaagggatggccaatccagaacagtccgccagtttcaattcacagattggcccgaacagggggttcctaaaagcggagagggatttatcgattttattggccaagtgcacaagaccaaggagcagttcggtcaggacggacctatcagcgtccactgcagcgctggggtgggcagaactggtgtattcataactctgtctatcgtacttgagagaatgcgatacgaaggcgtcgtggacatattccagacagtgaagatgctgcgcacacagaggcctgctatggtccagacagaagacgagtaccaattttgctatcaggctgcactggagtatctcggctcgtttgaccattatgctacctag

SEQ ID NO: 201783 - DNA, 5847 bp, synthetic construct
  misc_feature 1..5847: note = Description of Artificial Sequence: Synthetic coding sequence
  source 1..5847: mol_type = other DNA
atggcccccacctggggccccggcatggtgagcgtggtgggccccatggggcttctggttgtgttgctcgtcggcggctgtgccgctgaagagccgccccgctttatcaaagagcccaaggatcagatcggagtgagcgggggtgtggcgtctttcgtttgtcaggccactggggacccaaagccaagagttacatggaacaaaaagggtaagaaggtgaactctcagcgcttcgagacgatcgaattcgatgagagcgccggtgcagtgctgagaattcagccccttagaacgcccagagatgagaatgtttatgaatgcgtggcccagaacagtgttggcgaaattaccgtgcatgcaaaactcactgtgctgagggaggatcagctgccatctggattcccaaacattgacatggggccacagctgaaggtcgtagaacggaccagaaccgccactatgctttgcgcagcaagcggcaatccagaccccgagataacatggtttaaagatttcttacctgtggatcccagtgccagtaacggccgaatcaaacagctgcgatcagaaacgttcgagtcaacaccaattcggggcgcactgcaaatagagagctctgaagagacagatcaggggaagtacgaatgcgtggccaccaactccgccggcgtgaggtatagtagtcccgccaacctatatgtacgggagctccgagaggtaagaagggttgccccgaggtttagtatccttcctatgagtcatgagatcatgcctgggggcaatgttaatataacttgcgtggcagtgggcagtcctatgccatatgtcaaatggatgcaaggggctgaggacctgacgcccgaggacgacatgcctgtcggccgaaacgtgttagaactgactgacgttaaagattctgctaactatacttgcgttgccatgtctagtctcggggtaatcgaggcagtggcacagattacagtgaagtcactgcccaaagcaccggggacgcccatggtgacagagaacacagcaacgtccattaccattacatgggactccggcaacccggatcctgtgtcatactacgtaatcgagtacaagagtaagagtcaggacgggccctaccagatcaaagaggacattactaccactagatactcaatcggggggctctcccccaactcagaatacgagatttgggttagcgcagtgaactccattggccagggtccgccatctgaatctgtggtcactaggacaggcgagcaggccccagcatccgcacctaggaacgtccaagcacggatgctctcagcaaccaccatgatcgtgcaatgggaggaacccgtcgaacccaatgggttaatcagaggataccgcgtctattatacaatggaaccagaacatcctgtcggcaactggcagaaacacaacgtggatgacagtttgctgactaccgtgggatccttgctcgaggatgaaacctatactgttagggttttggcttttacgagtgtcggcgatggccccctgagcgatcccatacaggtcaaaacccaacagggcgtgccagggcaaccaatgaacttgcgggccgaggcccgcagcgagacgtccatcactctctcttggtcaccacctcgacaggagtcaattattaaatacgagctactgtttagggaaggagaccacggcagggaggtgggtcgcaccttcgaccctaccacgtcttatgtggtggaggatctgaagccgaatacagaatacgccttcaggctggcagctagatctccgcagggcctcggtgcttttacccccgtggttcgccaaagaactttgcagtctaagccatccgccccgcctcaggacgtgaaatgcgtgagtgtgaggtccacagcaatcctagtgtcctggcgccctcctccacccgaaacccataacggcgcacttgtgggctactcagtccgctaccgccccttgggaagcgaggatcctgaaccgaaggaagtgaacggtattccaccaaccacgacccagatacttcttgaggctctggagaagtggacgcagtataggataacaactgtcgcacatactgaggtgggtccaggacctgagtcctcacccgtagttgtacgcacagatgaagacgtgccctccgctccccctaggaaggtggaggccgaagctcttaacgccaccgccatacgggtgctgtggaggtcccctgccccagggcgccagcacgggcagataagggggtaccaggtccactacgtgcgaatggaaggtgccgaggcccgcggtccacctcggatcaaggacgtgatgctcgcagatgcccagtgggagactgacgatacggcagaatacgagatggttatcaccaatctacagccagaaactgcatattccatcactgttgctgcctataccatgaaaggggatggggccaggtccaagccgaaggtggttgtgaccaaaggagccgtgctgggacggcccacactgagtgtgcagcagacgcctgaagggtccctgctcgcaagatgggagcctccagctggtactgctgaggatcaagtgcttggctaccggctccagttcggccgggaagactctacgcccctcgcgacactagagtttcctccctcggaggacaggtatactgcttcaggagtgcacaagggggcaacatatgtctttaggctcgccgctcgcagccgtggcggcttgggagaggaggctgctgaggtactttcaatccccgaagacactccaagaggtcacccacagattctcgaagccgctggcaatgcctcagcgggtactgtgcttttgcggtggttgccaccggttcccgccgaaaggaacggagcaattgttaagtatactgtcgctgtgagagaagcgggtgcgctgggtccggcccgggaaaccgaattacctgccgcagccgagccgggtgccgaaaacgcattaacactccaaggacttaagcctgacactgcgtacgatctccaggtgagagcccatacccgcagaggccccggccctttctcacctcctgtgagatatagaacattcctgcgagaccaggtcagtcccaagaacttcaaggtgaaaatgataatgaaaacgagtgttctcctctcctgggagttccctgacaattataatagcccgaccccatataaaattcagtacaatggactgacccttgacgtggacggccgcaccaccaagaaattgattacccacttgaaaccccataccttctataacttcgtcttgaccaaccgcggcagttctctaggcggactccagcagactgtcaccgcctggacagcatttaaccttctcaacggaaaaccaagcgtagcaccaaaaccagacgccgacgggtttatcatggtttacctgcccgatggacaatctccagttccagtgcagagctactttatcgtgatggtcccgttacgaaagagcagaggaggacaattcctgaccccactcggctcgcctgaagacatggatttggaagaactgattcaggatatttctcgtctgcagaggcgcagtcttcgtcacagccgtcagcttgaggtgcctcgcccctacattgccgctcggttttccgtgctgccacccacattccaccccggcgatcaaaagcaatacggggggttcgacaacaggggcctagaacccggtcacagatacgtgctctttgtactcgccgttttacagaaatccgagccaacattcgccgcaagcccattttctgatccattccagctagacaatcctgaccctcagcctatcgtagatggcgaggagggcctaatctgggttatcggaccagtgttggcagtggtgttcattatctgcatcgtcattgctatactgctctataaaaataaacctgattctaaacgcaaagactctgagccaagaacaaagtgcttactcaacaacgctgacctagctccccaccatcctaaagacccggtcgaaatgagacggattaatttccagactccagactctggactgcggagccctctgcgtgagcctggctttcactttgagagcatgctatcacatccgcctataccgatcgccgatatggctgagcataccgaaaggcttaaggccaatgactccctaaaactctctcaggagtatgaatctatcgaccctggacagcagtttacttgggagcactcgaacttagaagttaataagcctaagaacaggtacgcaaacgttattgcctacgatcacagccgggtgattctccagcctatcgaggggatcatggggtccgattacatcaacgcaaattacgttgacgggtacaggtgtcagaatgcctacatcgccactcagggacccctgcctgaaacattcggtgacttctggcgaatggtgtgggagcagaggagcgctaccatagtgatgatgacgcgactggaggaaaaaagtcggatcaagtgcgaccagtattggcctaacagaggaaccgagacttacggattcatccaagtcaccctactggatacgattgagctggccaccttttgtgttcgcacattctctctgcacaaaaatggctccagtgaaaagcgcgaagttagacagttccagtttaccgcctggccagatcatggtgtgcccgaatacccaaccccgtttctggctttcttgaggagagtgaagacatgcaacccacctgatgcggggcccatcgtggttcactgttccgcaggcgtgggcagaactggctgtttcatcgttatagacgctatgttggaaagaatcaaacctgaaaagacggtggatgtgtatggccacgtaacgcttatgagatctcagaggaactatatggtacagaccgaggatcagtacagtttcattcacgaagctctattggaagcagtcggctgcggcaatacagaagtgcccgccagatctctctatgcatacatacaaaagcttgcacaggtggagccaggcgaacatgtgactggcatggagttagagttcaagcgcttggcgaactccaaagctcacacgagcaggtttatttcagccaacctgccttgcaacaaattcaagaaccgcctggtaaacattatgccatatgaatccaccagagtatgcctgcagcccatacgcggagtagagggctcagactatatcaacgctagctttatcgacggataccggcagcagaaagcctatatagccacgcagggtccattagcagagaccaccgaggatttttggagaatgctctgggagaacaatagtaccatcgtggtgatgcttactaaacttcgggagatgggtcgcgaaaagtgccatcaatattggcccgccgaacgctcagcaagataccaatatttcgtggtcgacccaatggcagagtacaacatgccacaatacatcttaagagagttcaaggttactgatgcccgtgacgggcaaagcagaacagtccggcagttccagtttacagactggcctgaacagggtgtgccaaagtcaggagagggctttatcgacttcattggacaggtgcataaaacaaaggaacagtttggccaagacggtcccatttctgttcattgctcagccggagttggacgtacgggcgtcttcataaccctatccatagtgcttgagcgcatgagatacgagggtgtggtagacattttccagactgttaaaatgctgcgcacccagcgccccgccatggtgcagactgaggacgagtaccaattctgttaccaggctgccctggagtacttaggctcatttgaccactatgctacctag

SEQ ID NO: 201784 - DNA, 5850 bp, synthetic construct
  misc_feature 1..5850: note = Description of Artificial Sequence: Synthetic coding sequence
  source 1..5850: mol_type = other DNA
atggcccccacctggggccccggcatggtgagcgtggtgggccccatgggactgctggttgtcctcctagttggcggctgtgcggccgaggaaccgcccagatttatcaaagaacccaaagatcaaattggagtgagtggtggcgtggcgtcctttgtctgccaggctaccggagatcctaagcccagagtcacgtggaacaagaaaggcaaaaaagtaaattctcagcggttcgagacaattgaatttgacgaaagcgctggcgccgtcttgcggatccagccgcttcggaccccaagagatgaaaacgtctatgaatgcgtagcacagaactcagtgggagagatcaccgtccatgctaaattgacggtgcttcgagaggatcaactgccaagcggattccccaacattgatatgggcccccagcttaaagtcgtggaaaggacaaggacagccactatgttgtgcgccgcaagcgggaatcctgatccagagatcacctggttcaaagattttctgccagtcgatccctctgcgagcaacggtagaatcaaacaactccgacgtagcgaaacctttgaatcaacgcctattcgcggcgccctgcagattgaatccagtgaggagactgaccaaggtaaatatgagtgtgttgctaccaactccgctggggtgcgctatagctctcccgcgaacctatacgtcagggagctccgcgaagtcagaagggtggccccgcgattctcaatattgcccatgagtcatgagattatgcctggaggaaacgtcaacatcacctgcgtcgccgttgggtctccaatgccatatgtgaagtggatgcaaggggccgaggatttaaccccagaagacgatatgccagtcggcaggaatgtcctcgaattgaccgatgtgaaggatagcgccaactatacttgcgtcgctatgagctctctcggggtgatcgaagcagttgcccagatcacggtgaagagcctcccgaaggcccccggaactcctatggtcacggaaaacacagcaacttctataaccattacttgggattcaggcaacccggaccccgtcagctactacgttattgagtacaaatcaaagtctcaggatggtccataccagattaaagaagatattactactacgcgatactccatcggggggcttagcccaaactcagagtacgagatctgggtgagcgccgtgaattcaattggacaggggccaccctctgaatcagtcgtgacaagaacaggcgaacaggctccggcttccgccccccgcaacgtacaggcccggatgctcagcgcaactacaatgatagtgcagtgggaagagcccgtagaaccgaatggccttattcgaggctaccgagtgtattacactatggaaccagagcaccctgttggaaattggcaaaagcacaatgttgacgatagcttgctgactactgtgggctcattgctggaggacgaaacatatacggtacgggtgctggcatttacgtcggtgggagatgggcctctgtcagaccccatacaggtcaaaacccagcaaggcgtgccaggccagcccatgaaccttcgggcagaagccaggtctgagacctctataactctgtcctggtctcctcctcggcaagaatcaatcatcaagtacgagctgttatttcgcgaaggtgaccacggaagagaagtcggacgtacatttgatcccaccacctcttatgtggttgaggacttgaagcccaacaccgagtacgccttccgactggctgccagaagcccacaagggctgggggccttcactccggtcgtgcgacagcgcacccttcagtctaagccgagtgcaccgcctcaagatgtcaagtgcgtttctgtgaggtccactgctatactcgtgtcttggcggcccccccctcccgagactcacaacggcgctctggtcggctactcagtaaggtacaggcctttgggatctgaggatcccgagccaaaagaagtgaacgggatcccacccactacaactcagatcttgcttgaggcactcgagaaatggacccagtacagaatcaccacagtggcccatactgaggtcgggcctggtcccgaatcatcaccggtggtagtaagaaccgatgaagacgtgccttctgcaccccctcgaaaggtagaggcagaggccctgaacgccacagccattagggttctttggaggagcccagcccccggcaggcagcatggccagatcagaggctaccaggtacactatgttcgcatggagggggcggaggcaaggggcccaccccggataaaagacgtgatgctcgcagacgcacagtgggaaacagatgacacggcagaatacgagatggtgatcaccaacctacaacccgaaactgcctactccatcaccgtggccgcatacaccatgaagggtgatggagctcggtctaaacctaaggtcgtggtgactaagggggccgtgctgggccggcctacgctatccgttcaacaaacaccagagggaagtctgcttgccaggtgggaacccccagcaggaacagcggaggatcaagttctgggctatcgactgcagttcggccgagaagattccacccccctggcaacacttgaatttcctccctcagaagatcgttacacagcatctggtgtgcacaagggcgccacatacgtcttccggctggcggctagaagtcggggcgggcttggggaagaagcagccgaagtattaagtatacccgaggacacacctcgcggacatcctcagattctggaggcagccgggaacgcgtctgccggcaccgttctcctccggtggttaccacccgtgcctgctgagcggaatggagctatcgtgaaatacacagtggcggtgagggaggcgggagctctagggccagctagagagaccgagctcccagcagctgctgagcccggggctgaaaacgcactcactctgcagggactgaaaccggatacagcatacgacctacaagtgcgcgcacacacgaggcgagggcctgggcccttcagtccccccgtgcgttatcgaacattcttgcgggatcaagtttcccccaaaaactttaaagtgaaaatgatcatgaagacatcagtcctgctgagctgggaatttcccgataattataactccccgactccttataagattcagtataacggtctgacattggacgtggatggtcggaccaccaagaaactgatcacacacctgaaacctcacacgttttataatttcgtgttaacgaaccgtggctcttccctgggcgggctgcagcagacagtgacagcgtggacggcctttaatctcctgaacggtaagccttcggtggcccccaagcccgacgcagacggtttcatcatggtgtatttgcctgacgggcaatctcccgtcccagttcagtcttacttcattgttatggtgcccctcagaaaatctagaggaggccagtttctcacacccctgggttcccctgaggatatggatcttgaggagctaattcaagatatcagccgcctccagcgccgatcccttagacattcgagacaattagaagtgcccagaccatatatcgccgccagatttagtgtgcttccacccacattccacccaggggaccaaaaacagtatggcgggttcgacaaccgaggactggagcctggacacaggtatgtgcttttcgtactcgccgtgcttcagaagagtgagcccactttcgcagcctcacccttttctgacccgttccagcttgataaccctgacccgcagccaatcgtcgacggcgaggagggcctgatatgggttattgggccagtcctcgccgtcgtttttattatctgcatcgtaattgctattctcctttacaaaaagaagcctcatagcaagagaaaagactccgaaccccgcaccaagtgtctcctgaacaatgcggacctggcgcctcaccacccaaaagatccagttgagatgaggaggattaattttcaaacccccgattcagggctgcgctcacctctgagagagcctggatttcactttgagtctatgttgagccaccccccaatccccatcgccgacatggctgagcacacagagcggctcaaagccaacgattcccttaagttgagtcaggagtatgagtcaatcgaccctgggcaacaattcacttgggagcactccaacctggaggtaaataagcccaagaaccgttacgctaatgttattgcatacgatcattcacgcgtgatcttgcaaccaatcgaagggattatgggctctgattacattaacgcaaactacgtggacgggtacaggtgccagaatgcatatatagccactcagggccccctgcccgaaacattcggcgatttctggagaatggtgtgggagcaaagatcagctaccattgtcatgatgacccgtctggaagaaaaatcgcgcatcaaatgcgatcaatattggcccaataggggtacagagacttatggtttcatccaggtgacgttattggatactatagaacttgcaaccttttgtgtccgcacattttcattacataaaaatggcagtagtgagaagcgggaggttcgacagtttcagttcacagcttggcctgatcacggggtcccggaataccccacaccctttcttgcttttttgcgacgtgtgaagacctgcaacccaccggatgctggcccaatcgtggttcactgctccgcaggcgtaggacgcacagggtgctttattgtaatcgatgccatgctagaaagaatcaagccagaaaagactgtagacgtatatggccatgtcacactgatgagatcacaacggaactatatggtgcagacagaagatcagtactcattcatacacgaagcattattagaggctgtgggctgcggcaacacagaggtcccggcacgctcattgtacgcctacatccagaaactggcgcaagtggaacctggggagcacgtaacggggatggaattagagttcaagaggctcgccaattctaaagctcacaccagccgcttcatatctgcgaacctgccctgtaacaagttcaagaaccgccttgtgaacataatgccatatgaaagcacccgggtgtgcctgcagccaattcggggagtcgagggcagcgattacatcaacgcctctttcattgacggctacagacaacagaaggcctatatcgcaacacaaggccctctcgccgagacgaccgaggatttctggcggatgctttgggagaacaactccacaatcgtggttatgttaactaaactgcgtgagatgggacgtgaaaaatgccatcaatactggcctgctgagcgctccgctcgctatcaatatttcgtggttgaccctatggcagagtacaatatgccgcagtatatcctgcgcgaattcaaggtaaccgacgcacgggatgggcagagcagaaccgttcgacagtttcaattcacagactggccagagcaaggcgtgcctaagtccggtgaaggatttatagatttcatcggccaagttcataaaacgaaggaacaatttggacaggacggcccaatctccgtgcattgtagtgcgggggttggtcgcacgggtgtgtttatcaccttaagtatcgtcctcgagcgcatgaggtacgaaggggtagtggacatttttcagactgtgaagatgctgaggacccagcggccagccatggtccaaaccgaggatgagtaccagttctgctatcaggctgcattagagtacctcggctcctttgaccactacgcaacttag

SEQ ID NO: 201785 - DNA, 4683 bp, synthetic construct
  misc_feature 1..4683: note = Description of Artificial Sequence: Synthetic coding sequence
  source 1..4683: mol_type = other DNA
cggagcgcccggggcctgagcgtgcgggaccggggcgccatccccttgcaagggggggaccgaagatcccttcccagtatggccccgacctggggtccgggtatggtgagtgtggtaggtcccatgggtctgttggtggtgcttcttgtcggcgggtgcgctgcggaagagcccccgaggtttattaaggagccgaaggaccagataggggtgtcgggaggagtcgcttcttttgtgtgccaagccacaggcgaccctaagccccgagtgacctggaataagaaggggaaaaaggtcaatagccagagattcgagaccatcgaatttgatgagtctgcaggagctgtcctccgcattcagcctcttcgcacgccccgagacgagaacgtttatgagtgcgtcgcacaaaactccgtcggtgaaataactgtccacgccaagctcacagtcctcagagaagaccagctcccaagcgggtttccaaatattgatatgggcccccagctgaaggtcgtcgaacgtacgcgaaccgctacaatgctgtgcgctgcctcaggcaatccggatccagaaatcacctggtttaaagattttctccctgttgatccatctgcttctaatggccgaattaaacagcttcggagcggagctttgcagatcgagagctccgaggaaaccgatcagggaaaatatgaatgtgtcgccacaaattctgcgggcgttaggtattctagccctgcaaatctgtacgtgcgcgtgcgacgtgtagcgccaagatttagcatcctacccatgtctcacgagatcatgcccggcgggaacgtcaacattacctgcgtggcggtcgggtccccgatgccctacgtaaaatggatgcaaggggctgaagatctaacacctgaggatgatatgccagtcggccgtaatgttcttgaactgaccgacgtcaaagatagtgccaattatacttgcgtggccatgagctcactcggcgtcatcgaggccgtcgctcagattacggtgaagagcttaccaaaggctcctggtacacctatggtgacagaaaacaccgctacttcaatcaccataacttgggacagcggcaaccctgatcccgtgagttactatgtcattgagtacaagagcaagtctcaggatggaccttaccagattaaggaggacattaccaccacacgatattcaataggcgggctttctcccaactccgagtacgagatatgggtgtctgccgtgaactccattggccaggggcctccatctgaaagtgttgttactaggaccggagagcaggcgccagcctctgcccccaggaacgtgcaggcgagaatgctgagtgctacaacgatgattgttcaatgggaggagcccgtcgaacctaatggacttatcagagggtatagagtctattatactatggagccagagcacccagtgggcaactggcagaagcataatgttgatgatagcctacttaccacagtggggtctctccttgaggacgagacatataccgtgagagttctggctttcacgtcagtaggcgatgggccattgtctgaccccatacaggtgaaaacacagcagggtgtccctggccagccaatgaacctccgggccgaagcaaggtccgaaaccagcattacactcagctggagccccccgagacaggaatctattatcaagtatgaactgctttttcgcgagggagaccacggtcgggaggtgggaaggacattcgatccaactaccagctatgtggttgaggacctcaagcccaacaccgaatatgccttcaggctcgcagcacgttcgccccagggcctgggcgcgttcacaccggtggtcagacaaagaaccctgcaatccatcagtcccaaaaactttaaagtcaaaatgatcatgaagaccagtgtgttactgagctgggaattccccgataattacaactctcctacaccgtataagattcagtacaacggcttaacactcgacgtagatggcaggaccactaaaaagctgattacacacctcaaacctcatactttctataactttgtactgactaatcggggctcctcactcggaggtctacaacagacagtgacagcgtggactgcttttaacctcttgaacggaaaacctagcgtggctccaaagccggacgctgatggattcataatggtgtaccttcccgatggacaaagcccagtccccgtacagtcatattttatagtgatggtgcctctcagaaagagcagagggggacaattccttaccccccttggtagtccggaggatatggatctcgaggaacttatccaggatatctcccgcctccagcgcaggagcctccgccactccaggcagctggaggtgccgcgaccttatatcgctgccagatttagtgtattgccaccaacttttcatcccggcgatcagaaacagtatgggggtttcgataacagggggctcgagccaggccatcggtatgtgttgttcgttctggccgtcctccaaaagtctgagcctactttcgcagcaagtcctttctctgatccattccagctggacaatcctgatccacagcccatcgttgatggcgaggaaggactcatctgggtcattgggcctgtgctggctgtggtcttcattatttgtattgttatagcgatattgttgtacaagaataaaccagattcgaaacgcaaagactctgaacctcggacaaagtgtctgctgaataatgcagatctggccccacaccacccaaaggacccagtcgaaatgagaagaatcaacttccaaactcccgatagcggcctgcggtcgccgctgagagagcccgggtttcatttcgagtccatgctcagtcacccccctatccctatcgctgatatggccgagcataccgaaagactcaaggctaacgatagcctcaaattgtcccaagaatacgagtctatagaccctggccagcagttcacctgggaacacagcaaccttgaggtaaacaagcccaagaatagatatgccaatgtcattgcttatgatcactctagggtgatcttgcagcctattgagggtatcatggggagcgattatattaatgcaaattatgttgacggatatcgttgtcagaatgcgtatatcgccacacaggggcctttacctgaaacgtttggcgatttttggcgcatggtctgggagcagcgctcagctaccattgtgatgatgaccagattggaagagaagtcacgaatcaaatgtgatcaatattggccaaaccgaggcacagagacctatgggtttatccaagtcaccctcctggacaccattgaactggcaacgttctgcgtgcggacattcagcctgcataaaaacggctccagcgagaagcgtgaggtacgccagtttcagtttacagcatggcctgatcacggagtacctgagtatcccacgccatttcttgcctttctgcgacgggtaaagacgtgtaatccaccggacgcagggcctatagtggttcactgctctgccggtgtgggtcgaactggctgttttatcgtaattgatgccatgctggagcgtatcaaacctgagaagaccgtcgatgtgtacggccatgtgactctgatgaggagtcagagaaattacatggtgcagacagaagaccagtattctttcatccatgaggccctacttgaagcagtcggatgcggcaataccgaagtccccgctcggtcgctctacgcctacattcagaagctggcccaggtggaacccggtgagcacgtcactggcatggaactggagtttaaacggctcgccaatagcaaagcccatacaagccgttttatttctgcgaatctaccttgcaataagttcaagaataggctggtcaatattatgccatatgagtccacccgggtgtgcctgcaacccataaggggcgttgagggcagcgattacatcaatgcaagtttcattgatggctatcgtcagcagaaagcttacatcgctacacagggtcctctggctgaaacgaccgaggacttctggaggatgctgtgggagaacaattccacaatagtggttatgctcacaaaattgcgcgagatgggcagggagaagtgccaccagtactggcccgctgaaagaagtgcgcgctatcagtactttgtggtggaccccatggccgagtataacatgcctcagtatatcttgagagagttcaaagtgaccgacgcacgggatggtcagtccaggactgtgagacagttccaattcacagattggcctgaacagggagtgcctaagagtggggagggatttatcgactttataggtcaagtacacaaaactaaagagcagtttggtcaggatgggcccatctcagtgcattgctcagcgggggtgggacgcaccggggtgtttatcaccctgtccatcgtgctggagaggatgcggtatgagggggtagtagacattttccagactgttaagatgctcagaacccagcgcccagcgatggtccagaccgaaaccgagtcaagaccaggctggagtgctgtggcccaatccagactgactgccagtagtgcatcttggattcacgccatcctacttccccaacctccagaatggctgggcctccaggtgtag

SEQ ID NO: 201786 - DNA, 4518 bp, synthetic construct
  misc_feature 1..4518: note = Description of Artificial Sequence: Synthetic coding sequence
  source 1..4518: mol_type = other DNA
atggcccccacctggggccccggcatggtgagcgtggtgggccccatggggctcctagtggtcttactggtagggggatgcgcagctgaggaacccccgaggtttataaaggagccaaaagaccagatcggcgtgagcggaggcgtagcaagcttcgtttgtcaggcaaccggcgaccctaagccacgagtgacctggaataaaaagggtaagaaggtgaatagtcagcgctttgagacgatcgaattcgatgaaagcgccggcgcggtgcttaggattcagccgctaagaacacccagagatgagaacgtctatgaatgtgttgctcagaatagtgtcggcgaaatcactgtgcacgccaagttaaccgtgttacgagaggatcagctaccaagcgggtttccaaatatagatatgggcccacagctcaaagtcgtggaacggacccgcaccgcaactatgctctgtgctgcctccggcaaccctgaccccgaaatcacctggtttaaggacttcttaccagtggatcccagtgcaagcaatgggcgcatcaagcagctgcgtagcggagctttacagatcgagtccagtgaagaaacggatcagggtaaatatgagtgcgttgccaccaactccgctggggtgcgctattcgtccccagcaaacctctacgtgagagccctgagagaggtgcggagggtggctccgaggttctcaattttgcccatgtcccatgagataatgcctggcggaaacgttaacatcacctgtgtggccgtgggctccccgatgccctacgttaaatggatgcagggtgccgaggacctgactcccgaggacgacatgcctgtgggccgcaacgtgctagaactgaccgacgtgaaagacagtgcgaattatacctgcgtcgcaatgagttcactgggggtgattgaagctgtggctcagatcaccgttaagtctctgcctaaggccccaggaaccccgatggtaactgaaaatacagctacatctattacaataacatgggactcaggaaacccagatccagtctcatactatgttatcgaatacaaaagcaagtcacaagacggtccctaccagatcaaagaggatattaccacgacgcgctattctataggaggtctctcgcctaattccgagtacgaaatatgggtgtcagccgttaacagtatcggacaggggccaccatctgagtcagtggtgacacgcacaggtgagcaggctcccgcttcagccccccgtaatgtgcaggcccgcatgctctccgccacaacaatgattgtccaatgggaggaaccggtcgagcccaacgggctgataaggggctatcgtgtgtattacactatggagccagagcacccagtgggaaattggcagaaacataatgtggacgactccttgctaactaccgttgggtccttactggaggacgaaacttacaccgtgagggtcctggccttcactagcgtcggggacggtcccttgtcagatcccatccaggtgaaaactcagcagggtgtgcccggccaacctatgaacctgagggcagaggcacgtagtgaaacgagcattacactctcctggtcaccgcccagacaagaaagtatcataaagtatgaattattgttccgagaaggagatcatggaagagaggttggaaggacattcgaccccacaacgagttatgttgtcgaagacctgaaacccaacactgaatatgctttcaggcttgcggctaggtccccccaagggttgggcgccttcactcctgtggttcgccaaagaactctgcaatccatctcccccaagaatttcaaggttaagatgatcatgaagacctcagtactcctgagttgggagttccccgataattacaactctcccaccccgtacaaaatccagtataatggcctcactctggacgtggatggtaggacgaccaagaagctgattacccatctgaagccacatacattctacaattttgtcttaacaaaccggggcagcagcctcgggggactgcaacagactgtaacagcctggactgcgttcaacttgctcaatggtaaaccttccgtcgcacccaaacctgatgcagatggcttcattatggtgtaccttcctgacggtcaaagccccgtccctgtacagagctattttatcgttatggtgccgttacggaaatctcggggtggccagtttctgacacccctgggatcccctgaggacatggacttggaggaacttattcaagatatctctcgactccaacgcaggtctctccgacatagtcgacagctagaagtgccccggccgtacattgccgcgcgattttccgtactgccgcccacctttcacccaggggatcagaagcagtatggaggctttgataacagggggctggaaccagggcatcggtatgtgctgttcgtccttgctgttctccagaagagtgagccaaccttcgcggcttcccccttctccgacccgtttcagctggacaaccctgatccgcagccaattgtcgatggcgaagagggattaatctgggttattgggcccgtgctagccgtggtcttcattatctgtatagtgatcgcaattctattgtataaaaacaagccagacagtaagcggaaagatagcgaaccgaggacaaagtgtctgctgaacaatgctgatttggccccacatcatcctaaggatcccgttgagatgcgcaggataaactttcaaacgcccgggatgctttcgcacccacctattcccatcgctgacatggccgaacacaccgaaaggctcaaggccaatgattctttgaaactctcacaggagtatgagtcgatcgatcctggccagcagtttacctgggaacacagcaacttggaagtgaataaaccaaaaaataggtatgcgaacgtaatagcctacgaccatagcagggtgatcctccagcccattgaaggtattatgggcagcgattatataaacgcgaattatgttgacgggtaccgctgtcagaacgcttacattgctacacagggccccctacctgagacgtttggagatttctggcgaatggtgtgggagcagaggtctgcgacaattgtgatgatgacacggttagaagaaaaaagccggattaaatgcgatcagtattggcctaaccggggcacagagacatacggtttcatccaggtcacgctgttggacactattgaactggccacattctgcgtaagaacgtttagcttacacaagaatggtagctctgaaaagcgggaagtccgccagttccagttcacggcttggcctgaccacggggtacccgagtaccccacgcctttcctggcattcctgaggcgcgtgaagacttgcaatcccccagacgccgggcccatcgtcgtgcactgttcagcgggcgtgggcagaacaggatgttttattgtgatcgacgctatgttagagagaataaaacccgaaaagacggttgacgtttacgggcacgttactttaatgcgctcacagcgtaactacatggtgcagaccgaggaccagtatagcttcatccacgaagctctgctggaagccgtggggtgcgggaataccgaggtccccgcccgctcactatacgcttacatccagaagcttgcccaagtcgagccaggagagcacgtcacaggcatggagttggaattcaagaggctggccaactcaaaggcccacacaagccgcttcatctctgcgaatttgccttgcaacaagttcaaaaatcgcttggtcaatattatgccttatgaaagcacacgcgtctgtctccagcccattagaggtgttgagggtagcgactacataaacgctagcttcatagatggctaccggcagcagaaagcctatattgctacacaggggccactggctgagaccaccgaagacttctggcggatgctctgggaaaataacagcacaattgtggttatgcttactaagttgagggagatgggccgagagaagtgccaccaatactggcctgccgaacggtccgcgcgttaccagtatttcgtagtggaccctatggccgagtataacatgccccagtatattttaagggagttcaaagtcaccgatgcccgcgatggacagagcagaacagttcgtcaattccagttcacagattggcccgaacagggtgttcccaagtctggcgagggctttatagacttcatcggacaggtccataagacaaaagagcagttcggacaagacggaccaatcagtgttcattgttctgccggggttggccgcactggtgtgtttattacactctctatagttcttgaacgaatgaggtacgaaggagtcgtggatattttccagaccgttaagatgctgaggactcagcgtcctgccatggtgcagactgaagatgaataccagttttgttaccaggccgcgttggagtatctcggctccttcgatcattatgccacatag

SEQ ID NO: 201787 - DNA, 4329 bp, synthetic construct
  misc_feature 1..4329: note = Description of Artificial Sequence: Synthetic coding sequence
  source 1..4329: mol_type = other DNA
atggcccgggcccaggccctggtgctggccctgaccttccagctgtgcgctcccgagaccgaaacccccgccgctggatgcaccttcgaagaggcgagtgaccccgctgttccttgcgaatacagtcaagcccaatacgatgacttccagtgggagcaggtgagaatccatcccgggactagagcgcccgccgacttgccccatggcagctacctgatggtcaacacctcccaacacgctccgggccaacgggcccatgtcatcttccagagtctatccgagaatgacacccattgcgtacagtttagctatttcctgtacagtagagacggacattcacccggcactctcggggtgtatgttagggtcaacggaggcccactgggtagtgccgtgtggaacatgaccgggtcccacggccgccaatggcatcaggcggagttagccgtgtccactttctggccaaacgagtatcaggttttgttcgaggccctgatcagtcctgatcggcgtgggtatatgggcctggacgacattctgctcctttcttacccctgcgccaaggcacctcatttttcccgactaggggacgttgaagtaaacgccggtcagaacgcttcatttcagtgcatggcggccggacgggccgccgaggcagagaggtttcttcttcagagacagagcggtgccctcgtcccagcggccggcgtaaggcacattagtcaccgcagattcctggccaccttcccactggccgctgtaagtagagccgagcaggatctatacaggtgtgtcagccaagcccccagaggagcgggagtcagtaatttcgctgagctgatcgtgaaggaacctcctacgcccatcgcccctccgcagttgctgcgagcggggccaacatacctcatcattcaattaaataccaactccatcattggcgacggtccgatcgttcgcaaagaaatcgagtaccggatggcccgggggccttgggccgaagtgcacgctgtctctcttcagacctataagctttggcacctagatccggacaccgagtacgagatcagtgtactgctcaccagacctggagatggggggacgggacgccccggtccaccgctcatcagtagaacaaaatgcgccgaacccatgcgcgcacccaagggattggcctttgccgagatccaggcacgtcagcttaccctgcagtgggaaccactcggttacaatgtcacacggtgccatacttacacggtgagcctttgctaccactacacattgggatcatcccacaaccagactatacgtgagtgtgtgaaaacagagcagggcgtgtcccggtacaccatcaagaatctcctaccgtaccggaacgtgcacgtgcgcctggtgctcacaaatcccgagggaagaaaagagggaaaggaggtgacattccagaccgatgaagacgtgccctccggcattgccgccgagtcacttacttttacacccctggaagacatgattttcctgaagtgggaggaaccacaggagccaaacgggctgatcacccagtacgaaatatcatatcaatccattgaatcctctgatcctgccgtgaacgtccctgggccgcggagaactatatccaaattacggaatgagacttatcatgtttttagtaatctgcatcctggcacgacctatcttttctctgtccgagctaggaccggcaaaggcttcgggcaggccgcactgacggaaatcactactaatattagcgctccctcctttgactacgcagatatgccctccccattgggcgagagcgaaaatactatcacagtcctgttgcgacccgcccaggggcgtggggcaccgatctctgtctaccaggttatcgtggaagaggagcgcgctcgccgactgcggagggaacctggcgggcaggattgcttcccagttcccctgacgttcgaagcggcactcgcgcgcggcctcgttcattacttcggcgccgaactcgccgcctcatcacttcccgaggcaatgccattcactgtgggtgataaccagacctataggggcttttggaacccccccctcgaaccccgcaaggcctacctaatttatttccaagctgccagccatttgaagggagagacccgattgaattgcattcggattgctagaaaggctgcatgtaaagagtcgaagcgtccgctggaggtgtctcagcgctcggaggaaatgggtcttattttaggtatctgcgccggcggtttggctgtgctgatcctgctgctgggagccataattgtgattataagaaaaggaaaacctgtgaatatgacaaaagccacagtgaattatcgacaggagaaaacacacatgatgtcagcggtcgaccggtcattcaccgatcagagcactctccaggaagacgaacgactggggctaagtttcatggacacccatggctactcaactagaggcgaccagaggtcaggcggggtgaccgaagcttccagcctcctgggtggcagcccgaggcgcccctgcggccggaagggtagcccataccacaccggtcagttgcaccctgcagtcagagttgccgatctcctgcagcacatcaatcagatgaagacggcggagggatatgggtttaagcaagagtacgaatcattctttgagggttgggacgcaacaaagaagaaggataaagtcaagggctccaggcaggaaccaatgccggcatacgaccggcaccgcgtcaaactgcaccctatgctgggtgatccgaacgcagattatatcaatgctaactatattgatctgagaggtggccgtacgggctaccaccggagcaatcacttcattgcaactcaaggccctaagcccgaaatggtgtacgacttctggcgcatggtctggcaagagcattgttcctccatcgtgatgatcaccaagctggttgaggtgggccgggttaagtgctctcggtattggcccgaggattcagatacgtatggtgacattaaaattatgctggtaaagacagaaacacttgccgaatatgttgtacggacgttcgccctggagcgacggggctattccgcccgccatgaagtgagacagtttcactttaccgcatggcctgaacacggcgtgccctaccacgctacagggctgctagctttcattagacgagtcaaggcttcaaccccccctgacgccggaccaattgtgatacactgttctgccggaaccggccggaccggctgctacatagtactggacgtgatgctcgacatggctgaatgtgagggcgtcgtggatatttacaattgtgttaaaacactttgcagtcgccgggttaacatgatacagacagaagagcaatatatcttcatccacgacgcgatcctggaagcgtgcctgtgcggcgagactaccatcccagtgagcgaatttaaggccacttataaggaaatgatccgaatcgacccgcagagcaattcatctcagctgcgcgaggagttccagacgctgaacagcgtgaccccacctctggatgtggaggaatgttcaattgctctgcttccacgcaacagggacaaaaatagatctatggatgtgctccctcctgatagatgcctgccttttctgatctccacggatggcgacagcaataactatataaacgccgctctgacagattcatatacccgatccgctgctttcatcgtgacactgcaccccttgcaaagtacaacccccgacttttggaggctggtttacgactatgggtgcacaagcatcgtgatgttgaatcaactgaatcagtcaaacagcgcatggccttgtcttcagtattggccagaacccggcagacagcaatatggcttgatggaggtggagttcatgtcaggaacggcagatgaggatcttgtggcccgggtgtttagggtgcagaatataagccggctgcaggagggacacttgctcgttcgccatttccagtttctgcggtggtcggcctaccgggatactcctgatagtaaaaaggccttcctgcatcttctcgcagaggttgacaagtggcaggccgagtctggcgacggccgcaccatcgttcattgcctcaatggaggcggacgatctggaactttttgcgcctgcgccaccgtgttagaaatgataaggtgccacaatttagtggatgtatttttcgcagcaaagactctaaggaactacaaaccgaatatggttgagacaatggatcagtatcacttctgctatgatgtagctctggagtatctggaggggctcgagtccaggtag

SEQ ID NO: 201788 - DNA, 4341 bp, synthetic construct
  misc_feature 1..4341: note = Description of Artificial Sequence: Synthetic coding sequence
  source 1..4341: mol_type = other DNA
atggcccgggcccaggccctggtgctggccctgaccttccagctgtgtgccccagagacagaaacaccagccgcagggtgcacgttcgaggaggcctccgatcccgcagtcccatgtgaatactctcaggctcagtacgacgatttccagtgggaacaggtaaggatccacccaggtaccagagcgccggctgatctcccgcatggctcctatctgatggtgaacacaagtcagcacgcacccggtcagagagcacatgtcattttccagagcctaagtgagaatgacacccactgtgtccagttttcctacttcttatattctcgcgacgggcatagcccaggtacgctgggagtttatgtacgcgtgaatggcggcccactgggttctgctgtatggaacatgaccggatcacacggcagacaatggcaccaagcggagctggcagtctcaactttctggcccaatgagtatcaggttctgtttgaggcgttgatctctcccgacagaagaggctacatgggacttgacgacatcctcctgctctcctatccgtgcgctaaagcgcctcacttttcacggctgggtgacgttgaagttaacgctggccagaatgcctcttttcaatgcatggccgcaggaagggccgcagaggccgaacgtttcctgctgcagcggcagagcggagcattggttccagcagccggagtcaggcatatcagtcaccgcaggttcttggctactttccccctggccgctgtcagtagggccgaacaggacctctatagatgtgtgtcccaggcgcctaggggagctggtgtgtctaacttcgccgaactgattgttaaggagcctccaacccccatagcccccccacaactcttgcgggctggacctacttatctcatcattcagttaaacacaaacagtatcattggcgacgggccgattgtacgtaaagagattgaatatcggatggcccgcggaccctgggccgaagttcacgccgtttcgctccagacttacaagctgtggcatctggacccagacactgagtacgaaatcagcgtgttgctgacccgacctggcgacggaggcacagggagaccggggccacccctgatttcgcgcaccaagtgcgccgaaccaatgcgagcgccaaaggggctcgcttttgctgaaattcaagctcggcaactgacgctgcagtgggaacctctcggctataacgtcacaaggtgtcacacttacaccgtgagtctatgttaccattacaccctgggtagctcccataatcaaaccatccgtgagtgcgtgaagactgaacagggggttagccgttacactattaagaatctgttgccgtaccggaatgtgcatgtgcggctggtgttaacaaatcccgagggaagaaaggaggggaaagaggtcacctttcaaaccgacgaggacgtcccatctggaatcgcggcagaatccctgacatttaccccattggaggatatgatttttctgaagtgggaggagcctcaagagccaaacggcttaatcactcaatatgaaattagctaccaaagcatagaatcgagtgaccccgctgtcaatgttcctggaccccgccgcacaatcagtaagctgagaaacgagacatatcacgtgttttctaacttgcatccaggaaccacctacttgttttcggtgagagcgcggacgggaaagggctttgggcaggccgcgctgacggaaattacaactaatattagcgccccttccttcgactacgcagacatgccgagtccgctgggggagtctgagaacaccatcaccgtactgctacgcccagcacaaggacgcggtgctccaatcagtgtataccaggtcatcgtggaggaagaacgagctcgcaggctgaggagggagcccggtggacaggattgttttcccgtacctttaaccttcgaggccgctcttgcccgtggcctagtgcactacttcggggcagagcttgctgcttcaagtctgcctgaggccatgccatttaccgtgggggataaccaaacctatcgcgggttttggaacccgccactggagccaagaaaggcatacttaatatacttccaggcggcctcgcatctcaagggcgagacccggcttaactgcattcgaatagccaggaaagccgcttgcaaggaaagcaagaggccgcttgaggtcagccagcgttccgaggagatgggactcattctcgggatctgcgccggagggctggcagtgctaatcctcctgctgggcgccattattgtgataatacgtaagggcagggaccactatgcttattcctattatcccaagcccgtgaacatgactaaggctaccgtcaattataggcaagaaaagacccacatgatgagcgccgtggaccgcagtttcacagaccagagcaccctgcaggaagatgaacgactcggccttagcttcatggacacgcatggctactctaccaggggcgatcaaagaagcggcggggtcactgaagcatccagcctgctgggcggatcccctaggcgaccctgcgggcgaaagggatccccctaccacacaggacagctacatccggcagtgagagtggccgacctgctgcagcatattaaccagatgaagacagcagagggctacggtttcaaacaggaatacgagtcttttttcgaaggctgggatgccaccaagaaaaaagacaaagtgaaaggtagtaggcaggagccaatgccagcctacgacagacaccgggtcaagttacacccgatgctaggggatccaaacgcagattacataaatgccaactatatcgacgggtatcaccgtagcaaccactttatagcgactcaggggccgaaacccgagatggtgtacgacttttggagaatggtgtggcaggaacactgtagcagcattgtgatgatcacaaagctcgtggaggtggggcgtgtgaagtgtagtcgatattggcctgaagatagcgacacgtatggcgatattaagatcatgctagtgaaaacagagacattggccgagtatgtggtgcgcacattcgccctggagcggcgagggtatagtgcccgtcacgaagtaagacagttccactttaccgcctggcctgaacacggtgttccctaccacgccaccggactccttgctttcataagacgagtgaaggcatctacacctccagacgccggacctatcgtcatccattgtagcgctggcacaggccggaccggctgctacatcgtcctggacgttatgttagacatggccgaatgcgagggtgtggtggacatttacaattgcgtgaagactctgtgcagccggcgagtaaatatgatccagactgaggagcagtatatttttatacatgatgcaatccttgaggcctgtctgtgcggcgagactaccatccccgtcagcgaattcaaagcgacctacaaagaaatgattcggatcgatcctcagtcaaactctagccaactgagagaggaattccagaccctgaattcagtgacaccccccctggacgtggaagagtgcagcatagcattgttgcctcggaatcgagacaagaatagatcaatggatgtgctcccacctgatcgctgcttaccctttctaatctcaaccgatggggactccaataactacattaacgccgctctaacggattcttacactaggtccgccgccttcatagtcactctgcaccctctgcagagtaccactcccgatttctggaggctggtgtatgattatggttgcacttccatcgttatgctgaaccagctcaaccagtcaaactctgcgtggccctgtctccagtactggccagagccagggagacagcaatacggtctgatggaggttgaattcatgagtggtaccgctgacgaggacctggtggctagagtcttccgcgtccagaatatctcacgactgcaagaaggacatctcttggtccgccactttcagtttctgagatggtctgcttaccgtgacacaccagactccaaaaaggcttttctgcacttgctagcagaagtggataaatggcaggcggaaagcggcgatgggcgtaccatcgtgcactgtctgaatggcggtggacgaagcggcaccttctgtgcgtgtgcgactgtgttggagatgattcgctgccataatcttgttgatgtcttctttgcggctaagactctccggaactacaaaccaaatatggtggagacaatggatcaatatcatttctgttacgatgtggccttggagtacctggaaggcctggagagtaggtag

SEQ ID NO: 201789 - DNA, 4329 bp, synthetic construct
  misc_feature 1..4329: note = Description of Artificial Sequence: Synthetic coding sequence
  source 1..4329: mol_type = other DNA
atggcccgggcccaggccctggtgctggccctgaccttccagctgtgtgcacccgaaacagaaacaccagctgccggttgtacattcgaagaggcttccgatccagccgttccttgcgaatactctcaggcccagtacgacgactttcaatgggagcaggtgaggatacacccaggtactcgggctcccgcagaccttcctcacgggagctatctgatggtcaacacatcccagcatgcacctggccagcgcgcgcacgtgattttccaatccttatcagagaacgacactcactgcgtccagttctcttacttcctgtatagccgagacggacactctcctgggacccttggcgtatatgtaagagtcaatggtgggcctctcggtagcgctgtgtggaacatgacgggctctcacggacgacaatggcatcaagctgagctcgcagtaagcaccttctggccaaatgaataccaagttctgtttgaggcgctcatttctcctgaccggcgcggatacatgggactggatgacatcctcctgcttagctacccatgcgcgaaagcaccacacttctcccggctaggggatgttgaggtgaacgcgggacagaacgccagctttcagtgtatggccgcagggcgggctgccgaggctgagcggttcctcttgcaacgtcaaagcggagccctagtcccggccgctggtgtcagacacatctcccacaggaggttcctcgcgacctttcccttggcggctgtaagccgcgctgagcaggatctgtataggtgtgtgagccaggcaccccggggcgctggcgtgtcaaattttgcggagttaattgtgaaagagccccctacacccatagcccccccccagttattaagggctggacctacatatctgatcatccagctcaatactaactctatcatcggtgacggccctatcgtgcgcaaagagatcgagtacaggatggccagagggccgtgggccgaagtgcatgctgtaagtctccagacctacaaactgtggcacttggacccggatacggaatatgagatatccgtgctcctcacccgtccaggggacggcggtacgggacgcccaggcccccccctgataagtagaactaagtgtgccgagcccatgcgcgccccaaagggcctcgcttttgccgaaatccaggctcgccaacttacgctgcagtgggagcctcttgggtataatgttactcggtgccacacttatacagtatctttgtgctatcattataccctgggctcctctcacaaccagacaattagggaatgcgttaaaaccgaacagggcgtttcaaggtatactattaaaaacctacttccctacaggaacgtacacgttcgcctagttctgactaacccagaaggtaggaaagaaggaaaagaagtaaccttccagaccgacgaagacgtaccatccggaatcgccgccgaatcccttacatttacccccctggaggacatgatttttttgaaatgggaagagccccaggagccgaacggtctgatcacgcagtacgaaatctcctaccagtcgattgagtcaagtgacccagccgtcaacgtgccaggacctcggagaacaatcagtaaactgagaaacgagacataccatgtcttctccaacctgcaccccggcacgacctatctgttctctgtgagggccaggacaggtaaagggtttgggcaagcagcccttaccgagatcactacaaacatctcggcaccatcctttgattatgccgacatgccaagtcctctgggtgagtctgagaataccatcacagtgctgctgagaccggctcagggacggggcgctccaatctccgtctatcaggtaatagtggaagaggaacgcgcgcgccgcttgcgccgagagcccggtggacaggattgcttcccagtgccactcactttcgaagctgccttggccagaggcttggtccactacttcggtgccgagctggccgcgtcgtctttgcctgaggccatgccattcaccgtgggtgataatcagacttacagggggttttggaatccccctctagaaccaaggaaagcatatctgatttattttcaagccgcaagtcacctgaagggcgagacccggctcaattgtattcgcatcgctcggaaagccgcatgtaaggagtctaaaaggccgctggaggtgtcgcagagatccgaggagatgggactgatattaggcatctgtgctggcggtctcgccgtgttaatccttcttcttggagccattatcgttatcataagaaaagggaagcccgttaacatgaccaaggcaacagtaaactaccggcaagagaagacgcacatgatgtccgccgtcgaccgctctttcactgatcagtctaccctccaagaggatgaacggcttggactgtcatttatggacactcatggatactccactcgcggagaccagcggtccggaggagtgactgaagcttcttccctccttggggggagcccaaggagaccttgtgggaggaaggggagtccctatcacactggacagctgcacccagcagtccgggttgcagatctcttgcagcatatcaaccagatgaagacagctgagggttatggctttaaacaggagtacgagagcttcttcgaaggctgggacgctacaaagaagaaagacaaggttaagggcagccggcaggaaccgatgccggcctacgaccgccaccgagtcaaactgcacccaatgttaggcgaccctaatgcggattacattaatgccaactacatagacattagaattaatcgggaaggttatcaccggtctaaccattttattgctactcagggtcccaagcctgagatggtatacgacttttggcgcatggtgtggcaggagcactgtagctccatcgtgatgataactaagcttgtggaagtgggacgggtaaaatgctccagatactggcctgaagacagcgatacctacggagacatcaaaatcatgctggtcaaaacggagaccttagctgagtatgttgtacgcacttttgccctcgagcgtaggggctactctgcccgtcacgaggtgaggcagtttcatttcacagcatggccagaacacggagttccctaccatgcaaccggcttgctagcgtttattaggagagtaaaagcatccaccccacccgatgccggccccattgtgattcattgttccgctggcacaggcagaaccggctgttatatcgtcttagatgtgatgctggacatggccgagtgcgaaggtgtggtggatatttataattgtgtcaagactctgtgctcgagaagggtgaacatgattcagactgaggaacaatatatcttcatccacgatgccatccttgaggcttgcttgtgtggcgagaccaccatcccagtgtcagagtttaaggcaacatacaaggaaatgatcagaatcgatccacagagcaacagcagtcagttgcgcgaagagtttcagacgctgaattcggtcacacctccactcgatgtcgaggagtgttctatagcactgcttccccgaaatagagataagaataggagcatggacgtgctccccccagaccgatgcctcccatttcttattagtactgacggcgacagcaacaattatatcaatgcagcattgacagactcctatacacgttcagcggcttttatcgtaaccctccacccgctgcagagcactacacctgacttctggagacttgtctatgattacggatgtaccagcatcgttatgctgaatcaactgaaccagtctaacagtgcttggccatgcctccaatattggcctgaacctgggaggcagcagtatggcctcatggaagtagaattcatgtctggaacagccgacgaggacctcgtagcaagagtgttccgggttcagaacatttcacgcttacaggagggccatctcttggtcaggcacttccagtttcttcggtggtctgcctaccgggacacgccagactcgaagaaagccttcctgcatctgctggcagaggttgataaatggcaggcagagagtggagacggcaggaccattgtacactgtcttaatggtgggggaagaagtggcaccttctgcgcctgtgcgactgtgctcgagatgataagatgtcacaacctggttgacgtgttctttgccgcgaagaccttacggaattacaaacctaatatggttgagaccatggatcagtaccacttttgttacgacgtggcgttagaatacctcgaggggctggagtcaagatag

SEQ ID NO: 201790 - DNA, 4311 bp, synthetic construct
  misc_feature 1..4311: note = Description of Artificial Sequence: Synthetic coding sequence
  source 1..4311: mol_type = other DNA
atggcccgggcccaggccctggtgctggccctgaccttccagctgtgcgctcccgagacagagacacccgccgccggatgcacatttgaggaggctagcgaccccgcggtgccttgtgaatattcacaagcacaatatgacgactttcagtgggagcaggtccggatccatccaggaacccgagcccctgccgatctgccccatggctcgtatctcatggtgaatacatcacagcatgcccctggacagagggcccacgtaatctttcaaagcctgtctgagaatgacacccattgtgttcaattttcctactttctgtatagtagagacgggcacagccctggcactcttggggtgtacgtccgcgtgaacggtggaccgctgggtagtgccgtttggaacatgacaggctcccacggaaggcaatggcaccaggcagagctggctgtgagcactttctggcccaatgaataccaagtgctgtttgaagccttgattagccccgatcgccggggttatatgggtcttgatgatatccttctgcttagctacccttgcgctaaagctccacacttcagcagacttggggacgtagaggtcaacgcggggcagaatgcaagcttccagtgcatggctgccggccgagcagctgaagcagagagatttctgctccagcggcagtccggtgctctcgttcccgctgcaggggttagacacatttcccatagacggttcctcgccacgtttccgctcgctgccgtgagtcgggcagagcaggacctgtatcgatgtgtgagccaggcaccccgcggcgcaggggtgagtaattttgctgaactgatcgttaaggaaccacccacacccatagctcccccgcagctgctgcgggcaggtcccacctatctcattatacagctcaataccaacagtattataggcgatggcccaatcgtgaggaaggaaattgaatacagaatggcacgaggaccctgggccgaggtgcacgccgttagcctacagacctataaattgtggcatctcgatcctgacaccgaatatgagatttctgtactacttactcggcccggggatggaggcacgggtaggccaggcccgcctttgatttcacgcaccaaatgtgctgagccgatgcgggcaccgaagggtctggctttcgcagaaatacaggctagacagttgaccctccagtgggagcctctaggatacaacgtgactcgatgccatacatacactgttagcctctgctaccactatacacttggaagtagccataaccagaccataagggagtgcgttaagaccgagcaaggagtttcccgatatacaattaagaaccttcttccctataggaatgtgcacgtgcgtctcgtgttaaccaaccccgagggtagaaaggaaggaaaagaagtcacatttcagaccgacgaggacgtaccatctggtatagccgctgagtcactgacatttactcctcttgaagatatgatatttttgaagtgggaagaaccccaggagcctaacggcttgatcacgcagtacgagatttcttaccagagtatcgagagctccgaccctgccgtcaacgtgcctggtccaagacgtaccatctctaagcttaggaacgagacctatcacgttttttcaaatctgcatcctggaactacctacttattctcagtcagagcccgaacaggaaaaggctttggccaagcagccttaacagagatcaccactaacatctctgctcccagtttcgattatgccgatatgccctctcctctgggcgaaagtgaaaataccatcaccgtgctgctaagacctgcccaggggaggggggcccctatcagcgtctatcaagtgattgttgaggaggaaagggccaggcgtctccgtagggagcctgggggacaggattgctttcccgttcccctcacatttgaagcagctttggccaggggattggtgcattacttcggtgccgagctcgccgcctcatctctgcccgaggcaatgcccttcaccgtgggggataaccagacgtatcgtggattctggaacccccctctcgaaccacgcaaagcctacttgatttattttcaggcagctagccaccttaaaggcgagactcgcctaaactgcatccggatcgctcggaaagccgcctgcaaggagtcaaagcggcctctggaggtgtctcaaagatctgaagaaatgggccttattctaggcatatgtgcgggtggactggcagtgttaatcttactcctgggggcaatcatcgtcattatcaggaaaggaaaacctgtgaacatgaccaaggccacggtcaactatcggcaggaaaaaactcacatgatgtcagccgtggataggagcttcaccgaccagtcaacattgcaggaagacgagcgtctggggttgagtttcatggatacacatggatattctacacgcggggaccaaaggagcgggggggtgaccgaggccagctccctcctcggaggcagtcccaggaggccctgcggacgcaaaggttcgccttatcatacaggtcagctccatcctgctgtacgcgttgccgatctccttcaacacatcaaccagatgaaaacggcggagggctacggcttcaagcaggagtatgaaagcttctttgaaggatgggacgctacaaagaaaaaggacaaggtgaaaggtagccgacaggaacccatgcctgcatatgaccggcacagggtgaaactgcatcctatgctcggcgatcccaacgcagactatattaatgcgaattacattgatggatatcaccgttctaatcacttcatcgccacacagggacccaaacccgagatggtctacgatttctggcgcatggtgtggcaagaacattgttccagtatagtgatgataaccaagctcgttgaagtaggccgagttaagtgctcacgctattggcctgaagactccgacacctatggcgatatcaagatcatgctggtgaagacagaaactcttgctgaatatgtagtccgaacattcgcgctggaaaggcggggatatagcgcacggcatgaggtgcgccaattccattttactgcctggccggaacacggcgttccatatcacgcaactggcctgcttgccttcatcagacgtgtgaaagcttccacaccccccgatgcgggcccaattgtgatccactgttctgctggcacaggtaggaccggatgctacatcgtcctagacgtaatgcttgacatggcagaatgtgagggggtggtggacatttataactgtgttaagaccctgtgttcccgcagggtgaatatgatccaaactgaagagcagtatatctttatccacgacgcaatactggaagcctgcttatgcggggaaaccactattccagtgagcgagttcaaggcaacatacaaagaaatgatccggattgatcctcagtctaatagctcacagcttagagaagagtttcagacactgaattccgtcactcccccacttgatgtggaggagtgttctatcgccttactccctcgcaacagagataaaaatcgttctatggatgttctgccgcctgataggtgtctgcccttccttatcagcaccgacggcgacagtaacaactacattaacgctgctctgacagacagctatacacggtccgccgcgttcatagtaacgctacaccctttgcagtctacgacgccggacttctggcgtctcgtctatgattatggttgcaccagcattgttatgcttaaccagctaaaccagtcaaactcggcctggccgtgcctgcagtattggcctgagcctggccgccagcagtacgggctgatggaggtcgagttcatgtctggcacagctgatgaagacctggtggctcgtgtattccgcgtacagaacatttcaaggctgcaggaaggacatctgctggtcaggcacttccagtttcttcgatggtccgcctatcgtgatacgccagacagtaagaaagcctttttgcatctactcgctgaagttgacaaatggcaagccgagtccggcgatggcagaaccatcgtgcactgcctcaacggcggcggcaggagcggaaccttttgcgcatgcgccacagttctggaaatgatcaggtgccacaacctggtggacgtctttttcgcggcaaagacacttcggaactataaacccaacatggttgagacgatggatcaataccacttttgctacgacgtcgctctcgagtacctggagggacttgagtcccggtag

SEQ ID NO: 201791 - DNA, 4302 bp, synthetic construct
  misc_feature 1..4302: note = Description of Artificial Sequence: Synthetic coding sequence
  source 1..4302: mol_type = other DNA
atggcccgggcccaggccctggtgctggccctgaccttccagctgtgcgcacctgaaaccgagactccggccgcagggtgtacgtttgaggaagcaagcgatcccgcagtcccctgtgagtattcccaggcacaatatgatgacttccagtgggaacaggttcggatccaccccggtacccgggccccggcagacctcccacacggcagttacctgatggtaaatacaagccaacacgccccaggccagcgggcacacgtgatctttcaatctctcagtgagaatgacacccattgcgtgcagttctcttacttcctatattcccgtgatggtcattctccgggcacactcggcgtgtacgtacgcgtcaatggtgggcctctcggctccgcagtttggaatatgaccgggtcccatgggaggcaatggcatcaggctgagctagccgtgtccaccttctggccaaacgagtatcaagtgctattcgaagctctgatctcacctgaccgccgcgggtatatgggactggatgacatccttctgttgtcctacccttgcgccaaagctcctcactttagccgccttggtgacgttgaggtgaatgccggacagaacgcctcattccagtgcatggcggccgggagggctgcggaggccgagcgatttctattgcaaaggcagagtggggccctggtgcctgccgctggcgtgcgccatatatcacacaggcgatttctggccactttccccctggccgccgtctccagagcagaacaggacctgtataggtgtgtgtcccaagcacctcgcggagctggggtctcaaacttcgctgagttgatcgtgaaggagcctcccacaccgatagcaccgcctcaacttctgcgtgccggtcctacatacttaattatacagctgaacaccaactctattatcggagatgggcctatagtgcgcaaggagatcgagtatcgaatggcaagagggccatgggccgaggtgcacgccgtgagcctccaaacttataagctgtggcatttagaccccgataccgagtatgaaatctcagttctgctgacaagaccgggagatggaggtaccggcaggcccgggccccccctcatctcccggaccaagtgcgcagaacctatgcgggctccaaaaggcttagccttcgcggagatccaggctaggcagcttaccctgcagtgggaacccttgggatacaatgtgacacggtgtcacacctacactgtctctctctgctaccactacacgctcgggtcttctcacaaccagactatacgagagtgtgtcaaaactgagcagggggtaagcaggtataccatcaaaaatctgctgccttatcgcaacgtgcacgtgagactggtgcttactaatccggagggccgaaaagagggcaaggaagtgacatttcagaccgacgaggacgtcccctctggtattgctgcagagagtctgacattcactccattggaggatatgatattcctaaaatgggaggaaccgcaggagccaaatggcttaatcacccagtacgagattagctatcagtccatagagagctccgacccagccgttaatgtgccaggtccccggagaactatttccaagcttcggaacgagacatatcatgtcttttcaaaccttcatcccggaacaacatacctcttttccgtaagagcacggacaggtaaaggcttcgggcaagccgctttgaccgagataacaacaaacattagcgcgcccagtttcgactacgctgatatgcccagccccctgggggaatcagaaaacacaatcaccgtgctgctgaggcccgcccaagggaggggggccccaatttcagtgtatcaggtgattgtggaggaggaaagagcccgacggctgagacgtgagcctggcggtcaggactgtttcccagttcccctcacatttgaggcagctctggcaagaggcctggtgcactacttcggagccgaactggcggcctcgagcctgcccgaagccatgcctttcacagtcggcgacaaccagacttaccgggggttttggaaccctccgctggagccccgcaaagcctatctgatttactttcaggctgcttcacacctaaagggtgagacccgccttaattgcatccggatagctcgtaaggctgcctgcaaagaatctaagcggccattggaggtcagccagaggagcgaggagatggggctcatcctgggcatctgtgcaggaggcctcgccgttttaatcctgcttctgggggccatcattgtgattattcgaaagggaaaacctgtaaatatgaccaaggcaactgtcaactaccggcaggaaaaaacccacatgatgagcgccgtcgaccggagctttacagatcaatccaccctgcaggaggacgaaaggctggggttgtcctttatggatacccacgggtactctacacggggtgaccaaagaagtggcggggttaccgaagccagttctttgctaggagggtccccccgccggccgtgtggacggaagggaagtccctaccacacaggacagcttcacccagcagtgcgagtagctgatctgctccagcacattaaccaaatgaagaccgcagaaggatatggcttcaaacaggagtacgagagttttttcgaggggtgggatgctactaagaagaaggataaagttaaaggctccagacaggagcccatgcccgcctacgataggcaccgagtaaagctccatcccatgctcggggacccgaacgcggattatataaacgccaattacatcgacgggtaccaccgttccaaccactttatcgctacacagggccccaagcccgagatggtgtatgacttttggaggatggtgtggcaagaacactgctcttccatcgtaatgattacgaaactggtggaagtgaagtgctctagatactggcccgaggacagtgacacctatggcgacatcaagatcatgctggtcaagaccgagactctggccgagtatgtggtgcggaccttcgctctagaaaggcgtggatactccgccaggcacgaggtgcggcagtttcacttcaccgcctggccggaacacggcgttccctaccatgccacagggttactggcctttattcgtagagtgaaagcttctacgccgccagacgccggccctatcgtaattcactgcagtgctggaactgggcggactggatgctacattgtactggacgttatgttagatatggccgagtgcgagggggtggtcgacatctacaattgtgtgaaaacattgtgtagccgccgcgtaaacatgattcaaacagaggaacaatatatctttatacatgacgccatcctggaagcctgcctctgtggcgagacaaccattcccgtctcagagttcaaggccacatataaggagatgatccgaattgaccctcaatcaaattcaagccaattacgagaggagtttcaaactctcaactccgttaccccgcccttagatgtagaggagtgctcaatagcactgttgccccgtaaccgggataagaaccggtccatggatgttctgccaccggacaggtgcttgccatttttaatttcaaccgatggagattccaacaactatatcaacgccgcacttactgacagctatacccgtagtgccgccttcattgtgacgctccaccctctgcagagtacaacccccgacttttggcggttggtatatgactacggctgtacaagcattgtgatgttaaatcagctgaaccagtcaaatagcgcctggccctgtctgcagtattggcccgagcccggccgccagcaatacggcctcatggaggtggaattcatgtccggcactgctgatgaagacctcgtggcccgtgtgtttcgggtgcaaaatatatcaaggctgcaggagggccacctactggtgcgtcattttcagtttctgcgctggtcagcatatagggatactcccgacagtaaaaaggcattcctgcatcttctggctgaggtggacaaatggcaggcagagtcaggagacgggagaacaatcgtgcactgtctcaacgggggtgggagaagcggcaccttttgcgcttgcgccaccgttttggagatgattcgctgccacaatctggtcgacgtattttttgcagctaagacgctgcgtaattacaagccaaatatggtcgagacaatggatcagtaccacttctgctatgacgtggctctggagtacctggagggactggaatccagatag

SEQ ID NO: 201792 - DNA, 6948 bp, synthetic construct
  misc_feature 1..6948: note = Description of Artificial Sequence: Synthetic coding sequence
  source 1..6948: mol_type = other DNA
atgcggatcctgaagcggttcctggcctgcatccagctgctgtgcgtttgcagacttgactgggctaacggctattaccggcagcagagaaaattagtggaagaaataggttggagttatacaggagccctaaatcagaaaaactgggggaagaaatatcctacctgtaactctcccaaacagtctcctataaatattgatgaagatttaactcaggtgaacgtgaatctgaagaagctgaagttccaggggtgggacaagacaagcctggagaacaccttcattcacaacactggaaagacagtcgaaatcaacctcacaaacgattatagagtgtcaggaggcgtcagcgagatggtgttcaaggccagtaagattaccttccactggggaaaatgcaacatgagctctgacggttccgagcattccctggagggacagaagtttcctctcgagatgcagatatactgcttcgatgcagaccgcttctcctccttcgaggaggctgtaaagggtaaggggaaattacgcgccttgagcatcctgtttgaggttggaaccgaagagaacttggactttaaagccatcattgacggtgtcgagagtgttagtcggttcgggaaacaggctgcccttgacccattcattttgttaaatctgcttcctaactctacggataagtattacatttataacggctccttaacgtcacccccctgcaccgatacagtcgattggattgtttttaaggatacagtctccatttctgagagtcagctcgctgtgttttgcgaggtgctgaccatgcagcaatcgggatacgttatgttaatggattatctgcagaataacttccgtgagcagcagtataagttcagcaggcaggtgtttagctcgtacaccgggaaggaggagattcatgaggctgtatgctccagcgagcctgagaatgtgcaggctgatcccgagaattacacgagtctgctcgttacatgggaacgtccacgtgtagtgtacgacacaatgattgaaaagttcgcagtgctgtatcagcagctggacggtgaagaccagacgaagcatgagtttttgactgacggataccaagacctcggtgccatcttaaacaatcttctacccaatatgagttatgtacttcagatcgttgccatatgtactaacggtctctatggaaagtacagcgaccaattgattgtggatatgccaacagacaaccccgaactggacctcttcccagaactcataggaactgaagaaattatcaaagaggaagaggagggaaaagatatcgaggaaggtgctatcgtgaacccaggcagagacagcgcaacaaaccagatacgaaaaaaggagccccaaatcagcacaaccacccactataaccgcatcggcactaaatacaatgaggccaaaacaaaccggtcaccaacaaggggctcagagtttagcgggaagggtgacgtgcccaatacaagtttgaactccacaagccagcctgtgactaagctggctaccgaaaaggacatctcactcacctcgcaaacggttacggagctcccaccacacaccgtagaagggacctcagcgagcctgaacgatggatctaagacggttctaagaagccctcacatgaacctgtcgggcacagcagaaagcctgaacacagtaagcattaccgagtatgaggaggagtctctgcttaccagtttcaagctcgatacaggagccgaggattcatctggaagctcgcccgctactagcgccattccgtttatttcggagaacataagccaggggtatatcttttcgagtgaaaacccagagaccatcacctacgatgttctaatacctgagagcgcccggaacgctagtgaggattctacctcgtctggcagtgaagagtctttaaaggatccatccatggaggggaatgtatggttcccatccagtaccgacatcacagctcagccagacgtggggtctggcagggaaagtttcctgcaaaccaactacactgaaattagagttgacgaatcggaaaaaactaccaagtctttctccgccggtcccgtaatgtctcagggtcccagcgtgactgacctggagatgccacactacagtacctttgcctattttccgacagaagtaactccccacgcctttacaccatctagtagacaacaggacctggtgtctaccgtgaatgtggtgtactcccagacaactcagccggtttacaatggcgagacccccctgcagcctagctattcgtccgaggtgttccctttggtcaccccgctcctgctggataaccagattctgaacacgacacctgctgcgagcagctcagactctgcgttacacgcaacaccagtgttcccatctgtggacgtgtcctttgaatccatcctgtcctcctatgatggggctcccctcctacccttctccagtgccagcttttcatctgaactgttccgccatttgcacacagtgtctcagattttgccgcaggttacaagcgccactgaaagcgacaaagtgccactgcacgccagtctgcccgtggcaggtggagatctgcttcttgagccctctctggcccaatacagtgatgtcctcagcacaacccacgcagcatccgagaccctggagtttgggtccgaaagtggggtactgtacaagaccctgatgtttagccaggtggagcccccctcttctgacgctatgatgcatgcgcggagctctggcccggagcctagttacgccctatccgacaatgagggcagccaacacatcttcacagtgtcttattcctctgccattccggtgcatgatagtgttggcgtaacatatcaaggatccctgttctctggcccatcccatatcccaatccctaagagctcactcatcactccaaccgccagtctgctgcagccaacacacgcgttgagcggtgatggcgaatggtcgggcgctagcagcgattccgagtttttgctgcctgacacggacggtctcactgctcttaacatcagtagccctgtcagcgtagctgaatttacctatacgacgagcgtctttggagatgacaacaaagcattatccaaatctgagattatatatggtaacgaaaccgaattgcagatccccagtttcaacgagatggtgtacccatcagaaagcaccgtgatgccaaacatgtatgacaatgtgaacaaactgaatgcttctttgcaggagaccagtgtcagcatctcctcaacaaaaggcatgttccccggatccctggcacatacaactaccaaggtcttcgatcacgaaatcagccaggtgcctgaaaataacttctccgtgcagcccacgcatacagtgtctcaagcatctggtgacacatcactgaaacctgtcttgtcagcaaactcggagccagcgtcctctgaccccgcctcaagcgagatgctgagcccaagcacacagttgctgttttacgaaaccagcgcaagcttcagcactgaagttctcttacagcctagtttccaggctagtgatgtagacacgctgctcaaaacagtgcttccagccgtcccgtccgatccaatcttggttgaaactccaaaggtggacaagatctcttccacaatgctgcacctaatcgttagcaatagtgcttcatccgaaaacatgctccatagcaccagtgtacccgtcttcgacgtctctcccacttcccacatgcattccgcctctctccagggcctgaccattagctacgctagcgaaaagtacgaaccggtgctgctcaagagtgagtcatcacaccaggtggtgccttctctatacagtaacgatgagctcttccagacggcaaatctcgagataaaccaggcccatcctcccaagggcagacatgtgtttgccactcctgtgttatccatcgacgaaccccttaacacccttatcaacaagctgatacattccgacgagatcctgactagcactaagagctcagtgaccgggaaggtgtttgcgggcattcctactgtcgcttctgatacatttgtgagcacagaccattccgtgcccatagggaacgggcatgtcgctatcaccgcagtaagcccacatagagacggttccgtaacctcaacgaagctgctattcccctccaaagcgacatccgagctatctcactcggcgaagtctgacgctgggttggtcggcgggggggaggatggggatacagacgatgatggcgacgacgatgatgacgataggggcagcgatgggctgtccattcacaaatgtatgagctgttcttcttaccgggaatcccaagaaaaagttatgaatgacagcgacacgcacgaaaactcactcatggatcagaataatcctatctcatacagcctcagtgagaattctgaggaggacaaccgtgttacatctgtgtcctccgattctcagacggggatggatagatctcccggaaagtctccatcagcaaacggtctgtcccagaagcacaatgacgggaaagaagaaaacgatattcaaactggttccgcacttttacctctgtcaccagagagtaaggcttgggccgtcttgacctccgatgaagagagcgggagcggccagggtacaagtgactcactgaatgaaaacgagactagtactgacttttctttcgctgacaccaatgagaaagatgctgacgggatccttgcagccggagattcagaaatcacacccggtttcccccagtcaccaacctcctcagtgacatctgaaaacagcgaggtgttccatgtatcggaagccgaggcctccaattcttcacacgaatcacggataggactcgccgaaggcctggagagcgaaaagaaggccgtgattcccctggtgattgtgtccgcactgacctttatttgtcttgtagtactagttggtatcctaatctattggaggaagtgcttccagaccgcccacttctatttagaggacagtacttctcctagggttatctctactccacccacccccatattccctatttctgacgacgtgggagctatccccatcaagcacttccctaagcacgtagccgacctgcacgctagcagcgggtttactgaagagttcgaaacactcaaagaattttatcaggaagtgcagtcttgtactgtggacctgggcataaccgccgactcctctaaccacccagacaataagcataagaaccgttatattaacatcgtcgcatacgaccatagtagggtaaaactggcccagctggcggagaaggacggcaaacttacggactacatcaacgccaattatgtggatggctacaatagaccaaaagcctacatcgctgcacaagggcctctgaagtccactgcagaggatttttggcgcatgatctgggaacataacgtcgaggtcattgtgatgatcaccaatctagtggagaagggtcgccgcaagtgcgatcagtactggcccgccgatggcagtgaggaatacggtaattttctggtgacacagaaatcggtacaagtgcttgcatattacacagtcagaaacttcaccctccgcaacacaaaaattaaaaagggctctcaaaaagggcgaccgtcaggccgcgttgtgacgcaataccactatacccagtggccggatatgggggtaccagaatacagcctccccgtgctgacatttgtccggaaggctgcgtacgccaagagacacgctgttggacccgtggttgttcactgctctgcaggcgtcggaagaaccgggacatacatcgtgctggattctatgttgcagcagatccagcacgagggtacggtgaatatctttggcttcctgaaacatatcagatcccagcggaattacctagtccagaccgaggagcagtatgtctttatccacgacacactcgtcgaggcaatcctgtccaaagaaaccgaagtcctggacagccatattcatgcctatgttaatgctctgctcatacccggacctgctggcaagacaaagcttgaaaaacagttccagttgctctcacagtcaaacatccagcagagtgactattccgcagcattgaagcagtgtaatagggaaaaaaatcgcacctcctccataatcccggttgagcgcagccgggtggggatttcaagtttgagcggcgaaggtacagattacattaatgccagctatatcatgggatactaccagtcaaacgaattcatcattacacagcacccactgttacatactatcaaggacttttggcggatgatctgggaccacaacgcacagctggtagtgatgatcccagacgggcagaatatggctgaagatgagtttgtgtattggcccaacaaggatgaaccaattaactgcgaaagcttcaaagttaccctgatggccgaggaacataaatgcctatctaatgaggagaagttaatcatacaggactttatcctggaagccacgcaagatgattacgtccttgaggtgagacatttccagtgtcctaaatggccaaatcccgacagccctatctcgaagaccttcgagctgattagcgtcattaaggaagaggcagctaacagggatgggcctatgattgtgcacgacgagcacggaggcgtaacagccggaacattctgcgctctaacaactttgatgcatcagctggagaaagaaaactcggtggatgtgtaccaggtggccaagatgataaaccttatgagacccggtgtcttcgccgatatcgaacagtaccagtttctatataaagtgatattaagcctggtttctacacgtcaggaggagaacccctctaccagcctcgactccaatggcgctgccctgcctgacggaaacatcgcagagtcactagagtctctggtgtag

SEQ ID NO: 201793 - DNA, 474 bp, synthetic construct
  misc_feature 1..474: note = Description of Artificial Sequence: Synthetic coding sequence
  source 1..474: mol_type = other DNA
atgggccggctgaccgaggccgccgccgccggcagcggcagccgggccgcaggctgggccggtagcccacccactttgctgccactgagccccacgtctcccaggtgcgccgccactatggcatccagcgatgaggatggaaccaacgggggggctagtgaagccggtgaggatcgagaggcccctggcgagcggcgcaggttgggcgtgcttgctaccgcctggcttaccttctacgatatcgccatgaccgccggacggttaatccttagccctcgtctcgagtgtattggcgccattagcgcccactgccaacctcagccccccgaattcaagcgattttcttgcttgggattaagatcttcatgggactacaaacggggccctccaagacccatcaacttctgcatcttcggccgagaccgcgtcagtccctgttggcccggatggagccgcacgcccgatctgaaatag

SEQ ID NO: 201794 - DNA, 867 bp, synthetic construct
  misc_feature 1..867: note = Description of Artificial Sequence: Synthetic coding sequence
  source 1..867: mol_type = other DNA
atgggccggctgaccgaggccgccgccgccggcagcggcagccgggcagcaggttgggcagggagccccccaaccctgcttcctttatcccctacgtcccctcggtgcgctgcaaccatggcctcttccgacgaagacggcaccaatgggggcgccagcgaagctggcgaggacagggaagcaccaggcgaacgcagaagactaggcgtgctggctacagcctggctgaccttctacgatatcgccatgactgccggctggcttgttctggcgatcgccatggtccggttctatatggagaaggggactcataggggactgtacaaatccattcagaaaaccctgaaattctttcagacattcgctctgctggaaatcgtgcactgtcttatcggcattgttcccacatcagtgatcgttacaggggtgcaggtttccagccgcatatttatggtttggctcatcactcactccatcaagcctatccagaatgaggagagcgtagtgcttttccttgtggcttggactgtcactgagattaccagatattccttctacaccttttctctgttggatcatctgccttactttatcaaatgggcccgctataatttttttatcattctgtatcccgtgggcgtggctggcgagttattgactatatacgccgcgctgccccatgttaagaaaactgggatgttttcaattcggctccctaacaaatacaatgtgagtttcgattactactactttttgctgatcaccatggcatcttatatcccactgttccctcagctgtacttccacatgctgcggcagaggcgaaaggtgttacacggcgaagtcattgtcgaaaaagatgactag

SEQ ID NO: 201795 - DNA, 1269 bp, synthetic construct
  misc_feature 1..1269: note = Description of Artificial Sequence: Synthetic coding sequence
  source 1..1269: mol_type = other DNA
atggccggctgcgtgcccctgctgcagggcctggtgctggtgctggccctgcaccgggtggagccctccgcaacctctctgaaggaaagacatggacttcattctgatagcgcctgcacgggagtgcaagaaagcttattcctgcctgcatccaaagccaatgacgtgctggtgcgttggaaaagggctggtagctatttgcttgaggagttgttcgaggggaatctcgaaaaagaatgctacgaagagatctgcgtctatgaggaagcccgggaggtcttcgaaaacgaagtcgttactgatgagttttggaggcgctacaagggcggctctccctgtatatcacagccctgccttcacaacggctcttgccaagatagcatctgggggtacacctgcacttgttccccggggtatgaggggtcaaattgcgaattggccaaaaatgagtgtcatcctgagcggacagacggttgccaacatttttgcctgccaggccaagagtcttacacatgctcctgtgcacagggttatcgattgggggaggatcacaagcaatgcgtgccccacgaccaatgcgcatgtggcgtccttacctctgagaaacgggcacctgacctgcaggacctcccctggcaagtgaaattgactaattccgaggggaaagacttctgtggtggggtcatcataagggagaactttgtactcaccaccgccaaatgctctctactccatagaaacataacggttaagacgtactttaataggacatctcaggatcctttaatgattaaaatcacgcatgtgcacgtgcatatgcggtacgacgcggatgcaggggaaaatgacctttccctgctcgaactggagtggcccatacagtgtcctggtgctggactccctgtatgtacccctgagaaagactttgcggagcatctactgatcccaagaacacgcggcctcctgtccggttgggccaggaacggaaccgacttaggaaactctctcaccacccgtcctgtaacattagtggagggcgaagaatgtggccaggtgcttaatgtgactgtcactacacgcacatactgtgagcgatcaagcgtcgcagcaatgcattggatggatggatcagtcgtcacccgggaacatagggggagttggtttctgacgggggtcctggggtctcagcctgtcggcgggcaggctcatatggtgttggtgaccaaggtgtcgcggtactccttatggttcaagcaaattatgaactag

SEQ ID NO: 201796 - DNA, 1203 bp, synthetic construct
  misc_feature 1..1203: note = Description of Artificial Sequence: Synthetic coding sequence
  source 1..1203: mol_type = other DNA
atggccggctgcgtgcccctgctgcagggcctggtgctggtgctggccctgcaccgagtggagccctctgtgttcctgcctgcaagtaaggctaacgatgttctggtgagatggaagcgtgcgggttcgtacctgttagaggagctgtttgaagggaacttagagaaagagtgttatgaagaaatttgcgtgtatgaggaagcacgggaggtgttcgagaacgaagtggtgactgacgaattttggcggcgatataagggcggctccccttgtatttcacagccctgcctgcataacggaagctgtcaagacagcatctgggggtatacctgcacctgctccccaggctacgaaggctccaactgtgagctggcaaaaaatgagtgtcaccccgaacgtaccgacggatgccaacacttttgtctccccggtcaagagtcttatacctgttcttgcgcacagggttaccgtctaggggaggaccataaacagtgcgtccctcatgaccagtgcgcctgcggcgtgctgacctccgagaaacgggcaccggacctgcaagatctcccttggcaggtgaaactcacaaattcagaaggaaaggacttctgcggtggtgtcatcatccgcgaaaatttcgtgctgacaaccgccaagtgcagcctcctgcaccggaatattacagtcaagacctatttcaataggacgtctcaggatccactaatgattaagatcacccacgtccacgtgcatatgcgctacgatgcggatgctggcgaaaacgacctgagcctcctcgagctggaatggcctatccagtgccctggtgcaggattgcccgtgtgtacacccgaaaaggactttgccgagcaccttttaataccaagaactagagggctgttgtccggttgggcacgaaatggaaccgatctgggtaactcactgactacgcgtccggtcaccttggtggaaggcgaggagtgtgggcaggtgctgaatgtgacagttaccacaagaacgtactgcgaacggagcagtgtggccgcaatgcattggatggacggcagcgtggtgacgagagagcacaggggaagctggttcctgaccggggtgctgggcagccagccagtaggaggacaggcccatatggtactggtaacaaaagtatctagatactccctgtggttcaaacagattatgaactag

SEQ ID NO: 201797 - DNA, 1053 bp, synthetic construct
  misc_feature 1..1053: note = Description of Artificial Sequence: Synthetic coding sequence
  source 1..1053: mol_type = other DNA
atggagcccaagcggatccgggagggctacctggtgaagaagggctcggtgtttaatacctggaagccaatgtgggtcgtccttctggaggatggcatcgaattttataaaaaaaaatcagataattcccccaaggggatgatacccctgaagggatctacgctgacaagcccgtgtcaggactttgggaagcgaatgttcgtcttcaaaataactaccacaaagcaacaggaccatttcttccaggcagctttcctggaagagcgggatgcatgggtaagggacattaagaaggctataaagtgcatcgagggcgggcagaagtttgccagaaaatccaccagacgttctattcggttgccagagacaatcgacctcggtgcgctctacttgtctatgaaagacacagagaagggaataaaggaactgaacctggaaaaggataagaaaatatttaaccattgctttaccggtaactgtgtgatcgattggctggtgagcaatcaatcagtgaggaatcgtcaggagggtctgatgatcgcaagttctctcctgaacgagggttatctacagcccgctggagacatgtccaaatctgccgtcgatgggactgccgagaatccgttcttggataacccagacgccttctactattttcctgattcaggatttttctgcgaagagaacagtagcgacgacgacgtcatcctgaaagaggaattccggggggtgatcatcaaacagggctgccttctcaaacagggacacaggcggaagaattggaaagttaggaaattcatacttcgagaggatccagcttacctccactattacgacccggccggcgcggaagaccccttgggcgcgattcacttgcgaggatgtgtggtgacctccgtggaatctaattcgaatggaaggaagagcgaggaggaaaacctgttcgagattattacggccgatgaggtacactactttctccaggcggccacacccaaggagagaacggaatggatcagagctattcagatggcaagcaggaccgggaagtag

SEQ ID NO: 201798 - DNA, 648 bp, synthetic construct
  misc_feature 1..648: note = Description of Artificial Sequence: Synthetic coding sequence
  source 1..648: mol_type = other DNA
atggccagcctgcagatgcggggcaaccccggcagccacttctgcggcgggaccttgattcacccatcatttgttctgactgcggcgcattgtctgagagatatccctcagaggctggtaaacgtggtattaggggcacacaatgtgcgcacacaagaacccacccagcagcatttctccgtggcacaagtcttcctgaataactacgacgctgagaacaaactgaacgacgtactgctaatccaactcagcagtcctgccaatctgtctgcctccgtggccaccgtacagctgccccaacaggaccagccggttccacatggaactcagtgcctagcaatgggctggggaagagtcggggcccatgaccctcctgctcaggtgctgcaggagctgaatgttacagtggtcacttttttttgtaggccccataacatatgtacatttgtcccgcggcggaaggctggcatctgtttcggcgactccggcggacctcttatttgtgatggaatcattcaggggatcgatagtttcgtaatttggggctgtgcaaccaggttatttcctgactttttcaccagggtggctctgtacgtagactggatcagatcgactttaagacgagtggaggcaaaggggcggccctag

SEQ ID NO: 201799 - DNA, 858 bp, synthetic construct
  misc_feature 1..858: note = Description of Artificial Sequence: Synthetic coding sequence
  source 1..858: mol_type = other DNA
atgcccggcgcccggagcggcggcagcggcggcgacggcagcaacagcggaagttattctggtgatgccagcggagcggtgactgtgtgggaggttgtgagcctactgggaaagcttctgggcacggtcgtcgctctgaaagtggtgctgtacttactcagagtctgcctagcgatggcctggaagtcaggtggcgcctcacattctgagctgattcataatctgcgtaaaaacgggatcataaagacagacaaggtgttcgaggtaatgctggccacagatagaagccactatgctaaatgtaacccttatatggactctccgcagtccatcggtttccaggctacgataagcgctccacacatgcacgcatatgccctggagttgcttttcgatcagctccatgaaggcgccaaagccctggacgtcggcagcgggtctggcatcttaactgcatgtttcgccaggatggttggttgcacaggaaaggtgattggaatagatcacattaaagaacttgtagatgacagcgttaataacgtgcggaaggatgatccaaccttgctcagtagcggtagagtgcagctggtagtaggggatgggcggatgggttacgccgaggaggccccctacgacgcaatccatgtcggagcagccgcgcccgtcgtacctcaggctctcatcgaccagctaaagcccggcggtaggctaatattgcccgtggggccagccggaggcaaccagatgctcgagcagtacgacaagctgcaggacggatccataaagatgaagcctctgatgggcgtcatatatgttcctttgaccgataaagaaaagcaatggtcacgctggaagtag

SEQ ID NO: 201800 - DNA, 684 bp, synthetic construct
  misc_feature 1..684: note = Description of Artificial Sequence: Synthetic coding sequence
  source 1..684: mol_type = other DNA
atggcctggaagagcggcggcgccagccacagcgagctgatccacaatcttaggaagaacggtattataaagactgataaagtattcgaggtcatgcttgctaccgaccgtagtcactatgctaagtgcaatccttacatggacagcccgcagtcaatcggattccaggccaccatctcagcgccacacatgcatgcttacgctcttgagctgctgttcgatcagctccatgagggggccaaagctctggacgttgggtctggtagcggcatcctcacggcatgcttcgcaaggatggtgggatgcacaggcaaggtgatcgggatcgatcatatcaaggaactggtggatgactcagtgaataacgtgcggaaagatgatcccaccctgctgtcatctggaagagtgcaactagtcgtgggagacggccggatgggctatgccgaagaagctccttacgacgcaatccatgttggggcagccgctccggtggttccacaggcacttatcgaccaacttaaacccggaggccgcttaattcttcccgtgggaccagcaggcggtaaccagatgttggagcaatacgacaaactccaagatggcagcatcaagatgaaacctctcatgggcgtgatctatgttcctctgacagataaggaaaagcagtggtcaaggtggaaatag

SEQ ID NO: 201801 - DNA, 861 bp, synthetic construct
  misc_feature 1..861: note = Description of Artificial Sequence: Synthetic coding sequence
  source 1..861: mol_type = other DNA
atgcccggcgcccggagcggcggcagcggcggcgacggcagcaactctggttcctactcaggagatgccagcggagcagttacggtgtgggaggtcgtgtcactcctgggcaagctgctggggaccgtggtggcactcaaagtggttctgtacctgttgcgcgtttgtctggcaatggcttggaagagcgggggggcctcccacagtgaactgatacataatctcaggaagaatggtatcatcaagacagacaaagtgttcgaggtgatgttagcaactgaccgttcccactacgctaaatgcaatccatatatggactccccacagagcatcggcttccaagccactattagcgcaccccacatgcatgcatatgccctggaactcctcttcgatcagctccatgagggtgctaaggcgctggatgtgggaagcgggtctggcatactgaccgcctgcttcgctcgaatggttggttgcacaggcaaagtgatcggcatagatcacatcaaagagctggtggacgatagtgtgaataatgtccgcaaggatgatcccaccctattatccagcggcagagtccagcttgtcgtgggcgatggtcgcatggggtatgctgaggaagctccctatgacgccatccacgtcggcgctgccgcccctgtggtgccacaagcgctgatcgatcaactgaagcctggcggacgcctgatcttgcctgtgggccccgctggaggaaaccagatgttagaacagtatgacaaactccaggatggctccatcaaaatgaagcctcttatgggggtgatctacgtgccgcttacagacaaggaaaaacagtggtccagagacgagctgtag

SEQ ID NO: 201802 - DNA, 858 bp, synthetic construct
  misc_feature 1..858: note = Description of Artificial Sequence: Synthetic coding sequence
  source 1..858: mol_type = other DNA
atgcccggcgcccggagcggcggcagcggcggcgacggcagcaacagtggtagctacagcggggatgccagtggggccgtaacagtatgggaggtggtgtcacttttgggaaagctgctagggacagtagtggccctgaaagtcgtgctctatctgctacgcgtctgtctggctatggcgtggaaatctggaggggcctcacactcggagctgatacacaacctgcggaaaaatgggatcataaaaacagacaaggtgttcgaggtgatgttagccacagatagaagccactatgctaaatgtaacccctacatggattccccacaatctattgggtttcaagcgaccatctcggctccgcatatgcacgcatatgcacttgaactgctgttcgatcaactccacgagggcgccaaggccttggacgtaggaagcggatccggaattctcaccgcctgcttcgcaagaatggtggggtgcactgggaaagtgataggcatcgaccatatcaaggaacttgtggacgatagtgtgaacaatgtgcggaaggacgaccctactttgctctcatcaggcagagttcagctggtcgttggggacggccgcatgggttacgccgaggaggctccctacgacgctatacacgtcggggctgctgcccccgtggtgccccaggccttgatcgatcaactgaagcccggcggcaggctcatcctgcccgtcgggcccgccggcgggaaccagatgctggaacagtacgacaaactgcaggatgggagtataaagatgaagcccttgatgggagtcatctacgtgccacttactgataaggagaaacagtggagcaggtggaaatag

SEQ ID NO: 201803 - DNA, 579 bp, synthetic construct
  misc_feature 1..579: note = Description of Artificial Sequence: Synthetic coding sequence
  source 1..579: mol_type = other DNA
atggcctggaagagcggcggcgccagccacagcgagctgatccacaatctcaggtcctttcaggccaccattagcgctccacacatgcatgcctacgcgctggaactccttttcgatcagcttcatgaaggagctaaggctctggacgtggggagcggcagcggtatcctcactgcttgttttgccaggatggtggggtgcacaggcaaagtgataggtatagatcatatcaaagaacttgtggacgactcggtgaataatgtccggaaggatgacccaacattgctgagcagtggacgcgtacaactggtggttggggacgggcgaatgggctatgccgaagaggctccctatgacgccattcacgttggggccgctgcacccgtggtgccccaggcattaatcgatcagcttaagcccggaggccgattgatcctcccagtgggaccggctgggggaaaccagatgttggaacagtatgacaaactccaggacggctccatcaaaatgaaaccacttatgggagtcatctacgtgcccctgaccgacaaggagaagcagtggtctagatggaagtag

SEQ ID NO: 201804 - DNA, 2016 bp, synthetic construct
  misc_feature 1..2016: note = Description of Artificial Sequence: Synthetic coding sequence
  source 1..2016: mol_type = other DNA
atgaagcagatcttcttcctggacgacagcggcccccccttcggccatatggtcctggccttgggcggatatttgggcggcttcgatggtaatttcctttggaatagaatcggggccgaatattcctctaatgttcccgtgtggtccttaagactccttccagccctggcaggagcgctgagcgtgcccatggcctaccagatcgtgttggagctacatttcagtcattgcgctgcaatgggcgcggccttgttgatgttgattgagaatgccctcatcactcagtcccgactcatgcttcttgaatcagtgctgatctttttcaatctcctggccgtgctgagctacctcaaattctttaattgccagaagcacagtccattttctttaagctggtggttttggctaactcttactggtgttgcttgttcgtgtgctgttgggatcaagtacatgggcgtattcacctatgtgctggtcctcggagtggcagcagtacacgcttggcatttgctgggagatcagaccctgagcaatgtctgtgtgttttgccacctgctggcgcgagctgtcgccctactggtgatccctgtagtcttgtacctcctgttcttctatgtacacttgattctcgtttttagaagcggaccgcacgaccaaatcatgagttccgctttccaggcctccctggagggcggacttgccaggattacgcagggccagccgctggaagtggcatttggatctcaggtaactctgcggaacgtttttggtaagcctgtaccctgttggcttcattctcatcaggacacataccctatgatctatgaaaatggcaggggctctagccaccagcagcaagtgacttgctaccccttcaaggacgtgaacaattggtggatagtgaaagacccccggcgacaccagctggtggtctcttcccctcctaggcctgtgaggcatggcgacatggtgcagctggtccacgggatgaccacgagatcgcttaacacccatgatgtggcggccccgttatctccacattcacaagaagtgagctgctatatcgactacaacatttcaatgcccgctcagaacctatggcgcctggagatcgtaaataggggatccgacaccgatgtctggaaaaccatcctttccgaggttcgctttgtccacgttaacacttctgccgtcctgaagctgagcggcgcacatctccctgattggggctatcggcaacttgaaattgtgggcgagaaattatctagaggataccacggttctaccgtgtggaatgtggaagagcatcgatatggggctagccaggagcagcgggaacgggagcgggagttgcattcgcctgctcaagttgatgtttcacgcaacctgtctttcatggccagatttagcgaattgcagtggcgaatgctagcactgcgtagcgacgactccgagcacaagtactcaagttcccctctggaatgggttaccctggataccaatattgcatactggctccacccacgcacttcagcccagatccacttactcgggaatattgtcatttgggtttccggatcactcgccctggccatctacgctttgctgtccttatggtatctgctcagaaggaggaggaatgtccacgacctgccccaagacgcttggctgaggtgggttttggctggtgctctctgtgccgggggatgggccgtgaattacctgccgttttttctcatggaaaaaaccctttttctttatcactatctcccagcgctcacattccaaattctactcctgccagttgttctacagcatatatcggatcatttgtgcagatcgcagttgcagaggtctattttctctgcactggtggtggcctggtacagcagtgcctgtcacgtgagcaacacgttgcgaccactgacctatggtgataaatccctttcaccacacgagttaaaggcgctgaggtggaaggatagttgggacatcctgatccgaaagcattag

SEQ ID NO: 201805 - DNA, 2088 bp, synthetic construct
  misc_feature 1..2088: note = Description of Artificial Sequence: Synthetic coding sequence
  source 1..2088: mol_type = other DNA
atgtggggcttcctgaagcggcccgtggtggtgaccgccgacatcaatttgagcctggtggccctgactggtatgggcctgctctctcgtctgtggaggcttacctacccacgtgctgtcgtcttatttcggcgcatacgctggcagttcttcgtcgagcagaactggtcaagcgtcgtggcctttcccgaatactcatccaatgtgccagtgtggtcactccggcttctgcctgcactggcaggagctctgagtgtgcccatggcttatcagattgttctggaacttcacttctcccattgtgctgccatgggggctgctcttctcatgctgattgaaaatgctctcatcacacagtcgcggctgatgttgctcgagtccgtgcttattttcttcaacctcctggccgtgctgtcttaccttaagttttttaactgtcagaagcatagtccatttagtctatcttggtggttttggttaaccctgactggggttgcttgttcttgcgctgtcggcattaagtatatgggagtgttcacatacgtactcgtgctgggagtcgcagcagtccacgcatggcatctgctgggagatcagaccctgtccaacgtatgcgtcttctgccacctgctcgctagggctgttgcactactcgtcattccagtggtgctgtatttgctttttttctacgtgcacctgattctggtgttccggtctggccctcacgatcaaatcatgagctcggctttccaggcctccttggaaggggggctcgctagaatcacccagggccagcccttagaagtggccttcggcagccaggttaccctcagaaacgtgttcggaaagcctgtcccatgctggctgcattcccaccaggatacttacccaatgatctatgagaacggtcgaggcagtagtcaccagcagcaggttacatgctatcctttcaaagatgtgaataattggtggatagttaaagatccaagaaggcaccagctcgttgttagttcccctcctcgcccagttcgtcacggggacatggtccagctggtccacggtatgacaacccgttcgctaaacacgcacgacgtagcggctcctttgtctccacattcccaggaagtaagctgctacatcgactataatatctctatgccagcccagaacctgtggcggctggaaatcgtgaaccgtggctccgacacggatgtttggaaaaccatcctcagcgaagtgcgcttcgtccacgtgaatacctcggccgttcttaagttaagtggagcccaccttcccgactggggatacaggcagcttgagatagtcggggagaagctgtctaggggttaccatggttccacagtgtggaacgtcgaggaacatcgttatggagcctcacaagagcagagagaacgcgaacgggagctccatagtcctgctcaggttgatgtgagcaggaatctgagctttatggcccgattctctgaactccagtggcgcatgctcgctctacgctctgacgactcagagcataaatactcctctagcccgcttgagtgggtaactcttgatactaatatcgcatattggctgcatccgcgcacctcagcccagattcacctattgggcaatattgtcatatgggtgagcggaagtctcgcacttgccatctacgcccttctctctctctggtacctcctgcggcggaggcggaatgtccacgacctcccacaagatgcttggctccggtgggtattagctggcgcactgtgcgccggaggatgggcggtgaactacttgcccttcttcttaatggaaaaaactctcttcctttaccactatctacctgctctgaccttccagatccttctgttaccagttgtcctccagcatatttccgaccacctgtgccgcagccagcttcaacgatctatctttagtgccttggttgtagcgtggtactctagcgcctgccatgtttcaaataccctgaggcccttgacctatggtgataaaagtcttagtccccacgaattgaaggctttgcggtggaaagacagttgggacatcctgatacgaaaacattag

SEQ ID NO: 201806 - DNA, 1041 bp, synthetic construct
  misc_feature 1..1041: note = Description of Artificial Sequence: Synthetic coding sequence
  source 1..1041: mol_type = other DNA
tggcggggcggcggctgcaccagccccgccaccctgggcgccgcccggggcgctgtcgggatcgggaaggaggggcagtaccagcccctcattgcttcactgacctgggggcttgtgcctctctcacaagcgcaggagatcgtaaacagggggagcgataccgacgtctggaaaactatcttatcagaagttaggttcgtccatgtgaatacaagcgctgtattaaagctgagcggggcccatctcccagactggggctaccgccagctcgaaattgttggggaaaaactatccagagggtatcacgggtcgaccgtatggaacgtggaagaacatcgctacggggcctcccaggaacaaagggagcgcgagagggaattacactctcctgcccaggtagatgtctctcgtaacctgtcttttatggcccggttcagtgaactgcaatggagaatgcttgccctgagatcagacgactcagagcacaagtactcctcaagtcctctcgaatgggtaacacttgataccaatatcgcttactggctccacccaagaaccagcgcccagattcacctcttaggaaatatcgtgatctgggtctccggtagtctcgcacttgcaatatacgcactcttgtccctatggtatctgctgaggcgccggcgaaatgtgcacgatcttccccaggatgcctggctaagatgggtgctggcaggcgccctgtgcgctggaggctgggcagtcaattatttaccgttttttctgatggaaaaaacactgtttctgtaccactacctgcctgccctaacctttcagatcctgctgttgccggtcgtgcttcagcacattagcgaccacctgtgccggagccagctgcagcggagcattttctctgctctggtggtggcgtggtactccagtgcttgccacgttagcaataccctccgtccactcacttacggtgacaaatccttgagcccgcatgagctgaaggcgcttagatggaaggatagctgggatattttgatccggaaacactag

SEQ ID NO: 201807 - DNA, 471 bp, synthetic construct
  misc_feature 1..471: note = Description of Artificial Sequence: Synthetic coding sequence
  source 1..471: mol_type = other DNA
atggcctaccagatcgtgctggagctgcacttcagccactgcgccgctatgggtgccgccctcttaatgctcatcgagaacgctctgatcacccagtcacgcctgatgttactggagtctgtgctcatattcttcaacttgttggccgtcctgagttatctgaagtttttcaattgtcaaaaacatagtctgcccctatgggccccccgtcctaaccacgtccagtgtcttcccggacagttaagggggcgcacttcaagtgaccactccggttctgccactggcgggggcttatgggtgcccggccatagtgaggaaaggctgtgggaaacctgtgcgctgctagcaagcttccctcccgggcacctgccccatgatgtgcgatacgaaaatggtcgtgggtcttctcaccagcagcaggtgacctgctaccccttcaaagacgtgaataactggtggatcgtgaagtag

SEQ ID NO: 201808 - DNA, 2244 bp, synthetic construct
  misc_feature 1..2244: note = Description of Artificial Sequence: Synthetic coding sequence
  source 1..2244: mol_type = other DNA
atgtggggcttcctgaagcggcccgtggtggtgaccgccgacatcaatcttagcctcgtcgccctaaccggcatgggtctcttgtctcgcctctggcgcctcacatacccgcgcgcggtagtgttcgatgaagtctactatggccagtacatctccttttatatgaaacagatttttttccttgacgacagcggacccccgtttggccatatggtgctggctctgggcggatatctgggagggtttgatggcaactttctatggaacagaattggggcggagtacagttcaaacgtgccagtttggagcttacgtctgctgcccgcacttgcgggggctttgtctgtgcccatggcctatcaaattgtgttggagcttcacttcagtcactgcgccgccatgggagccgccctgttaatgctaattgagaatgcgctaattacccagtcccgcctcatgttgcttgaaagcgttctgattttttttaaccttctggctgtgctgagttacctcaagttcttcaattgccagaaacattcaccattttcgttatcttggtggttctggttgaccctcacaggcgttgcctgttcctgcgcggttggaatcaagtacatgggagtcttcacgtatgtactcgtgctcggtgttgctgctgtgcacgcttggcatttactgggcgaccagactctgagcaatgtcggcgccgacgttcagtgctgtatgaggcccgcctgtatgggacagatgcagatgtctcagggcgtgtgcgtattctgccatttattagctcgcgcagtcgcattgttggtgatacccgttgtgctgtatttgctgttcttctacgtgcatctgatacttgtctttcgaagcggaccacatgatcaaatcatgtcctcagctttccaagctagcttggagggtggactggctcggatcacacagggccagccattagaggtggccttcgggtctcaggtaaccctgcgaaatgtattcggcaaacccgtgccatgctggctccattctcatcaggacacttatcccatgatatacgagaacggccgcggttcctcacatcagcaacaggttacatgttatccatttaaggacgtgaataactggtggatcgtgaaggatccacgcagacatcagttggtggtgagctcgcctcccagacctgtgcgccacggcgacatggtgcagctagttcatggcatgactacacggagcctgaacacacacgacgtggcagcgcccctgtcccctcactctcaggaggtgtcctgctacattgactacaatatttctatgcccgcccaaaacctttggcgtcttgaaattgtcaaccgggggtctgacactgacgtttggaaaacaatattatccgaggtgcggttcgtgcatgtgaatactagcgccgtccttaagctttcaggcgcccatttgcctgactggggctacagacagttagaaatcgtgggggaaaaactgtctcgtggatatcacggatcgaccgtctggaatgtggaggagcataggtatggcgccagccaggagcagagggagagggagagggagttgcactcccccgcccaggtggatgtgagtcggaacttatcattcatggccagattttctgagttacagtggcgaatgctggccctgcggtcagatgactcagagcataaatattcctcaagcccgctggaatgggtcactctggatacaaacatagcctactggcttcatccacggacctccgctcagatccacttgcttggtaatatcgtgatttgggtctctggaagcctcgccctggctatctacgcccttctgtctctttggtacctgttgaggcgtcggcggaatgtgcacgacctgcctcaggatgcctggctgcggtgggtgctggctggagcattgtgcgcaggcggctgggcagtgaattaccttccattttttctgatggagaagacattgtttctctaccattatctcccagcacttacttttcagatactgctgctacctgtagttctgcaacacattagcgatcacttatgcaggtcgcaactgcagcggagtatcttcagcgccctggtcgtcgcttggtacagctccgcctgtcatgtaagcaacacccttaggcccctgacttatggggacaaaagtctcagtccccacgagctcaaagcgctccgatggaaagatagctgggatatactgattcgtaaacattag

SEQ ID NO: 201809 - DNA, 2178 bp, synthetic construct
  misc_feature 1..2178: note = Description of Artificial Sequence: Synthetic coding sequence
  source 1..2178: mol_type = other DNA
atgtggggcttcctgaagcggcccgtggtggtgaccgccgacatcaatctgtctctggtcgctctgacaggtatgggcctgctgagcaggctgtggaggttgacttacccgcgcgctgttgtatttgacgaggtgtactacgggcagtacatatcgttttacatgaagcagatctttttccttgacgattccggccctccatttgggcatatggtgctcgcccttggtggctacctgggaggctttgatggtaattttttatggaatcgtatcggcgcagaatattcaagtaatgttccggtttggtctctgagactgttaccggcactggcgggggccctatctgtcccaatggcctaccagatcgtcctcgaattacacttctcgcattgcgcggccatgggagccgctctccttatgctgatcgaaaatgcattaattacacagtctcggttgatgcttctggaatcggtgttgattttttttaatcttctagctgtcttaagctatctgaaattttttaattgtcagaagcatagccctttttctctgtcttggtggttctggctcacattgacaggtgtagcctgttcttgcgccgtagggatcaagtacatgggcgttttcacttacgtgctggttctgggagtggctgcagtgcatgcttggcatttactgggcgaccagacgctgagcaatgtgtgcgttttctgtcatctgctcgcacgggcggttgccctgctggtgatccctgtggtcctctatctgctgttcttttacgtccatctgatcttagtgtttcgcagtggtcctcacgaccagattatgagctccgccttccaagcatctctggagggcgggcttgcccgcattactcaaggccaacccctggaggttgcatttggatcccaggtgacactccgcaatgttttcggaaagccagtcccatgctggctacactcccatcaggacacttacccgatgatttacgaaaatggccgcgggtcgtctcaccagcagcaggtgacgtgctatccttttaaggatgtgaacaactggtggatcgtgaaagatcctagacgccatcagctggttgtgtcctctccacctcgtcctgtcaggcacggtgatatggtccaactcgttcatggcatgactacccgtagtctgaacacccatgatgttgccgcccccctgagtccgcactcccaggaagtgtcatgttatatcgattacaacatttcaatgcctgctcaaaatctgtggcgattagaaatcgtgaatagggggagtgacacagacgtgtggaaaactatcctgagcgaagtgcggttcgttcacgttaacacatctgcagtgctgaagttgagcggcgctcacctccctgactggggatatagacagttagagattgttggagagaagttgagtagagggtaccatggatccacagtgtggaatgtggaggagcatcgctatggggcgtcccaggaacagagagagagagaaagggaactacactcaccggcacaggtggatgtttcccggaatctatcctttatggcgcgatttagtgaacttcaatggcgaatgctggccctcagaagtgatgattccgagcataaatatagctctagtcccctggagtgggtgacactggatactaatattgcttactggctgcatccccggacatctgcgcagattcatctcttgggaaatatcgtcatttgggtgagcggctcactggccctcgccatttatgcactgctctcactctggtatctgttacgacgccggaggaacgtgcacgatttgccacaggacgcctggttgcgatgggtgcttgctggagcgctctgcgccggtggctgggcagtcaactatctgcccttcttccttatggaaaagacgttattcctgtatcattacctccccgcacttaccttccagatactcctgcttccagtggtgcttcaacatatcagcgaccatctctgtaggtcccagctgcagcggtcaatattctccgcactcgtggtggcctggtactcaagcgcctgtcatgtgtctaacacactgcgtccactaacgtatggcgataaatccctaagccctcatgaattaaaagcgcttagatggaaagatagttgggatatactgatacgtaagcactag

SEQ ID NO: 201810 - DNA, 1827 bp, synthetic construct
  misc_feature 1..1827: note = Description of Artificial Sequence: Synthetic coding sequence
  source 1..1827: mol_type = other DNA
atggcctaccagatcgtgctggagctgcacttcagccactgcgccgccatgggcgccgccctccttatgctgatagagaatgctctgattacccagtctaggctgatgcttctggaatctgtactaatcttcttcaacctgctggcagtgctgtcttacctaaagttttttaactgtcagaagcattccccattttcactgtcttggtggttctggttgactcttaccggcgttgcgtgcagctgtgcggttggaattaaatacatgggagtattcacgtacgtcctggttctgggcgttgctgccgttcacgcctggcacctgctgggcgatcagacactatctaacgtttgcgtgttctgccacttgctcgcaagagccgttgccctcctcgtgatccccgtggtgctttatctgctgttcttctatgtgcatctgatcctggtgttccgcagcggcccccacgaccagataatgtcgtcggctttccaggcctcgctcgagggaggactggcgcggattacccaggggcagcccctcgaagtagcctttgggtcccaagtcaccctgagaaatgtttttggaaaacctgtgccctgctggctgcactcacaccaggacacataccctatgatttatgagaatggcaggggctcgagccaccagcaacaggtgacatgctaccccttcaaagatgtgaacaactggtggatcgtgaaggatccccggcgtcatcaacttgtggttagctccccccccagaccagttcgacatggggatatggtacagctcgtccatgggatgaccacccgaagcctgaatacacacgatgtggcagcaccactttcacctcactctcaagaggtgtcgtgctacattgattacaacatcagcatgcccgcacagaatctctggcgcctggaaattgttaaccgagggtctgatactgacgtgtggaagacaatactcagcgaagttaggttcgtccacgttaacacctctgctgtgttgaagctgagcggggctcatctgcctgactgggggtaccggcaactcgagatcgtaggcgaaaaacttagcaggggctaccacggctctacagtgtggaatgtcgaggagcacagatatggtgccagccaagagcagcgcgaaagagagcgcgaattgcattcccccgcacaggtcgacgtcagtcgtaacctttcattcatggcccggttctccgagctgcaatggaggatgctggcgctgcgcagcgatgactctgaacacaaatattcaagctctcccttggagtgggtgactctggataccaacatcgcttactggttgcatcctcgcacaagcgcacagatccacttgctgggcaacatcgtcatatgggtatcaggctctcttgctctggccatttatgccctgctatccctgtggtatctgctgcggaggaggagaaatgtgcacgacttgccccaggatgcctggctgcgttgggtactggctggcgcactctgcgcaggaggctgggctgtcaattacctgcctttctttctgatggaaaaaaccctatttctgtatcattatttacctgctctcactttccagattctgctcctgcccgtagtgcttcaacatatctccgatcatttgtgtagaagccagttacagcgtagcattttctcagctttggtcgtagcttggtactcctctgcgtgccacgtgtctaatactctgagacccctcacatatggtgacaagtcgctaagcccccatgagctcaaggccttaaggtggaaggactcctgggatatcctgatcaggaagcactag

SEQ ID NO: 201811 - DNA, 471 bp, synthetic construct
  misc_feature 1..471: note = Description of Artificial Sequence: Synthetic coding sequence
  source 1..471: mol_type = other DNA
atggcctaccagatcgtgctggagctgcacttcagccactgcgccgctatgggggctgccctactaatgttaatcgagaatgcactgatcacccagtcacggttgatgctgcttgagagcgtgctaattttttttaacctcctcgcagtgctgagctatctgaagttctttaattgccagaaacattcgctgcccctatgggcccccaggcctaaccatgtacagtgcctgcctggacaactcaggggcagaacaagtagcgatcattcagggtctgctactggaggtggattgtgggtccccggtcactccgaagaaaggctgtgggagacctgcgcacttctggcatctttccctcccggacacctcccccacgacgttagatacgaaaacggacgggggtcttcccatcagcaacaggtcacctgttatccatttaaagacgtgaacaactggtggattgtgaaatag

SEQ ID NO: 201812 - DNA, 429 bp, synthetic construct
  misc_feature 1..429: note = Description of Artificial Sequence: Synthetic coding sequence
  source 1..429: mol_type = other DNA
atgtggggcttcctgaagcggcccgtggtggtgaccgccgacatcaacctctccctcgtggcactgactggcatgggcctgctgagccggctgtggcgattgacatatccgcgcgcggtcgtgttcgatgaggtctattatggacagtatatctccttctatatgaaacagatcttcttccttgatgactccggcccgcccttcggacatatggtccttgctctgggcgggtacctggggggttttgatggtaacttcctgtggaatcgcatcggagctgagtattcgtctaatgtgcctgtgtggagcctccgactccttcccgccctcgccggggcactcagcgtacccatggcctaccaaatcgtgctggaactccatttctcacattgtgctgctatgggcgccgccctcctgatgctgatctag

SEQ ID NO: 201813 - DNA, 1722 bp, synthetic construct
  misc_feature 1..1722: note = Description of Artificial Sequence: Synthetic coding sequence
  source 1..1722: mol_type = other DNA
atgctgctggagagcgtgctgatcttcttcaacctgctggccgtgttgtcctacctaaagtttttcaactgtcaaaagcattcacctttctctctctcttggtggttctggcttactttgacaggcgtggcatgtagctgtgctgtgggaataaagtacatgggagtatttacatacgtcttagtgcttggtgttgcagctgttcacgcttggcacctgttgggtgatcaaactctctccaacgtgtgtgtcttttgccacctccttgcacgagcggtggctctgcttgttatcccagtagtcctctatctcctttttttttatgttcacttgatcttggtgttccgaagcggaccccacgaccaaattatgagctctgccttccaagcctcgctcgagggaggcctcgctcgaataacacagggacagccacttgaggtggcctttggaagccaggtaacccttcggaatgttttcgggaaaccggtgccctgctggctgcatagccaccaggatacctaccccatgatctacgagaatgggaggggtagttcccatcaacagcaggtgacatgttacccgttcaaggatgttaataactggtggattgtcaaagaccctaggagacatcaactagtggtgtccagccctcctagacccgtccggcacggggacatggtacagctggtacacgggatgaccaccaggagtctgaatactcatgacgttgccgcccccctgtcgcctcattctcaggaggttagttgttacatcgactacaacatcagcatgcccgcccagaacctgtggaggttggagattgtcaataggggaagcgacaccgacgtgtggaaaactatcttgtctgaagtgagattcgtgcatgttaacacatccgccgtgctaaagctcagcggggcccacctacctgattggggttatcgccagcttgagatcgtcggggaaaagctctcccggggatatcatggcagtactgtctggaatgtggaggaacataggtatggcgcgtctcaggagcaaagggagagggaaagggagcttcacagccctgctcaggttgatgtgtctcgaaatctgtcatttatggcaagattctcagagctgcagtggcgtatgctggcactccggagcgacgatagcgagcataagtacagttcgagtcctttggagtgggtgaccctggacactaatattgcctattggctgcaccccagaaccagcgcccaaattcacctgttgggcaacatcgttatttgggtgtccggctctctcgcactggccatctacgctcttctgtctctatggtatctccttcggaggcgtcggaatgtccatgacctgcctcaggacgcctggttgcggtgggtgctggctggggctctttgtgccggcggatgggccgtgaattatcttcctttctttctgatggagaaaacactgttcttgtatcattacctgccagccctcacttttcaaatcctcctcctccctgtcgtgcttcaacatatctccgaccacctatgcagaagccaattacagcgatccattttctctgccctggtggtggcttggtacagttctgcgtgccacgtttctaacactctgaggccgcttacttatggggataagtccttgtcacctcacgaactgaaggctctgagatggaaggactcctgggacatcctgatcagaaagcattag

SEQ ID NO: 201814 - DNA, 2178 bp, synthetic construct
  misc_feature 1..2178: note = Description of Artificial Sequence: Synthetic coding sequence
  source 1..2178: mol_type = other DNA
atgtggggcttcctgaagcggcccgtggtggtgaccgccgacatcaatctatccctggtggcacttacaggtatgggccttctgtctaggctgtggcgactcacatatccccgggccgtggtgttcgacgaagtctattacggacaatacatctcattctatatgaaacagattttttttctcgacgactctggacccccattcggacatatggtcctcgccctaggggggtatttgggggggtttgacggaaacttcctgtggaacagaattggtgctgaatacagcagcaacgtgccagtctggagcctcagattgcttccagccctggccggggctctgtctgtgccgatggcctaccagatcgtgctggaactgcatttcagccactgcgctgcaatgggcgcggcccttctcatgcttatcgagaacgctctgattactcagtcccgtctcatgctgctggaaagcgtgttgatcttcttcaatctgctggccgtgctgtcatacttgaaattcttcaattgtcagaagcattctcccttctccctgtcatggtggttttggttgacgctgacaggggtagcatgcagttgcgcagtcggcatcaaatacatgggtgtctttacctacgtgcttgtgctgggggtcgccgctgtccatgcgtggcatctgcttggcgaccagactctcagcaacgtgtgcgtattttgtcatctgctggcaagagccgtcgcactgttagtgatcccagtggttctgtatctgctgtttttttatgtgcaccttatactggtctttcggtcgggcccccatgatcagatcatgtcctccgcatttcaggcatccctagaaggcggacttgcaaggattactcaaggacagccgcttgaagttgcattcggatctcaggttacccttcggaatgtcttcggtaagcccgtaccttgctggctacacagccaccaggatacataccccatgatatacgagaatggccggggcagcagccaccaacaacaggtgacatgctatcctttcaaggacgttaacaattggtggattgtcaaagaccccaggaggcatcaattggttgtatcttctcccccccgacctgtcagacacggagatatggtgcagctggtgcatggcatgaccacacgctccctcaatacccacgacgttgctgcccccctgtctccccattcacaggaggtttcgtgctacatcgactacaatatctctatgcctgcacagaacctgtggcggcttgagatcgtaaaccgaggaagcgatacggatgtgtggaagacaattctaagcgaggtgaggtttgtccacgttaataccagcgccgtgcttaagctaagcggagcacacctgcctgactggggctacagacagctcgaaatcgtgggagagaaactctctaggggctatcatggcagcactgtgtggaatgtggaagaacatcggtacggtgcttctcaggaacagagggagagagagcgggaactacattcaccggctcaggtggatgtctcgcgaaatctgtctttcatggcgcgcttcagcgagttgcagtggcggatgctagccctgcggtccgacgacagcgaacataaatactctagttctcctttagagtgggtaaccctggacaccaatattgcatattggctgcatccacgcaccagcgcacaaatccatcttctcggaaacatagtgatatgggtgtccggtagtttagccctggcaatctatgcattgctgagcctgtggtacttgttaagaagacgcaggaacgttcacgacctgccccaggacgcttggctccgatgggtgctggctggcgctctctgtgccggaggctgggctgtcaattacctcccgttcttcctaatggagaagacccttttcctttatcattacttaccagcccttacgtttcaaattctactgctgcccgtggtgttgcagcacatctccgaccatctgtgcagaagtcagctccagaggtcaatattttccgcgctggtcgttgcctggtactcctcggcatgccacgtttccaacacactccgtcccctgacctacggagataaatctttatcgcctcacgagctaaaggccctcaggtggaaggactcgtgggatattctcatcaggaagcattag

SEQ ID NO: 201815 - DNA, 507 bp, synthetic construct
  misc_feature 1..507: note = Description of Artificial Sequence: Synthetic coding sequence
  source 1..507: mol_type = other DNA
atggcctaccagatcgtgctggagctgcacttcagccactgcgccgcaatgggagccgcgctgcttatgcttatcgagaatgctcttattactcagtccaggctgatgctgctcgagtccgtcctgatctttttcaacctactggcagtgctcagttatctaaagttttttaattgccagaaacattcacctttctccctgtcctggtggttttggctgacactaacaggtgtggcttgtagttgcgccgtcggtatcaaatatatgggagtcttcacctacgttctggtcctgggtgtggccgccgtgcatgcctggcacttgttgggcgatcaaacgttgtcaaacgtgtgtgtcttttgccatctgctggcccgcgcggtggcgctcttggtaattccggtcgtcctgtacttattgtttttctatgtacatctgattctcgtgttccggtccggcccccatgatcagattatgtcttctgcattccaggcctctctcgaatag

SEQ ID NO: 201816 - DNA, 894 bp, synthetic construct
  misc_feature 1..894: note = Description of Artificial Sequence: Synthetic coding sequence
  source 1..894: mol_type = other DNA
atggcctaccagatcgtgctggagctgcacttcagccactgcgccgctatgggggccgccctactgatgctaattgaaaacgctttaatcactcagagtcggctgatgttgctcgagtcggtgttgattttttttaaccttctagctgtgctcagctacctgaaattctttaattgccagaaacatagtccctttagcctctcctggtggttttggctgactctgacaggagtggcatgttcatgcgctgtgggcatcaaatacatgggggtattcacctacgtcttagttctcggggtcgccgctgtgcacgcctggcacctactcggggatcagactctgtcaaacgtcggagcagacgtgcaatgttgcatgcggccagcctgcatgggacagatgcagatgagccaaggagtgtgtgtcttttgccatcttctggcacgagcagttgccctactggtgattccagtggttttgtacctgctgtttttctacgtgcatttaatcctggtgttccgcagtggccctcacgaccagatcatgtcttcagcctttcaggccagccttgagggcggtctggcccgcattacccagggccaacctctcgaggtggcctttggctctcaagttaccttacgaaatgtgtttggaaaacccgttccctgttggctgcatagtcatcaggatacgtaccctatgatttacgagaatgggcgcggtagttcccatcaacagcaggtaacgtgttatcccttcaaggatgtcaataattggtggatagtcaaggacccacggagacaccagctggttgtttcttctccccctagacctgtcaggcacggcgacatggtacagctcgtacatgggatgaccaccagaagcctgaacacatag

SEQ ID NO: 201817 - DNA, 657 bp, synthetic construct
  misc_feature 1..657: note = Description of Artificial Sequence: Synthetic coding sequence
  source 1..657: mol_type = other DNA
atgaagcagatcttcttcctggacgacagcggcccccccttcggccatatggtgctagcactgggtgggtatctgggagggttcgatggaaacttcctgtggaatagaattggggctgagtactcttccaacgtgcccgtttggagcctgcgtcttctccctgccctggcaggcgccctctctgtccccatggcatatcagatcgtgctggagttgcacttctcccactgtgctgccatgggcgccgcactgttgatgctcatagagaacgcgctcattacgcagtcacggctgatgctgctggagtcggtcctcatcttttttaacctcctggcggtgctgagctatcttaagttcttcaactgtcagaagcactccccgttttcgttgtcttggtggttttggctgactctgaccggcgtcgcctgttcctgcgcagtcggcatcaaatacatgggcgtgttcacctacgtgctggtactgggagtggcagctgttcatgcctggcaccttttgggagatcaaacactgtccaacgtgggagctgacgtgcagtgttgcatgagaccagcctgcatgggccagatgcagatgtcccaaggcgtgtgcgtgttttgccacctgctggctcgggcagtagcgcttctggttatttag

SEQ ID NO: 201818 - DNA, 1398 bp, synthetic construct
  misc_feature 1..1398: note = Description of Artificial Sequence: Synthetic coding sequence
  source 1..1398: mol_type = other DNA
atggccatcttctgcggcaccgagctggagcaggtgtgcgtgttctgccacctgttagccagggctgtcgccctccttgtgatcccagtggtattgtacctcctgttcttctatgtccatttaatcctcgtgttcaggtctggcccccacgatcaaatcatgtcctctgcttttcaggcctcactcgagggtggtcttgcgagaatcacccagggccagcccttggaggtggcatttggcagccaagtgacactccgtaacgtgtttggaaaacccgtcccttgttggctacattcacaccaggacacctaccctatgatctacgaaaacggcagggggagcagccaccagcaacaagtcacctgttatccttttaaagacgttaataattggtggatcgtcaaagatccacggcggcatcagttggttgttagctcccctccccggcctgtgcgtcacggtgatatggtccagttggtccatggaatgacaactcgcagcttgaacacccacgacgtggcagcccccctgagtccccatagtcaagaagtctcatgctacattgactacaacatctccatgcctgctcagaacctgtggagacttgaaattgtgaatcgtggaagcgataccgatgtgtggaagaccatactcagcgaagttcgcttcgtccacgtcaataccagcgccgtgcttaagcttagtggtgctcacctgcctgactggggctataggcagttggaaattgtaggtgagaaacttagcaggggctaccacggctccacagtgtggaacgtggaggaacaccgctacggcgcctcccaggagcaacgcgagcgtgaaagggagctgcattctcctgcacaggtcgatgtgtctagaaatcttagtttcatggcacgattctccgagttgcaggctcagattcatcttttggggaatatcgttatttgggtctctggcagcctggccctggccatttacgccctgctctctctctggtaccttttgcgaagaaggcggaacgttcatgacctgccgcaagacgcatggctgagatgggtgctggccggggcattatgtgctggcggctgggctgtgaactatctccccttttttctgatggagaaaacgctgttcttgtaccattacctgccggccctcacattccagatattgctcctaccagttgtgttacagcatatctcagaccacttatgcagaagccaactgcagagatcaattttcagcgccctcgtggtcgcttggtactcatccgcttgtcatgtctccaacactttacggccccttacctacggcgacaagtccttatcacctcacgaactgaaagctctacggtggaaggatagctgggatattttaatcagaaaacactag

SEQ ID NO: 201819 - DNA, 2253 bp, synthetic construct
  misc_feature 1..2253: note = Description of Artificial Sequence: Synthetic coding sequence
  source 1..2253: mol_type = other DNA
atgccccccgccaccggcggcggcctggccgagagcgagctgcggcctaggagaggaagatgcggaccacaagccgccagagccgccggtcgggatgtggccgccgaggctgtggccagaagccctaagaggcccgcttggggctcaagacggttcgaagcagtcggatggtgggctctcctggctttggttactctgctctcgttcgctacacgctttcataggctggatgaacctcctcacatctgttgggacgagactcacttcggaaaaatggggtcttactacataaatcgaacttttttcttcgacgtgcacccccctctgggtaagatgctaataggacttgccggctacctctcaggttacgatggcactttcctttttcagaagcccggcgacaagtacgagcaccattcttatatgggcatgcgagggttttgcgctttcctcggctcctggctggtgccgttcgcttacctcactgtcctggacctgagcaaatccctttcggcagcactgcttactgccgctctcctcacattcgataccggatgtttgaccctgagtcagtatatcttactggacccaatccttatgttctttatcatggcagctatgctgagtatggtgaagtataactcttgcgctgatcgcccattttccgccccttggtggttctggctttcccttaccggggtcagtctggccggcgctctgggcgtgaagtttgtgggactctttataatcttgcaggttggactcaacacaatagctgacctgtggtacctttttggcgacctatctttgtcactcgtaactgtgggcaaacatcttactgcccgcgttctctgtttgattgtgcttcccctcgctctctataccgcgacgtttgcagtacattttatggtgctttcaaagtccggccctggcgacggattcttctcttctgccttccaagcacggctttccgggaataatctccacaacgcttcaatacctgaacacctagcctatggatcggtcatcacagttaaaaacctacggatggctatcggctatttgcatagccaccgtcatctttaccccgaaggcattggtgcacggcaacagcaagtgactacctatctccataaggattataataatctttggatcatcaagaagcacaacacaaattccgaccctctggacccttcctttccagtggaattcgtgaggcacggggacattatccgactggagcacaaggagacatccagaaatctacattcacattatcatgaagcgcctatgacgcggaagcactatcaggtaaccggatatggcatcaacggaaccggtgatagcaatgatttctggaggattgaagtggtgaatcgaaaattcggcaaccgcatcaaggtgttgagatctagaatccgattcatacacctggtcaccggttgtgtgctgggctcatccggcaaagtgttgcccaaatggggctgggaacagctcgaagtgacttgtaccccatatctgaaggagacactgaatagtatctggaacgttgaagatcatattaatccaaagttgccgaatataagcctggatgtgctccaaccatccttccccgagattttactagagagtcacatggtcatgataaggggcaacagtggactgaagccaaaggataatgagtttacaagcaaaccgtggcattggcctataaactatcagggactcagattttctggggtcaacgacaccgattttagagtgtacctgttaggcaacccagttgtttggtggctgaacctgctcagcattgctctgtatttgttgagcggatctatcatcgctgtggctatgcaacgtggcgctcgactccctgccgaggttgccgggctgagtcaggttctgttacgaggtggggggcaggttctgctgggctggactctccattactttcctttttttctaatgggtcgggttctctactttcatcactacttccccgccatgctgttctctagcatgctgacaggaatactctgggataccctgctacgcctgtgcgcttggggactcgcttcgtggccgctggcccgagggattcatgtagctggaatcctctccctgctgctcgggacagcatattcattctatctttttcatcctctcgcttacggaatggtcggtcccttggctcaggacccgcagtcgccaatggccgggctgaggtggctcgattcctgggacttttag

SEQ ID NO: 201820 - DNA, 669 bp, synthetic construct
  misc_feature 1..669: note = Description of Artificial Sequence: Synthetic coding sequence
  source 1..669: mol_type = other DNA
atgaagctgcccctgctgctggccctgctgttcggcgccgtgagcgccctgcacctgcgaagcgaaacctccacgttcgaaacaccactaggtgcaaagacactacccgaggacgaggagactcccgagcaggagatggaagaaaccccctgccgggaactggaagaggaggaggaatggggttcaggatccgaagacgccagtaaaaaggatggggccgtggaaagtatctctgtgccagacatggtcgacaaaaacctcacctgtccagaggaggaggacacagtcaaagtggtgggcatcccaggctgtcaaacctgtagatacctcctggtgaggtcgttgcaaaccttctcgcaggcatggttcacatgtaggagatgctaccgcggcaaccttgtcagcatccacaacttcaatattaactacaggatacagtgtagtgtcagcgccctcaaccaaggacaggtgtggattggaggtcgaattactggctccgggcgctgccgcagatttcagtgggtcgatggctcacgatggaatttcgcttactgggccgctcatcagccatggtccagaggcgggcactgcgttgctctttgtactcggggcggccactggcgacgagctcactgtttacgccgcctgcccttcatttgttcttactag

SEQ ID NO: 201821 - DNA, 669 bp, synthetic construct
  misc_feature 1..669: note = Description of Artificial Sequence: Synthetic coding sequence
  source 1..669: mol_type = other DNA
atgaagctgcccctgctgctggccctgctgttcggcgccgtgagcgctcttcacctgcgatcagagacttctacattcgagaccccgctgggggctaagacactacctgaggacgaggagacaccggagcaggagatggaagagaccccctgtagggagctggaggaagaggaggagtggggttccgggagtgaggatgcttcgaaaaaggacggagcggtcgaaagtatttcggtcccagacatggtagataagaacctaacttgcccggaggaagaagatacagttaaggtggttggaattcctggttgtcagacctgcaggtatctgctggttaggagccttcagacattcagccaagcttggtttacatgccgccggtgttaccggggaaacttggtttcaattcacaactttaacatcaactatcggatccaatgttccgtttcagctctgaaccagggccaggtctggatcggcggccgcattaccggttcagggagatgtcggaggttccagtgggtggatggtagcaggtggaattttgcctactgggctgcacaccagccctggtcgaggggaggccattgcgtggccctgtgcacacgcggcgggcactggcgaagggcccattgcttaagaaggctgccttttatctgctcatactag

SEQ ID NO: 201822 - DNA, 636 bp, synthetic construct
  misc_feature 1..636: note = Description of Artificial Sequence: Synthetic coding sequence
  source 1..636: mol_type = other DNA
atgaagctgcccctgctgctggccctgctgttcggcgccgtgagcgccctgcatttgcgctcagagacttccacatttgagacacccttgggtgccaaaactctgcccgaagacgaagagacgcctgagcaagaaatggaagaaacgccctgccgggagttggaagaggaggaagagtgggggagtggctcagaggatgcaagcaagaaggatggggcggttgagtctatctccgtcccagacatggttgataaaaatctgacttgtcccgaagaagaggatactgtgaaggttgtcggcattcccggctgccaaacctgccgctacctcctgttcacgtgtcgccgctgctatcgaggaaacctggtctctatccataatttcaatatcaattaccggatacagtgttccgtttcagcgcttaaccagggccaagtgtggatcggcggccggattactggatctggacggtgccgcagatttcagtgggtcgacggctcccgctggaactttgcttattgggccgcccaccagccctggtccaggggcggccattgcgtggcattatgtacacggggagggcactggaggagagcacactgcttacgcagactgccattcatttgttcatattag

SEQ ID NO: 201823 - DNA, 678 bp, synthetic construct
  misc_feature 1..678: note = Description of Artificial Sequence: Synthetic coding sequence
  source 1..678: mol_type = other DNA
atgcagtgcctgctgctgctgcccttcctgctgctgggcaccgtgtcagcactgcacctcgaaaacgacgctcctcatctggaaagcctggaaacccaggcggatttgggacaagacctggactcctccaaggaacaggaaagggatctggcccttactgaagaagtgatccaggccgagggggaggaggtaaaagcctcagcctgccaagataattttgaggacgaggaggccatggagtctgatccagctgccctcgataaggactttcaatgtccacgtgaggaggatatagtggaagtgcaggggtcgccgaggtgtaagatctgtcggtatctgctggtgaggacccctaagacattcgccgaggcacaaaacgtgtgttctcgctgctatggcggtaatctagtctcaatccacgatttcaattttaattatcgaatacagtgctgcacgagcacagtgaaccaggcccaggtgtggatcggaggaaacctcagaggatggttcttatggaaaagattttgctggactgacggcagccattggaatttcgcttattggtctccagggcagccgggtaacggacaggggagctgcgttgccctctgtactaagggaggctactggcgtagggcgcagtgcgacaagcagctcccattcgtatgctctttctag

SEQ ID NO: 201824 - DNA, 4092 bp, synthetic construct
  misc_feature 1..4092: note = Description of Artificial Sequence: Synthetic coding sequence
  source 1..4092: mol_type = other DNA
atggcctggaagaccctgcccatctacctgctgctgctgctgagcgtcttcgtaattcagcaggtatcctcccaggaattaagctgtaagggcagatgcttcgaaagcttcgagcgcggaagggaatgtgattgtgatgctcagtgtaaaaaatacgataagtgctgcccagactacgaatcgttttgcgccgaagtgcataatccgaccagcccaccctccagcaagaaggcacctccacccagcggggccagccagaccatcaaatcaaccactaagaggtcccctaaaccaccaaacaagaaaaaaaccaagaaggtgatcgagtctgaagaaattacagaagagcatagcgtgtcagagaatcaggagtccagctcgagctccagttccagctcgtccagctccaccatcaggaaaatcaagtctagtaagaactcagcagccaatagggaattgcagaagaagctgaaagttaaggacaataagaagaatcgtacaaaaaagaaaccgacccctaaaccaccagtcgtggacgaagctggttcagggctggacaatggagacttcaaagtaacgacccctgatacctctactacacagcataacaaagtgagcacatcccccaaaatcacgaccgctaagcctatcaacccccgcccctctcttccccctaactctgacacctcaaaggagacatctctgacagttaacaaggagactacggtcgagactaaggagacaaccacaacaaacaaacagacctccactgacggcaaagaaaagacaacttcagcgaaggagacccaaagcattgagaagacctcagccaaggaccttgctcccacatccaaagtgctagccaaacccacaccaaaggctgaaaccaccacaaaggggccggcgctcacgaccccgaaagaacccactcctactacccccaaggagcctgccagtacaacacccaaagagccgacccctactaccatcaagagcgcccccactacccccaaggagcccgcccctaccaccaccaaatccgcacccaccaccccaaaggaacccgctccaacaacaacaaaggaaccggccccgacaactcccaaggaaccagctccaacaacaactaaagaacccgcgcctacaaccactaaaagcgccccaaccacccctaaagagcctgcccctacaaccccaaaaaaaccagcaccgacaacacccaaagaaccagccccaactacacccaaggagccaaccccaacaacacccaaagagcctgcgccaactacaaaagaacctgcaccaactaccccgaaagaaccagctcccaccgctcccaaaaaaccggcccctactacaccaaaggagccagcgccgacaacgccaaaggagccagccccaaccactacaaaggaaccttcaccaactacacctaaggaaccagctcccaccacgactaagtccgcacctaccacaacaaaggagccagctcccactaccaccaaaagcgcccctactacgcccaaggaaccatccccaacaactaccaaggagcctgctcctaccactcctaaggagccggcacccacaacccctaaaaaacctgcccctacgacgcccaaggagcctgcccctaccactcccaaagagcccgccccaactaccacgaagaaaccggctcctaccacccctaaagagccagctccgacgactccgaaggagaccgctcccacaactccgaagaagttgacccctacaacgcccgagaagctggctccgaccacccccgagaaacctgctccaactacccccgaggaactcgcaccaactacacccgaagagccaacccccacaacacctgaagaaccagcccccacgactcccaaggctgctgctcccaacaccccgaaggaacccgcacctaccaccccaaaagagcccgcccccacaactcctaaggaaccagcccccaccactccgaaggaaacggcccctaccaccccgaaaggtactgcccctaccacgctaaaggagcctgcgccaaccacccccaagaagcctgctcccaaggagctggcaccgacaaccacgaaggaacctacctctacaacatgcgataagcccgctcctacgaccccaaaaggaacagcacccactactccaaaagagccggcccccactacccccaaagaaccagccccaaccacaccaaaagggacagcgccgacaacactaaaggaaccagctccaaccactcctaagaaacccgcccccaaggaactagcccctacaactacaaagggaccaactagtaccacctcagacaagcctgcgcccaccactccaaaggaaacagcacccaccacccctaaggagccagcaccaaccactccaaagaagcctgctcccacaacccccgagaccccaccacctacgacttctgaagtcagcacccctaccaccaccaaggaacctactaccattcacaaaagtcccgacgagtctaccccagaattatcagcggagcccacccctaaggcactcgagaattctcccaaggaacccggggtgccaacaacaaaaactcccgccgccaccaaacctgaaatgacaaccactgccaaagacaagaccactgaacgagatctgcggaccaccccggagaccactaccgccgccccaaaaatgaccaaggaaactgccaccacaacggagaagaccacagagagcaagataacagctactaccactcaggtgacttcaaccacaacacaggacactacacccttcaagattacgactcttaagactaccaccctggcaccaaaggtcaccaccactaagaaaacaattacaacaaccgagatcatgaataagcctgaggagacagcaaaacccaaagaccgggccaccaatagcaaggctacaactcctaaaccacagaaaccaactaaagcccccaagaaacccacctctaccaagaagccaaagaccatgccccgggtgcggaagcctaaaactaccccaactccacgcaaaatgaccagcaccatgcctgaattaaatccaacctcacgtatcgccgaggccatgcttcagaccaccaccaggccaaatcaaacacccaattcgaagttggtcgaagtgaaccctaagagcgaagatgctggtggcgctgagggcgagacgccacatatgctgttaaggccccacgtcttcatgcccgaagtgactccagacatggattacctgccgcgtgttccaaaccagggaataatcatcaaccctatgcttagcgacgagacaaatatttgcaacggaaagcccgtggatggactcacgaccttaagaaatggcactctcgtcgcttttcgaggacactatttttggatgctgtcccccttctcaccaccctcccccgcccgtaggattaccgaagtgtgggggatcccctcgcccatcgacacagtcttcacacgttgtaattgcgagggaaagaccttctttttcaaggactcccaatactggcggtttacgaacgatattaaagacgcaggctatcctaagccaatttttaagggtttcggcggactgacagggcaaattgttgcggcactttccacggccaagtacaaaaactggcctgagtcagtttatttttttaagcgtgggggatctattcagcagtatatttataaacaagagcctgtccagaagtgtcccggacgcagaccagccctgaattacccagtatacggcgaaaccacacaggttaggcgccggcgatttgagcgcgcaatcgggccctctcagacacatactatccgcatccagtatagtcctgccaggttggcctaccaggacaaaggggtcctacataacgaagtaaaagtgagcattctatggagaggccttcctaatgttgttacttctgcaatcagcctcccaaacatccggaagccagacggctacgattactacgcgttctccaaagaccagtactataacatcgatgtgccaagccgtaccgcccgagccatcacgacacggagcggacagacattgtccaaggtctggtacaactgcccatag

SEQ ID NO: 201825 - DNA, 2802 bp, synthetic construct
  misc_feature 1..2802: note = Description of Artificial Sequence: Synthetic coding sequence
  source 1..2802: mol_type = other DNA
atggcctggaagaccctgcccatctacctgctgctgctgctgagcgtgttcgtaattcaacaggtttcctcacaggagctatcctgcaagggccggtgctttgagtcctttgaaaggggacgagagtgcgactgtgacgcacaatgtaaaaaatacgataaatgttgtcctgattacgagtccttttgtgcggaagtacacaatcccactagtccgcccagttctaagaaggcacctccgccgagcggcgcctctcagactattaaaagcacaacaaaaagatctcccaagccccccaataaaaagaagaccaagaaggttatcgaatccgaggaaattacagaagagcattcagtgtcagaaaaccaagaatctagcagttccagtagctcatcctcctccagttcaactattaggaaaattaaaagtagcaaaaacagcgccgctaacagagaactgcaaaaaaagctgaaagttaaagacaacaaaaagaataggaccaaaaaaaagcccacccctaaacctccggtggtggacgaagctggtagcggcctagataatggggattttaaggttacgacccctgatacttcaaccacacaacacaataaggtctctacatcgcctaagatcaccactgctaagccaattaatccccggcctagtctgcctcccaattccgacaccagcaaagaaacaagtctaaccgtgaacaaggaaaccactgttgagaccaaagagacaactaccaccaacaagcagacgagcacggacgggaaagagaaaactaccagtgccaaggaaacgcagtccattgaaaaaacctctgctaaagatcttgcccccactagtaaggttctggctaagccaactcctaaagctgaaacaactaccaagggtcccgcactcaccacaccgaaggagccgacgccaaccaccccaaaggaaccagcgagtaccaccccgaaggagcccaccccgactactatcaagtccgcaccaacaacacctaaggagcctgccccaactactacaaagtccgcccctacaacccctaaggaaccggctccaacgactaccaaggagcccgcgcccactactccaaaaaaacctgcccccacaacaccagagacgccccccccgacaacctccgaggtctcaacacctacaactaccaaggaaccaacgactattcacaagagccctgacgagagcacacccgaattgagtgctgaacccacccccaaggctctggaaaacagtcccaaggagccgggcgtacctaccacaaaaacaccagccgccaccaagccagagatgacaacaaccgccaaggataaaaccactgagagagatctacgaaccacccctgagacaactacagccgctcccaagatgactaaagaaactgcaactaccaccgagaagactaccgagagtaaaatcactgcgacgacaacacaggtgacttccactacaacccaggatactactcccttcaaaatcacaacactgaaaacgacaacattggcacctaaggtgacaacgacgaagaagactatcacaacaaccgagattatgaataagcccgaggaaacagctaaacccaaagacagagctacgaattccaaggctaccacacccaaaccccaaaagcctactaaggcccctaagaaacccacttcaaccaagaagccgaagacaatgcccagagtcaggaagccgaaaaccacgcctacgcctaggaaaatgaccagtactatgccagagttaaaccccacctcccgtattgccgaggctatgctgcagacgactactcggcccaaccagacccctaacagcaagcttgttgaggtaaatcctaaatctgaggatgcagggggcgccgagggggaaacccctcacatgctgcttcgaccacatgtctttatgccggaggtaacacccgacatggactacttgcctagggttcccaaccagggcatcattataaacccaatgctgtctgatgagaccaacatttgcaatggcaagccagtggacggcctaacgacactgagaaacggaaccttggtggcattccgcggacactacttctggatgctgtcccccttctcaccaccatcaccggcaaggcgtatcactgaggtgtggggaatcccctcacccatagatacagtctttacaagatgcaactgcgaagggaagactttcttcttcaaggattcccagtattggaggttcactaatgatatcaaagatgccggatatcccaagcctatttttaaaggcttcgggggactgaccggccagatcgtggccgcgctctctacagcaaagtataaaaattggcctgaatctgtttacttctttaaacgcggcggcagtatacaacagtacatttataagcaggagcctgtccaaaagtgtcccggacgtagaccagcacttaattacccagtctacggcgaaacaacccaggtgaggagaagacgattcgagagggcaatagggcctagccagacccacaccatcagaatccaatatagccctgcccggctggcttaccaggataagggggtcctgcacaacgaggtcaaagtgagcatactttggcgaggcttgcctaacgtcgtcactagcgctatttcactcccgaacattcggaaaccggatggctacgactattacgctttctccaaggaccagtactacaacatcgatgtcccctccaggacagctcgagccatcacgacgagaagtggacagactctgtctaaggtgtggtacaactgtccgtag

SEQ ID NO: 201826 - DNA, 3936 bp, synthetic construct
  misc_feature 1..3936: note = Description of Artificial Sequence: Synthetic coding sequence
  source 1..3936: mol_type = other DNA
atggcctggaagaccctgcccatctacctgctgctgctgctgagcgtgttcgtgatccaacaggtgtcctctcaggacctgagctcttgcgccggccgatgtggcgagggctattcacgagatgctacctgtaactgcgattataactgtcagcactacatggagtgctgccctgatttcaagagagtgtgtaccgctgaattgtcgtgtaaaggaagatgcttcgagtctttcgaaagaggaagggagtgcgactgcgatgctcagtgcaaaaaatatgacaagtgctgtccagattacgagagcttctgcgctgaggtgaaggacaacaagaaaaatcgtacaaaaaagaaaccgacccccaaaccccctgtggtcgatgaggcaggttctgggcttgacaatggagatttcaaagtaacaacacccgacacgtccacaacacaacacaacaaagtctccaccagccctaagatcacaaccgctaagcccattaatccacgtcccagccttccgccaaacagcgataccagcaaagaaaccagcctgactgtaaataaagagacaaccgtcgagactaaggagacaactacgacaaataagcagaccagcactgatggtaaagagaagaccacgtctgccaaggaaactcagtccatcgaaaaaacatccgctaaggatctcgcacccacctccaaggtgcttgccaaacccacaccgaaagccgagaccaccactaagggccccgctctcactacccctaaagagcctactcccacgacgcccaaggagcctgcttcaaccactcccaaggagccaactccgaccacaattaaatcggcgcccacaaccccaaaggaacccgcccctactacaaccaagagtgcgcctactactcccaaggaacctgcccccacaacaacgaaagagccagcccctacgactccaaaggagcctgcaccaactacaactaaagaaccagccccaactacaaccaaatcggcacctacaacccccaaggagcccgctccaactacgcctaagaagcctgcacctaccacgccaaaagagccagcacccaccacacccaaagagcccactcctaccactccaaaggaacctgccccaaccactaaggagcctgctcctacaacaccgaaggaacccgcacccactgcaccaaagaagccagcccccaccacgccaaaggagccagcacccacgaccccaaaagaacccgcccccaccactacaaaggaaccatctcctacaacccctaaggaacctgctccaaccactacgaagtcagcccccacaacaactaaagaacctgcccccaccaccactaaaagcgctccgactacgccaaaagagccatctcccacgactacgaaggagccagcacccactactcccaaagagcccgctcccacgaccccaaagaagcctgctcctaccaccccaaaggagccagctcccaccacaccaaaggaacccgccccaactactacaaagaagcctgcccccactactccgaaggaacccgcaccaaccactccaaaagaaaccgctccaaccaccccaaaaaaactcacgcccacaacaccagagaagttggctccgaccacccccgaaaagccggccccgaccacacccgaggaacttgcccccacgacgccagaggagccaaccccaacgactcccgaggagcccgctcctaccaccccaaaagccgcggctcccaatactccaaaggagccggccccgacaactcccaaggagcccgcccccaccactcctaaggagcccgccccgacaacaccaaaagagactgcaccaaccacccctaaaggcaccgctccaactacccttaaggagccagccccaaccacgcccaagaagccagctccgaaggagctggcaccgaccacaaccaaagagcctacatccacaacctgcgacaagccggcacccaccacccccaaaggtacagcccccaccacgcccaaagaaccagccccgactactcctaaggagccggcccctaccacacccaaagggaccgccccaactaccttgaaggagcctgcgccaactacccccaagaagccagcacccaaggagcttgcgccaaccactaccaagggtcccacatcaaccaccagtgataagcccgctccgacaactccaaaagaaacggctcccacaacccctaaggaacccgccccgaccactcctaagaagcccgccccaaccaccccagaaacaccgcctcccactacaagcgaagtcagcacacctaccaccaccaaggaaccaacaaccatacataaaagtccagacgagagcacccctgagttgagtgcagagcctactccgaaagccctggagaatagtcctaaagaaccaggagtgccaaccaccaagacacctgcagccaccaagccagaaatgacgaccaccgccaaggacaaaacaacagagagggacctgcggacaaccccagaaacaacaacggccgcccccaaaatgactaaagaaaccgccacgactactgagaagaccacggagtcaaagatcaccgctaccaccacgcaggtcactagtaccaccacccaagataccacccccttcaagatcactactctgaagaccacaacccttgcccccaaggtcacaactaccaagaagaccatcactaccaccgaaatcatgaataagcctgaagagacggcaaagccgaaggaccgtgccaccaactctaaggcgaccactcccaaaccccagaaaccaacaaaagcccccaaaaaaccaacgtcaaccaaaaaacccaagacgatgcctcgtgtcagaaagcccaagacaactcctacgcctcgcaaaatgaccagtactatgcccgaactgaatcccacctccaggatcgccgaggccatgcttcagaccacaacaagacctaatcaaacaccaaactcaaagctcgtggaggtcaaccccaaaagtgaagacgccgggggcgcagagggcgagacacctcatatgctcctaaggcctcacgtcttcatgccggaggtaacgccagacatggattacctccctcgggtcccaaatcaaggaataattattaatcctatgctgtcagatgagactaatatatgtaacgggaaaccagtggacggactgacaacgctgcgaaacggcaccctggtggcatttcgtgggcactatttttggatgctgtctcccttttcccctccctccccggcaaggcgcatcaccgaagtgtggggtattcctagtccgatcgacaccgtctttacgagatgcaactgcgagggaaaaaccttttttttcaaggacagccaatactggagatttaccaatgacattaaggacgccgggtacccaaagcctatctttaaagggtttggcggcctgaccgggcaaatcgtggcagcgttgtcaactgccaaatacaagaactggccagagtctgtatacttctttaaacgtggggggagcatccagcaatacatctataaacaggagcccgtacagaaatgtccgggccgcaggccagccctcaattatccagtttacggggaaaccacgcaagttcgccgccggcgatttgagcgggccatcggccctagtcagactcataccattaggattcagtattctcccgcacgactcgcctaccaggataaaggcgtactacataatgaagtcaaggtgtcaattctgtggcggggcctacctaacgttgtgacttccgcgataagcctgcctaacataaggaagccagacggctatgattattatgccttctcaaaggaccagtactacaatatcgacgtgcccagccggaccgcccgcgcaatcacaacacggtcgggccagactctgtcaaaagtttggtacaactgtccatag

SEQ ID NO: 201827 - DNA, 4086 bp, synthetic construct
  misc_feature 1..4086: note = Description of Artificial Sequence: Synthetic coding sequence
  source 1..4086: mol_type = other DNA
atggcctggaagaccctgcccatctacctgctgctgctgctgagcgtgtttgtgatccaacaggtgtcatcacaggacctgagctcctgtgccggccggtgtggggaaggttactcccgcgacgctacctgcaactgcgactacaactgtcagcactatatggagtgctgccctgatttcaagcgcgtgtgcacagccgagctcagctgcaagggccggtgcttcgagagttttgaacggggtagagaatgcgactgtgatgcacagtgtaagaaatacgataagtgctgtcctgactacgagagtttctgtgctgaagtgcacaaccccacatctcccccttcaagcaaaaaggccccaccaccctcaggcgcatcccagacaatcaagtctaccacaaaaagaagcccaaagcctcctaataaaaaaaagacaaagaaagttattgaatcagaagagattaccgaagtgaaggataataagaagaatagaacaaagaaaaaacccacccccaaacccccagtggtcgacgaggccggctccggcctggataatggcgatttcaaggtcacaacacctgacaccagtactactcagcataataaagtatcaacctctccaaaaatcactacagcgaaaccaataaatcctcggccctcccttccccctaattctgacactagcaaggaaacatctttaaccgtgaacaaagaaaccactgtagagacaaaagaaaccaccacaaccaacaaacagacctccaccgatgggaaggagaagaccacctcagccaaagaaactcagtcaatcgagaagacatcagccaaagacctagctccaacatccaaagttctggctaaacctacacccaaggccgaaaccactactaagggacccgctcttaccacacctaaagagcctacccctaccacgcctaaagagcccgcatccacgacacctaaagaacctacaccaacaactattaaatctgctccaactacaccaaaggaaccagcacccaccacaacaaaatcagctcccacgacccccaaggagcccgcccctaccaccacaaaggagccagctcccaccacccccaaggaaccggcacctactaccacgaaggaacccgctccaactaccacaaagagcgcccctaccactcctaaagagccggctcctacaactcctaaaaaacccgctccgacgacccctaaggaaccagcccctaccacgcctaaggagccaactcctactaccccaaaggaaccagcccccacgacaaaggagcccgcaccaaccactcccaaagagcctgccccaaccgctcccaaaaaacccgcacctaccactccgaaggaacctgctccaactactcccaaggaacctgcgcccacaacaaccaaagaacccagcccaaccaccccgaaggaaccagcccccaccactacgaagtcggctccaacgaccaccaaagaacctgcacccactactaccaagagtgccccaacaacgcccaaagagccctcacctactacaaccaaagagcccgcaccaaccacccccaaagaacccgctccgaccaccccgaagaaacctgcacctacaacacctaaagaacctgcccccacaactcctaaggaacctgcccctaccactactaagaagcccgctcctacgactcccaaagaacccgccccaaccactccaaaagagactgccccaacaactccgaagaaactgacgcccacaacacccgagaagctcgcaccgacgacaccagagaaacccgcgcctacgacacccgaggagctcgcaccaacaacgcccgaagagccaacccctactacccctgaggaacccgcacccacaactcccaaggccgcagcccctaacactcctaaggaacccgcacctactacccctaaggaaccagcccctactacacctaaggagcccgccccaactactcctaaagagacagctccaaccacacccaaagggactgcgcccacaaccttaaaagaaccagctccaactactccaaagaaaccagctcctaaagaattagcgcctaccacaacgaaagaaccaacgagcacaacctgtgataaaccagcgcccaccaccccaaaaggcacggcgcctaccactccgaaagagcccgcaccaaccactcccaaggaaccagccccaacaacacctaaggggacagccccaacgaccctaaaagagcccgccccaacaactcccaagaagcccgctcctaaagaactggctccgactaccacaaaaggccctacctctactacctccgacaagcccgcccctacaacaccgaaggaaacagcaccgacaacgccaaaagaaccagcacccaccactcccaagaagccagcaccgaccacgcctgagacacctccgcccacaacaagcgaggtctccacccccactactaccaaggaacctacaacaattcataaatctccagatgaatcaactccggagctgtccgccgagcctacaccaaaggctctggaaaactctccaaaggagcctggtgtgccaactactaaaacacccgccgctacaaaacccgaaatgacgacaacggccaaagataagaccactgagcgcgatcttaggacgacaccagaaaccaccactgctgcgccaaagatgactaaggaaacagccacgaccacagaaaaaacaacagagtccaaaataacagcaacaaccactcaagtgacttctacaactacacaggatacaactcccttcaagataaccacattgaagaccaccactctggctcccaaggtgacaaccacaaagaagactatcacaacgaccgaaataatgaataaacccgaggaaaccgcgaagcccaaagaccgggcaaccaactcaaaggccactacgccgaaaccacagaagcctactaaagcgcccaaaaaacccacctctacaaagaagcctaagacaatgcctcgggtgcgtaagcctaaaacgactcccacaccccgcaagatgacctctaccatgccagaattaaatcctacctcaagaatcgctgaagccatgctccagactaccacaagaccaaaccagaccccaaactcaaaactcgtcgaggtcaatccaaagtctgaggatgcaggcggggcggaaggagaaaccccacacatgctgctgcggccacacgtgttcatgccagaggtgaccccagatatggattatcttccacgagtgcctaatcagggtattattataaaccctatgctgtccgatgaaactaacatctgtaatggcaagcccgtagacggcttgactaccctgaggaacggcaccctcgttgcctttagaggtcattatttttggatgctctcccctttcagcccgccatctcccgctcgcaggatcacagaagtgtggggtatacccagcccaatcgacaccgtcttcactagatgtaattgtgaggggaaaaccttcttcttcaaagacagtcagtattggaggtttaccaacgacatcaaagacgcaggttatcccaagcctattttcaagggtttcggcggcctgacaggtcagatagtggcggctttaagtaccgccaagtacaaaaactggccggaaagtgtatatttttttaagcgcgggggctccatacaacagtatatttataagcaggaacccgtccagaagtgcccaggacgccgcccagccctgaattaccctgtgtacggcgagactacacaggtgcgcaggaggcgcttcgagagggcgattggtccatcccaaacccacacgatcaggatccagtattctccagctaggctggcctatcaggataagggggtcctgcataatgaagtgaaagtgagcattttatggcgaggtctcccaaatgtcgttacgtcagcaatatcactgcctaatattagaaagccagacggatatgattactacgcatttagcaaggatcagtactacaacattgacgtcccatcgcggacagcacgggcgattacgacgcgctccgggcaaaccctgagcaaagtgtggtataattgcccatag

SEQ ID NO: 201828 - DNA, 4215 bp, synthetic construct
  misc_feature 1..4215: note = Description of Artificial Sequence: Synthetic coding sequence
  source 1..4215: mol_type = other DNA
atggcctggaagaccctgcccatctacctgctgctgctgctgagcgtctttgtaattcagcaagtgtcctcccaggatttgtcctcctgtgccgggaggtgcggtgagggctactctagggatgccacttgcaactgtgattataattgtcagcattatatggagtgctgccctgactttaagagggtgtgtactgccgagctgtcttgtaaaggtcgctgttttgaaagctttgaacgcgggcgtgagtgcgactgtgatgctcagtgtaagaagtatgacaaatgctgccctgattatgaaagcttttgtgcagaagtgcataatcccacatcgccgccctcatctaagaaggctcccccaccatctggcgcttcgcagaccatcaagtctacaaccaagcgcagcccgaaaccaccaaacaagaagaagacaaagaaggttattgagtcggaggaaattaccgaagagcactccgtgtctgagaaccaggaaagctcctctagtagctcgagtagcagctcctccagcacgatcagaaagatcaagtctagcaagaactctgctgcgaatcgtgagctgcagaagaagctgaaagtcaaagataacaaaaaaaatcgcaccaagaaaaaaccaacgcctaagcctcctgtcgtggacgaagccggatcggggttggacaacggagacttcaaggtgaccacccccgatacatccaccacccagcacaataaggtttcaactagcccaaaaatcacaactgcgaagccaattaaccctcgcccttcactgcctccaaatagtgacacatcaaaggagacatccctgaccgtcaataaggagaccactgtggaaacaaaagagaccacaactactaacaagcagacgtcgaccgatgggaaagagaaaaccaccagcgccaaagagactcagtccatagaaaagacatccgctaaagatctggcccccacaagcaaggtactagcaaagccaactccgaaagctgagacaaccaccaagggccctgccctcacaactcccaaagagcccactccgaccacacccaaggagcctgctagcactacccctaaggaacccactcctacaaccataaagagtgcccccaccactcccaaggagccagcacccaccaccaccaagtcggcccctaccaccccaaaggaaccagccccaactacaactaaagagcccgcccccactacccctaaagaaccagcgcccaccactaccaaagaacccgctcctacaactacaaagtccgctccaacgacccctaaggaaccagcccccaccacccctaaaaaaccagccccgaccactcccaaagaacctgccccaacaacgccaaaagaaccaacccctaccacaccgaaggagcccgcccccaccactaaagagcctgccccaactacacccaaagaacccgctcctaccgcgccaaagaaacctgctccaaccactccaaaggagcctgccccaactacccccaaggagccagctcctacaacaacaaaggaaccgtcacctacaacccccaaagagccagcacccactactaccaagtccgcccccacaacaacaaaagaaccagctcctaccactacaaagtccgcacctaccactcccaaggaaccctcgcctacaaccaccaaggaaccggcaccaacgactccaaaggagcccgctcccaccacccccaaaaagcccgcacccaccacccctaaggagcctgcccccaccacgcccaaagagccagctccaacaactacaaagaagccggctcctacaaccccaaaggagcccgcccctaccacacctaaagagaccgctcccacaactcccaagaaactcacgcccaccactcccgaaaagctggctccaacaacccccgagaagccggcccccaccaccccagaggagctcgccccaaccactcctgaggaacctactcctactacacctgaggaacccgccccaacaactcctaaagcagcagcccctaatacccctaaggagcctgcccccacgactccaaaagaacccgctcccactaccccaaaggaaccggcgcccaccaccccgaaagaaaccgcccctacaacacccaaaggcacagccccaactacactcaaggagcccgccccaaccacacctaagaagcctgcaccaaaggagctcgcccccaccaccacaaaagaaccaacctcaacaacctgtgataaacctgcccccaccacaccaaagggaacagcccccaccacccctaaagagcccgcaccgacaactccaaaggaaccggctcctactactccaaagggcaccgcgcccactacgctgaaggagcccgcccctaccacccccaagaagcctgctcccaaggaactcgcgcccaccactacgaagggaccaacttcaactacatccgacaaacctgcacctaccacacctaaggagacggctccgactacaccaaaagagcctgccccgaccactccgaaaaaacctgctccaactactcctgagactccacccccaactacatcagaagtttccaccccaacaacaaccaaggagccaacaacaatccacaagagtcctgacgagtccacaccagagctttctgccgagccgacacctaaagcacttgagaatagcccaaaggaaccaggagtgcccactacaaaaacccctgccgctacgaagccagagatgacgaccacagcaaaggataaaacaaccgaacgggacctgcgaaccacacctgaaactacaacagccgctcctaagatgactaaggagacggctactacaaccgaaaagacgaccgaatccaagataaccgctaccactacacaggtcacaagcacaacaacacaggacaccacacctttcaaaattactaccttgaaaacaacaacgctggcccccaaggtgacaacaaccaaaaagacaatcaccacaacagaaatcatgaataagcctgaggaaaccgccaaaccaaaagacagagccacaaattccaaggccaccacccccaagccgcagaaacccacaaaggccccaaaaaagccaacatcaactaagaaacccaagacaatgccacgggtgcgcaagccaaagaccactccaactcccaggaagatgacttccacgatgcccgaactgaatcccacctctcgaatcgctgaagccatgcttcagacaaccactcggcctaatcaaacgccgaacagcaagctggtggaagtaaaccccaaaagtgaagacgccggaggagcagagggagaaaccccacacatgctgctaagaccccacgtgttcatgcccgaagtgactcccgacatggactaccttccgcgcgtgcccaaccaagggattattatcaatccaatgctgagtgacgagactaacatctgcaatggcaaaccagtcgacggcctgaccaccctccggaacggtacgctggtggcctttagagggcactacttttggatgctttctccattctcgcccccctctccagctcggaggatcacggaggtttggggaattcccagccccattgatactgtctttacccgatgcaactgtgaagggaaaactttcttctttaaagactcacagtactggaggttcacaaacgacatcaaagacgcaggctatcctaagccaatatttaaaggattcggcgggctgacaggacagatcgttgctgccctatcgactgcgaagtacaaaaattggcccgagagtgtttacttctttaaacgaggtggaagcatccagcaatacatctataagcaggagcccgtgcagaaatgccccggccgtcggccagcgctgaactatccagtgtatggcgaaaccactcaggtgcggcgcaggcggttcgaaagggcaattggaccaagtcagacccacaccatacggatccagtattctcctgccaggctggcctaccaggataagggcgtgctgcataacgaagttaaggttagcatcttgtggcggggtctgcctaacgtggtgacttccgccatcagtctgcctaacattcgtaagccggatggctacgactactatgcctttagtaaggatcaatattacaacattgacgtgccatctagaacagcacgggcaatcactacgcggtctggacagactctgtctaaggtgtggtacaattgcccttag

SEQ ID NO: 201829 - DNA, 834 bp, synthetic construct
  misc_feature 1..834: note = Description of Artificial Sequence: Synthetic coding sequence
  source 1..834: mol_type = other DNA
atgggcctgctggagtgctgcgcccggtgcctggtgggcgcccccttcgcttctctcgttgctactggactgtgctttttcggcgttgccctgttctgtggatgcggacacgaggctctcactgggaccgagaagctgattgaaacctacttcagcaagaattatcaagactacgagtatctgatcaacgtgatccacgcttttcagtatgtcatttacgggactgcaagtttcttctttctctatggtgctctgctgctggctgagggtttttataccaccggtgctgttaggcagattttcggtgactacaaaaccaccatttgcggaaaaggactgtctgcgaccgttaccggggggcaaaaagggaggggcagcagaggtcaacaccaggcccactcactggaacgcgtatgccattgcttagggaaatggctggggcacccggataagttcgtcgggattacgtacgccttgacagtcgtttggctgctggtgtttgcgtgttctgctgtgcctgtgtacatctatttcaatacttggacaacctgccagagtattgcattcccaagcaagacctctgcctcaatcggaagtctatgcgcggatgctagaatgtacggtgtgctgccatggaatgcctttccgggtaaggtgtgtggatccaacctgcttagcatttgtaaaaccgccgagttccagatgacattccacctgttcatcgcagcgttcgtgggcgcagcggccacactggtctctttgctgacctttatgatcgctgctacatataattttgccgtgctgaaacttatgggccgcggcacgaagttctag

SEQ ID NO: 201830 - DNA, 729 bp, synthetic construct
  misc_feature 1..729: note = Description of Artificial Sequence: Synthetic coding sequence
  source 1..729: mol_type = other DNA
atgggcctgctggagtgctgcgcccggtgcctggtgggcgccccctttgcttcactcgtggctactggcctgtgtttttttggggttgctctgttctgcgggtgcggacacgaagccctgacagggacggagaaactgatcgaaacctacttttcaaagaattaccaagactatgagtatttgatcaacgttatccatgcttttcagtacgttatctacggaacagcctcatttttctttctctatggagccctcctcctggccgaggggttctatactacaggtgctgtgcgacagattttcggggactataagaccacaatttgtggcaaaggactgagtgccacatttgtggggatcacctatgctctaactgtggtttggcttctggtgttcgcatgtagtgccgtgccagtttacatttactttaacacttggacaacctgccagtccatcgctttcccctccaaaaccagcgcaagcatcggaagcttatgcgcagatgcccggatgtacggtgttctcccgtggaatgcgttcccaggaaaggtgtgcggtagtaacctgctttcaatctgtaagacggcggaattccagatgacatttcacctgttcatcgccgcattcgtgggggccgccgccacactggtgagtctgctgaccttcatgattgccgctacttacaacttcgcagtcctaaagcttatgggccggggtaccaaattctag

SEQ ID NO: 201831 - DNA, 834 bp, synthetic construct
  misc_feature 1..834: note = Description of Artificial Sequence: Synthetic coding sequence
  source 1..834: mol_type = other DNA
atgggcctgctggagtgctgcgcccggtgcctggtgggcgccccctttgccagcctggtagccacggggctgtgcttttttggcgtggccttgttctgcggctgtgggcacgaagctctgaccggaacagaaaagctcatcgagacttacttctcgaaaaattaccaggactatgagtaccttatcaacgtgattcatgccttccaatatgtgatctacggcaccgcttctttctttttcctgtacggcgccctgttactcgcagaaggtttttacacaactggagcagtgaggcagatcttcggggactacaaaactacaatctgtggaaaggggctgtccgccacagtcacaggtggccagaagggcaggggatcacggggacagcatcaagcacactcattggaacgtgtgtgccattgcctggggaagtggctgggccatcctgataaattcgtaggcattacttatgccctcaccgtagtttggcttctcgtattcgcatgttccgccgtgcctgtgtacatatactttaatacttggactacgtgccagtccatcgctttcccaagcaagacgtctgcttcaatcgggtccttatgtgccgacgcccgaatgtatggagtcctcccctggaacgcattccctggcaaagtgtgtggcagcaacctcctgtccatttgcaaaacagcagagttccagatgacttttcacctcttcatcgctgcatttgtcggggctgccgctactctggtaagtttattgacttttatgattgctgcaacctacaattttgccgtgctgaagctgatgggtagagggactaaattctag

SEQ ID NO: 201832 - DNA, 384 bp, synthetic construct
  misc_feature 1..384: note = Description of Artificial Sequence: Synthetic coding sequence
  source 1..384: mol_type = other DNA
atgggcctgctggagtgctgcgcccggtgcctggtgggcgcccccttcgctagcctcgttgcaaccgggctgtgcttctttggtgtggcactgttttgcggctgtggtcatgaggccctgactgggactgagaaactcatcgagacttatttctctaagaactaccaagattatgaatacctcatcaacgtgattcatgcgtttcagtatgtcatttacggcacagcatcttttttcttcctgtacggggcgcttctcctggccgagggtttttacacgacaggtgccgttagacagattttcggtgattataagacaaccatctgcggcaagggactatccgccaccgtgaccggaggccagaaaggtcggggatctcgctag

SEQ ID NO: 201833 - DNA, 768 bp, synthetic construct
  misc_feature 1..768: note = Description of Artificial Sequence: Synthetic coding sequence
  source 1..768: mol_type = other DNA
atgggcctgctggagtgctgcgcccggtgcctggtgggcgcccccttcgctagcctcgtggccacaggcttgtgcttttttggggtcgcactgttctgtgggtgcggccatgaagctcttaccggtaccgaaaagctgatagaaacctattttagcaagaattaccaggattacgagtatctaattaatgtgatccacgcctttcagtacgtgatatatggcacagcaagctttttttttctgtatggcgctctcctgttggccgagggcttctatacaaccggcgcagtcagacagaagggccgcggctcaagggggcaacaccaagcccactctctcgaacgcgtatgccactgcctcgggaagtggctgggccaccccgacaagttcgtagggatcacatatgctctgaccgtggtctggctcctggtttttgcatgcagcgcagttccagtgtacatctacttcaatacatggacaacctgccaaagcatcgcctttccatctaagactagcgcttccattgggtccctgtgtgctgacgcccgcatgtatggcgtgctgccctggaacgcgttcccaggcaaggtctgtggttctaacctgctctccatctgtaaaacagctgagttccagatgacctttcatctctttattgccgccttcgttggagcagcagcaacactggtgagcctgctgactttcatgatcgccgctacgtacaatttcgccgtgctgaaactgatgggccgcggaacgaaattttag

SEQ ID NO: 201834 - DNA, 414 bp, synthetic construct
  misc_feature 1..414: note = Description of Artificial Sequence: Synthetic coding sequence
  source 1..414: mol_type = other DNA
atgggcctgctggagtgctgcgcccggtgcctggtgggcgcccccttcgcaagtttggtggccacaggtctatgcttctttggggtggcgctgttctgcggttgcggacacgaggccctgaccggcacagagaaattaattgagacctacttttccaaaaattatcaggactacgagtatctgattaatgtgattcacgcttttcaatatgtgatttacggcactgcttcgtttttctttttatatggcgccctgttactggccgaaggcttctacaccacgggtgcagtgcgccagattttcggcgattataagactaccatctgtggcaaagggcttagcgccaccgtcacagggggacagaaagggcgaggctcccggggccagcatcaggcccactccttagaaaggtag

SEQ ID NO: 201835 - DNA, 303 bp, synthetic construct
  misc_feature 1..303: note = Description of Artificial Sequence: Synthetic coding sequence
  source 1..303: mol_type = other DNA
atgggcctgctggagtgctgcgcccggtgcctggtgggcgcccccttcgcttcactggtagcaaccggcctttgcttctttggggttgcgctgttttgtggttgcggccacgaagctctgaccggcactgagaaattgattgaaacttatttttcaaagaattatcaagactatgagtatttaatcaatgtaatccacgcctttcagtacgtaatctatggcactgcatcatttttctttctgtatggtgccctcctgttggctgaagggttttatacaacaggggctgtacgccagatctag

SEQ ID NO: 201836 - DNA, 372 bp, synthetic construct
  misc_feature 1..372: note = Description of Artificial Sequence: Synthetic coding sequence
  source 1..372: mol_type = other DNA
atgggcctgctggagtgctgcgcccggtgcctggtgggcgcccccttcgccagcctggtggcaaccggattatgcttcttcggcgtggcgttgttctgcggatgcggccatgaggccctgacaggaacagagaaattgatagaaacatatttcagcaaaaattatcaagattatgaatatttgattaatgtaattcacgccttccagtacgtgatctatggaacagcatctttttttttcttatacggcgcccttctcctcgcggagggtttctacactactggagcagtgcgtcaaatcttcggagactacaaaactactatatgcggcaaaggactctctgctaccgtgacaggagggcagaaggggtag

SEQ ID NO: 201837 - DNA, 339 bp, synthetic construct
  misc_feature 1..339: note = Description of Artificial Sequence: Synthetic coding sequence
  source 1..339: mol_type = other DNA
atgggcctgctggagtgctgcgcccggtgcctggtgggcgcccccttcgccagcttggtcgccacaggcctatgcttcttcggcgtggccctgttttgcggatgtggacatgaggccctgaccggaaccgagaagctaatcgagacgtatttttctaagaattaccaggactatgagtatctcatcaatgtgattcacgcttttcagtacgtaatctacgggaccgccagcttcttcttcctgtatggcgcgctgctcttggccgaaggcttctacacaacaggtgctgtgcgccaaatattcggcgactacaagacaactatctgtggcaagggatag

SEQ ID NO: 201838 - DNA, 411 bp, synthetic construct
  misc_feature 1..411: note = Description of Artificial Sequence: Synthetic coding sequence
  source 1..411: mol_type = other DNA
atgggcctgctggagtgctgcgcccggtgcctggtgggcgccccctttgcgtcgctggtggctacaggtctgtgttttttcggtgtagcgctgttctgtggatgtgggcatgaagccctgaccggcacagaaaagctcattgaaacctacttctctaaaaactaccaagattatgagtatttgattaacgtcattcatgcatttcagtacgtcatctatgggacagccagtttcttttttctgtacggggccctgctattggctgaaggcttctacaccacgggggccgttcggcagattttcggggattataaaaccacgatttgtgggaagggactcagcgccacagtgaccggagggcagaaaggtagaggctcccgcggccaacaccaggctcattctctggagtag

SEQ ID NO: 201839 - DNA, 438 bp, synthetic construct
  misc_feature 1..438: note = Description of Artificial Sequence: Synthetic coding sequence
  source 1..438: mol_type = other DNA
atggccgacagcgagcggctgagcgcccccggctgctgggccgcctgcaccaatttttccagaactcgcaaggggattctgctctttgcggaaattatcctttgcctggtcattctgatatgcttcagcgcgtctactcccggttactcttctctgagcgtcatagagatgattttggcggccatattcttcgtcgtgtacatgtgtgacctgcacaccaaaatcccatttataaactggccctggtctgatttctttcgtaccttaattgcagctatactttaccttattacatccattgttgtgcttgtcgagcgggggaaccactccaaaattgtggcaggtgtcaaggcaatgggcgcggcactaaagcaccgcgccaagggtctgaggagccagggaccttttctgcccctgctgctcgccgagattgtatag

SEQ ID NO: 201840 - DNA, 459 bp, synthetic construct
  misc_feature 1..459: note = Description of Artificial Sequence: Synthetic coding sequence
  source 1..459: mol_type = other DNA
atggccgacagcgagcggctgagcgcccccggctgctgggccgcctgcaccaactttagccggacacgcaaaggaatcctactgttcgcggagataattctttgcttagttatcctcatttgcttcagcgcttccacccccggatatagcagccttagtgtaattgaaatgattcttgctgccatcttttttgtggtttacatgtgcgacctgcacacgaaaatcccctttatcaattggccttggagtgacttctttagaactttaatcgccgccatcctgtatttgataacttccatcgtggtcttggtggagcgtgggaatcatagtaaaatcgtcgctggcgtgttggggttgatcgcaacctgtttgttcgggtatgatgcttacgtgaccttccccgtgagacagcctagacatacggcagcccccaccgacccagcagatggtcccgtctag

SEQ ID NO: 201841 - DNA, 336 bp, synthetic construct
  misc_feature 1..336: note = Description of Artificial Sequence: Synthetic coding sequence
  source 1..336: mol_type = other DNA
atgagcgacgccgccgtggacaccagcagcgagatcaccaccaaggatctgaaagagaaaaaggaagtggtggaggaggcggagaatggcagagacgctcctgcgaatggaaacgccgagaatgaagaaaacggggagcaggaagctgacaatgaggtcgacgaggaggaggaggagggaggagaggaggaggaggaagaggaggaaggagatggggaagaagaagacggtgacgaggacgaagaagcggaaagcgctaccggtaaaagagccgcggaggatgacgaggacgacgatgtggacaccaaaaagcaaaaaacagatgaagacgattag

SEQ ID NO: 201842 - DNA, 408 bp, synthetic construct
  misc_feature 1..408: note = Description of Artificial Sequence: Synthetic coding sequence
  source 1..408: mol_type = other DNA
atgcagaccttcggccccgccggcgtggccgccgtgggccggcgggtagagtcgccagccgatcgaagggcgacgagggcttgccactgcaagctgtgcctgcctgcaggctcactgcaaggcctaaagggagaagaaggaagtgtcgaggaggctgagaatgggcgtgacgcgcctgccaatggtaacgccaatgaagaaaatggtgagcaggaggcagacaatgaggtggatgaagaagaagaggaagggggtgaggaagaggaagaagaggaagaaggcgacggtgaagaagaggatggggatgaggatgaagaggctgagagtgccactggtaaaagggccgccgaggacgatgaggacgatgacgtggatacaaagaagcagaagaccgatgaagatgactag

SEQ ID NO: 201843 - DNA, 333 bp, synthetic construct
  misc_feature 1..333: note = Description of Artificial Sequence: Synthetic coding sequence
  source 1..333: mol_type = other DNA
atgagcgacgccgccgtggacaccagcagcgagatcaccaccaaggacctgaaggaaaagaaggaggtggtcgaggaggccgagaatggacgtgatgctccggcaaatgggaacgctaatgaggaaaacggcgagcaggaagcagataacgaggtggatgaggaagaggaagaagggggagaggaggaagaagaggaagaggagggagacggagaggaagaagatggcgatgaagacgaagaggcagaatctgcaactggtaagcgcgccgccgaagacgacgaggacgatgacgtggacactaagaaacagaagactgatgaggacgactag

SEQ ID NO: 201844 - DNA, 3714 bp, synthetic construct
  misc_feature 1..3714: note = Description of Artificial Sequence: Synthetic coding sequence
  source 1..3714: mol_type = other DNA
atggacagcggcgccggcggccggcggtgccccgaggccgccctgcttattcttgggccaccccgaatggaacacctccgccactctccaggacccggcggtcagcgacttctgttaccatcgatgctcttagccttgctgcttctactggcaccatcccccggccatgcaacacgggtcgtgtataaagtgcctgaagaacaacctcccaataccctcattggaagcttggctgccgattacggttttcccgatgtaggccacctatacaaattagaagtgggcgcaccatacctgagggtggatggcaagacaggcgacatctttaccaccgagacctctatcgaccgagaaggcttacgcgagtgtcagaatcagcttcccggtgatccatgcatattggagtttgaagttagcattaccgacctcgtacaaaacggctctccacggctcctcgagggccaaatcgaggtgcaggatatcaacgataatacacccaatttcgcctccccggttattaccctcgctattcccgaaaatactaacattggcagcttgtttcctataccactggccagtgacagagatgccggcccgaacggtgtggctagctatgagctgcaagccggccctgaagcacaagagctgttcggcttgcaggtggccgaagatcaagaagagaagcagccgcagctgatagtgatgggcaacctcgatagagaacgctgggatagttatgacctgacaatcaaggtgcaggatggcgggagccctccaagggcaagctcagctctcctgcgggtcactgttctagatactaacgataacgcccctaaatttgagagacccagttacgaggctgagctgtctgagaattcccctattggacactctgtgatccaggtgaaggctaacgactctgaccaaggagccaacgcggaaatcgagtacacctttcaccaggcacccgaggtggtcaggcgcctgctgcgccttgaccgcaatacaggactcatcacagtgcaaggaccagtagatcgggaggacctttctacacttcggtttagcgtgctggcaaaggatcgcggaacaaatcctaaatccgcgcgggcccaggtagtggtgactgtgaaggatatgaatgacaacgcacctacaatagaaatacgcggtataggcctggtgacccaccaggatggcatggctaatataagtgaggatgttgccgaggagactgctgtcgctctggtacaggtatccgacagggatgaaggagagaatgctgccgtaacatgtgttgtcgcgggcgatgtaccttttcagctcaggcaggccagtgaaacaggctccgattcaaaaaaaaagtatttcctgcaaaccaccactcctctggactatgagaaggtcaaagattatacaattgagatagtagcagtggactctggcaatccgcctctgtcgagcacaaactcccttaaggtacaagtggtggacgtgaatgataacgctccagtatttacccagtcagttactgaggtcgcgtttccagagaataacaagccaggggaagtgatcgctgagatcaccgcctcagacgcagattctggctcgaacgccgaacttgtgtattctctcgagcccgagccagccgctaaaggactgttcacaatctctcccgagaccggcgagatccaggtgaagacaagcctagacagggagcagagagagagctacgagctcaaagtcgtcgccgccgatcgcggatccccaagccttcaaggcaccgccactgttttagtgaacgtgctggattgcaacgataatgacccaaagttcatgctctctggctacaacttctcggtcatggaaaacatgccagccctcagtcctgtgggcatggtgactgtaatagacggggataaaggtgaaaacgcccaggttcagctcagcgttgagcaggacaacggagactttgtgatacaaaatgggacagggacgatcctgtcgagtctgtctttcgatcgagaacaacaatctacgtacacgttccagctaaaggctgtcgatgggggcgttcctccccgatctgcctacgtgggagttaccattaacgttcttgatgagaatgacaacgcaccatacattaccgcaccctcaaatacatcgcataagctactgacacctcaaacacggctgggagaaacagtgtcgcaggtggcagctgaggattttgactccggggtcaacgctgagcttatatattctatcgccggagggaacccatacggcctcttccagatcggctcgcactctggcgctatcactcttgagaaagagatcgagcgtagacaccacggactccacaggctggtggtgaaagtatccgaccgtggaaagccaccacgatacggcacagcgctcgtacacttatatgtcaacgagaccctggcaaatcggacacttctggaaaccttgctaggccactcactcgacactcctctcgatattgacatagccggtgatcccgaatatgagaggagcaagcagcgtggtaatattttgtttggcgtggtagctggggtggtcgcagtcgcattgctgatagctctcgccgtgttagtgcggtactgtagacaaagggaggccaaatccggctatcaggccggcaagaaagaaacaaaggacctgtacgcgccgaaacccagcggaaaagcctccaaggggaacaaatctaagggaaaaaaatcgaaatctcccaagcccgttaagcctgtggaagatgaggacgaagccggtctccaaaagtcactgaaattcaatttaatgagcgacgctcctggagacagccctcgcatccacctgccactgaattatccgccaggctctccagatctgggtagacactatcgttcaaacagcccgctcccctcgatacagctgcaaccccagtcgccctcagcctcaaaaaaacaccaagtggtgcaagatctgcctcccgccaacacttttgtggggacaggggatactacctcgacggggagtgaacagtacagtgactacagttacaggacgaacccaccaaaatatcctagcaagcagctcccgcatcgacgtgtcacgttttcagctaccagtcaggcccaagaactgcaggaccccagtcaacactcctactatgatagcgggttggaagagagcgaaacacccagctccaaatccagctctggcccccgtctcggccccctggctctcccggaagaccactacgagcgcacaacccccgacggcagcatcggggaaatggagcatccggagaatgaccttcgacctctgccggatgttgccatgaccggaacatgcaccagagaatgctccgagttcggacatagtgacacctgctggatgccaggacaaagctccccctccaggcgcaccaaaagctccgcactgaagctgtccactttcgtgccatatcaggatcgtggcggacaggagccggcaggagcggggtctccatcccccccagaggatagaaacaccaagacagctccggtgcggctacttccttcctattcagctttctctcattcaagccacgacagctgcaaagatagtgcaacattggaggagatacccctcactcagacatctgactttccccccgctgccacccccgcatcagcccaaactgccaaacgggaaatctacctctag

SEQ ID NO: 201845 - DNA, 3183 bp, synthetic construct
  misc_feature 1..3183: note = Description of Artificial Sequence: Synthetic coding sequence
  source 1..3183: mol_type = other DNA
atggacagcggcgccggcggccggcggtgccccgaggccgccctgctaatactggggcctccacgaatggagcatctcagacactctcctggccctgggggccagcgtctcttgctcccatctatgctcttggcactgctgctgctactggcaccttccccgggccacgccacccgggtggtgtacaaggtgccagaggaacagcccccaaacacgctgattggttctctggcagctgattacggctttcctgatgtcggacacctctacaaactcgaagtcggggcaccatacctcagggtagatggaaagaccggggacatttttacaaccgagacatccatcgacagggagggactcagagagtgtcagaatcaactgcccggtgatccgtgcattctggaatttgaggtttccattactgatcttgtgcagaatgggagccctcgactattggaggggcagatcgaggttcaggacattaatgacaatacgccaaatttcgcatctcctgtcataactttggcaatccccgagaacacaaacattgggtctctctttcctatacctctggcatccgaccgcgacgctggccctaatggcgtcgctagctatgagcttcaggctggtccagaagctcaggagctgttcgggctgcaggtcgctgaagatcaagaggaaaagcaacctcagctcatcgtaatgggtaatctggatcgggagagatgggacagttatgacttgaccataaaagtgcaggacggcggctcaccgccacgagcctcatcggccctgttgcgcgttaccgtcctagacaccaatgacaatgcccctaagtttgagagaccttcatatgaggccgaactctccgaaaatagtcctatcggtcacagtgtcattcaggttaaggctaatgatagcgaccagggcgcaaatgctgagatagagtatacctttcaccaagcacctgaagtggtgaggcgactacttcgtctcgatcgtaacaccggcttaattaccgtgcaaggaccagttgacagagaggacctttctactttgcgcttctctgtcctggccaaggatcgagggactaaccctaagagcgcccgggctcaggttgtggtgactgtgaaagacatgaacgacaacgctcccaccatcgaaattagaggcattggcctggtgacccatcaggacgggatggctaatattagcgaggatgtggctgaggaaacggctgtggctttggtccaagtgtccgaccgggacgagggggagaatgccgccgtgacatgtgttgtagccggggatgtgccctttcagctgaggcaagctagcgaaaccggctccgatagtaaaaagaaatactttttacagactaccacccccttggattatgagaaggtgaaggactataccattgagattgtggctgtcgactctgggaatcccccactttcaagcacaaattcattaaaagttcaggtggtggatgtcaacgataatgcgcccgtgttcacccagagtgtcaccgaggtggcgtttcccgagaataacaagcctggggaggtgatcgccgagataaccgccagtgatgcagatagcggttctaacgctgagctggtgtattccttggagccagaaccagcagctaagggcctgtttactatatcaccagaaaccggagaaattcaggtgaaaaccagcttagaccgcgaacagagagagtcatatgaattgaaggttgtggctgccgatagaggatctccctccttgcagggaaccgctactgtgcttgtgaatgtgctggactgtaatgacaacgatccaaaattcatgctaagcggttacaactttagtgttatggagaacatgcccgcactatcccccgtgggtatggtaactgtaattgatggggataagggggagaacgcccaggtacaactgtcggtggaacaagacaacggagacttcgtgatccagaatggcacgggcaccattctctcctcactctcttttgaccgggagcagcaaagtacctacacctttcagttaaaggccgtggatggaggggtcccccctcgctctgcgtatgtgggagtcacgattaacgtcctggatgaaaacgacaacgcaccctacatcaccgccccgtctaatacctcacacaaactgctgactccccaaacaaggctcggcgagaccgtcagtcaggttgccgccgaggatttcgactcgggagtgaatgctgaattgatctattccattgccggcggtaacccatacggcttgttccagatcggatctcactctggggccatcactcttgagaaggaaattgagcgcagacatcacggtctgcatcggctagtggtcaaagtgtcagacagggggaagcccccgaggtatggaacagcactggtccacctgtacgtgaatgagacactggcaaatcgcaccctgctagaaacactcctcggccactcactggataccccacttgacattgatattgcgggagatcccgaatacgaaaggtctaagcaacggggcaacatcctatttggggttgtggctggcgtcgtggcggtggcacttctgatcgcactcgcggtactagtgcggtattgtagacagagagaggctaagtctggttaccaggctgggaaaaaagaaacaaaagacctctacgccccgaagccgagcggaaaagcatcaaaggggaacaagagcaagggcaagaaatctaagagccctaaaccggttaaaccagtggaggatgaagacgaggccggactccagaaaagcttgaaattcaatctcatgagtgacgcgccaggggattctcccaggatacacctgcccctgaattatccacctggaagccctgatctagggagacactaccggagtaactctccattgccatctatccagctgcaaccgcagtctcctagcgcaagcaaaaagcaccaggtggtccaagatctgccccccgcaaacacatttgtgggtactggagacactacctccaccggcagcgaacaatatagtgattactcctatagaacaaaccctccgaagtacccgtcaaaacaagttggacagcccttccagttatccaccccccagcccctcccccatccctatcatggagccatttggacggaagtttgggagtag

SEQ ID NO: 201846 - DNA, 3147 bp, synthetic construct
  misc_feature 1..3147: note = Description of Artificial Sequence: Synthetic coding sequence
  source 1..3147: mol_type = other DNA
atggacagcggcgccggcggccggcggtgccccgaggccgccctgctgattttgggaccccctcgcatggagcatcttcggcatagccccggaccaggcggtcagagactgttgctgccatccatgctcctcgcactgctgcttctgctcgccccgagcccaggtcacgctacacgcgtggtttacaaagtaccggaagaacaacccccaaatacactcatcgggtctctggctgccgactacggctttcccgatgtgggacacttatataagctggaagtgggggcgccttacctgagggtggatggaaaaacgggtgatatctttacaactgaaacaagtatagaccgagagggactaagagagtgtcagaatcagctgcccggcgatccatgtatcctcgaatttgaggtttccatcacagatctagtgcagaatgggtctccacgcctgctggagggtcagatcgaagtgcaagacatcaatgacaacacccccaatttcgcaagcccagttatcactctcgccatccctgagaacacaaatataggaagtctctttcccatacccctggccagcgacagagatgcgggcccgaatggcgtagcatcatacgagcttcaggtggccgaggatcaggaagagaagcagccccagttgatagtgatggggaacctggatcgggaacggtgggacagctatgatctcacgatcaaggtgcaggatggggggtcccccccacgtgccagttcagcccttttaagagtaacagtcttagatacaaacgacaatgcccccaagttcgaacgaccaagttacgaggcagaactctctgagaactcccccattggccactctgtgattcaggtcaaggccaacgattcagaccagggcgcaaatgctgaaattgagtacaccttccatcaggctcccgaggtcgttagacgtctcctccgcctggatcgcaataccggcctcatcactgtgcagggtccggttgatcgtgaagatctctcgaccctcagattctcagtgttggcaaaagatcgggggacgaaccccaaatctgctcgggctcaggtggttgtcacagttaaagatatgaatgataacgctcccacaatcgaaatccggggaatcggactcgttactcaccaagatgggatggccaatatcagcgaggacgtcgctgaggagacggcagtggcccttgttcaggtgtccgacagagacgaaggggaaaacgcagccgtgacctgtgtggttgcgggagacgtcccatttcaactcagacaggcatcagagaccggttcagactcgaaaaaaaagtatttcctgcagaccaccactcctttagattacgagaaagtgaaggattacaccatagaaatcgtggccgtggatagcggtaacccacccctctcctccacaaatagcctgaaggtgcaggtggttgatgttaacgacaacgcccctgtgtttacgcagtctgtgaccgaagttgcattcccagagaacaacaaacctggggaggtgatagccgagattactgcctctgacgccgatagtggctcaaacgccgaattggtctattctctggagcccgagcccgccgccaaaggactcttcaccatctctccggaaaccggcgagatacaggtaaaaactagcctagatcgggaacaacgggagtcctatgagctaaaggtggtcgctgccgatcggggatctccatctctccaggggaccgctactgtccttgtcaatgttctcgactgcaacgacaacgaccctaagttcatgctatccggttataatttttccgttatggaaaatatgccggccctgagtcccgtgggtatggtgacagtgatcgatggggataagggtgaaaatgctcaggtccagctgtctgtagagcaagataacggggactttgtcatacagaacggcacagggactatcctaagcagtttaagctttgatagagagcaacaatctacctacacattccagctgaaggctgtcgacggaggagtgccgccacgaagtgcttacgtgggggtaacaattaatgtcttggatgagaacgacaacgccccctatattaccgccccaagcaacactagtcataagctgctgactccacagaccaggctgggcgaaactgtgtctcaggtggccgctgaagattttgacagcggcgttaatgccgaacttatttactccattgcagggggaaacccttacggcttgttccaaattggatcccacagtggggctataacacttgagaaggagatcgaaaggcggcaccatgggctccatcgactggttgtcaaggtgtcagatcgggggaaacctcctcgctacggaaccgccctggtgcacctatacgtgaatgaaaccctggctaatcgcactctgctggaaacactgctaggacatagcttggatacaccactggatattgacatcgcgggggacccagagtatgaaagatcgaaacagagaggaaatatcctgttcggggtggtcgctggagtggttgcagtggccctgcttatcgcgctggctgttttggtgcgctattgccgccagagagaggctaaaagcggatatcaagcaggcaagaaagagactaaggacctgtacgcccccaagcccagcggcaaggcatccaagggaaataagtcaaagggtaaaaagagcaaaagtccaaagccagtaaagcccgtggaggacgaagatgaggctgggttacaaaaatcgttgaaatttaatctgatgtccgacgcacctggcgacagtccaagaatccatttaccattgaactacccaccagggtcccccgacctcggcaggcattaccgttcaaacagtcctcttcctagtatacaactgcagcctcagtccccaagtgcaagtaaaaaacatcaggtggtgcaggatctgccccctgctaatacctttgttggcaccggcgatactacttccactggatccgagcagtattccgattacagctatcgtacaaatccgcctaagtatccaagcaagcaggtagggcagccttttcagctgtctaccccacagcctctacctcacccataccacggcgcaatttggaccgaggtgtgggaatag

SEQ ID NO: 201847 - DNA, 3117 bp, synthetic construct
  misc_feature 1..3117: note = Description of Artificial Sequence: Synthetic coding sequence
  source 1..3117: mol_type = other DNA
atggagcacctgcggcacagccccggccccggcggccagcggctgcttctaccctcaatgctgctcgccctgctcttgctgctggctccttctcctgggcacgctactagggtggtttataaggtgcctgaagagcagccacccaatacgttaatcggcagcttggccgctgactatggtttccctgacgtgggccatctgtacaagctggaggttggcgctccgtatctgcgggtagacggcaagaccggcgacatcttcacgactgagaccagcatcgatcgcgagggtctccgggagtgtcagaatcagctgcccggagatccttgcatcctagagtttgaggtctccattacagatctagtccagaatggatctccacgcctcctcgaaggacagatagaagtgcaagacatcaacgacaacactccaaatttcgcttcacccgttattacacttgctatacctgaaaataccaatattgggagtcttttccctatacctttggctagcgaccgcgatgccggccccaacggagtggcttcatacgagcttcaagccgggcccgaggctcaagaactgtttggactacaggtggcagaggatcaggaagagaagcagccacaactcattgtgatgggcaacctggatagagagagatgggacagctacgacttgaccattaaggtgcaggacggtggatccccccccagggcttcctcagccctgctgcgagttaccgtgctcgacaccaacgataatgcacccaagttcgagaggccatcttacgaggccgaactctctgaaaattcccccataggccactctgtaatccaagtgaaggcgaacgactccgaccagggcgcaaatgccgagatagaatatacatttcaccaggccccagaggtggtccgcaggctgttgcggctggatcgcaataccggactaatcactgtgcagggacccgtcgacagggaagatttgagtactctgaggttcagcgtgcttgccaaagatagggggaccaatcccaagtcagcccgcgcacaggtggttgtcacagtgaaggatatgaacgataatgctcctacaatagaaatcaggggcatcggcctggttacccaccaagatgggatggccaatatcagtgaagacgtggctgaagagactgctgttgccctggtgcaagtgtctgaccgggacgaaggagagaatgcagcagtgacatgcgtggtggcaggtgatgtacccttccaactgagacaggctagtgaaactggcagcgactccaaaaagaaatacttcctccagactacgacaccacttgattatgagaaagtaaaggattataccatagaaatagtcgcggtcgattccggtaaccctcctttgtcctccactaactctctgaaggtgcaagttgtagatgtcaacgataacgctcccgtgttcactcagtccgttaccgaggtggcgtttccagaaaacaacaagcccggcgaagtcatcgccgagattaccgcctctgacgctgattccggcagcaatgccgagttggtgtacagcctcgaacctgagccagcagccaagggcctctttactatatcacctgagaccggcgaaatccaggtgaagacctccctagatcgggaacagcgggaatcctacgagctgaaagtcgtggctgctgaccgcggttcccctagcttgcagggaaccgctaccgtcttagtgaatgtgttggattgtaacgacaatgaccctaagtttatgctgtctggatacaatttttctgtgatggagaacatgccagccctctcacccgtgggtatggtcacagttatcgacggcgacaaaggtgaaaatgctcaggtccagctctccgtggaacaagacaatggcgattttgtgatccagaacggaacaggaacaattcttagctcattgtcatttgaccgggaacagcagtccacctacacgtttcagctgaaggcagtggatggaggagtgccgccccggtctgcttatgtcggagtgacgatcaatgtgttagacgagaacgataacgccccatacataacagccccgagcaacacatcccataagctgctcacacctcagactcgtctcggcgaaacagtctcccaggtagcagccgaggattttgatagtggagttaacgccgagttgatttactcgattgcagggggaaacccatacgggttgttccagatcggctctcattccggggccatcactctggagaaagagattgaacggcgccaccacggtctccataggctcgtggtgaaggtcagcgatcgtggcaagcccccccgatatggtaccgctctcgtccacttgtacgtgaacgaaactctcgcaaaccgcacccttcttgagactctgttgggacacagtctggacacaccacttgacatcgatatcgcaggtgatcccgagtatgaaaggtcaaagcagcggggaaacattttatttggcgtcgtagcgggcgttgtcgcagtagccctcttgatcgcccttgctgtgttggtccgatattgccgccagcgggaggccaaaagtggttaccaggccggaaaaaaggagacaaaggatctttacgcacctaaaccttccggcaaggcatcaaaagggaacaaatctaagggtaagaagagtaagtctcctaaaccggtgaaaccggtggaagatgaggacgaggcaggtttgcagaagtctctcaaattcaaccttatgagcgacgcccccggcgatagcccccgaattcacctcccgctgaactatccacccggctcccctgaccttgggcgccattaccgatctaacagtcctctgccttcaatccagctccaaccccagtccccatcggcctctaagaaacatcaggtcgtgcaggacttgccccctgcgaataccttcgtggggaccggtgacactaccagtacaggctctgagcagtatagtgactattcctacagaaccaacccccctaagtacccgtccaagcaggttggccagccgtttcagttgtctactccacagcctttaccgcatccctaccatggagctatctggactgaggtctgggagtag

SEQ ID NO: 201848 - DNA, 3123 bp, synthetic construct
  misc_feature 1..3123: note = Description of Artificial Sequence: Synthetic coding sequence
  source 1..3123: mol_type = other DNA
atgatcgtgctgctgctgttcgccctgctgtggatggtggagggcgtgttcagccagcttcattacactgttcaggaagaacaggaacacggaactttcgtcggaaatatagctgaggatctgggattggatatcacaaaactgtcagcacgtggattccagactgtgcccaattctcgaacgccgtatttagacctgaatcttgaaacaggcgtcctgtatgttaatgagaagatcgaccgtgaacaaatttgtaaacagagtccaagctgtgtcctgcatctggaggtgttcctggagaacccgcttgagctgtttcaggtggaaattgaggtgcttgatattaacgataaccccccttcctttcccgagcccgacttaacagtcgagatttctgagagcgctacccctggaactcgcttccctctggagagcgcttttgatcccgacgtcggcacaaactctctgcgagactacgagatcacgcctaattcctatttctcactggacgtgcagacccaaggagatggcaatcgatttgcggaactcgttttggagaagccgttagaccgggaacaacaagctgtgcaccgctatgtgctaaccgccgttgacggtggaggaggtggaggcgtgggggaaggcggcggaggagggggcggggccggactcccaccacagcagcagcgcaccggtacagccctcctcaccattcgagtcctggactcaaatgataatgtgccagcttttgaccagccagtgtacaccgtgtctctaccagaaaactcacctccagggaccctcgtgatccagctaaacgccacggacccagatgaaggccaaaacggagaagtcgtgtacagctttagcagtcacatttctccacgggcccgtgagctgtttggcctgtccccccggactgggcggctggaagtctctggcgaacttgattacgaggagagccccgtgtatcaagtatacgttcaggcgaaggatctgggacccaatgccgtgcccgcccattgcaaggtgctggtacgcgtcctcgacgccaacgacaacgccccagagatttctttcagcactgtcaaggaggctgttagtgagggagcggcacctggcacggtggtggccctgtttagcgtgactgatagagacagcgaggagaacggtcaggttcagtgcgaattactgggcgacgttccatttcggcttaaaagctcttttaagaattactacacgatcgttaccgaggccccccttgatcgggaggcaggggattcttataccctgaccgtggttgcccgagaccggggggaaccagcactcagcacctctaagtccatacaagtgcaggtgagcgatgtgaacgacaacgcccctcgattttctcaacctgtctacgatgtgtacgtgacagagaacaacgttcccggtgcatacatatatgccgtctcagctactgaccgggacgaaggcgctaatgcccagctcgcatatagtatcctcgaatgccaaatacagggaatgtccgtatttacttacgtctcaattaactcagaaaacggctatctctacgctctgaggtctttcgactacgaacaattgaaggatttcagcttccaggtggaagcccgggacgcaggatcgcctcaagccctcgccggaaacgctaccgtgaacattctcattgtcgaccagaatgacaatgccccagctatcgtcgcccccttacctggacggaacgggacccccgctcgggaagtgctgccacggagtgcggagcctggttatctgctgacccgggtcgcggcggttgacgcagatgacggagagaatgccagactgacatattccatcgttcggggcaatgagatgaatctgttccggatggactggcgaactggcgagctgcgcacagctcggcgggtccctgcaaagagggatccacaacgcccgtacgagctggtgatagaggtgagagatcatggtcagcctccattgtccagtacagcaactctggtggtccagctcgttgatggagcagttgagcctcaaggcgggggggggtctggtgggggaggctctggggaacatcagcgcccatcccgctcaggcggaggcgagacttccctagatcttacacttattctgattatcgccctggggtcagtgtcattcatcttcttgctcgctatgatcgtccttgcggtgcgatgtcagaaagagaaaaaacttaacatctacacttgcttggccagtgactgttgcttgtgctgctgttgctgcggaggggggggaagtacctgctgcgggcggcaggctagggcaagaaaaaagaaactgagcaaaagcgatatcatgctggtgcaatcgagtaatgttccctcaaaccccgcacaagttcctattgaggaaagtgggggattcgggtcccaccatcacaaccagaactactgctaccaggtgtgccttacccctgagtcagctaaaacggatctgatgtttctcaaaccttgtagcccgtcccgcagcaccgatactgaacataacccttgcggcgctattgtgaccggttacacggaccagcagcctgacatcatcagcaacggtagtatcctctcaaacgaaactaaacaccagcgtgcggaattgtcctatctcgtcgaccggcctaggagggttaacagttcagcattccaggaagcggatatcgtctcatccaaagatagcgggcatggcgactccgaacaaggcgactcagatcatgatgccaccaacagggcacaatctgccgggatggatctgtttagcaactgtaccgaagaatgtaaagcactgggtcatagcgatcgatgctggatgccctcttttgtgcccagtgatggacgacaggcggctgattacagaagcaacttacatgtgcctggaatggactctgtccccgacactgaagttttcgagaccccagaagctcagcctggcgccgagagatcgttttccacttttgggaaggagaaggctttacacagcacgctggaacgaaaggagctggatggactactgactaatactcgggcgccttacaaacctccatacctgactcggaaaagaatttgctag

SEQ ID NO: 201849 - DNA, 3123 bp, synthetic construct
  misc_feature 1..3123: note = Description of Artificial Sequence: Synthetic coding sequence
  source 1..3123: mol_type = other DNA
atgatcgtgctgctgctgttcgccctgctgtggatggtggagggcgtcttttctcagctgcactacaccgtacaggaggaacaagaacacgggacgtttgttggaaacatcgctgaggatttagggctggacatcactaaactgtccgcgaggggtttccaaacggtccctaactctaggactccctatttggatctcaacctggagacgggtgtgctgtacgtgaatgaaaaaatcgaccgcgagcagatatgcaagcagtctccgtcatgtgtgctgcacctcgaagttttcctcgaaaatccactggaactattccaggtggaaatcgaagtgctcgacataaatgacaatcctccttcctttcccgagccagatttaaccgtagagataagcgagtcagccaccccgggaactaggtttccattggaatccgcctttgaccccgacgtcgggaccaactctcttagagattacgaaattaccccaaattcctatttcagcctggatgtccagactcagggcgacggcaatagattcgccgagttggtgctcgaaaagcccctggatagggagcagcaggctgtgcaccgctatgtgctgaccgccgtcgatggtgggggaggcggcggtgttggcgaaggagggggcggaggaggaggcgccgggttgcctccccagcagcagaggacgggtactgcgttgctgactatccgagtgctggacagcaacgataatgtaccagccttcgaccagccagtgtataccgtaagtctgccggaaaattcccctccgggaacacttgtcatccagctcaatgccacagatccagatgagggacagaacggcgaagtggtgtattcttttagttcccacatctctcctcgggctcgagagctcttcggtctgagcccgcgcacaggacggctggaggttagtggcgagctggactacgaagaatctcctgtgtatcaggtatatgtgcaggcaaaagacctcggtcctaatgccgtccctgcccattgcaaagtgcttgtaagagtgctggacgcaaacgataatgccccagagatctcattcagcaccgtgaaggaagctgtaagcgagggcgccgctccagggacggtagtcgcacttttttcagtcacagacagggacagtgaagagaacgggcaggtgcagtgcgaattattgggcgacgttccattcagactgaaaagcagctttaaaaattactatacaatagtgaccgaagcaccactggaccgcgaggccggcgactcttataccctgaccgttgttgcgcgcgaccggggagagccagcactgtccacttcaaagagcattcaagtccaggtgagcgacgtcaacgataatgctccccgcttctcgcagcccgtttatgatgtgtatgtaacagaaaacaacgtgcctggggcctatatctatgccgttagcgctacagaccgggacgaaggggctaacgcgcaactggcctacagcatactcgagtgccaaatccagggcatgagtgtctttacttacgtgagcattaattcagaaaacggctatctgtacgcacttcgcagttttgactacgagcagctaaaagatttcagttttcaggtggaagcacgcgacgctggctctccccaggctcttgctggaaatgcgacggtgaatattctgatagtggatcagaacgataatgccccagccatagtggctcccctgcctggcaggaatggaacccccgccagggaggtgctgccacggtccgcggagccagggtacctgcttactagggtcgcggccgtggatgctgatgacggggagaacgcccgcttaacttattcaatcgtcagaggaaacgagatgaatttatttaggatggactggaggacgggcgagttacgcactgcacggagagtgccagccaagagagacccacagcggccatatgaactagtcattgaggtcagagatcatggccagcccccattatcatcaactgcaactcttgtggtgcagttagtggacggagccgtggagcctcagggcggcggcgggagtgggggcgggggctctggagagcaccagaggccctcccgctccggcggcggcgaaaccagtctggatctcactctaattctaataatagccttgggatcagtttcattcattttcctgctcgcgatgatagtgctggcggttcgatgtcagaaggaaaaaaagttgaatatctacacctgcctggcatcagattgctgcctttgctgttgctgttgcgggggaggaggaagcacctgctgtgggcgccaggcgagggccaggaagaaaaagttgtctaaatccgatattatgctggtgcagtcctccaacgtgccttccaatcctgcccaggtacccatcgaagaatcggggggatttgggtcccaccaccataaccagaactattgctatcaggtctgtctgacccctgagagcgcaaagaccgatttgatgttcttgaaaccgtgctccccctcaagatctaccgatactgagcataatccctgtggagcaatcgttactggttacaccgatcagcagccagatattatctccaacggctccatcctgtccaacgagactaaacatcagagagcagaactgagctacctggtggacaggccaaggagagtgaactcttccgcattccaagaagccgatatcgtgagttctaaggattcaggccacggcgactcagaacagggagattcagatcacgatgcaacaaatagagctcagtccgcaggaatggatctattttccaactgtaccgaagagtgcaaggcccttggtcactctgacagatgctggatgccaagttttgtgcccagcgatggacgccaggctgccgactatcgatcaaatcttcacgtccccgggatggacagcgttccggatactgaagtcttcgagacacccgaggcacaaccaggcgccgaacggagtttctctaccttcgggaaagagaaagccctccatagtacccttgaaagaaaagagctggacggactgttgaccaacacccgggcaccgtataagcccccgtatcttagaaagaagcaaaggtgctag

SEQ ID NO: 201850 - DNA, 3933 bp, synthetic construct
  misc_feature 1..3933: note = Description of Artificial Sequence: Synthetic coding sequence
  source 1..3933: mol_type = other DNA
atggacctgctgagcggcacctacatcttcgccgtgctgctggcctgtgtggtgttccactccggggctcaggagaagaattacacaatccgtgaggagatgccagagaatgtgcttatcggagatttgctaaaggatctgaacctctcgctgatccccaataagagcctaacaaccgccatgcagtttaagctggtgtataagactggtgatgtgccactgatcagaattgaagaagataccggagagatatttaccactggagctaggatagaccgggaaaaactctgtgctgggatccctagggacgagcattgcttctatgaagtcgaggtcgcgattttgcctgatgagatttttcgactggtcaagattcggttcctcatcgaggatattaatgacaatgcccctctcttccccgcgaccgtgatcaacatctcaatccccgagaattctgcgataaatagtaaatacaccctccccgcagccgtggatccggacgtcggaattaacggagtccaaaactacgagctcattaaaagtcagaatatatttgggcttgacgtcattgagaccccagagggcgacaagatgcctcaattgatcgtgcaaaaggagttagatcgcgaggaaaaagatacatacgtcatgaaggttaaggtcgaggatggcgggtttccgcaacggtcttccaccgcaattctgcaggttagcgtgactgatacaaacgacaaccatccggtcttcaaggaaactgagattgaagtgagcatcccagagaatgcgccagtaggaacttccgttactcaactgcacgcgactgacgcagacatcggggagaatgccaaaatccacttctcctttagcaatctggtgagtaacattgcaaggcgcttatttcacctgaacgcaaccacgggcctaatcacaattaaggagccgctggacagagaagagacacccaaccataagctgctggttctggcctccgacggtggcctcatgccagctagggccatggtgctggtcaacgtaacggatgtgaacgacaacgtcccaagcatcgacatcagatacattgtgaacccagtgaatgacaccgtggtgttatcagagaacatccctttgaataccaagattgcccttatcaccgtgaccgacaaggacgctgaccataatggccgagtgacctgttttacagatcacgaaattccatttcgcctgcgccctgtgttcagtaaccagttccttctggaaaccgcagcctatctggactacgagtctacgaaggaatacgccataaaattactcgctgcggacgccggcaaaccgcccctgaatcagtcggctatgctgtttatcaaagtgaaggatgaaaacgataacgcccccgtgttcacccaatcgtttgtcacagtaagcatacccgagaacaactccccaggcatacagctgacgaaagtatcggccatggacgctgattctggccctaacgctaagattaattacctgctcggccccgatgcccctcccgagttcagtctggattgccgcaccggcatgctgactgtggtcaaaaagctggatcgagaaaaggaggataagtacctctttaccattctggctaaagacaatggcgtaccacccctaacctctaacgtgaccgttttcgtgtccataatagatcagaatgacaatagccctgtatttacccacaatgagtataatttttatgtcccagagaatctgccaaggcatggtaccgtgggactgattaccgttaccgacccagactacggagacaactccgcggtgaccttgagcatcctggacgaaaatgacgattttaccatcgattcacagaccggggtgatcaggcccaacatctccttcgatagagaaaagcaagaaagctataccttctatgtcaaagctgaagatggcggccgggtcagccggtcgtccagtgctaaggtcaccattaacgtggtggacgtaaatgacaataagcctgtctttatagtgccacctagtaattgcagttacgaactcgtgctccctagcacaaacccagggacggttgtgttccaggtcattgccgtggataatgataccggcatgaatgccgaggtcaggtattccatcgtgggcgggaacactagagatctgttcgccatcgaccaagagacaggaaacattacattgatggagaagtgtgacgtgacagaccttggcctgcaccgtgtgctggtgaaggccaatgacctcggccaacccgatagcctcttctcggtggtgatcgtgaatctgttcgtgaacgaatcagtgactaatgcaaccctaatcaacgaattggtgaggaagtcaacggaggctccagttaccccaaacactgaaatcgctgatgtttcatcccccactagtgattacgtaaaaatactggtggcagccgtggccggcacgatcacagtcgtggtggtaatctttattacagccgtggtgcggtgcaggcaggcccctcacctgaaggccgctcagaaaaacaaacagaactccgagtgggcaacgccgaaccctgagaacaggcagatgattatgatgaaaaagaaaaagaaaaagaagaagcactcccccaagaatctgctgcttaacttcgtcaccatagaagaaacaaaggccgatgacgtggactctgacggcaatagggtaacgctggacctccccatcgatcttgaggagcagaccatgggcaagtacaactgggtgaccactcctacaacctttaagcctgactcccctgatctggcacggcactacaagagcgcatcccctcagccagcctttcaaatccagccagagacccccctgaatagtaaacaccacattatccaggagctaccactagacaatacattcgtcgcctgcgatagcatttccaagtgtagctcttcctcctcggatccttactcagtcagtgattgtggctatccagtcacaaccttcgaagtcccagtgagcgttcatacgagaccaagccagagacgcgtgacctttcatctgcctgaggggtcccaagagtcctcctctgatggtggtctcggcgaccatgacgctggcagtctgacatccacaagccacggtctgcctctggggtacccacaagaagaatacttcgaccgagcaacacctagcaatcgaaccgagggcgacggcaatagcgacccagaaagtacatttatccctagaagtccaacggcagccgagataacggtccagccaacggtagaggaggcatccgataactgcacgcaggagtgtctaatctatggccattctgacgcttgttggatgccagcatcgcttgatcattcctcatccagccaggcacaggcctcggccctttgtcacagcccccccttaagccaggcgagtactcaacaccacagcccacgcgtgacccaaaccattgccctgtgccatagcccccccgtaacgcagacaattgctctctgccactccccgccccccatccaagtctctgctctgcatcattcccccccactggtccaggccacagcgctgcatcactcccctccgagtgcgcaggcctctgcactgtgctacagtcctccactggcacaagctgcggccatttctcactcctcacctctgcctcaggttatcgcacttcacaggagccaggcccagagcagcgttagtctgcaacaggggtgggtccaaggagcagacggcctgtgcagtgtggaccagggtgtccaggggagtgccacgtctcagttctataccatgtccgagcgactacacccctcggatgactcaattaaggtgatacctctcactacattcactcctcgccagcaggcccggccgagccggggagatagccctatcatggaggagcatcctttatag

SEQ ID NO: 201851 - DNA, 4044 bp, synthetic construct
  misc_feature 1..4044: note = Description of Artificial Sequence: Synthetic coding sequence
  source 1..4044: mol_type = other DNA
atggacctgctgagcggcacctacatcttcgccgtgctgctggcctgtgtggtcttccattctggagcccaggagaaaaattatacgataagagaagaaatgcctgagaacgtgctgatcggggacctgcttaaggatttaaacctgtcgctaattcctaacaaatctctaacaaccgccatgcagttcaagctggtgtacaagaccggtgatgtacctctgatccgcatagaggaagatacgggggagatctttacaaccggggccagaatcgaccgggaaaaattgtgtgctggaatcccgagagatgagcattgtttttatgaggttgaagttgctattctccccgatgaaatttttcgcctggttaagattaggttcctgattgaggatattaacgataatgcccccctgtttcctgcaacagtgatcaatatttcaatccccgagaattctgccatcaactctaagtacacccttcctgcagccgtggacccagatgtagggattaatggcgtacaaaattacgagctgatcaaatcacagaatattttcggtcttgacgtgatagaaacccctgagggggataaaatgccccagctgatcgtccagaaagagttggaccgcgaggaaaaagacacatacgtcatgaaggttaaggtggaggatggtggtttcccgcaacgctcaagcaccgcgatcctccaagttagcgtgaccgacaccaacgacaatcacccagttttcaaggagactgaaattgaggtgtccatccctgaaaacgcacctgtcggcaccagtgttacgcagttgcatgcaacagacgctgatataggtgaaaatgctaaaatacacttttccttcagcaatctggtgagtaatatcgctcgtcgtctcttccacctgaacgccaccaccggtcttatcacaatcaaggagccactcgacagagaagagacgcctaaccacaagttgctcgtgctggcttctgatggcggcttaatgccagctcgggccatggtgctagtgaatgtcacggatgtcaacgacaacgttccctccattgatatcagatatatcgtgaaccctgttaacgatacggtggtgctgagtgagaatatccctctgaatacgaaaatcgctctaatcaccgtgactgataaggatgcagaccataacgggagggtaacctgtttcacagatcacgaaatcccattcaggctgaggccggtgttcagcaaccagttccttctcgagactgccgcttatcttgactatgagtcaacgaaagagtacgcgatcaagcttctggccgcagatgcaggcaagccacctctcaaccaaagtgctatgctcttcatcaaagtgaaggatgaaaacgataatgcgccagtgtttacacagtcttttgtaaccgtctctatccccgaaaacaatagcccaggcattcagctgaccaaggtgtctgcaatggacgccgacagcggccctaatgcaaaaataaattacttgttaggtccagacgctccaccagagtttagcctggactgtcgcaccggtatgctcacagtcgtaaagaagctggatagagagaaggaagacaaatatctattcaccattttggccaaggacaacggcgttccacccctgacatcgaacgtgacggtatttgtttctattatcgaccagaacgacaatagtccagtattcacccataacgagtacaacttctatgttccagaaaatctaccaagacacggaaccgtggggctgataaccgtgactgaccctgattacggcgataatagcgccgtgactttatccattctggatgagaatgacgactttacaatcgattcccaaaccggcgtgatccgcccgaacatctccttcgatagagaaaaacaagaatcatacaccttttacgtgaaagcagaagacggaggtagggtgtcccgttcctcgagcgccaaagtcaccattaacgtggtagacgtgaatgataataagccggtgtttatagtgccccccagtaactgcagttacgagttggtgctcccctcaaccaatccaggtacggtggtctttcaggtgatcgccgttgacaacgacacaggtatgaatgccgaggtcagatacagtatagttggagggaacacacgcgacttatttgcgattgaccaagagacgggcaatataacgctaatggaaaagtgcgacgttaccgatttgggcctgcaccgggtgctggttaaagcaaatgatcttgggcagcccgacagtctattctctgtcgtaatcgttaatctgtttgttaatgaatccgtgactaacgcaacgctaattaacgagctcgtgcggaagtccaccgaggctcctgtgacgccaaatacggagattgcagatgtgagtagtcccacatccgactacgtcaagattctggtggcggcagtagcaggaacaataacagttgtggttgttatattcataaccgctgtcgtccggtgtcgacaggccccacatttaaaagccgctcagaaaaacaagcagaattctgagtgggccacgcctaatcccgagaatcggcagatgattatgatgaaaaaaaaaaaaaagaagaagaagcatagccccaaaaatttacttctgaattttgtcacaattgaggaaactaaggcggacgatgtggattcagacggaaacagggtaacgcttgatctacctattgatttggaagaacagaccatgggaaagtataactgggtaaccacccctacgactttcaagcctgattcgccagaccttgctagacattataaatcagccagccctcagcctgccttccagatacagcctgagacacccctgaactcgaagcaccacattatccaagagcttcctctcgacaatacatttgtagcgtgcgacagcatctccaagtgtagctctagctcgagtgatccttactctgtgtcggactgtggctaccctgttaccacctttgaggtccctgttagtgtgcatacccgacctcccatgaaggaagtggtcagatcttgcacgccaatgaaggagtctaccactatggaaatctggatccaccctcagcctcagcgcaaaagcgaaggcaaggttgccggcaagagtcagcgcagagtcacttttcaccttccagaaggaagccaagaatcgtccagcgatggaggccttggtgaccatgacgctggcagtctcacgagcacatcacacggccttcccctcggctatccccaggaggaatactttgacagggccaccccgtcaaataggacagagggagatggtaactccgaccctgagtcgacattcatccctagatctccaactgcggccgagattaccgttcagccaacagtcgaagaggcttctgacaactgcacacaagaatgcctgatctacggacactccgacgcctgctggatgcctgcctcgctcgaccattcatcatcttctcaggcccaggcctctgccctctgtcacagtccccccttgtcacaggcaagcacccagcaccactccccaagggtgactcagaccattgccctttgccacagtcctcccgtaacacagacaatcgctctgtgtcactcaccacctccaatccaggtttcagccctgcaccactctccccctctggtccaagctaccgcactgcaccactctccaccgagtgcccaggcaagcgcactgtgttatagtcccccactggcccaagctgccgctatttcgcactctagccctctgccacaggtgatcgcattacaccgcagtcaggctcagtcctctgttagtctgcagcagggttgggtacaaggagccgacgggctgtgctccgtcgaccagggggtgcaggggtccgcaaccagtcaattttatacgatgtcggagaggttacatcccagcgacgactcaatcaaggtcattcctctgactactttcactcctcgacagcaggccaggcccagcaggggtgactctccgattatggaagaacaccccctctag

SEQ ID NO: 201852 - DNA, 3990 bp, synthetic construct
  misc_feature 1..3990: note = Description of Artificial Sequence: Synthetic coding sequence
  source 1..3990: mol_type = other DNA
atggacctgctgagcggcacctacatcttcgccgtgctgctggcctgtgttgtctttcattcaggcgcgcaggaaaagaactatacaatcagagaagagatgcctgagaatgtgctaattggcgatttgcttaaggatctcaatctgtccctaatccccaacaagtccctcacgaccgcaatgcagtttaagttagtctacaaaactggagacgtaccacttattcggatcgaggaagacaccggtgagatttttaccactggtgctcgcatcgaccgcgaaaagctatgtgccgggatccctcgcgacgagcactgcttttatgaagtggaggttgccatattacccgacgagattttcagacttgtgaagattagatttctgatcgaagacattaacgacaacgcccctctgtttcctgccactgtaatcaatatcagcatcccagaaaactccgctatcaatagcaagtacaccctacccgctgccgtcgacccagatgtcggtatcaacggagttcagaactacgaacttattaaatcccaaaatattttcggtttggacgtaattgagacccctgagggggataaaatgccacagctgatcgtgcagaaagagttagaccgagaggaaaaggatacttacgttatgaaggtgaaggtcgaggacgggggatttcctcagcgctcaagtacagcaatcctccaggtttctgtaactgatactaacgataaccacccagtgtttaaggaaaccgagatcgaggtgagcattcccgagaacgcacccgtcggcacatctgtcacccaacttcatgccacagacgcagacatcggagaaaacgccaagatccatttcagtttctccaatctagtaagtaacattgccagaagactatttcatctaaacgccactaccggcctgattactataaaggagcctctggatagggaggaaactccaaaccacaagctgttggtgctagcgtcagacggaggactgatgcccgcaagagccatggtgctcgtgaacgtgacagatgtgaatgataacgtgccatccatagacattcgctacattgtgaatcccgtcaatgatactgtcgtgctgagcgaaaacattcccctgaacaccaaaattgccctcatcactgtgactgacaaagacgccgaccataacggacgcgtgacatgctttacagatcatgagattccatttaggctgagacctgttttttccaatcagttcctgctcgagacagccgcatatttggactacgagtccaccaaagagtatgccatcaaacttctcgccgcagacgccggcaagccacccttgaaccagtccgcaatgctgttcattaaggtgaaggacgagaatgataatgcgcccgtcttcacacaatcgttcgtgacagtatcaatacccgagaataactcgccaggcatacagctcaccaaggtgagtgctatggatgccgatagcgggcctaacgctaagataaactacctactgggaccagatgcaccgccagagtttagccttgactgtagaacaggtatgcttacagtggtgaagaagctggatcgtgagaaggaggacaagtatttgtttaccatcttggctaaggataatggagtgccaccattaactagcaacgtcacagtatttgtttcaatcattgatcagaatgacaactccccagtgttcactcataacgagtacaacttctacgtacctgaaaatttgccgcggcacggtaccgtggggttaattaccgttacggaccccgattacggagataactcagccgtgaccttgtcaatcctggatgaaaatgacgacttcactatcgactcacagaccggcgtgatcaggcctaatattagttttgatcgcgaaaaacaggagagttataccttctacgttaaggcagaggacggtgggagggtgtctcggtcttcctccgcaaaggttactatcaacgtggtggatgtgaacgataataagcccgtattcattgttcctccttctaactgcagttacgagctcgtactcccatcaaccaaccccggaacggttgtgttccaggtgattgcagtggataatgacactggcatgaatgccgaggtccgttattcaattgtcggcggaaacacccgcgacctgtttgctatagatcaggagaccggcaatattacactaatggaaaagtgcgacgtcaccgacctcggcttgcaccgggtattggtgaaggcaaacgacctggggcagcccgacagtctatttagtgtcgtcatagtcaaccttttcgtgaacgaatctgttacaaacgcaacccttattaacgaactggtcagaaagagtacagaggctcccgttacccctaataccgaaattgccgatgtaagcagtccaaccagcgactacgtgaaaatcttggtggctgccgtagcgggcacgatcacagtggtggtggtgatcttcataacagcagtcgtgcgatgtcgacaggcgcctcatctgaaagctgctcagaaaaacaagcagaactccgagtgggccacccccaaccccgaaaacagacagatgatcatgatgaaaaaaaagaagaagaaaaagaaacacagccctaaaaatctgctgttgaacttcgtaacaatcgaggagacaaaggctgatgacgtggatagcgatggaaaccgcgtcactcttgacctgccaatagacctggaagagcagactatgggcaaatacaattgggtgacaacaccaactacctttaaacccgattccccagacctggcacgccattataagtctgcaagcccccagccagcatttcaaatccagcctgaaactcctcttaactctaagcaccacatcatccaggaactgcctctagataacacatttgtggcttgcgacagtatcagcaagtgcagctcttccagtagcgacccatatagcgtgtctgattgcgggtatcccgtgacaacttttgaagtcccggtcagcgtgcacacaagacctcctatgaaagaggtggtaaggtcttgtacaccaatgaaggaatctaccactatggagatttggattcatccccagccacagtctcagcgtagagttacatttcacctgcctgaaggatcccaggagtcctcctcagatggcggactgggggatcacgatgccggaagcctgactagtacaagccacgggctcccgctgggttacccacaggaggagtacttcgaccgagctactccatcaaaccgcaccgagggggatggcaactctgatcctgaaagtaccgctgaaatcacagtacagccaactgtagaggaagccagtgataactgcacgcaggagtgtctgatttacggccattcagacgcgtgttggatgcctgcatctcttgatcactcatccagctcacaggcccaggcttccgccctgtgtcacagcccaccattgtcccaggcctcgacccagcatcactccccacgagtgactcaaaccatagctctttgtcatagcccacctgttacccagaccatcgcgttgtgccactctccccccccgattcaggtctctgcgctgcatcacagcccaccgcttgttcaagcaaccgctctccatcatagtcccccatcagcacaggcgagcgccctttgttacagcccaccgctggcacaggctgcagcaattagtcattcatcacccctaccacaggtcattgcgctccaccggtcacaagcccagagctcagtaagtctgcagcaaggttgggtgcagggggcagatggcctgtgctctgtggatcagggagtgcagggaagtgcgacaagtcagttctacaccatgtccgaaaggctgcatccgtccgatgacagtattaaggtcatccctctcacgacttttaccccccgccagcaggcccggccatcacgcggcgattctccaattatggaggaacaccccctgtag

SEQ ID NO: 201853 - DNA, 3066 bp, synthetic construct
  misc_feature 1..3066: note = Description of Artificial Sequence: Synthetic coding sequence
  source 1..3066: mol_type = other DNA
atggacctgctgagcggcacctacatcttcgccgtgctgctggcctgtgtggtgttccacagcggtgcccaagagaagaactatacaatccgagaggagatgcccgagaatgtcctgatcggagacttgttgaaagacttaaacctgtcattaatacctaataaatcactcactactgcgatgcaattcaagctggtgtacaaaaccggggatgttccacttatccggattgaggaggacaccggagagattttcaccactggggctagaatcgatagagagaagctctgtgctggcatcccccgagatgaacactgtttctacgaagtggaagtggcgatcctgccggacgagatatttaggttggtgaaaattcggtttctcatcgaggacatcaacgacaacgccccactctttcctgccactgtgatcaacatatccataccagagaactcggcgatcaattcaaagtacacgttacccgcagcagtagatcccgatgttggtataaacggcgtccagaattatgagctgattaaatcccagaacatcttcggtctggacgtgatcgaaaccccggagggcgataagatgccacaacttattgtgcagaaggaactagaccgggaagagaaagacacatatgtcatgaaagtaaaggtggaagatggcggattccctcagcggtcatcaactgcgattctgcaggtgtccgtgacagatactaacgacaatcaccccgtcttcaaagaaacggaaatcgaagtcagcatccctgagaacgcgcctgtgggcacttccgtgacccagctgcacgccactgacgccgacatcggcgagaatgcaaagatccatttcagtttctccaacctggtgtcaaatatcgcccgacgcctgttccatctgaatgcaactactggattaatcaccatcaaagagcccctggacagggaggaaaccccgaatcacaagctgctcgtgttggcttcagacggcggcttaatgccagcccgggctatggtccttgttaacgttacagatgtgaacgacaacgtgccgagtatcgatatcaggtacatcgttaaccccgtaaatgataccgttgtgctgagcgaaaacatccctctgaatactaaaatcgccctgatcactgtcactgacaaggatgcggatcataacgggagagtaacttgtttcaccgaccatgagatcccattcagactgcgcccggtctttagtaaccagttcctcctcgagactgcggcatatctggactatgaatcaacaaaagaatacgcaattaagctgctcgccgcagacgctggtaaaccacctcttaatcagtcagctatgctgtttataaaagtcaaggacgagaacgataatgcccctgtgtttacccaaagctttgtgaccgtctctattcctgagaacaacagccctggcattcaattgacaaaggttagtgctatggatgcagacagcggtccgaatgccaaaattaactacctcctgggccccgacgctccaccagagttctccctcgactgccgtactgggatgctaaccgttgtgaagaaactggaccgtgagaaagaggacaagtatctgttcactatcctggcaaaagataatggtgtacccccactgacgtctaacgtgactgtgtttgtgagtataattgatcagaatgataattctccagttttcacccataacgagtacaacttttatgtaccggaaaacctgcctcgccacggcaccgttggattgattactgtgacagaccccgactatggcgataatagtgcggtgacattgtccattctggacgagaacgacgacttcactatcgatagccagacgggcgtaattagacccaacatctcttttgaccgcgagaagcaggaatcttataccttttacgtgaaagccgaagatggtgggcgggttagtagatcttctagcgcaaaggttacgatcaacgtagtggatgtcaacgataataaacccgtctttattgttcccccctccaactgctcttacgagctagtactcccgtcgaccaaccctggtacagtcgttttccaggtgatcgcagtagataacgacacaggaatgaatgcggaagtaaggtacagtatcgtcggtggcaacacacgggatcttttcgccatcgatcaggagaccgggaacatcacactgatggagaaatgcgacgttacagacctaggcctccatagagtcttggtcaaggcaaacgaccttggtcagcctgacagcctgttcagtgtggtaatcgtgaatctctttgttaatgagagcgtgacaaacgccacactcattaatgagttagttcgcaaatctacagaggccccagtaacccctaacacagaaattgcggacgtgtcatctcctaccagcgactatgtcaaaatactggtcgccgctgtcgcgggaactattaccgtagtcgtggtgatatttataacagctgtggtacggtgccggcaggcgcctcacctaaaagcggctcagaagaacaaacaaaactccgagtgggcgacccccaacccggagaacagacagatgatcatgatgaagaaaaaaaagaaaaagaaaaagcatagccccaaaaatctgcttctcaactttgtgacgatagaggagaccaaggccgacgatgtggattcagatggcaaccgtgtgacgctggacttgcccatcgacctcgaggaacaaacaatggggaagtataactgggtaactacgcctaccactttcaagccagactcacccgatttagctcggcactacaaaagcgctagtcctcaaccagccttccaaatccagccagagacgccgctgaattctaaacatcacattatccaagagctgccattggacaacacattcgttgcctgcgacagcatctctaagtgctctagcagctctagcgatccctactctgtgtcagactgtgggtaccccgttacaacttttgaagtccccgttagcgtccacacacgccccgtgggtattcaggtgtctaatactacattctag

SEQ ID NO: 201854 - DNA, 3933 bp, synthetic construct
  misc_feature 1..3933: note = Description of Artificial Sequence: Synthetic coding sequence
  source 1..3933: mol_type = other DNA
atggacctgctgagcggcacctacatcttcgccgtgctgctggcctgtgtggtgttccattcaggcgcacaagagaagaactacaccatcagggaagagatgccggaaaatgtcctgattggcgatttgctcaaggatctgaatctatcactgattcccaataagagcctgacaacagcgatgcaatttaagctcgtttacaaaacgggggatgttccgttaatcagaatcgaagaggatactggcgaaatttttactactggagcccggattgaccgggagaaactgtgcgccggcattcctcgggacgaacattgtttttacgaagtggaagtggctattcttcctgacgagatttttaggctggtcaaaatcagattcctgatagaggatatcaatgacaacgcccccctgttccccgcaaccgttatcaatatcagtatccccgaaaacagtgctattaattcgaagtatacgttgccagccgcggtagatcctgatgtcggcatcaacggggtccagaattatgagctgatcaaatctcagaacatctttggtctggatgtgatcgagactcctgagggagacaagatgcctcaattgattgtccagaaggagcttgatagggaggagaaagacacctatgttatgaaggtgaaagtggaagacggcgggttccctcaacgtagtagcacagccatcctccaggtgtccgtgacagacaccaatgataaccatcccgttttcaaggagaccgagattgaagtcagcatccccgagaatgccccagtggggacctcggtgacccagctccatgctaccgacgctgacattggcgagaatgcgaagattcatttctccttctcaaacctggttagcaatatcgctcgacggcttttccacttaaacgcaacgacaggtctgatcaccattaaggagccactggacagagaagaaactccaaaccacaaactattggtcctcgcctctgatggcggactgatgccggcccgggctatggtactggttaatgttacagatgtgaatgacaatgtgccttcaatagacataaggtatatcgtgaaccctgtcaacgatactgtggtgctgagcgaaaacatcccgctcaacactaagatcgcactcataacggttaccgacaaagacgccgaccacaacgggcgggtgacttgtttcacagaccacgaaattcctttccgacttagacccgttttctctaaccagttcttactggagactgctgcatacttggactacgaatctaccaaagaatatgcaatcaaacttttggctgctgatgcaggcaagccaccgttgaaccagtccgcaatgctgtttatcaaggtcaaggacgaaaatgataacgcccccgtgtttacacagtcattcgtgaccgtatctattcccgaaaataactcccccggtattcaattgactaaagtaagcgccatggatgccgactctggtccaaacgctaagatcaactacctcttaggacctgacgccccacctgagtttagcctcgactgccgaacaggaatgttgactgtggtcaagaagcttgaccgcgagaaagaggacaaatacttatttaccatactggccaaagacaatggagtcccaccgctgacttcgaatgttacagtcttcgtgagtataatcgatcagaacgataatagccctgttttcacccacaacgaatacaatttttacgtcccggagaacctccctcggcatgggaccgttggcttgatcacagtcactgatcccgactacggagataattctgctgtgacgcttagtatccttgacgaaaatgacgatttcactattgacagccagacaggagttatccgtcccaatataagctttgatcgcgagaaacaggagtcttatactttctacgtgaaagctgaagacgggggtagagtgagtaggtcctcatcagcaaaggtgaccattaatgtcgtcgacgtgaacgacaacaagcccgtgttcatcgtgcctcccagcaactgctcctacgagttagtgctgcctagcaccaaccccggaacagtggtgtttcaggtaatcgccgttgacaacgatactggcatgaacgccgaggtgcgatatagcatcgtcggagggaacactcgagacctatttgcaatagatcaggaaactggcaatatcaccctcatggaaaaatgcgacgtgaccgatctcgggctgcatcgcgtgctcgtcaaggctaatgatttgggtcagccagacagcctgttctctgtggtgattgtgaacctgttcgtgaacgagtctgtgacgaatgccacactcataaacgaattggtgagaaaaagcacagaagccccagttacccctaatactgaaattgctgatgtttcatccccgacctcggactatgtgaagatcttggttgccgcagttgccggcaccatcaccgtggtcgtggtgatcttcatcactgcggtcgtccgttgtcgacaagcaccacacctgaaggctgcccagaagaataagcagaactccgagtgggctacccccaatcccgaaaatcggcaaatgattatgatgaagaaaaagaaaaagaagaaaaaacatagtccaaagaacttgctgttgaatttcgtgaccatagaagaaaccaaagctgacgatgtggattccgacggcaatcgggtgacattggatctgccaattgatctggaagaacagacgatgggtaaatacaattgggtgactactcccactacatttaagccagactctcctgacctcgctagacactacaaatcagccagtccccagcctgccttccagattcaaccagagaccccgctgaactcaaagcaccatatcatccaggagttacctctggataacaccttcgtggcatgtgactcgatctctaagtgttcctcttccagcagtgatccttatagcgtcagcgactgtggctacccagtaaccacatttgaagtgccagtttccgttcacacccgcccctcccagcggcgagtgacgttccatctgcctgagggcagtcaggaaagctcttctgatggcggcctgggtgatcatgacgccggttctcttaccagcaccagccacggccttccgcttggatacccacaggaggaatactttgatcgcgctacccctagtaaccgaacggagggggacgggaacagtgatcccgagagcacctttatccctggcctgaagaaggctgctgaaattaccgttcaacccaccgtcgaagaggcaagtgacaactgtacgcaggaatgcctgatttatgggcattcagatgcctgttggatgcctgcctcattggaccattcatccagctcccaggcacaggctagtgcgctatgtcactctccccccctttctcaggcctccacccagcatcattctccgagagtaacgcaaacaattgcgttgtgccattccccacccgtcactcaaactattgccctgtgccactccccaccccctatccaagtctctgcactgcaccacagtccccccttagtgcaagctaccgctctgcaccatagcccacccagcgcgcaagctagtgccttatgttactcaccgcctttagcccaggcagccgccattagccacagctcccctttgccacaggtgattgctctgcacaggagccaggctcagagttccgtgtccctccagcagggctgggtccagggcgccgatggactgtgcagtgtggatcaaggagtgcaggggtccgcgactagccagttctacactatgtccgagcgcttgcaccctagcgacgattctattaaggtaatcccactaactacttttacacctcgccaacaggcccgccccagcaggggcgattccccaatcatggaagaacacccactctag

SEQ ID NO: 201855 - DNA, 4044 bp, synthetic construct
  misc_feature 1..4044: note = Description of Artificial Sequence: Synthetic coding sequence
  source 1..4044: mol_type = other DNA
atggacctgctgagcggcacctacatcttcgccgtgctgctggcctgtgtggtgttccattcaggagcccaagaaaagaactacaccatcagggaggaaatgcccgagaatgtgctgattggcgacctacttaaagacttaaatctctccctgatcccaaacaaatcgttgacaaccgccatgcagtttaagctggtgtataaaacgggagacgtgcctctaattagaatcgaagaggatactggtgaaatatttacaacaggcgcccgaatcgacagagagaagttgtgtgcgggcatcccaagggatgagcattgcttttatgaagtggaggtggcaattctgcctgatgaaattttcaggttagtgaaaatcagatttctgatcgaggatattaacgataatgcaccccttttcccagccactgttataaatatttcaatacccgagaactcggccatcaattccaagtataccttgccggccgcggtggaccccgacgtcggcatcaacggggtccagaattatgagctgattaagagccaaaatatttttggccttgacgtgattgagacacccgaaggggataaaatgccacagctaattgtccaaaaggaactggaccgagaggagaaggacacctacgtgatgaaggtgaaagtcgaggacggtggcttcccccagagatcttccactgcaatcctacaggtatccgtaactgatacgaacgataatcacccggtgttcaaggaaacggaaatcgaggtttccatcccggagaatgctcccgttggcacttcagtgactcaactgcatgcaactgatgccgatatcggagagaacgccaaaattcacttctcattctccaatctggtgtctaacatcgcacgccggctgttccacctcaacgccactaccggattgatcacaatcaaggaacccctggatagagaggaaacaccaaatcacaaattgctggtgcttgcaagcgacggaggtctcatgccggccagagccatggtgttagtcaatgtgacggacgttaacgacaatgtcccctccattgacatcagatacattgtgaatcccgttaacgacaccgtcgtgttgagcgaaaacatacctctgaacactaagatcgccctcatcaccgttactgacaaggacgcagatcacaacggcagggtgacatgcttcaccgaccacgagatcccttttagactgagacctgtgttcagcaaccagtttctcctggagaccgccgcttatttggactatgagagcactaaggaatatgccatcaagctcctcgctgccgatgcaggaaaacctccactgaaccagtccgcaatgctgttcatcaaggtaaaagacgagaacgacaatgcaccggtcttcacacagtcctttgtgacagtgtcaatccctgaaaataacagtccaggcatacagctgacgaaggtctcagctatggatgccgatagcgggcctaacgcaaaaattaactacctgctggggcccgatgctcccccagaattctctcttgactgccgaacagggatgctcacagtcgtgaaaaagctcgaccgcgagaaggaagataagtacttgtttactatcctggcgaaggacaatggcgtgcccccattaacatcaaacgttacagtgtttgtttccattattgatcagaatgataatagccccgtgttcacacacaacgagtataacttctacgttccggaaaatttgccacgccatggcacggttggcttgatcacagtcaccgaccccgattacggagacaactccgccgtgaccctgagcatcctggacgagaatgatgactttaccatcgattcacagaccggcgtaatccgcccaaatatcagctttgacagggaaaaacaggaatcttacactttctacgttaaagccgaggacgggggccgcgtaagccgcagctcatcggcaaaggtgaccatcaatgttgtggacgtgaacgataacaagcctgtgttcatcgttccaccatctaactgttcctatgaattggtgttgccaagcacaaaccccggaacagtcgtctttcaggtcatcgccgtcgataacgacacaggcatgaacgctgaggtccgctattccatcgttggagggaacacccgcgacctgtttgcgattgaccaggagacagggaacattactctgatggagaaatgcgatgtgactgatctgggcctgcatagggtcctggtaaaagccaatgacttaggccagcctgacagcttattcagtgtagtcatcgtaaatctatttgtcaatgagagcgtaactaacgccacactcattaacgaactcgtacgtaaatctacggaggcccccgtaaccccaaacacagagatcgccgacgtgtctagccccacatccgactacgttaagatcctggtagccgcggtggcgggaaccattacggtggtggtggtgatctttataaccgcagtcgtgcgatgtagacaggcgccccaccttaaggccgctcagaaaaacaaacagaattccgaatgggccacaccaaatcctgagaaccgccagatgattatgatgaagaaaaagaagaaaaagaagaaacactccccaaaaaatcttctcctgaatttcgtgactattgaggaaacaaaggcagatgacgtggacagcgatgggaaccgagtgacactagatttgcctatcgacctggaggagcagactatgggtaagtacaattgggtgactacgcccactacgttcaagcccgactctcctgatctcgctaggcattacaagagtgcaagcccacaaccagcctttcagattcaacccgaaacacctctgaattcaaaacaccacatcattcaggagctgccactagacaatacctttgtggcttgtgacagtatttctaaatgtagtagtagtagctctgacccctactcagtctctgactgcggatatccagttactactttcgaggtgcctgtgagcgtacacaccaggcctcctatgaaggaagttgtccgcagttgtacccctatgaaggaatccaccacgatggagatctggatacatcctcaacctcagaggaagtccgagggaaaagtggcaggcaaatcacaaagaagagttacttttcatctgccggagggctcacaagagagctcctccgatggaggccttggagaccacgacgcaggttctttgactagcactagccacggcctgccgctggggtacccccaggaggaatacttcgaccgtgcaacaccttcaaaccggactgagggcgacggaaacagcgatccagagagcacattcatcccaggtctgaagaaagcggctgagataacggtgcaaccaacggttgaggaggctagtgataattgtacgcaggaatgcttaatttacggacacagtgatgcctgttggatgcccgcaagtctggatcacagttcctcctcgcaggcacaagcaagtgccctctgccactccccacctctttcacaggccagcactcaacaccactcacctcgcgtaacccagaccatcgccttgtgccacagtccacccgtaacacagacaatcgctctgtgtcattctccaccaccaatccaggtaagcgctctgcatcattcaccccctctagttcaggctacagccctgcatcattcccctcccagcgcccaggcatctgcattgtgctattcgcctcctctagcgcaggctgccgccatttcccattcaagcccgctccctcaggtcatcgcccttcatagatcccaagctcagagcagcgtgtctctgcagcagggttgggtccagggcgcggacggtttgtgttccgtggaccagggagtacaagggagcgctaccagccagttttacaccatgagtgaacgccttcacccctctgacgacagcattaaggtgatcccactgacaacctttaccccgcgtcagcaagcccgcccatcccgtggtgattctccaattatggaggaacacccactgtag

SEQ ID NO: 201856 - DNA, 4014 bp, synthetic construct
  misc_feature 1..4014: note = Description of Artificial Sequence: Synthetic coding sequence
  source 1..4014: mol_type = other DNA
atggacctgctgagcggcacctacatcttcgccgtgctgctggcctgcgtggtgttccactccggcgcacaagagaaaaactacactatccgggaggagatgcctgagaatgttctgattggtgacctgcttaaggacctgaacttgtcacttatcccaaacaaatctctgactacagccatgcaattcaaacttgtttataagaccggcgacgtacctcttatcagaatcgaggaggacacaggcgagatctttacaacaggggcacgtattgatagggaaaagctctgcgcaggaattccaagggacgagcactgcttctatgaggttgaggtggccattttgcctgatgaaatatttagactggtgaagatccggttcctgattgaggacatcaacgacaacgcacccctgttccctgcaacagttataaacatctccattccggagaactccgcaatcaatagcaaatacacactgcccgcagcagtggaccctgacgtgggtattaacggcgttcagaactacgagctgatcaaaagccagaatatctttggcctagatgttattgagacacctgaaggcgataagatgccgcagttaattgtccagaaagagctggaccgtgaagagaaagatacatatgtgatgaaggtgaaagttgaagacggaggcttcccacaaaggtctagtacagccattctccaggtgagcgtaaccgatacaaatgacaatcaccccgtgttcaaggagaccgagatcgaagtgtcgataccagaaaatgccccagtgggaacttctgtcacccagctgcacgcaaccgacgcagatatcggtgaaaatgccaaaattcacttttcttttagcaaccttgtgagcaatattgcacggcgcctttttcatttgaacgccacaactggtctgattactatcaaagaaccactggatagagaagagactcccaatcataagctgctggtgcttgcatccgacggagggctgatgccagcgagggccatggtgctggtcaacgtcactgacgtgaacgataatgtgcctagcattgacatccggtacatagttaacccagtcaatgataccgttgttctatccgaaaatattcctctcaatactaaaattgcccttattacagtcaccgacaaagatgcagaccataacgggagagtgacctgctttaccgatcacgagatcccttttcgccttcgccctgtgttcagtaaccaatttctcctagagactgctgcgtatctcgactatgaaagcactaaagagtacgcgatcaaactgctcgccgctgatgccggcaagcccccactgaatcagagcgccatgctttttattaaggtgaaggatgagaatgacaatgctccggtgtttacccagtcgttcgtaacagtctctatccctgagaataattcgccagggatccagctgactaaggtgtcagccatggacgccgattcggggcccaatgccaaaattaactacttgctgggaccagatgctccacccgagttttctctcgattgcagaaccgggatgctcacagtcgtcaagaagctggatagagagaaagaggataagtacttatttacaattctggccaaggacaacggagttcctccgctcacctccaatgtgacggtgttcgtgtccattatcgaccagaatgataactctcctgtcttcacccataatgagtacaacttctacgtcccggagaatttgcctcgacatggaactgtgggtttgattacagtcacggatccagattacggggacaatagtgcagtcacactctccattctcgacgaaaacgacgactttacaatcgatagtcagacaggggtcattagacccaatatttctttcgaccgagagaagcaggagtcctacacattttatgtgaaagccgaggacggtggccgggtgagtcggtcttcaagtgccaaagttacaattaacgttgtcgacgtgaatgataacaaaccagtcttcatcgtgcctcctagcaactgctcttatgaattagtacttccatccaccaatcccgggactgtggtttttcaggtgattgccgtcgataatgatacaggcatgaacgccgaggtccggtattccattgtgggtggcaatacccgtgatttgtttgccattgaccaggagaccgggaacattactctcatggagaagtgtgacgtcactgacctcggcctgcacagagtcttagttaaagcgaacgacttgggacagccagactctctttttagtgtggtgattgtgaacctttttgtgaacgagtcggtgactaatgccaccctgattaatgaattggtgaggaagtccaccgaggcccctgtgaccccaaacacagagatcgccgatgtttccagccctacaagcgattatgtgaaaattttggtcgcagctgtggcgggaacgatcacggtcgttgtcgtgattttcatcactgctgtcgtccgctgccgccaggcgcctcatttgaaagccgcccagaagaataagcagaacagcgagtgggcaacccctaaccccgagaacagacagatgattatgatgaaaaaaaaaaaaaagaaaaaaaaacatagccctaaaaatctcctgctgaacttcgtcacaatcgaagagacgaaggctgacgatgtggattcagacggcaaccgggttactctcgatttaccaattgatctggaagagcagactatgggtaagtataactgggtgaccactccaaccacttttaaaccagatagcccagacctggctaggcactataaatcagctagccctcaacccgcttttcagattcagcctgagaccccactgaatagcaagcaccacatcatacaagaattgcccctcgacaacacgttcgtcgcctgtgactcaatttctaaatgttcctcatcatcttccgacccctactctgttagcgattgcggatatccagtaacaactttcgaagtgcctgtgtctgtgcacacccggccccctatgaaagaggtcgtgcgaagttgtactcccatgaaggagagcaccacaatggagatctggatccacccccaaccacagtcgcaaagacgcgtaacgttccaccttcccgaggggtctcaggagtcctcctcagatggaggattgggtgatcacgatgcaggttctctcacaagcactagccatggcctgccattagggtacccacaggaggagtacttcgatcgtgcaacgccctctaataggacagagggcgatggtaatagcgatcctgaatccaccttcattcccggcctcaagaaagctgccgaaatcaccgtgcagccgacggtcgaggaggcttccgacaactgtacccaggaatgtttaatttatggccacagtgacgcctgctggatgccagcttctcttgaccacagtagctcatcacaggcccaggcgtctgccctgtgccattctcccccactatcacaggcttctacccaacatcactcccctagagtgacccagacaatcgcactgtgccattcccccccggttactcagactatcgctttatgccatagtccaccacctattcaagtgagcgctctgcaccacagtcctcccctggttcaggcgaccgcactacatcacagccccccttctgcacaagcctccgctctctgttactctccgccccttgcccaagccgcagccattagtcattcttcgcccctacctcaggtgatcgctttgcatcggagtcaggcgcaatcctccgtatcactgcagcagggctgggttcagggggctgacggactatgcagcgtcgatcagggcgtgcaaggttcagctaccagccaattctacaccatgagcgaacgactccacccttccgatgactcgattaaagtgattcccttaactacttttactccccgccagcaggcccggccctcacgtggggattcccccattatggaagagcaccccctttag

SEQ ID NO: 201857 - DNA, 3078 bp, synthetic construct
  misc_feature 1..3078: note = Description of Artificial Sequence: Synthetic coding sequence
  source 1..3078: mol_type = other DNA
atggacctgctgagcggcacctacatcttcgccgtgctgctggcctgcgttgtttttcatagcggcgcccaggagaagaactatactattcgcgaagaaatgcccgaaaacgttttgattggcgacctgctgaaagacctcaacttgtctttgattccaaataaatccctgacgacagccatgcagttcaagttggtctataaaacaggggacgttcccctcatacggatagaggaggataccggggagatcttcaccacgggggcacgtattgatagggaaaaactttgcgctgggatccccagggacgaacactgcttttacgaggttgaagtcgccattctgccagacgagatttttcgcctcgtcaaaatcagattcttaatagaagatataaacgataacgcccccctgtttcctgctactgtcattaacatttccatcccagagaacagcgccattaactcgaaatacacacttcctgcggctgtggaccctgacgtaggaattaacggcgtacaaaactacgagctgataaagagccagaacatcttcggacttgacgtgatcgagactcccgaaggagataagatgccccagctgattgtgcaaaaggagcttgatcgggaggaaaaagatacttatgtgatgaaggttaaggtagaggatggcgggttcccccagcgttcaagcacagccatcttgcaggtttccgttacagacacaaatgataatcatccagtcttcaaagaaacagagatagaagtgtccatcccagaaaacgcgcctgtcgggacatccgtgacccaactccacgctacggacgcagacatcggcgagaacgctaaaatccactttagtttcagtaatttagtgagcaatatcgcccgtcgcctcttccatctgaatgccacaacggggctaatcacaataaaggagcccttggacagagaggagactcccaatcataaactgttagtgctcgctagcgacggagggctgatgcctgcgcgggcaatggtcctggtgaacgtaaccgatgtgaacgataatgtcccttccatcgacattcgctacatcgtcaatccggtaaacgacacagtagtgctgtctgaaaacatccctctgaataccaaaatcgcactcattaccgttactgacaaagatgccgaccacaacggccgggtcacgtgctttactgatcacgagatcccattcaggctgagaccagtctttagcaaccaattccttctggagactgccgcctacctggactacgaaagtaccaaagagtacgcaatcaagttgttggcagcggatgccggaaagccaccattgaaccagagcgcaatgttatttattaaagtaaaggacgagaacgataacgcccccgtctttactcaaagctttgtgaccgttagcataccggagaataatagccccggaatccagctcacaaaagtgagcgccatggatgctgacagcggccccaatgctaagattaattaccttctggggccagacgcccctccagaattctctcttgactgtaggactggcatgctaaccgtcgtcaagaaactggaccgagagaaggaggataaatacctcttcaccattctggccaaggacaacggcgttcccccactaactagcaatgtcaccgtatttgtttcgatcattgaccagaacgacaactcaccagtgttcacccacaatgaatacaatttttacgtcccggaaaacctgcctaggcacggaactgtcggtttaattactgtgaccgatcctgattatggcgataactcagccgttacgctgagcattctggacgaaaacgacgattttacgatcgacagccagactggagttatacgccctaacattagtttcgaccgagagaagcaggagagttacactttctacgtaaaggctgaggacgggggcagggtgtcaaggagctccagcgcaaaggttacgatcaatgtagttgacgtgaatgacaacaagcccgttttcatcgtacccccttcaaactgcagttatgagctcgtcttacctagcactaacccgggtacggtggttttccaggtgatagccgtggacaatgataccgggatgaacgcggaggtccgctacagcattgttggcggcaatacccgggatctcttcgccatcgaccaggagactggaaatattacactgatggagaagtgcgatgtcacagatttgggcctacacagagtcctcgtcaaggcaaacgacctggggcagccagacagcctgttctccgtggttatcgtgaacctcttcgttaatgagtcagtgacgaatgcgacattgattaacgaactggtccggaagtctacagaagcaccagtcacccctaacaccgagatcgcggacgtgagttctccaaccagtgactatgttaaaatcctggtggcagctgtggccggaacaatcaccgtggtggttgtgatttttatcaccgctgtggtccggtgcagacaggcaccccacctgaaagctgcgcagaagaataaacagaactccgagtgggcaacccccaaccctgaaaacaggcagatgattatgatgaaaaaaaagaagaagaagaaaaagcattcgccaaaaaatttgctgctgaactttgtgacgatcgaggagacaaaggccgatgacgttgattctgatggcaaccgcgtgacgctggatctgcccattgacctggaggagcaaacaatgggaaaatacaattgggtgacaactccaactacttttaaacctgatagtcccgacctggcacggcactataagagtgcatctcctcaaccagctttccaaatccagcctgagacacctctgaattccaaacaccacatcatacaagaactgcctctcgacaatacttttgtagcctgtgactcgatctcaaaatgcagtagcagttcgtctgatccctattctgtcagcgactgtggataccccgttaccactttcgaggtgcctgtttcagtacataccaggccaacagattcacgcacctctaccattgagatatgtagtgaaatttag

SEQ ID NO: 201858 - DNA, 4020 bp, synthetic construct
  misc_feature 1..4020: note = Description of Artificial Sequence: Synthetic coding sequence
  source 1..4020: mol_type = other DNA
atggacctgctgagcggcacctacatcttcgccgtgctgctggcctgcgtcgtattccacagcggcgcccaggaaaaaaattacaccattcgcgaggaaatgccagaaaatgttctgataggggatctgctaaaggacctgaatctttcgctcatccccaacaagtcactgacaaccgcaatgcagttcaaactggtttacaaaaccggggatgtgcccctgatccgtattgaagaggacacaggagagatcttcaccacgggggcccggatagatagggaaaagctgtgtgcgggtatcccacgagatgagcattgtttttatgaagtcgaggtagcaatcttaccagacgaaatctttcggctggtgaagattcgctttctgattgaggacattaacgacaatgctccactgttccctgcaaccgtgataaacattagcatcccagagaattctgcgattaactcgaagtatacactccccgcggctgttgacccagatgttggtataaacggcgtccagaattacgagttgattaagtcacagaacattttcggacttgatgtgattgaaaccccagagggcgacaagatgcctcagttaatagtgcagaaagaactggaccgtgaagagaaggatacttatgtgatgaaggtaaaagtggaggatggcgggtttccacaaaggagtagcaccgctatcctccaagtaagcgtcacagacaccaacgacaatcatcccgtctttaaagagacggagatcgaagtatcaatccctgagaacgcaccggtcggcacatcggtgactcagttacacgccacagatgcagacatcggcgagaatgccaaaatccattttagttttagcaatctggtgtcaaatatagccaggaggcttttccacctcaatgccaccaccggtttaatcaccatcaaggaaccactggatagggaagaaaccccaaaccataagcttctcgtactagcctctgacggtggactgatgcctgctagggcaatggtgttagttaacgtgaccgacgtgaatgacaatgtgccttccattgatattcgctatatcgtgaacccagtaaacgatactgttgtgctctccgagaatattccactgaacaccaagatcgcattgattacggtcacggataaagacgccgatcataacgggcgggtgacgtgttttaccgaccatgaaatcccattccggctgaggccggtgtttagcaaccagtttctcttggaaaccgcagcctacttagactatgagagcaccaaagaatatgccattaaactgctggctgccgatgcaggcaaaccccccctaaaccagtccgccatgctgttcatcaaggttaaggatgaaaacgacaacgcgcctgtcttcacccagtcgtttgtgacggtaagcatccctgagaataacagccccggtattcagctgactaaggtaagcgccatggacgctgacagcggtcccaacgccaagatcaattacctgcttggacctgatgccccccccgagtttagccttgattgccgtacggggatgctcaccgtagtcaaaaaacttgaccgcgaaaaagaggataagtatctgtttaccatcctggctaaggataacggtgtgccacctctgacttctaacgtcaccgtgtttgtgtcaattatcgatcagaatgataatagcccagtgttcacgcacaacgaatataacttttatgttccagaaaatctaccacggcatggaaccgtgggccttatcacggtgacagaccccgactatggggataacagtgccgttactttgagcattctggatgaaaatgatgattttactatagacagtcaaacaggcgtaatccggcctaatatatctttcgatagagaaaagcaggagtcctacactttttatgtgaaggccgaagacggaggcagagtttccagaagttcctccgccaaagtcaccatcaatgtagtcgacgtgaatgacaacaaaccggtattcattgtccctccatccaattgttcctatgaattggtgctcccaagcacaaatccaggcactgtggtgtttcaggttattgccgtggacaatgataccggaatgaacgccgaggtgagatactccattgtgggcggtaacactagggatctcttcgcaatcgaccaagaaaccggtaacattactttgatggagaaatgtgatgttacggatctggggctgcacagggtgctcgtgaaagctaacgatctgggccagcccgattctttgtttagtgttgtgattgtcaatttattcgttaacgagtctgtgacaaacgccactttaatcaacgaactggtgcggaagtcaacagaggcccccgtgacgccaaataccgagatagccgacgtcagtagccccacctctgactacgtaaagattcttgtcgcagccgtggccggcaccatcaccgtcgtggtggtaattttcatcactgccgtggtgaggtgtcgccaggctcctcatctgaaggctgcccagaaaaacaagcagaattccgagtgggccactccaaaccctgaaaaccgccaaatgatcatgatgaagaaaaaaaagaaaaaaaagaagcatagtcccaagaatctgctgcttaattttgttaccatcgaggaaaccaaagcagatgacgtagacagtgacggaaatcgcgtcactctggatctgccgatcgacctggaagagcagaccatgggcaaatacaattgggtcactacgcccactacatttaaaccagacagtccagacctcgctaggcactacaagtctgcttcccctcagccggccttccagattcagcccgagactccactcaactccaaacaccacataattcaggagcttccacttgacaataccttcgttgcatgcgacagtatctcaaaatgcagctcgagctctagcgatccctacagcgttagcgactgcggctatcctgtcactactttcgaagtcccagtgtccgtccacacccgccccccaatgaaagaggtggtaaggtcatgtacccccatgaaggaaagtactactatggagatttggattcaccctcaaccccagcggaagagtgaaggcaaagtggccgggaagtcacaacgtagagtgacttttcacctgccggagggcagccaggaatccagttcagatggagggttgggggaccacgatgccggctccctcacttctacatctcacgggttacccctgggctatccccaggaagagtactttgacagggcaactccgtctaatcgaaccgagggggacggaaacagcgatccagagtcaactgccgagattacagtccaaccaactgtagaggaggcttctgacaactgcacgcaggaatgcttaatttatggccacagcgacgcctgttggatgcccgccagcctggatcattcttcttcaagccaggcccaggccagcgccctgtgtcatagccctcccttaagccaggccagtactcaacaccattctcccagagtcacgcagaccattgccctctgtcactcaccccctgttacacaaaccattgcactctgtcattctccaccccccatacaggtcagtgccctacatcatagccctccactagttcaagcgaccgcactgcatcatagtccgcccagcgctcaagcatcagccctttgttatagcccacccctggcgcaagccgcggctatctcacatagctctcctctgcctcaggtcatagccttgcatcggtcccaggctcagagctccgtttctctccaacaggggtgggttcagggtgcagatgggctgtgctcggttgaccagggcgtgcagggatcggccactagtcagttctacacaatgagcgaacggcttcacccctctgacgactcaatcaaggtcatcccacttaccactttcaccccgcgccagcaggctagaccttccaggggggattcccccatcatggaagagcatccgttgtag

SEQ ID NO: 201859 - DNA, 3198 bp, synthetic construct
  misc_feature 1..3198: note = Description of Artificial Sequence: Synthetic coding sequence
  source 1..3198: mol_type = other DNA
atggacctgctgagcggcacctacatcttcgccgtgctgctggcctgtgtggttttccatagcggtgcccaggagaagaactataccatcagagaagaaatgcctgaaaatgtgctcatcggcgatctccttaaggacctgaatttgtccctgattccgaacaagtccttgactaccgcgatgcagttcaagctggtttataaaaccggagatgtccccctgattagaattgaagaggataccggcgagatttttacaacgggagcccggattgatagagaaaagctgtgtgctggcatacctcgggatgaacattgcttctatgaggtcgaggtcgcaattctgcctgacgagattttcagactggtgaagatccgctttctaatcgaggatatcaatgataatgctcccctttttccagccactgtcatcaacataagtatccctgagaactctgccattaatagtaagtacacactgccagcagccgttgatcctgacgtgggcattaacggcgtccagaactacgaattgattaagagccaaaacatctttggtcttgacgtgatcgaaactcctgagggcgacaagatgcctcaactgattgtccagaaggaactcgatcgtgaggagaaagatacgtatgtcatgaaggtcaaagtcgaagatggcggtttcccccaacggtctagcactgcaatattacaggtcagcgtgactgacaccaatgacaatcatcctgtcttcaaagaaactgaaatagaagtaagcatcccagagaatgcacctgttggcacttctgtcacccagttacacgcaactgacgccgacattggggagaatgctaagatccacttttccttctccaatctcgtgagcaacattgctcgcaggctgtttcaccttaacgccaccaccgggctgataactatcaaagaaccgctggatcgggaagagaccccaaatcataaactgcttgtcctggcgtcagacggaggattaatgcccgctcgtgcaatggttcttgtgaacgtaactgacgtgaatgacaatgtcccatcgatcgatatcagatacattgtcaaccctgtcaatgataccgttgtgttgtcagaaaacatcccgctcaacaccaaaatagcactaatcacggtgacagacaaagacgctgatcacaatggaagggtcacctgctttaccgatcacgagatccccttcagactgagaccagtgttttctaatcagttcctgctggaaacagccgcctatctagactacgaaagtacaaaggaatacgcgatcaagctgctggcagccgatgctggaaagccccctctgaaccagtccgccatgctgttcatcaaggtgaaagatgagaacgacaatgctcccgtgtttacccaatccttcgtcaccgtctctatcccagagaataattccccgggtatccagcttacgaaagtttctgctatggacgctgattcaggaccaaatgctaaaattaactatctactcggtcctgacgcccccccggaatttagcctggattgtaggacaggcatgttgacagtcgtcaagaagctcgacagggaaaaggaagataagtatctgtttaccattttggccaaggacaatggtgtcccacccttaacttccaacgtgaccgtgtttgtgtccattattgatcagaatgacaatagccccgtcttcacacacaacgaatacaatttttatgtccccgagaaccttccaaggcacggcacggtcggcctgatcaccgtaacggacccagactacggcgataactccgcagttaccttgagcattcttgatgagaacgacgatttcactatcgacagtcagacaggcgttatccggcccaatatatcatttgaccgggaaaagcaggaaagttatacattttatgtgaaagccgaagacggaggccgagtgtctagatctagtagtgcgaaagtaactatcaacgttgtcgacgtgaacgataacaaacctgtctttattgtgccaccgtctaactgcagctatgagctggtgctgccctctaccaacccgggcactgtggtattccaggtcattgcggtggacaacgatactggcatgaatgcggaggtgcggtactccattgtgggaggcaacacaagagacttgttcgcaattgaccaggaaacggggaacattacactcatggaaaaatgcgacgttactgacctgggactacaccgtgtgctggtgaaagccaatgatctaggtcagcccgactccctcttttccgtcgttatcgtgaatctttttgtcaatgagtcggtaactaacgcaaccttgatcaacgaactggtgcggaagtctacagaggcgcccgtcacacctaataccgaaatagctgacgttagctctccaacctccgattatgtcaaaatcttagtggcagccgtggccggaaccattaccgtcgtggttgtgatttttatcactgccgtagtccgttgcagacaggcgcctcatctgaaagctgcccagaagaacaaacagaatagcgaatgggctacgcctaatccagaaaacagacaaatgatcatgatgaagaagaagaaaaaaaagaagaaacattctccaaaaaaccttctcctgaattttgtaaccattgaagaaaccaaggcagatgatgtggactccgatgggaatcgcgtgacgcttgatctgcctatcgatttagaggaacagactatgggaaaatacaattgggtgaccacacctacgactttcaaacccgatagtccagatctcgcccggcactacaagtctgcaagtccgcagcccgccttccagatccagcccgaaaccccactgaactctaagcaccatattatacaggagctaccactggacaatacattcgtcgcctgcgactcgatctctaagtgtagttcaagctcaagcgacccttactctgttagtgactgcggttacccggtgaccacctttgaagtacccgtgagtgtacacaccagacccccaatgaaggaggtggtgagaagctgtacacctatgaaggagagcaccaccatggaaatctggattcacccacagcctcagcgtaaaagcgaaggtaaggtggctggcaagactgtgctgacatcttcttcgccaagcgcaatgaccctgagttacttggactag

SEQ ID NO: 201860 - DNA, 1344 bp, synthetic construct
  misc_feature 1..1344: note = Description of Artificial Sequence: Synthetic coding sequence
  source 1..1344: mol_type = other DNA
atggccaccgccgccaccaccaccaccaccaccaccgccaccgtggcgctaacaacctcctgggacaacgccaccgggagaccgaccgccgaaccagatcctatactcgataattacgttttgctggtagtggtaatgagtctgttcgttgggggaacgcttgtcgtgttgtctggcgtcctgctcctatgtaagaggtgttgggatgttcatcaaaggttgaacagggctatggaagaagcggaaaaaactaccactacgtacttagacaacggtactcatccagcccaggacccggacttccgtggcgaagacccagagtgtcaagacgcagagacagaacgcttcctgtccacatcctcaaccggcaggcgggttagcttcaacgaagcagcactcttcgaacagtcccgaaagacccaggacaagggacgccggtatactcttaccgagggtgactttcatcacttaaaaaatgcaaggttaacccacttgcacttacctccactgaagatcgtgactatacacgagtgcgacagtggcgaggcatcgagtgctacaaccccacaccctgcaacctctccaaaggccacactggccatcttccagcctcccggaaaggccttgacggggcgctccgtcggccctagtagtgctctacccggggatccatataacagcgccgctggggcgaccgacttcgccgaaatctcaccatccgcaagttcagattctggcgagggcacttcgcttgacgctggcacacgaagcacaaaagccggcggcccaggcgcagcggctgggcccggggaggcaggtcctggatccggagccggcacagtccttcagtttcttacgaggcttcgacggcatgcttctctggatggggcgtctccgtattttaaagtgaagaaatggaaacttgagccatcccagagggcagcttccttggacacacgcggctcccccaagcgacaccacttccagcgtcagagagccgcttctgagtcgacagagcaggaggagggagacgcacctcaggaggatttcatccaatatatcgccagagccggcgacgcagtggccttcccgcatccaagaccctttttagcctctcccccccctgccttggggaggtacttttctgttgacggtggggccagaggggggcccgtgggcccttgcccacccagtcctcctcccagacggcccagagaaagatcccctgggcctgtggatacccggagccccgccagtagcggcaaagcaccgccccggggcggactgacaggggctacttctcccgcctggacacgcggcgggaaacagggtgagacgggatag

SEQ ID NO: 201861 - DNA, 3114 bp, synthetic construct
  misc_feature 1..3114: note = Description of Artificial Sequence: Synthetic coding sequence
  source 1..3114: mol_type = other DNA
atgaccgtgggcttcaacagcgacatcagcagcgtggtgcgggtgaataccaccaattgccacaaatgtctgctctctggaacatacatcttcgccgtcctgctagtgtgcgttgtgtttcattccggcgctcaggaaaagaattacactatcagggaggagatccctgagaacgtcttgattggcaatctgttgaaggacctgaacttgtctctaattccgaataaaagtctgacaaccacaatgcaatttaagcttgtatataagacgggcgatgtgccactaattcggattgaggaagataccggtgagatctttactaccggtgctagaatcgaccgcgagaagctgtgtgcgggcatacctcgagacgaacattgtttttacgaagtggaggttgccatccttccagacgaaatctttcggttggtcaagatccggttcctaattgaggacatcaatgacaatgctcccttgttcccagctaccgtcattaatatctccatccccgagaatagcgccatcaacagtaaatacaccctaccagccgctgtggacccagacgttggaattaacggggtccagaactatgaattaattaaatcgcagaatattttcgggttagacgtgattgagaccccagagggggataagatgcctcagctgatcgtgcaaaaagaactcgacagggaggagaaagatacctacgttatgaaggtgaaagtcgaagacggcggattccctcagcgttctagcacggcgattctgcaggtgagcgttactgacacgaatgacaaccaccccgtatttaaagagaccgaaatcgaggtctctattcccgagaatgcacccgtcggaacatccgttacccagctgcacgcaacagacgccgacattggtgagaacgccaagattcacttctctttttcaaacttagtgtccaatattgcaaggcgattgttccatttaaatgcgacgacaggcctgatcacaattaaggaaccactggacagggaagagactcccaaccataagctgctggtgctggcctccgatggcggcctgatgcctgcacgcgccatggttctggtgaacgttacagatgtaaacgataacgtgccctccatcgacatacggtacatagtgaatcctgtgaatgatacggtcgtcctttcagaaaacattcctctgaacactaagatcgcgctgattactgtcaccgacaaggatgcagatcacaacggcagagtgacttgctttacagaccatgaaatcccctttaggctccggccggtattctccaaccagtttcttcttgaaaacgcggcgtacctcgactacgaaagcactaaggagtatgccataaagttgcttgctgctgatgcggggaagcctcccctgaatcagtccgccatgctgttcattaaggtcaaggacgaaaacgataacgctccagtcttcacgcaaagctttgtgaccgttagtattccagagaataattcccccgggattcagctcatgaaggtgagtgcaacagatgcagactcaggcccaaacgctgaaatcaactatttgttaggtccggacgccccccccgaattttctctggacaggcggaccggcatgctgaccgtcgtgaaaaaactggaccgcgaaaaggaagacaaatatctgttcaccatcctggctaaggacaatggagtacctccattaacatcaaatgtcactgtctttgtgagcatcattgaccagaacgacaacagccctgtgttcacacacaacgaatacaaattttacgtaccagagaatctgccacgacatggtacagttggattaattacagtgacggaccctgattacggggataactcagccgtgacacttagtattctggacgagaatgacgattttacaatcgatagccagacaggcgtcatccgccccaatatcagttttgatagagaaaaacaggagagttatactttttacgtaaaggccgaagacggggggcgagttagtcggtccagtagtgctaaagtgactatcaatgtcgtcgatgtgaatgataataaacccgtgtttattgtccctccctacaattattcatacgagctggtattgcctagcaccaaccctggcacagtggtttttcaggttatcgccgtcgacaacgacaccggaatgaacgctgaggtgcgatattctatcgtgggtggaaacaccagagatctgtttgccattgatcaagagaccgggaacatcacactcatggaaaagtgcgacgtcaccgatctggggctccatagggtgctggtcaaggcaaatgacctcggccagcccgacagcctctttagtgtcgtgatcgtcaacctgttcgttaatgagtccgtaactaacgccacactgatcaacgagcttgtgcggaagtcaatcgaggccccagtgacaccgaacaccgagatcgccgatgtttcatcccctaccagcgattacgtgaagatcttggtggcggctgtggcgggaacgatcacggtcgtcgtagtgattttcattacggctgtggtgaggtgtcggcaggccccacatcttaaggcagcgcaaaagaacatgcagaactctgaatgggcaacgccaaacccggagaatagacaaatgatcatgatgaagaagaagaaaaaaaaaaagaaacatagccccaaaaacttactcctgaacgtggtgaccatcgaggaaaccaaggctgacgacgttgacagtgacggcaaccgcgtgaccctggatctccctatagatctcgaggagcagaccatgggaaagtacaattgggttaccacccccactacttttaaacccgactccccagatctagctcgccactacaaatcagctagtccacaaccagcattccagatccagcccgaaactccactgaacttgaagcaccacatcatccaggagctaccactggacaatacctttgttgcatgtgattccatctctaactgtagttcatcctccagtgacccatactcggtttcagactgtggctatcccgtgacaaccttcgaggtgccagtctccgttcatacacggccaacagatagtaggacatag

SEQ ID NO: 201862 - DNA, 3147 bp, synthetic construct
  misc_feature 1..3147: note = Description of Artificial Sequence: Synthetic coding sequence
  source 1..3147: mol_type = other DNA
atgttccgggtgggcttcctgatcatcagcagcagcagcagcctgagccctctattactcgtgtcagtggttagagtaaacactaccaactgtcataagtgcttactatcaggaacctacatcttcgccgtgctacttgtatgcgtcgttttccactctggggcacaggagaaaaactacactatacgggaagagatccctgagaatgtgctcatcggtaacctccttaaagatctcaacctctccctgattcccaacaaaagcttgacaactacgatgcagttcaagctcgtttacaaaaccggagacgttccactcatccgcatagaggaagacacaggcgagatcttcaccaccggcgccagaattgacagggaaaagctctgtgcaggaatcccacgagacgagcactgtttttatgaagtcgaggtcgccattctgccagacgagattttcagactggtcaagatcagatttcttatcgaggacattaatgataacgcaccgctctttccggctacagtgatcaatatctccatccccgagaactcagcgatcaactctaagtatactttgcccgcagccgtagacccggatgtggggatcaacggagtacagaattatgaactgataaagagccaaaacatattcggtctcgatgtgattgagactcccgaaggcgacaaaatgccccagcttattgtgcagaaggaactggatagagaggaaaaggacacttacgtgatgaaagtgaaagttgaggacggcggtttccctcagaggtcctccacagccatcctgcaagtgtccgtgactgatacaaatgataatcaccctgtgtttaaagagacagagatagaagtgtctatacccgaaaatgcaccggtgggaacaagcgtcactcagctgcacgccaccgatgctgatatcggcgagaatgccaagatacatttcagcttcagcaatttggtatctaatatcgccagacgcctcttccatctgaatgctacaacaggcctgatcaccataaaggaaccactggatagggaggaaacgccaaatcacaagttgctggtgctggcctccgacggtggactaatgcctgcgcgtgcaatggtgttggttaatgttaccgacgtcaatgataatgtcccatctatagacatccgctatattgtcaatccagtaaatgatactgttgtactgtccgaaaatatacccctcaacacgaaaatagccctcattactgttacggataaggatgcagaccataatggtagggtaacgtgctttacagaccacgagattccattccggttgagacccgtcttttccaatcaattcttgctcgagaatgcagcctacttggactacgagagcaccaaggagtatgctattaagctcctggccgccgacgccggcaagcctccacttaaccagtccgcgatgctctttattaaagtgaaggacgagaatgacaacgctcccgtgtttacgcagagtttcgtaactgtaagcataccggaaaacaattctccgggaatccagctcatgaaagtcagcgccaccgatgcggactccggcccaaacgctgagattaattatctcctcgggccagatgcacctcctgaatttagcttggatagacggaccgggatgctgaccgtggtgaagaaactggacagagagaaagaggataagtatctgtttacaatcctcgccaaggacaacggagtccccccgcttactagcaacgttaccgtgtttgtctcaattatcgatcaaaacgataatagcccggtgttcacccacaacgagtacaaattttacgtccccgagaacctccctagacatggaaccgtcgggctgattacagtaactgatccagactacggcgacaactccgcagtgaccctgtcaattctggatgaaaatgacgatttcacaatcgactcccaaacaggtgtgattagaccgaacatatcattcgatagggagaagcaggaaagctacactttctatgtgaaggccgaagacggaggtcgtgttagtagaagtagttcagcgaaggttactatcaacgtcgttgacgtgaacgataataagccagtcttcatcgtgcccccatacaattacagttatgagttagtacttccgtccacgaaccccggaacagttgtattccaagttattgccgtggataatgatacgggcatgaatgccgaggtcagatactctattgttggcgggaacactcgggacctgttcgcaattgaccaggaaaccggtaacattaccctgatggagaagtgcgatgtcaccgacctggggttgcatcgggtcttagttaaggccaatgatcttggacagcccgattccctgttctcagtggttattgtgaacctgttcgtaaacgaaagcgtgaccaacgcaaccctcatcaacgaactggtgcgcaaaagcatcgaggcccccgtcactcctaacactgaaattgccgacgtcagctcgcccacaagcgattatgtgaagatcttggtcgccgcagtcgcgggcactataacagtggtagttgtgattttcataaccgctgtggtacgctgccggcaggccccacacctgaaagctgcccaaaaaaatatgcagaactcagagtgggccaccccgaatccagaaaaccgtcagatgatcatgatgaagaaaaaaaaaaaaaagaagaaacactcccctaagaatctgctcctgaacgtggtgacaatcgaagaaacaaaggcagacgacgtagattcagacggcaatcgcgtcacccttgacttacccattgacctcgaagagcaaactatgggtaaatataactgggtgacgacaccaacaacttttaaacctgattcaccagatttagctagacattataagagtgctagtccacaaccagcctttcaaatacagcccgaaacacccctgaatcttaaacatcacatcatccaagaactccccctcgacaacaccttcgtggcgtgcgactccatctctaattgctcctcttcaagctccgacccctattcagtctcagactgtgggtacccagtgaccacattcgaggtgcctgtgtccgtccacaccaggccgaccgatagtagaacatag

SEQ ID NO: 201863 - DNA, 3960 bp, synthetic construct
  misc_feature 1..3960: note = Description of Artificial Sequence: Synthetic coding sequence
  source 1..3960: mol_type = other DNA
tgagtggtgcgggtgaacaccaccaactgccacaagtgcctgctgagcgggacctacatcttcgccgtcctcttagtatgcgtagtgtttcacagtggagcccaggagaagaattatacaataagggaagagataccagagaatgtgctcataggaaatctgctcaaagatctgaaccttagtctgattcccaataagtcacttacaacaacaatgcagttcaaactggtttacaagaccggtgacgtgccactaattcgtatcgaggaagataccggagaaatctttaccactggggccaggatcgatcgcgagaagctctgtgcagggatcccaagagatgaacactgtttctacgaagttgaagtggccatccttcccgatgagatcttccgattggtcaagatcagattccttatcgaggacattaatgacaatgctccactgttcccagccaccgtgattaacatctccatcccggaaaattctgctatcaattccaaatatacgctgcctgccgccgtggaccccgatgttggcatcaatggtgtgcagaattacgagctgattaagtcccagaatatctttggcctagatgttattgaaactcccgagggcgacaaaatgccgcagctcatagtgcagaaggaactggacagggaggaaaaggacacctacgtgatgaaagtgaaagtcgaggatggcgggttcccccagagatcgagcaccgctatcctccaggtgagcgtcaccgacacaaatgataaccaccctgtgtttaaagagacggaaatcgaggtgagtattcctgaaaatgcgcctgtgggcacctccgtcacccagcttcacgcaactgatgcagatatcggtgaaaacgcaaagattcacttcagtttcagtaacctagtgtccaatatcgctaggcgcctcttccatttgaacgccactaccggactgataacgattaaggaacctttagatcgagaagaaactcccaatcacaagttgctggtcctggcttccgacggcggccttatgccggctagggccatggtcctggtaaacgtgaccgacgtaaacgacaatgttccttccatagatatcaggtacatcgtgaacccggtgaatgacacagtagttctgtccgagaacatacctctgaacacaaaaatcgctctgattaccgtcactgacaaggacgctgatcacaacggccgcgtcacctgctttactgaccatgagatcccctttagactccggcctgtattttccaatcagttcctcctggaaaatgcggcctatctggattatgagtctaccaaggaatacgccatcaaactactggccgccgatgctggcaaaccacccctgaaccagagcgcgatgctgtttataaaggtcaaggatgaaaatgataatgcccccgtgttcacacaatccttcgtgactgtctccatccccgaaaacaactctcccggcatccagttgatgaaggtgtcagccactgatgcagacagtggacccaacgctgagattaattatctgctggggcctgacgcccctcccgaattttccctggatcggcgcaccggcatgcttaccgtggtgaaaaaactagatagggagaaggaagacaagtatttgttcacaattctggcgaaagataatggagttcctcctttgacaagtaacgtaaccgttttcgtttctattatcgatcagaatgacaactcaccggtattcacccacaacgaatacaagttctatgtgcccgagaatttgcctcgacacggcactgtgggcttgattactgtaaccgaccccgactacggtgataactcagctgtgacattatccattctcgatgaaaacgatgattttacaatcgattcccaaacaggagttattaggcccaacatcagcttcgaccgggaaaagcaagagtcatataccttttatgtgaaggcagaagacggggggagagtgtctaggtcttcatcagctaaggtgacaatcaacgttgtggacgtgaacgataataaaccggtctttatcgtgccaccgtataattatagctatgagctcgtactcccaagcacgaatcccgggactgtggtctttcaagtgatagctgtagataatgacacggggatgaatgccgaagttcggtatagtatcgtggggggaaacacccgcgacctattcgccatcgaccaggagacaggcaacatcacactgatggaaaaatgtgatgtgactgacctaggactgcatagggtcctggtgaaggcaaatgacctgggtcagccagattccctcttttctgtggtaatcgtgaacctgtttgtgaacgagtccgtgacaaatgccacacttatcaacgagctggtcagaaaaagtatagaggccccggtcacacccaatactgagattgcagacgtatccagtccaacctccgactacgtcaagatcttagttgctgccgtggcaggcaccatcaccgttgttgtggtgatctttatcaccgcagttgtgaggtgtcgccaggccccacacctcaaggcggcacaaaaaaacatgcagaactccgaatgggcgaccccaaatccagagaaccgccagatgattatgatgaaaaaaaagaaaaagaaaaaaaaacatagtcccaagaatttgttgctcaatgttgtaaccatagaggagacaaaggctgatgacgtggatagtgacggcaaccgtgtgacactggacctaccgattgacctggaagaacaaacaatgggaaagtacaactgggttactacacctactacattcaagcctgactctcctgatcttgcgagacactataagagcgcatccccacagcccgccttccagatccagcctgagacccctctcaacttgaaacaccacattattcaggaactacccctggataacacattcgtcgcctgcgactccataagcaattgttccagcagtagtagcgatccttactccgtatcagactgcggttaccccgtaacgacattcgaagtccccgtatccgtacacacccgtcccagtcagagaagagtcactttccacttgcctgagggctcccaggaaagctcaagtgacggcggcctgggagatcacgatgctggctccctgacctcaacctcacatggactgcctctcggatacccccaggaggaatattttgacagggctaccccctccaatcgtacagaaggcgatggcaactccgaccccgaatccacctttatcccaggtctgaaaaaggaaattaccgttcagccaactgtggaggaggcatccgataattgtacacaggagtgtcttatttatggccatagtgacgcgtgttggatgcctgcaagcctcgatcattcctcttcatcacaggcccaggcctcggctctatgtcactccccgccgttaagccaggctagcacgcagcaccacagccctcccgtgacccaaactattgtactctgtcacagtcccccagtaacacagactattgctctgtgtcacagccctccccctattcaagtcagcgctctgcatcatagtccaccacttgttcagggaacagccctgcaccatagccctcctagtgcccaggcatccgctctatgctatagccccccgctcgcccaggctgcagcaatttctcacagctcctcattacctcaggttatcgctctgcatcgctcacaagcacaatcttcggtgtccttgcagcagggctgggtccagggggcaaacgggctgtgttccgtggaccagggagtgcagggaagcgccacatcccagttctatacaatgtcagagcggctgcacccctctgacgattcaatcaaggtcatcccccttaccacctttgcaccccgtcagcaggcacggcctagccgcggtgattcacctattatggaaacacatcccttgtag

SEQ ID NO: 201864 - DNA, 1080 bp, synthetic construct
  misc_feature 1..1080: note = Description of Artificial Sequence: Synthetic coding sequence
  source 1..1080: mol_type = other DNA
atgcggagcatccggaagcggtggaccatctgcaccatcagcctgctgttgattttctacaagactaaagagattgcccggacggaagagcatcaggagacacaattaatcggcgatggagagctctcactgagtagaagtctagtcaactcttctgacaagatcatccgaaaggcaggatcttctatctttcagcataatgtggagggctggaaaatcaactcatcgctggtgctcgagattcgaaaaaatatcctacgctttttagacgcagagcgtgacgtgtccgttgtgaagtcttcctttaaaccaggggacgtcatccactacgtattggaccggcgcaggaccctgaatatcagccatgacctgcacagccttctgccagaggtgtcccctatgaagaatcgcagatttaaaacatgtgcagtggtcggaaattccggtatcctgttggacagtgagtgcggcaaggagatcgattcccataacttcgtgatcaggtgtaacctggcaccagtcgtggagtttgctgccgatgttggcactaaatctgattttattactatgaatccatccgttgtgcaacgtgccttcggcggcttcaggaacgagagcgatcgggaaaagtttgtccaccggttatcgatgttaaatgattcggtcctttggatccctgcgttcatggtaaaggggggagaaaaacacgtggagtgggtgaatgcactgatcctcaaaaataaattgaaagtaaggacagcttacccatcactgcgactgattcatgcggtccggggctactggctgactaataaggtcccaatcaaacgcccaagcactggcctgctgatgtacactctggctacgcggttctgcgacgagatccacctgtacgggttttggccattcccaaaggacctaaacggaaaagccgtgaagtatcactactatgacgacttgaaatacaggtactttagtaatgcctctcctcaccgaatgccgttggagtttaagactcttaatgtcctccataacagaggggcccttaagctaacaaccggaaaatgtgtgaaacagtag

SEQ ID NO: 201865 - DNA, 72 bp, synthetic construct
  misc_feature 1..72: note = Description of Artificial Sequence: Synthetic coding sequence
  source 1..72: mol_type = other DNA
atgatgcagctgctgcagctgctgctgggcctgctgggccccggcgggtacctgttcttactgggcgattag

SEQ ID NO: 201866 - DNA, 3480 bp, synthetic construct
  misc_feature 1..3480: note = Description of Artificial Sequence: Synthetic coding sequence
  source 1..3480: mol_type = other DNA
atgtacctgagcatctgctgctgcttcctgctgtgggcccccgccctcacacttaaaaaccttaactattccgttccagaagagcaaggcgccggtacagtaattggcaacatcggcagggacgcccgcctccagccaggcttaccgccagccgagcggggtggaggaggccgatctaagtctgggtcctaccgagtcctcgagaacagcgcacctcatctgttggatgtagacgcagactctgggctgttgtatacgaaacagcgcattgaccgcgagtctctgtgcagacataacgccaagtgtcagcttagtttagaggttttcgcaaacgacaaagagatctgcatgattaaggtcgagatccaagacatcaacgacaatgccccaagcttttcaagcgaccagattgaaatggacatcagcgagaacgctgcccccggcactaggtttccattgacttccgcccatgaccccgacgccggggagaatgggctgagaacgtatctgctaacaagagacgaccacggcctgttcggcctggatgtcaaaagtcgcggcgacggcactaagtttccggaattagtgatacaaaaagctcttgatcgtgagcagcagaaccatcatacactcgtactaaccgccttagacgggggagagccaccaaggagcgcgaccgtccaaattaatgtaaaggtaatagactccaacgacaacagccctgtatttgaggcaccaagctatcttgttgaactgccggaaaatgcccctctgggaacggtggtgattgacttgaacgctacagacgccgatgaggggccgaacggcgaggtgttgtattccttctcttcctatgtccctgatcgagtaagggagcttttttccattgacccaaagaccggcctgattagggtgaaggggaatctggattatgaggagaatggcatgctggaaattgacgtgcaggcccgtgacctgggcccgaatcctatcccagcacactgtaaggtaacggtgaaattgatcgatagaaatgataatgccccctcaattggcttcgtctccgtgcggcagggagcactgtccgaagcagcgcctcccggcacagtcatcgcgctggtgagggtgaccgacagggacagcggaaagaacggccaattgcagtgtagggtgctgggaggaggggggaccggaggagggggcgggcttgggggccctgggggcagtgttccatttaagctggaagagaactatgataacttctacaccgtcgttactgataggccactcgatcgtgaaacacaagatgagtacaacgtgactatagtcgcgcgggatgggggatcccctcccctgaatagtaccaagagttttgctattaaaatcctggatgaaaacgataacccccctagattcactaagggcctgtacgtgctgcaagtacacgagaacaacattccgggtgagtacctgggaagtgtattggcccaggaccccgatcttggccagaatgggaccgtgtcctatagtattctccccagtcatattggggacgtttcgatttacacctacgtctctgtgaacccaaccaatggggctatctacgctttgcgtagttttaacttcgaacagactaaggccttcgaattcaaggtgttagcaaaggattccggagcacccgcccatctcgagtctaacgctacagtgagagtgactgttttggacgttaatgataatgccccagtaattgtcctgcctactctacagaatgatacggcggaactgcaggtgccgaggaacgcaggactcggctacctagtatccaccgttagggccctggacagtgatttcggcgagtcaggcaggctgacatacgagattgtggatgggaatgatgaccacctctttgagatcgatccatcctctggggagattcgtactcttcacccattttgggaggacgtgacacctgtcgtggagctggttgttaaagtgaccgaccacgggaaaccaaccctcagcgctgtagcgaaactcataattaggtccgtttcagggtccctgccggaaggcgttccaagagtgaacggggagcagcaccattgggatatgtcattgccgttaatcgtcactttatctacgatctcgatcatcttactcgctgccatgatcaccatcgccgttaagtgcaagcgcgagaacaaagagattagaacttacaattgtaggatagccgagtactcacacccccagctcggaggcgggaagggaaagaaaaagaagattaacaagaatgatatcatgttggtgcagtctgaagtagaggagcgaaacgcaatgaatgttatgaatgtggtgtcttccccaagtttagcaacctcgccaatgtacttcgactaccagactcgtctgccacttagttcccctaggtccgaagttatgtacctgaaacctgctagcaataaccttacggtgccccagggacacgcaggttgtcacacctcctttactgggcaggggacaaacgcatccgaaacaccagcaactaggatgtcaatcatccagacggataatttccctgcggagccaaattacatgggatcccgacagcagtttgtgcagagtagcagcacctttaaagaccctgaaagagcctccctgcgtgattccggacacggcgattcagatcaagcggatagtgatcaggatacgaacaagggctcatgttgtgacatgagcgttagagaggcactgaagatgaaaactacaagtacaaagtcccaacccctcgagcaggaacctgaagagtgtgtcaattgcactgacgagtgtcgggtgcttggccattcagacaggtgctggatgcctcagtttcccgcagcaaaccaggccgaaaatgccgattatcggacgaacctgttcgtgcctacggtagaggcaaatgtggagactgaaacatacgaaactgtcaacccaacaggcaaaaagacgttctgtacatttggtaaagacaaaagggaacatacaatcctgatagcaaacgtaaagccatacctaaaggctaagagggcgctgtctccactgctgcaagaggtacctagtgcctcatcgtccccgacaaaagcatgcattgagccctgtacctcgaccaagggtagcctggatggatgcgaagctaaacccggcgccctggccgaagcatctagtcagtaccttcctactgattcgcagtatttgagtccgagtaagcagccacgggaccccccatttatggcgtcagatcagatggcccgggtctttgctgatgtgcacagccgggcgagcagggattcctctgaaatgggagcagtgctggagcagttagaccaccccaatcgagatctcgggagggagtccgtcgatgctgaggaggtcgtccgggaaatcgacaagctcttgcaagattgtcgtggcaacgacccagtcgcagtgcgaaagtag

SEQ ID NO: 201867 - DNA, 3408 bp, synthetic construct
  misc_feature 1..3408: note = Description of Artificial Sequence: Synthetic coding sequence
  source 1..3408: mol_type = other DNA
atgcaccagatgaacgccaagatgcacttccggttcgtgttcgccctgctcattgtgtccttcaatcacgacgtcctcggaaaaaacctgaaatataggatatatgaagaacaacgggtgggaagcgtgatagccaggctgtcagaagatgtcgctgacgttttgctcaagcttccgaatccgagtacagtgcgctttagagcgatgcaaagaggaaatagcccgctgctggttgtcaacgaggacaacggagaaatatcaattggggccaccatagacagagagcagctatgtcagaaaaatttgaattgctcaattgagttcgatgtcatcaccctccccaccgagcacttgcaactgtttcacatcgaggtggaagtcctagatatcaatgataactccccacagttttccaggtctctgatccctatcgaaatttcggaatcagcagcagtgggtacccgcatacctctggatagcgcctttgacccggacgtcggggaaaacagtcttcacacctactccttatccgcgaacgacttttttaatatcgaagtacggaccagaactgacggagcaaaatacgctgagttgattgtggtccgggagctagatcgggagcttaaaagtagttacgaactgcaactgaccgcttcagatatgggggtaccgcagagatctggcagcagcatactaaaaatcagtatctccgattcaaacgacaatagtcctgccttcgaacaacagtcttacatcattcagctgctggagaattctcctgttggtacattgctgctggacctgaacgcgacggaccctgatgaaggcgccaatgggaaaatagtctactccttttcttctcacgtttctccaaaaatcatggagacctttaaaatcgattcagagcgtggccatcttacactcttcaagcaggtcgattacgaaattacaaaatcatatgaaatagacgtgcaggcccaggatctgggtccaaatagcatcccagcccattgtaagatcatcataaaggttgttgatgtgaacgacaataagccagaaataaacatcaacctgatgagccccggcaaagaagagatcagttatatctttgagggagaccccatcgacaccttcgtggcactggtaagggtacaggacaaggattccggtctgaatggagaaatagtgtgtaaactccacggccacgggcattttaaattgcagaaaacgtatgaaaacaattaccttattctgaccaacgccaccctggatcgagaaaaaagaagcgaatactcattaacagtgattgccgaggaccgtggcacccccagtctctctaccgtgaaacatttcactgtccagatcaatgatattaatgataatcctcctcattttcagcgctcccggtatgaattcgtgatatcagaaaacaatagcccaggggcctatattaccacagttacagccacagatcccgatctgggagaaaacggacaggtgacctatactatactggagagttttatactcgggtcctcaatcactacttacgtgacaatcgacccaagcaacggggctatctacgctcttcggattttcgatcacgaagaagtcagccagattacatttgtggtggaagcgcgggacggagggtctccaaagcagttggtgagtaataccaccgttgtgttgacaataatagacgagaatgacaacgtgccggtggtcattgggcctgcattgaggaacaataccgctgaaattaccatccccaaaggtgccgagagcggttttcatgttacccgcatcagggcaatagacagggacagcggtgtgaatgccgagttaagctgcgcaattgtggccgggaatgaggagaatatctttattatcgatccccgaagctgcgatatccatacaaatgtcagcatggatagcgtgccgtatacggagtgggaattgtccgttatcattcaggataaggggaacccccagctccatacgaaagtactgctgaagtgcatgatatttgagtacgctgagtccgtgacatccacggccatgactagcgttagccaggccagtctggatgtcagtatgatcatcatcatcagtcttggggccatttgcgcagtcttgctagtcattatggtgctcttcgctactagatgcaaccgggaaaagaaagatacacggagctacaattgcagagtggctgaatcaacttatcaacatcatcctaaacgacccagtcgccaaatccacaagggagatatcaccctggtgcccactatcaatggcaccctacccattagaagccatcatcgaagttctcctagttcctcacccactctggagaggggacagatggggagccgacagtcacacaattcccatcaaagtctgaactcccttgtgaccatctctagcaatcatgttcccgagaactttagcctggaactaacccacgctactcccgcggtggagcaggtgagtcaacttttgagcatgctgcatcaagggcagtaccagccccgcccttcatttcgggggaacaaatactctcggagttacagatacgccctgcaggacatggacaagttctccttgaaggattctggtaggggcgactccgaggcaggcgacagtgattatgatctgggtcgcgactctcctattgatcgcctactgggtgaaggcttctccgatcttttcctaacagacggtaggatccccgccgcaatgaggttgtgcactgaggaatgccgggtcctgggtcactccgatcaatgttggatgccccccctgccaagccccagcagcgattaccggagtaacatgtttatccccggagaagagttccccacccagccccagcagcagcatccacaccagagccttgaggacgatgcccagccagccgactcaggcgagaagaagaaaagcttctcaacattcggcaaagactcccctaatgatgaggacacgggggataccagcaccagctcgctgttgtccgagatgtcttctgtcttccagcgtctcctgccacctagcttggatacttattccgagtgttccgaggttgatcgctccaattctctggagcgcaggaaaggccctctgcccgccaaaactgttggataccctcaaggcgtggccgcatgggcggcttccacccactttcaaaaccccacaaccaattgcggcccacccttggggacccattcctctgtgcagccgtcatcaaaatggcttcctgccatggaagagatccctgagaattacgaagaggacgatttcgataatgttctgaatcatctcaacgatggaaaacatgagctgatggatgcgagcgagcttgtggcagagattaacaagctgctccaggacgtgcgtcaatcttag

SEQ ID NO: 201868 - DNA, 3405 bp, synthetic construct
  misc_feature 1..3405: note = Description of Artificial Sequence: Synthetic coding sequence
  source 1..3405: mol_type = other DNA
atgcaccagatgaacgccaagatgcacttccggttcgtgttcgccctgctgatcgtaagttttaatcacgacgttctgggtaagaacctgaaatatagaatctatgaagagcaacgagtcggatccgttattgcacggctgtccgaggacgtcgctgatgtgttgctaaagcttcccaacccaagtaccgtccgattcagagctatgcaacgcggaaactctccactcctggttgtgaacgaggataatggtgagataagtattggcgccaccatcgatagagagcagctctgccaaaaaaacctcaattgcagcattgagtttgacgtgattaccctgcctacggaacacttacagctgtttcacattgaggtggaggtactggacattaatgacaactccccccagttcagtcggagcctcataccgattgagatcagcgaatctgcagctgttggaacgagaatacctctggattccgccttcgatccagatgtgggcgagaactccctgcacacttactcattgagcgctaatgacttctttaatatcgaggtgcgcactcggaccgatggggccaagtacgctgaactcatagtggtaagagagctggatagggaacttaaatcatcctacgaactacagctcacggctagcgatatgggagtgccgcagcggtccgggtcctccatcctgaaaatcagcatctccgacagtaatgacaatagccccgcattcgaacaacagtcctacatcattcagctgcttgaaaactcccctgttggcaccctgctgctggatctgaatgcgactgaccccgacgagggcgccaatggcaagattgtttattccttttcttcacatgtgtctcccaagatcatggagacttttaaaatcgattctgagcgcggacacttgactttatttaagcaggtggactatgagattacaaagtcctacgagatcgatgttcaggcccaggacctgggccctaactccatcccggctcactgtaagatcattatcaaggtggtggacgtcaatgataacaaacccgagatcaatattaatttaatgtcccccggaaaggaggagatctcttatatctttgagggcgacccaatcgatacattcgttgcactggtccgtgtgcaggataaagactccggccttaacggcgagatagtgtgtaagctccacggacacgggcatttcaaactacaaaagacatatgagaacaactatctgattctgactaacgccacgctagatagggaaaagcgaagcgagtatagcctaacggtcattgccgaagatcgggggacaccaagtctgagcaccgtcaagcactttaccgtgcagattaacgacattaatgataaccctccccactttcagcgctccaggtacgaatttgtgatttccgaaaataacagccccggcgcgtatatcacaaccgtgacagcgaccgatccagatctcggggagaacgggcaggttacatacacaattctcgaatcttttatattgggctcaagcatcaccacttatgtcaccatcgacccgagtaacggggcaatatacgctctgcgaatttttgaccacgaggaggtctcacagatcacgttcgtcgtggaagccagagacggaggctcccctaagcagcttgttagcaacaccacagtggtgctgacgatcattgatgagaacgacaatgtacctgtggtgattggcccggccttgcgcaacaatactgcagaaatcacaatccctaaaggcgcggaatctggattccacgtcacacggattcgagccatcgatagggattccggtgtcaacgcagagctgtcctgcgctatcgttgctggaaacgaggaaaacattttcatcattgatcctagatcctgcgacatccacacaaatgtgtccatggactcagtaccatacacagaatgggagctatcagtcatcatacaagacaaggggaatcctcagttgcataccaaggtgttactgaaatgcatgattttcgagtatgctgagagtgtcacatcgacggcgatgacatcagttagccaagcgtctctggatgtctcgatgattattatcataagcctcggggccatctgcgccgtactgcttgtgattatggtcctcttcgcaacaaggtgcaatcgggaaaagaaggatacccggtcttataactgtagggtggccgagtccacataccagcaccatccaaagcgtcctagccggcagattcataaaggagacataacccttgttcccaccatcaacgggacactgcccatcagatcacaccatagaagtagcccttcaagtagccccactcttgagcggggacagatgggtagtcgacagtcccacaactcccatcagtccttgaactcattagtcaccatctcgtctaaccacgtgccagaaaacttttcattagaattaacacacgccacacccgccgtcgaggtttctcaactgctttccatgttacaccaaggtcagtatcagcctcgaccaagcttccgggggaacaagtacagccggtcctatcggtatgccctgcaagacatggacaagttcagcctgaaggactcaggccgcggggacagcgaggccggcgatagtgattacgatctggggcgcgacagtccaattgacaggctgctgggtgaaggtttttccgacttgttcttaactgatggacgcattcctgcggccatgagactttgcaccgaggagtgcagagtattgggacattccgaccagtgttggatgccccctttgccctctccctcctcagattaccgctctaatatgttcatccctggggaagaatttcctacccagcctcagcagcaacatccccaccaatccctggaagatgacgcacagcccgccgactctggcgaaaaaaagaagagtttcagcacgttcggcaaagactcaccaaatgatgaggacactggcgacacttctacaagcagtctgttgtcagaaatgtcctcagtgttccagaggctgctgccaccatctctggatacttacagcgagtgttcagaggtggacagatcaaattcattagagagacggaaggggcccctccccgcaaaaactgttggctatccccagggtgtggcggcctgggcggcctccacccattttcagaatccgacaacaaactgtggacctccactggggactcattccagtgtgcagccgtcctcgaaatggctgccagctatggaagagatccctgaaaattacgaagaagacgacttcgacaatgtcctgaaccatctgaacgatgggaagcacgaactgatggacgctagcgaactagtggcggagattaacaagctgctgcaggacgtgcgtcagtcttag

SEQ ID NO: 201869 - DNA, 3306 bp, synthetic construct
  misc_feature 1..3306: note = Description of Artificial Sequence: Synthetic coding sequence
  source 1..3306: mol_type = other DNA
atggagagcctgctgctgcccgtgctgctgctgctggccatcctgtggactcaggccgctgctctcatcaacttaaagtacagcgtggaggaagagcaacgtgccggcacagtgattgccaacgtcgcaaaagatgcccgagaagcaggatttgctcttgacccccgacaggccagcgcctttagggtggtcagtaatagcgcccctcatctagttgatatcaatccctctagcggcttattggtcactaaacagaagatagaccgcgaccttctgtgtagacaatccccaaaatgcatcatttccctagaagttatgtcctcttcgatggaaatttgcgtgattaaagttgagatcaaggatttgaacgacaatgctccgtcttttcccgccgcacagatcgagttagaaatcagtgaagcagccagtccggggacacgaatcccattggacagtgcctatgatccagattcgggttcatttggcgtgcagacatatgaactaacaccaaatgagcttttcgggctggagatcaaaacaagaggcgatggcagccggtttgctgagctggttgtcgaaaagtcgctcgaccgggaaacacagtcgcactattcgttccggataactgcactggatggcggtgacccccccaggctcggcactgttgggctgagcataaaggtgactgactcaaacgacaacaatcccgtcttttcggaatccacctacgccgtcagcgtcccggagaactctccacccaacaccccagtgattagattgaatgccagcgacccagacgagggaaccaacggacaggtggtgtactccttttacggctatgtcaatgacagaacacgcgaactcttccagatcgatccacacagtggactggtgactgtaactggagccttggattatgaggagggtcacgtctatgagttagatgtccaggccaaggacttgggccctaatagcatcccggcccactgtaaagtgactgtaagtgtgctagatactaatgacaacccccctgtgatcaacctgctgtctgtaaattcagaattggtcgaagtctccgaaagcgctccacccgggtacgtcattgcccttgtgagggtgtctgaccgggatagcggattgaacggcagggtgcagtgccgcctgctggggaacgtgcctttccgtctgcaggagtacgagtcattctccactatcttagtggacggccggttagacagagagcagcacgaccagtacaatctcacaattcaggcacgggatggcggtgttccaatgctccaaagtgcgaaatcgttcaccgtgctcattacagacgagaatgataaccatccgcactttagcaagccctactatcaggtcatagtccaggagaacaacacgcctggggcctacctcctgtccgtaagcgcccgtgaccccgaccttgggctgaacggcagtgtatcttatcagatcgtcccctcccaggtacgtgatatgccagtttttacttatgtttccattaaccccaattccggcgatatctacgctctccgctccttcaatcacgagcaaaccaaggcattcgagttcaaggtgctagccaaggatgggggactaccttcgctccagtcaaacgcaaccgtccgcgtcataatccttgacgttaatgacaatactcccgtaatcactgcacctccattgatcaatggcactgcagaggtgtacataccgagaaactccggcatcggataccttgtgacggtggtgaaagccgaagattatgatgaaggagaaaacggtcgggtgacgtacgatatgacagagggagacagaggattcttcgaaatcgaccaggtgaacggcgaagtccgaaccacacgcacatttggcgagagttcaaaatcaagctacgagctcattgtcgtggcgcatgatcacggcaagacttcccttagcgcatctgccctcgttctcatatacctgagtccagcactagacgctcaggaatcgatgggcagcgtaaacctgtccctgatcttcataatagccctgggttcaatagccggtatactctttgtcactatgatctttgtcgctatcaaatgtaagcgggacaacaaggagattcggacatacaattgtagaatcgcagagtactcctacggccatcaaaagaaatcctccaagaaaaagaagataagtaagaatgacatccgcctggtgccacgcgacgtggaggagaccgacaaaatgaacgttgtcagttgctcaagccttactagcagtctgaattacttcgactatcaccagcagaccctgccccttggctgtaggaggtctgaatctacttttctgaacgtggagaaccagaacacacgcaataccagcgccaatcatatttaccaccactcgttcaattctcaaggacctcagcagcctgatctcatcattaatggtgtcccattacccgagaccgagaattattcctttgactcaaattacgtgaactcgagggcacatcttattaagtcatcatcgacatttaaggatttggaggggaattccttaaaggactcgggacacgaagagtcagatcagaccgattctgagcacgatgtacagaggtccctgtactgtgataccgctgtgaatgacgttttgaataccagcgtgacttctatgggaagtcagatgccagaccacgatcagaatgagggcttccattgccgcgaagagtgtaggatcctcggtcactccgatagatgttggatgccaaggaacccaatgccaattcgctccaagagcccagaacatgtccggaacatcatcgcactttctattgaagctaccgccgccgatgttgaggcttatgacgactgcggcccaactaagcgtacgtttgccacttttggcaaggacgtgagcgaccaccccgccgaagagcgtcctacgctcaaggggaaaaggaccgtcgacgtaactatttgttccccgaaagtgaacagcgttatacgcgaagccggaaacggctgcgaggccattagcccagtcacttcccccctccatctgaagagctctctgccaaccaagccctccgtgagttatacgatcgccctcgctccccccgccagggatctggagcagtatgtgaataacgtgaacaacggccctacacgcccgtctgaggctgaaccgagaggtgctgattctgagaaagtgatgcacgaagtgagccctatcctgaaggaggggcgtaataaagagagtccgggcgttaagcgtctgaaagacatcgtgctttag

SEQ ID NO: 201870 - DNA, 3447 bp, synthetic construct
  misc_feature 1..3447: note = Description of Artificial Sequence: Synthetic coding sequence
  source 1..3447: mol_type = other DNA
atggagagcctgctgctgcccgtgctgctgctgctggccatcctgtggacccaggcggctgcattaatcaatctcaagtactccgtggaggaggagcagcgtgctggaaccgtcattgcaaacgtggctaaagatgccagggaggctggatttgccctggaccctcgacaggctagtgcctttagagtagtctcaaactctgccccacatctggtggatatcaatccttcgagtggcctcctagtgaccaagcagaagatcgatagggacctgctttgtaggcagagtcccaagtgcattatctcgctggaggtgatgtccagctccatggaaatctgtgtgattaaggtcgagattaaagatctgaacgacaatgcccctagcttccccgctgctcaaattgagcttgaaataagcgaagctgcatcccccgggactcgcattcctctcgactccgcatatgatccagattccggatcttttggcgtgcaaacctacgaactgactccaaacgagctctttggactcgagattaaaaccagaggcgatgggtctagatttgcagaactcgtggtggaaaagtcactggatagggaaactcagtctcactactcgtttcgaattaccgcccttgatggcggcgacccgccacgcctggggacggtgggattaagtatcaaagttactgacagcaatgacaacaatcctgtctttagtgaaagcacatatgctgtcagcgtgcccgaaaactctccccccaacactcctgttatcaggctgaacgcctctgacccagacgaaggaaccaatggacaggtcgtgtactcattttacggatacgtgaatgacaggactcgagagctcttccagatagacccccacagcgggctggtaaccgtcaccggagccctcgattatgaggaaggccacgtgtacgagttggacgtgcaggctaaagacctgggaccgaacagcattcctgcgcattgcaaggtgaccgtcagcgtgctggacacaaatgataatccaccagtgataaacctcttgagcgtgaacagcgaattggtcgaagtgtccgaatctgcaccacccggctatgtaatcgccctggtccgggtttccgatcgagattccggtctgaacggccgagtccaatgtagactgctgggcaatgtgccgtttagacttcaagaatacgaatccttttccaccatcctggtggacggccgcttggaccgcgagcagcatgaccagtataacctgactatacaagcacgcgatggaggggtacccatgttgcagtccgccaaaagcttcactgttctgataaccgatgagaacgacaatcaccctcattttagtaaaccttattatcaggtcatcgtccaggaaaacaatactcctggcgcctacctcctatccgtatccgcccgtgacccagacctgggattaaacggcagcgtgagttaccaaatcgtgccttcccaggtgcgggatatgcccgtgtttacatatgtcagtattaacccgaactctggagacatctatgctctgaggtcattcaatcatgaacagacaaaggctttcgagttcaaggtgcttgccaaggatggtgggctgcccagtctgcaatctaacgcaacagtccgtgtgatcatcttggatgtcaatgataacacccctgtgatcacagcacctccacttataaacggcacagctgaggtttatattcccagaaactcagggatcggctatctggtcaccgtggttaaggccgaggattatgatgaaggagagaatggaagagtgacctacgacatgacagaaggtgatcggggctttttcgaaatagatcaggtcaacggtgaggtacgcacaacccggacatttggggagtcctctaagagctcctacgaactaatcgtggtcgcccatgaccacggaaaaacttcactgtctgcctccgcactggtgctgatctatctgagtccagctttggatgcccaggaatctatggggagcgtgaacctttcattgatctttatcattgctttggggagcatcgccggtatactgttcgtgactatgattttcgtcgccatcaagtgtaagcgtgacaacaaggagatccggacttacaactgctcgaactgcctcacaattacctgtcttttagggtgtttcattaaaggacagaattcgaaatgtctgcattgcatttccgtgtcccctatctctgaagagcaggataagaagactgaggaaaaggttagtcttcgtgggaagagaatagcggagtattcatacgggcaccaaaagaagtcgtcgaagaagaaaaaaatcagcaagaatgacatcaggctggtgcctcgcgacgtggaggaaaccgacaaaatgaacgtggttagttgttcctccctgacatcttcactaaactactttgattaccaccagcagacactgcctttggggtgtaggcggtctgaatccactttcctgaatgttgagaaccagaacactaggaatacctcagcaaaccacatataccaccactccttcaactcccaaggcccccagcaaccagacttgatcatcaacggcgtgcccctgccagagacagagaactactcttttgattctaactacgttaactcacgcgcgcacttgatcaagagctcttctacgttcaaggacttagagggtaacagcttgaaggatagtgggcacgaggaatccgatcagacagactccgagcacgacgttcagagaagtttgtattgtgatacagctgtcaatgatgtgcttaacacctcggtcacctcaatgggttcccaaatgcctgaccacgatcagaacgaaggctttcactgcagagaagagtgtcgcatcctcggccactccgaccggtgctggatgccccgcaaccctatgcctatccgcagcaagtcgccagagcacgtaagaaatatcatcgcgctgagcattgaggcaaccgcggccgatgtggaggcctatgatgactgtggccccacaaaacgtacattcgcgactttcgggaaggacgtgagcgatcatccagccgaggagcgcccaaccctgaagggaaagagaactgtcgatgttaccatatgcagccctaaagtgaattccgtcatacgggaggccgggaacggctgcgaggccatctctcctgtgaccagcccactccacctgaaaagttcactccctacaaagccatctgtgtcttacaccatcgccttagcgcctcctgcaagggatttggagcaatacgttaacaatgtcaataacggcccaacaaggccatcggaagccgagcctcgaggggctgacagcgaaaaggtgatgcatgaagtaagtcccattctgaaggagggacggaacaaagaatcaccgggagtgaagaggcttaaggacattgtcctctag

SEQ ID NO: 201871 - DNA, 3303 bp, synthetic construct
  misc_feature 1..3303: note = Description of Artificial Sequence: Synthetic coding sequence
  source 1..3303: mol_type = other DNA
atggagagcctgctgctgcccgtgctgctgctgctggccatcctgtggacacaagccgccgccttaatcaatctcaaatattcagtggaagaagagcagagagcaggaacggtcatcgctaacgttgctaaggacgcaagagaggccggcttcgctcttgatccacgtcaagctagtgcttttagagtggtcagcaacagcgcaccgcacttggtggacattaatccaagctccgggctgctcgtcacaaaacaaaagatagaccgggacctgctgtgtagacagtctccaaaatgcatcatctctctggaggtcatgtcctcttcaatggagatttgcgttataaaggtggagattaaggacctcaatgacaacgctcctagttttcccgccgctcagattgagcttgaaatttccgaggcagcatcaccagggactcggatccctttggactcagcttatgacccagatagcggatccttcggtgtccagacctacgagctcacacccaacgaactattcggtctagagattaagacccgaggagatggatccagattcgccgaactggtcgttgagaaaagtctggaccgtgagactcaaagccattacagttttcgaattaccgcgttggacgggggcgaccctcctaggctggggacagttggactatcgatcaaggtcaccgactcaaacgacaacaatcccgtcttttcggagtccacatatgctgttagtgttcctgaaaattctccacctaacacaccagtcattcgtctgaacgcctccgatccagatgaagggaccaacgggcaggtggtttatagtttctacggctacgtgaacgaccggacccgggagcttttccagatcgacccccactcaggtctggttactgtgactggagctttagattacgaggaggggcatgtgtacgaacttgacgtccaggcaaaggacctgggtccaaactctatccccgctcattgtaaggtaaccgtgagtgtgctagacacgaacgacaaccctccagtcatcaaccttctatcggtgaacagcgaactcgtagaggtctcagaatctgctcccccaggctacgtgattgccctggtccgcgtctctgatagagactccgggctgaacggcagagtacaatgtcgattgcttggcaacgtgccctttagactccaagagtacgagagcttttcaacaattttggtggacggacgtctggatagagaacagcacgatcagtacaatctgaccatccaggctcgggatggcggagtgcccatgttgcaatccgcgaaaagttttaccgttctcatcactgatgaaaatgataaccaccctcacttctcaaagccctattaccaggtaattgtgcaggagaataataccccgggcgcctaccttctgagcgtcagcgctagggacccggacctaggcttaaatggctctgtttcttatcagatcgttccctcccaggtccgtgatatgccagttttcacttacgtctcaatcaacccaaacagcggcgatatttacgccctcagaagcttcaaccatgagcagacaaaggccttcgagttcaaggtactcgctaaagacggagggttgccgagcctgcaatccaatgcaaccgtgagagtaattatcctggatgtgaacgacaatacccccgtgattaccgctccgcctctgatcaatggaactgctgaggtgtatattcctcggaattccgggataggctacctggtaacggtggtgaaagctgaagattacgatgaaggtgagaatggccgagtgacctacgacatgactgaaggagatcggggctttttcgagattgaccaggttaatggcgaggttaggacaacgcgcacctttggcgaaagcagcaagagtagctacgaattgatcgtcgtagctcacgaccatggcaaaacttcgctgtcagcatctgctctggtactcatttacctatcgccggcccttgatgctcaagaatcaatggggtctgtgaatttatccctaattttcatcatagcattgggaagcatagcagggatcctgttcgtaacgatgatcttcgtagctatcaagtgcaaacgagacaacaaagaaatccgtacctataactgtcggattgctgaatactcctacggccatcaaaaaaagagtagtaagaagaagaagataagcaagaacgacatcaggttagttcccagggacgtggaggagaccgacaagatgaatgtggtttcttgtagctccctcacttcctcacttaactactttgattaccatcagcagaccctgccactggggtgtcgcagatcagaaagtacatttcttaatgtggagaaccagaatacacgcaatacaagcgccaatcatatctaccaccacagcttcaacagtcagggaccacagcaacctgatctcattattaacggggtccctctcccagagacggagaactatagcttcgatagcaactatgtgaacagcagagcgcatctgattaagagttccacctttaaggatttggaaggcaacagtctgaaggactctggccacgaggagtctgatcagactgattccgagcacgatgttcagcgatctctatactgtgatactgccgtgaacgacgtgttaaacacgagtgtgacgtcgatggggtcacagatgcccgatcatgaccagaacgaaggcttccactgtcgggaagaatgccggatcttgggccacagcgatcgttgctggatgccaagaaaccctatgcccattagatcaaagagtcctgagcacgtccgaaacattattgcgttgtccatcgaggctaccgcagctgacgtagaggcatatgatgattgcgggcccacaaaacgcacatttgccactttcgggaaggacgttagtgatcaccctgccgaggaaagaccaacactgaagggaaagcgcaccgtggacgtgacaatttgctcgccaaaagtgaattcggtgatcagggaggcgggaaatgggtgcgaggctatctctcctgttacttcgccactccacttgaagtcctccctgccaacaaagccgtctgtgagctacaccatagccctggcaccccccgctcgggatcttgagcagtacgtcaacaacgtgaacaatggcccaacaagaccctccgaggcagaacctagaggggctgattcagagaaggtcatgcatgaggtgagccctatcctcaaggagggcaggaacaaagagtccccaggcgtaaaacggcttaaggatatagtcctgtag

SEQ ID NO: 201872 - DNA, 2094 bp, synthetic construct
  misc_feature 1..2094: note = Description of Artificial Sequence: Synthetic coding sequence
  source 1..2094: mol_type = other DNA
atgttcaccctggacgtggaggagaacgagaacggcgagcggaccccgtatctgatcgtcatgggagccctggatagggagacgcaggaccagtacgtatcaattattatcgctgaagacggcggctcgcctccattgctcggaagcgcgacactgaccattggcattagcgatattaacgataattgtcctctttttactgattcacagatcaatgtgacagtttatggtaatgctaccgtgggcacccccattgcagccgtacaagccgtggacaaagacctgggcactaatgcgcagatcacttattcatatagccagaaggtgccccaggcttctaaagacctttttcacctggacgagaatacaggagtgattaagttattctcaaagattgggggaagtgtgcttgagagtcacaagcttacgatattggcaaatggccctggatgtattcccgctgtgatcacagcgctggtaagcatcatcaaggtgatcttccgacccccggaaatcgtgccacgctatattgccaatgagatcgatggggtcgtttatctgaaagagctggagccagtgaacacgccaatcgcattctttactatcagggatcccgagggcaagtacaaagtcaactgctaccttgatggagaagggccattcagactttccccttacaaaccttacaacaatgagtacctgcttgaaaccactaagcccatggactacgaactccaacagttttacgaagtggctgtcgtcgcatggaattctgagggctttcatgtgaagagggtcataaaagtgcagcttctcgacgataacgacaacgcccctatcttcttgcagccactgattgaactgaccatcgaagagaacaacagcccaaatgcttttttgactaaattgtacgctaccgacgcagatagcgaagaaagaggccaagtatcgtatttcctgggtccggatgcgccaagttatttcagtctagatagcgtgaccgggatactgaccgtgagtactcagcttgaccgggaggagaaggagaaatataggtacaccgttagagcagtggactgcgggaagcccccccgcgagtccgtggcaacagtggcgctgacagttttggataaaaacgataactctcctcggttcataaataaagatttctccttttttgtgcctgaaaattttcctggctacggggagattggcgtgatatctgtaacggatgctgatgccgggcgaaacggctgggtcgctttgagcgtggtgaaccagagtgatattttcgtgatcgatactggcaaaggaatgctaagggcaaaggtgtctctcgatagggagcagcagtccagctacaccctgtgggtagaagccgtggatgggggggaacccgctctatctagcacggcaaagatcactatccttttgctcgatatcaacgacaatcctcccctggtcctctttccacaatctaacatgtcttacctcctagttttgcctagcacactgcccggatctccagtgacggaagtgtacgcagtcgacaaggacactggcatgaacgcggttattgcgtactctatcatcggcagacggggtcccaggcccgagagtttcaggattgaccccaaaacaggaaatattacactggaggaagctctcctacagactgactatgggctgcaccgtctgctcgttaaagtgagtgatcatggataccctgaaccactgcacagcactgtcatggttaacctcttcgtgaatgacacagtttccaacgaaagctacatcgagagccttctcagaaaagaaccagagatcaatatcgaggagaaggaaccacaaatatccattgagcccacccacagaaaggttgagagcgttagctgcatgccaacccttgtcgcgctcagtgtgatctccttaggatctattactttggtgacaggaatgggaatctacatctgccttaggaaaggggaaaaacacccaagagaggatgaaaatctcgaagtacagattcccctcaaagggaaaattgatctgcacatgcgagaaagaaaacctatggatatttcaaatatatag

SEQ ID NO: 201873 - DNA, 2856 bp, synthetic construct
  misc_feature 1..2856: note = Description of Artificial Sequence: Synthetic coding sequence
  source 1..2856: mol_type = other DNA
atgcggggccggggcaacgcccggagcagccaggccctgggcgtgtcttggtgccccgctacctggcatccccgtctcgatatgggcaggctgcatcgaccgcgatcatccacttcttacagaaatctgcctcatctgtttctctttttcttgtttgttgggccattttcttgcttgggcagttactccagggcaactgagttgctgtattctctcaacgagggactgcccgcgggggtccttattggcagtctggcagaggatttgagactcctacccaggagcgccgggagaccagaccctcaaagccagttacctgaacgcacaggcgccgaatggaatcctccattgagcttctctctagcttctaggggcctgtctgggcagtatgttacactggataatcgctccggagagctccacacgtccgctcaggaaattgacagagaggcactgtgcgtggagggcggaggcggaaccgcctggtcaggctctgtgtcaatctcttccagtccctccgattcatgtctactgctgctggacgtgttagtgctgccccaagagtacttcagattcgttaaagtcaaaatcgcgatcagggacattaacgacaatgccccacagtttccagtttctcagatctccgtctgggtccccgagaacgccccagtcaatactaggctcgcaatcgaacatcctgccgttgaccctgatgtaggcattaacggcgtgcagacttacaggctgttggattatcatggcatgtttacactagacgttgaggaaaatgaaaacggagagagaacaccctacttgatcgtgatgggcgccctcgaccgagagacccaggaccaatatgtctcgattataatcgctgaggatgggggaagccctcccctcctggggtcagccaccctcactattggaattagtgatatcaatgacaattgtccactgttcacagatagtcagattaatgtgactgtctacggtaatgctacggtcggaacccccatcgcagccgtccaagccgttgataaggatttaggaacaaatgcccagattacctactcctattcccagaaggtcccacaggcatcaaaggatctctttcacctggatgagaacactggagtaataaagctctttagcaaaatcggtgggagcgtgctagagtcgcacaagcttacaatcctagctaatgggccaggctgcattccagccgtgatcaccgctctagtatctatcatcaaggtgatatttcgacctccagaaattgtgcctaggtatattgctaatgagattgacggcgtggtctatcttaaggagcttgagccggtgaacacacctatcgccttctttacaattagagatccagagggcaaatacaaggtgaattgttatctggatggggagggaccctttcgcctgagcccttataaaccatacaacaatgagtacttactggagaccacaaagccgatggattatgaacttcagcagttctatgaagtagccgtcgttgcctggaattccgagggattccacgtcaagagggtaatcaaagtacaacttctggacgacaacgacaatgctcccatcttcctgcagccgctgatcgaattgaccattgaagagaataactccccgaatgcgtttttaaccaaactttatgctacagatgctgatagtgaagagagaggccaggtatcctacttccttggcccggacgctccttcctactttagtttagacagtgtaacaggtattctcaccgtctctacacaactggacagagaagagaaagaaaaatacagatacactgtcagggccgtggactgcggcaaacctccacgggagtcagttgcgactgtggctcttaccgttctggacaagaacgacaacagtcctcgcttcattaacaaggacttctccttcttcgtgcctgagaactttcctgggtatggtgagattggcgtgatttccgttactgacgcggacgcaggacggaacggctgggtggcactgtccgtcgtcaaccaatctgacatctttgttattgacacaggaaaaggaatgttgagggcaaaggtgtctttggaccgcgagcagcaaagttcctacactctttgggtggaagcggtcgacgggggggaacctgctctctcatctactgctaagattaccatcttgttgctggacattaacgataacccacccctggtgctttttccccaatcgaacatgtcctatctcctcgtcttgccctcaactctgccgggctctccggtgactgaggtatatgccgtagataaggacacaggaatgaacgccgtgatcgcttactccattatagggcggagaggccctagaccagaatcgttcagaatcgacccgaaaactgggaatatcactttggaagaggctcttttgcaaacagactacggactgcatagactgcttgtcaaagtaagcgaccatggctacccggaacccctgcatagtaccgtgatggttaacctgtttgtgaatgatacagttagcaacgaaagttacattgagtcactgctgcgtaaggagcccgagatcaacattgaagaaaaggaaccacagatctcgatcgagcctactcataggaaagttgaaagcgtcagctgtatgcccacactcgtggccttgtctgtgatctcactcggttcgattacacttgtcaccggtatgggaatttacatctgcctgaggaagggtgaaaagcatcctcgggaagacgaaaacctggaggtgcagatccccctgaaaggcaaaatagatctgcatatgagggaacggaagcccatggacattagtaacatttag

SEQ ID NO: 201874 - DNA, 2856 bp, synthetic construct
  misc_feature 1..2856: note = Description of Artificial Sequence: Synthetic coding sequence
  source 1..2856: mol_type = other DNA
atgcggggccggggcaacgcccggagcagccaggccctgggcgtgtcttggtgcccggcgacctggcaccctagactggatatgggtagacttcaccgcccaaggagctcaacaagttacagaaacttgccacacctcttcctcttttttctgtttgtgggtcccttctcctgtctgggctcctattcgcgggctacggaactcctctattccctgaacgaaggattgcccgccggggtactgataggatcattagccgaggacttgcgcttgctgccccgcagcgcaggaagaccagacccgcagtcacagttgcccgagcgtacaggagcagagtggaacccccccctgagctttagcctggcatcccggggactgagcgggcagtatgtgaccctagacaatcgctccggcgagctccacaccagcgcccaggaaatagatcgggaagccttgtgtgtcgagggcggcggtggtacagcatggtcaggttccgtgtcaatctcaagcagccccagcgatagctgccttttgctcctggatgtccttgtcttaccacaggaatatttcagatttgttaaagtgaagatagcgattcgggacataaatgacaatgccccacagttcccggtgtctcagattagcgtgtgggtgccagagaatgctcctgtcaacaccagactggcaatagagcaccccgctgtcgaccctgatgtgggcataaacggcgtgcaaacgtacaggctgctggattaccacggaatgtttacactggatgtagaagaaaacgagaatggagaacgaacgccatacctcatcgttatgggcgctcttgatcgagagacacaggaccagtatgtgagcattatcattgctgaggacggtggcagcccccccctgctggggagtgccacactgacaattgggatttctgacatcaatgacaattgccccctgtttaccgacagtcagatcaatgtgacagtgtacggcaatgcaacagtggggactccgatcgccgctgtccaggctgtggataaggacttgggcactaatgcacaaattacttacagttattcacagaaggtgccccaggccagtaaagacctgtttcatctggatgaaaatactggcgtcataaagctgttctcaaagataggaggtagcgttctcgaatcccataaactgacaatactggccaatggtcccggttgtatccccgctgttataaccgccctggtgagtattataaaagtgatcttccgtccacccgaaatcgtccctcgttacatcgccaatgaaatcgatggggttgtctacctgaaggagctggagcccgtcaataccccaatagccttctttacaatccgcgacccggagggaaagtataaagtaaactgttatctcgatggggaggggcccttccgattatcaccatataagccctacaataacgagtatctgttggagaccaccaagccgatggattatgaactacaacagttctacgaagtggctgttgtggcctggaactctgaggggtttcatgtcaagcgtgttattaaggtgcagctgttagacgataatgataatgccccaatttttctgcaacccctgattgaactcaccatagaggagaacaatagcccaaacgcattcctcaccaagctctacgcaacagacgcagactctgaggagcgtggccaggtctcctacttcctcgggcctgacgccccaagctactttagcttggacagcgttacgggcatcctgactgtgtcaacacagctggaccgcgaggagaaagagaagtatcgctatactgtacgcgccgtggattgtggaaaacctccccgggagtcggttgcaactgttgctctgacagttcttgataaaaatgacaactctcctaggttcattaacaaggactttagcttctttgtccccgagaacttccccgggtacggtgagatcggcgtcatctctgttactgatgctgacgcgggaaggaacgggtgggtagccctgagcgtcgtcaaccagagcgatatctttgtgatagataccggtaaaggtatgttacgagcaaaagtcagccttgaccgcgagcagcagagctcatatactctgtgggtggaagcggtcgatgggggcgagcccgcactgtctagcaccgctaagattacgattctcctactagacatcaatgacaatccccccctcgtgctgttcccacagtccaacatgtcttatctgctggtgctgcccagcaccctgcccggctcgccggtgacagaggtctatgccgtggacaaggacacaggcatgaatgccgtgatcgcgtattccatcataggccgaaggggccctcgacccgaatcattccgcattgaccctaaaactggtaatattacacttgaggaggctctgctgcagactgactatgggttgcatcgcttgttagtgaaggttagcgaccacggctaccccgaaccactgcatagcactgtcatggtcaacctcttcgtgaacgacacagtctctaacgagtcttatattgagagcctgctccggaaggagccagaaatcaatattgaggagaaggagccccagatctctatagagccaacgcataggaaggttgaatccgtgtcctgcatgcccactctggtagctctgagtgtgatcagtctgggcagcatcacattggtgactgggatgggcatttacatttgcctaaggaagggagagaagcaccccagagaggacgagaatctagaagtgcaaatcccactcaaagggaagatcgacctccatatgcgggagagaaagcccatggacatttccaacatttag

SEQ ID NO: 201875 - DNA, 3603 bp, synthetic construct
  misc_feature 1..3603: note = Description of Artificial Sequence: Synthetic coding sequence
  source 1..3603: mol_type = other DNA
atgctgcggatgcggaccgccggctgggcccggggctggtgcctgggatgttgcttactgcttccactgtctctgtcactggcagccgctaagcagctcctacggtatagactcgctgaagagggcccggccgatgtgagaattggcaatgtggcgagcgatctcgggatcgtcacgggctccggagaagtcacgttctccctggaatccggatctgagtatctgaaaattgacaacctgacaggcgagctgagcactagtgaacgcagaatcgatagagaaaagttgccccagtgtcagatgattttcgatgaaaacgaatgctttttggacttcgaagtcagtgttatcggtcccagtcagtcgtgggttgacctttttgagggtcaggtgatcgttttagatataaacgataatacgcctacattccctagtcccgtcttaacactgaccgtggaagagaaccgaccagtggggaccctgtatctgctgcccacggcaactgatcgtgatttcggccggaacggcattgagagatacgaattgttgcaagaaccaggaggcggcggatctgggggggagtctcggcgcgccggcgcagcagattctgcaccttatcccggcggggggggaaacggtgcatccgggggtggctctggtggatctaagcgacggctggacgctagcgaaggaggcggcgggacgaatcctggtggccgatcatcagtgttcgagctgcaggtcgccgacacccctgacggagagaagcagcctcaattgattgtaaagggagtctatgaagctgacctcgccgaaaatagtgctcccgggactcctatccttcagttgcgcgctgccgatcttgatgtgggggttaatgggcagattgagtacgttttcggggctgccactgagagtgtccgtcgtcttttaaggctcgacgaaacttctggctggctatctgtgctgcatagaatcgatcgggaggaagtcaaccaactgcgcttcacagtgatggcaagagacagagggcagccacccaagactgataaggctaccgtggtcctgaacatcaaggacgaaaatgacaacgttcccagtattgaaatacgaaagattggcaggattccactcaaggatggggtggcaaatgtggcagaagatgtcctagtcgatacccctatagcgctcgtgcaagtctctgatcgagatcagggcgagaatggggttgttacatgcacggtggttggagacgtaccttttcagttgaagcccgcttcggacaccgagggcgaccaaaataagaagaaatatttcttgcacacctcaactccactggactacgaagccacccgggaatttaatgttgttatagtggcagtagactccggttccccctcactttcctctaacaacagcttgatagttaaggtaggagacactaatgacaacccacccatgttcggccagagtgtcgtggaggtgtattttccggaaaataacatacccggggagcgggtggccacagttttggccaccgacgcggatagcggtaaaaacgccgagattgcatactctttggatagcagcgtgatgggaatctttgctattgaccccgacagcggtgatattctggtgaacacggtgctggatagggagcagaccgatagatacgagttcaaggttaacgccaaagataaggggattcctgtactgcagggttctaccactgttattgtgcaagtggcagataagaatgacaacgaccctaaattcatgcaagatgtatttacattctacgtcaaggagaatctccagccaaatagcccagtgggaatggtgaccgtcatggacgcagataagggccggaacgccgagatgagcctctacatcgaagagaacaataatattttctcaatagaaaatgacaccggaacaatatattcgaccatgtcttttgatagagaacatcagaccacctacacattcagagtgaaagccgtggatggcggggaccctccaaggtcagctaccgccactgttagcctgttcgtgatggacgagaatgacaatgcccctactgtgacacttcccaaaaacatctcatataccctcctgccacccagtagcaacgttagaaccgtggtggccactgttctggccactgactccgacgacggtattaacgcagacctcaactactcgattgtcggggggaaccccttcaaactttttgaaatcgacccaacttctggagtggtgtccctggtcggcaagctgacacagaagcactacggcctgcacagactggtcgtccaggtcaacgattcaggacaaccctctcagtcaacaacgacactggtccacgtctttgtcaacgagtccgtgtctaatgcgactgccattgattcccagatagcgcggtcactgcatatccctctaacccaggacatcgccggtgacccttcttatgaaatttctaaacagagactgtctatcgtgatcggcgtggtggccgggattatgaccgtaattctgatcatccttattgtagtgatggctaggtattgcaggagtaagaataagaacgggtacgaggcgggcaaaaaagaccatgaagatttcttcactccgcagcagcacgataagtccaaaaagccaaagaaggataagaaaaacaagaaatctaaacagcctttgtatagtagcatcgttactgtggaagcctctaaaccgaacggccaacgatatgacagtgtgaatgaaaaactgagcgactcaccctcaatggggcgttatcgcagcgtgaatggcgggcccgggtcaccggaccttgcacgccattataagagtagctctcctctgccaacagtccaactacacccccagtctcccacagcaggcaaaaagcatcaggccgtccaggacctgccacctgcaaatactttcgtgggcgctggagacaacatctccatcggatctgaccactgtagcgagtactcttgccagaccaacaacaaatactccaaacagcccttccggcgcgtgaccttcagtgtggtgtcccaaccccaagacccccaccaggggagtctgcaaagctgctacgactctggcctggaggaatccgagacaccatcttccaaaagcagttccggacctagactgggcgccctacctctgccggaggacaactacgagcgcactacgcctgacgggtctgtcgactctaggcctctaccagacgttgcactgacagggaagtgcaccagagagtgcgacgagtatggccatagcgactcttgttggatgcccgtgaggacatctcctgagaggaagaagtcccagcctaagctgagtaccttcatgcccgtcgatgagagggggtcgcaggaaaagcttgcaaatggagaggcggctatcatgggagatcgcaatcgcaatttactgaacaaaaaactaacctctagttatgagaccttctcggccgctagcttctcaaagaacgaagaagccaaccccgaggacatacccctgactaagaccggtgaatacaagccatcccccgtaaacaccctcactcggcgggaagtttacctgtag

SEQ ID NO: 201876 - DNA, 3210 bp, synthetic construct
  misc_feature 1..3210: note = Description of Artificial Sequence: Synthetic coding sequence
  source 1..3210: mol_type = other DNA
atgctgcggatgcggaccgccggctgggcccggggctggtgcctgggatgctgcttactgctgccgctctccttgtccctggctgcggccaagcaacttcttcggtacagactcgcagaggagggtcccgctgatgtacgaatcggcaatgttgcctcagacctgggcattgttactggctccggggaagtaacttttagcctcgaatccggaagtgagtatttgaagattgacaacctgactggagaactgtctacctcagaaagacggatagaccgcgagaagctcccccagtgccaaatgatattcgatgaaaacgaatgtttcctggacttcgaggtttctgtgatcggcccttcacagagctgggttgacctctttgagggtcaggtgatcgtgcttgacattaatgataatactcctaccttcccatctcctgtcttgacattaaccgtggaagagaatcgtccagttggcaccctgtatttattgcccactgctaccgatagagatttcgggcgaaacggaattgaaagatacgaattgttacaggaacccggaggagggggctcagggggggagtcgagaagagcgggagctgccgatagcgccccctatcctgggggtggcggcaatggtgcctctgggggaggtagcgggggaagcaaacgccgacttgatgccagtgagggaggcggaggaacaaaccctggcggtcgaagtagtgtgtttgagctgcaggtggcggacactccggatggggagaaacagcctcagctgatcgtcaaaggggccctggatcgtgaacagcgggacagctatgaacttacactaagggtgcgtgacggcggcgacccgccccgcagcagtcaggccatcctgcgcgtcctgattacagacgtcaacgacaactctccacgctttgagaagagcgtctacgaagccgacctcgctgaaaactcggccccaggaacccccatcttacaactgcgagccgcggacctggatgttggggttaatggccagatcgaatatgtgttcggggcagccacagagtctgtaagacggctgcttcgtctggacgagacctctggttggttatcggtcttgcaccgaattgatcgggaggaagtgaatcagttacgtttcactgtcatggcacgtgacagaggccagccgccaaagacggataaggcaaccgtagtgcttaatattaaggatgagaacgataacgtcccctccattgagattagaaagataggaaggatcccactgaaagatggggtcgctaatgtcgccgaggacgtccttgtggacacaccaattgctttagtccaagtgagcgatagagaccagggggaaaatggcgttgtgacctgcaccgtcgtcggtgacgtgccttttcagttaaagccagctagtgatacggaaggcgaccagaataagaaaaaatactttctacacacaagcacccctctagactacgaggcaacaagagagtttaatgtcgttatcgtagccgtggactctgggtccccaagcctatcctccaataactccctgattgtaaaagtgggcgatactaacgacaacccccccatgttcggtcagtcagtcgtcgaagtgtacttcccagaaaacaacatccccggtgagagagtggcgaccgtactggccaccgacgctgattcagggaaaaatgcagagattgcctacagtctggacagcagcgtgatgggaattttcgccatagatccagacagcggtgacatcctggtcaatacagtactggaccgggaacaaacggatcggtatgagttcaaagtgaatgctaaggataaaggaatccccgtgctccagggatccaccactgtcatcgtccaggtggctgataagaacgacaatgaccctaagttcatgcaggacgtgtttactttctatgtgaaagaaaatctgcagcctaacagtccggtgggcatggtgactgtaatggatgccgacaagggccgaaatgcggagatgtccttgtatatagaagagaacaacaacatcttttcaattgagaacgatacaggcaccatttacagcacaatgtcctttgatcgggaacaccaaactacctacacattccgcgtaaaggccgtggacggcggggatccgcctaggagtgccacagctacagtgagtctcttcgtaatggatgaaaatgataacgccccaactgtgacactccctaagaacatatcatacaccttgctaccccccagctccaacgtccggactgtggtggctaccgtccttgctaccgacagcgatgatggaatcaatgcagacctgaattatagcatcgtggggggtaatccttttaaactcttcgaaattgatcctacgagtggcgttgtctccttagtcggtaagttgacacagaagcactatgggctgcatagactcgtggtgcaggttaatgattccggccagccctcacagtctacgacaacactcgtgcatgtattcgtgaacgaatccgtgtcaaacgccacagccatcgatagccagatcgccaggtccctccatatccctctcacacaggacattgcgggtgatccttcctatgagataagcaagcagcggctctctatcgtgatcggcgtggttgcagggatcatgactgtcatactcatcattctgattgttgtcatggccaggtattgtcgctccaaaaataaaaacggatatgaggctgggaaaaaagatcacgaggacttcttcacgccacagcaacatgataagtctaagaagcctaaaaaggacaagaagaacaagaaatccaaacagccactgtattcatctattgtcaccgtcgaggcaagcaagccgaacgggcagcgttatgactcagtcaacgagaagctatctgattcgccttctatgggccgttataggagcgtgaatggaggcccgggcagcccagacctcgcgcgccactataaatcatcatcacccttgcctactgtccagttacaccctcaaagccctaccgcggggaagaaacaccaagccgttcaggacctcccccccgcgaacaccttcgtgggtgcgggcgacaacatcagcatcggatccgatcattgctctgaatatagctgccagacaaacaataagtactccaagcaaatgcgacttcacccctacatcaccgtgtttggctag

SEQ ID NO: 201877 - DNA, 3768 bp, synthetic construct
  misc_feature 1..3768: note = Description of Artificial Sequence: Synthetic coding sequence
  source 1..3768: mol_type = other DNA
atgctgcggatgcggaccgccggctgggcccggggctggtgcctggggtgttgcctgttgctgccactctcactgtctctggcagctgccaagcagctgctaagataccggctcgctgaagaggggccagccgatgttcgtattggcaacgtggcctccgatctgggcatcgtcacgggatctggggaagtgacattctctctcgaatctggctctgagtacctgaaaattgacaatctgaccggagagctgtctacttctgagagacgcattgaccgggaaaagctgccccaatgtcaaatgatattcgacgagaatgagtgtttcctcgattttgaagtaagtgttattggtcccagtcaaagttgggtcgacctatttgagggacaggtcattgtgttggatatcaacgacaatacacctaccttcccttcccccgtgctgacactgaccgtagaggagaaccgaccagtcggaacattatacttgctcccaacagcaacagatagagattttggtcgcaatgggattgaacgttatgagctgctgcaagagcctggcggtggcggcagtgggggggagtcgcggagggctggagccgcagactccgctccataccccggaggtggcggcaacggcgccagcggaggaggatccggcggatcgaagcgaaggctagatgcgtccgaagggggcggcggaaccaaccctggaggacgaagttcagttttcgaactgcaagtcgctgacacccctgacggagaaaagcagccacagctcatagtcaagggggcattggatcgggagcagcgcgatagctacgagctgacactacgcgtgcgggacggaggtgaccccccgcgctcctcccaagcgattctcagggtgctgatcactgacgtgaatgacaacagtccacgctttgagaaatcagtgtacgaagcagacctggccgagaactcagctccagggaccccaatcctgcagttgagagctgcagacctggacgtcggggttaatgggcagatagaatatgtctttggcgcggcaacagagtctgtgagaaggctactgcggctggacgagacctctgggtggcttagtgtgctgcaccgaatcgatcgagaggaggttaaccagctgagattcactgtgatggcacgcgataggggtcaacctcccaaaaccgacaaggcaacagtcgtgctgaatatcaaagacgagaatgacaatgttccgtctatcgagattaggaagataggccgtattcccttgaaagacggagtggctaacgtggccgaggacgttctggtggatactcccattgcgttagtgcaagttagtgaccgggatcagggagagaacggcgttgtgacatgcacagtagtgggagacgtgccgttccaacttaaaccagccagtgacactgagggtgaccagaataagaagaagtacttcctgcatacttctacccccctcgactatgaagcaacccgagagttcaacgtcgtaatcgtggctgtggattctggctctccttctctttcctctaataactcactaatcgtgaaggttggcgataccaacgataacccaccaatgtttggccagtcggttgtggaggtgtactttcctgaaaataatattcccggggaacgcgtcgcaaccgtgttggccacagatgccgacagcgggaaaaacgctgagatagcctacagtctagattcatctgtgatggggatcttcgctattgaccctgattccggtgacatcctggtgaacacggtgctcgacagagagcagacagataggtatgagttcaaggtgaacgccaaggataagggcatccctgttctgcagggttccactaccgtgatcgtccaagtggccgacaagaacgacaacgaccccaagttcatgcaggacgtgttcaccttctacgtgaaggagaatcttcagcccaacagccccgtgggcatggtgactgtaatggacgcggataaggggcggaacgcggaaatgagcctgtacatcgaagaaaataataatattttctcaatcgagaacgataccggtacaatctacagcaccatgtctttcgatagggaacaccaaacgacctatacatttagagtaaaggctgtggacggtggagacccgccgaggtccgctacagccactgtcagtctgtttgtgatggatgagaatgataacgcccctaccgtaaccctgccaaaaaatatctcgtacaccctcttgcctccatccagtaacgtgagaacggttgtggcaactgtgctcgcaactgatagcgacgacggcataaatgccgacttaaattattcaattgtcgggggcaatccgttcaagctttttgagattgatccaactagtggggtggtaagtctcgtgggtaagcttacacagaagcattatgggttgcatcgcttggtggtgcaggtcaatgatagtggtcagccttcccagagcacaactacactcgtgcacgttttcgtgaatgagtccgtatccaatgcgacagccatagattctcaaattgcgcgttccctccacatccccctgacgcaagatattgccggtgatccatcatacgaaataagcaagcagaggttgtctatcgtcataggcgtcgtcgcgggtatcatgacagtgatcctgataatcctgatcgtggtcatggctcgttactgccgctcgaaaaataaaaatgggtatgaggccgggaagaaggaccacgaggacttcttcacacctcagcagcacgacaagtccaagaagcccaaaaaggacaagaaaaacaagaaatctaagcaaccactatattcctcaattgtcaccgtcgaagcaagcaaaccaaatggacagcgctacgactctgttaacgagaagctgtctgattccccttccatggggcgttatcgcagcgttaatggcgggcccgggtcgcccgacctcgctaggcactataaatctagctccccactgcccacggtgcagctgcacccacagtcccctaccgcaggcaaaaagcatcaagccgtgcaggatcttccacccgctaatacttttgttggagcgggtgataacatttcaatcgggagtgaccattgctccgaatacagttgccaaacgaataacaagtactccaaacaacccttcaggcgcgtgaccttcagcgtggtcagccagccacaggacccgcaccagggcagcctgcagtcttgctatgattcgggactcgaagaaagtgagacaccctcaagtaaatctagtagtggcccccgtctgggagccctgcccttgccagaagataactatgaaaggaccacccctgacggctcagtgggcgaagccgaacatatggagaatgatagccgacccttgcctgatgtcgctctgaccggcaagtgcacgcgagagtgcgacgaatacggccactcagattcatgctggatgcctgtgagaacttcacctgaaaggaagaaatctcagcctaagctctcaaccttcatgccagtggacgagagaggaagtcaggaaaagctcgccaacggagaagccgctattatgggtgacaggaatcgaaatctcctgaacaagaagcttacttccagttacgaaaccttctctgccgcctcctttagtaagaacgaagaggcaaacccagaggacatccccctgactaaaaccggggaatacaaaccttcacctgtgaacacactgacccgcagggaggtgtacctgtag

SEQ ID NO: 201878 - DNA, 2922 bp, synthetic construct
  misc_feature 1..2922: note = Description of Artificial Sequence: Synthetic coding sequence
  source 1..2922: mol_type = other DNA
atgagccccgtgcggcggtggggcagcccctgcctgttccccctgcagctcttctccctttgctgggtcctgagcgtcgcccaaagcaaaacggtgcgctacagcacatttgaggaggacgcgccgggcaccgtaataggaacgctggccgaggatctgcacatgaaagtgtccggcgacacttctttcaggcttatgaagcagttcaatagttctttactccgagtccgcgagggcgacggacagcttactgtgggggacgccggtcttgatcgggagaggctgtgcgggcaggccccacagtgcgttctggcatttgatgtcgtgtccttcagtcaggagcagtttagactggttcatgttgaggtggaggtgagagacgttaacgaccatgccccccgttttccccgggctcaaatacccgtcgaggtaagcgagggcgccgctgtgggtacacgtatacccctagaggtgcctgtggacgaagacgttggggcaaatggtctgcaaaccgttagactggcggaaccacactctccattccgcgtggagctccaaacccgcgctgacggcgcgcagtgtgccgatctcgtgctgctgcaggagctcgacagagagtcacaggccgcttactccctggaattggttgctcaggacgggggccgccccccacggtccgccacggccgctctcagtgtgagggtgctcgacgctaacgatcattctccagcattcccacagggtgccgtggcggaggtggaattagctgaggatgccccagtcggatctctgctccttgatttggacgccgctgatccagatgagggtcctaatggagatgtggtgtttgcgtttggagcgcggacacctcccgaagctagacgcctattccgcctggacccacggagcggacggctcactctggctggccctgttgattacgaacggcaggatacgtatgagctggacgtgagggcacaagaccgtggccccggaccgcgagcagcaacatgcaaggtcattgtgcggatccgcgatgtgaatgacaatgctccagacatagccataacacccttggcagcacctggggcccctgcaacaagtccctttgccgcagctgccgccgccgctgctttggggggcgctgatgccagttctcccgctggcgcaggtacccctgaagctggagctacatctctggtgccagaaggagcagcaagagaaagcctcgttgcccttgtgtcaacctcagatagagactccggggcaaatggtcaagtgaggtgtgcactttacggccatgaacactttcggctacagcccgcctatgcaggttcatatctggtcgtgactgcggcttctctagaccgcgagcgaatcgcggagtataacctcacactcgttgcagaggatagaggcgctcctcctctgcggacagtgcgcccgtataccgtccgcgtgggtgatgagaacgacaacgctcctctcttcactcgcccagtgtacgaagtgtcagtcagggaaaataaccccccgggggcctacctggcgaccgtggctgccagagatcgcgacctgggccgaaacgggcaggttacctatagacttctcgaggccgaggtcggtcgcgcggggggcgccgtcagcacttatgttagcgtggatcctgctaccggtgccatctacgcgctgaggagctttgactacgaaacgctccgccagctcgacgtccggatccaagcaagcgatggtgggagtccacagttatcatcctctgcccttgtccaggttagagttctggaccagaatgatcacgctcctgtgctggttcacccagcacccgccaacggcagcttggaggttgccgtgcccggaagaactgctaaggacaccgttgtggcccgcgtgcaggcacgagatgcagacgaaggcgctaacggagagctggcctttgagctgcagcaacaggaaccccgcgaagcctttgccatcggtaggaggaccggagaaatcttgctgacgggtgaccttagccaagaaccgccaggacgagtgttccgggccctgctggttatttcggacggcggcaggccaccacttactaccacagcaactgtttctttcgtggtgactgccgggggtgggaggggtcctgcggctcccgcatccgctggttctcctgagaggagtcggccccctggttcaagattaggtgtcagtggctccgtgctgcaatgggatacccctctgatcgtaatcattgtgctcgcaggcagttgtaccctgttattggcggccattatcgccattgccaccacttgtaacagacgcaagaaggagccttatggcgctagtccaggatttggtaaagagccagctccacccgtcgccgtgtggaaagggcatagctttaacacaattagcggccgagaggccgagaagttttctggcaaggactcaggcaaaggagatagtgattttaacgacagcgactcagacatttccggggacgcactcaagaaagatttaatcaaccatatgcagtccgggctgtgggcttgcaccgccgagtgcaaaatcttaggacatagcgatcggtgctggagtccttcatgttctgggccaaacgcccacccttcgccacacccacctgcccagatgtccaccttttgcaaatctactagtctcccgcgggaccctctgcgccgcgataactattaccaggctcagctgcctaaaaccgtgggactgcaatccgtgtacgaaaaggtgttacaccgcgactacgacaggactgtcacgttgctgtcccccccccgccccggtcggctccccgatttacaagagataggggttccactgtatcagtcaccaccaggtcgctacttgagtcctaaaaagggagccaacgagaatgtgtag

SEQ ID NO: 201879 - DNA, 3213 bp, synthetic construct
  misc_feature 1..3213: note = Description of Artificial Sequence: Synthetic coding sequence
  source 1..3213: mol_type = other DNA
atgagccccgtgcggcggtggggcagcccctgcctgttccccctgcagctgttctcactgtgctgggttctctctgtggcacagagcaagaccgtccgttacagcaccttcgaggaagatgcccctggaacagtgatcggcacactggccgaggatctccacatgaaagtctctggtgatacgagctttcgactcatgaagcagtttaatagcagcttgctgagggtacgtgagggcgatggccagctaacagtgggcgacgcgggcctggaccgggagcgcctgtgcgggcaggcacctcaatgcgtgttggccttcgacgtcgtgtctttctctcaggaacaattccgcctcgtccatgtggaggtcgaggtcagagacgtcaacgatcacgcacccagattcccgcgtgcccagattcctgtcgaggtctccgaaggcgctgcggtgggcactcgcataccgcttgaggtcccggtggatgaagatgtaggggccaacggtctgcagaccgttcgcctggccgagccgcacagtccattccgcgtcgagctgcagactcgagctgatggcgcccaatgtgccgacctcgtgttgctgcaggaactggatcgagagagccaagcagcctattcgctggagctcgttgcacaggacggaggccgaccaccgagaagcgccacggccgccctgagcgtgagggtgctcgacgcaaacgatcactctcccgcgttccctcaaggcgcagtggctgaagtggagcttgccgaagacgctccggtaggatctctgctgctggatctggacgctgcagatcccgatgaaggtcctaacggcgatgtggtgttcgctttcggcgctaggactcccccagaggcccgcagattgttccgcctcgatccacggagcggaagactgacactggcaggaccggttgattatgaacgacaggatacgtacgagttggatgtcagggcacaggaccggggacctgggcctcgtgcagcaacctgcaaggttatcgtgcgcatccgcgatgttaacgataacgcacccgatatagctataacacctttggcagcccctggcgcgccagccacatcaccattcgctgccgctgcagctgcagctgctttagggggggccgacgcatcatcacctgcaggcgccggcacgccagaggctggggctacaagcctagtccccgagggcgccgctcgcgagtctttggtcgctctggtctcaactagcgatcgggattctggagcaaatggacaagtacgttgcgctctgtatggccacgagcatttcaggttacaacctgcttacgcagggtcctatctagttgtaacagctgcatcactggatcgagagaggatcgccgagtataatctgactttagtcgcagaggaccggggggcccccccactgaggacagttcggccatacaccgttagagtgggagatgaaaatgacaatgcacctctttttaccagacctgtgtacgaggtgtctgtcagggagaacaatcctcccggagcatacctcgccacagtggccgccagggaccgggatcttgggcgcaatggccaagttacttatcgcctgctggaagccgaggtgggccgagccgggggagccgtgagcacttacgtctcagtggatccagcaacaggggcgatttacgcgctgaggtcgtttgattacgaaactcttcgtcagctggacgtgcgtatccaggcaagcgatgggggttcccctcagctctctagtagcgctctcgtgcaggttcgcgtgctggatcaaaatgatcatgcccctgtgctcgttcaccctgctcctgctaacgggtctctggaggttgcggttcctggcaggactgcaaaagatacagtcgtggccagggtgcaggctagagatgctgacgagggcgccaatggcgagctcgccttcgagctccagcaacaagaaccgcgggaggcatttgccatcggcagacgcacaggcgaaattctcctgaccggagacctctctcaggagccgcccggccgcgttttccgggcgctgttggtaatttccgatggtgggaggcccccgttaactaccacagcaacggtgtcatttgtcgtcacagcaggaggcggccgaggacctgccgcacccgctagcgccggaagtccagagagatcacgaccccctggtagcaggctgggcgtgtccggaagcgtcctccagtgggacacgcctttaatcgtcattatcgtgctagccggtagctgtacattgctgctggcggctataattgccatcgccacgacctgtaatcggaggaagaaagaagtgcggaagggaggcgctctccgcgaagagagacccggagccgccggaggcggtgcttctgctccagggtcacccgaggaggccgcccgaggcgccggcccgcgcccgaatatgttcgatgtcttgactttcccaggtactggcaaggcaccttttggcagcccggccgcagatgccccacctcccgccgtggcagccgccgaggtgccagggtcagaagggggtagcgctacaggcgagtccgcctgtcatttcgaaggccagcagaggctccggggagcacatgcagagccatatggcgcctccccaggatttggcaaagaaccggcccctcctgtggcagtatggaaaggccacagctttaataccatctctggtagggaagccgaaaaattctccggcaaagatagtggaaagggagatagcgattttaacgactctgattcggacattagtggagatgcgttgaaaaaagatttgatcaaccatatgcagagcgggctatgggcttgtaccgctgaatgcaagattctgggacactccgatcggtgttggagcccgagttgctcagggcctaacgctcaccccagtcctcatcctcctgcccaaatgagtacattctgcaaatccaccagcctgccccgggaccctctcagaagagataattactaccaggcacagctcccgaaaactgtaggcctacagagcgtgtacgagaaagtcctgcatagagattatgatcgtaccgtgacactgctgagtccaccccgacccggacgtttacctgatctccaggagataggagtgccgctttatcagagcccgcctgggaggtatctctcaccgaaaaagggggccaacgagaacgtgtag

SEQ ID NO: 201880 - DNA, 1791 bp, synthetic construct
  misc_feature 1..1791: note = Description of Artificial Sequence: Synthetic coding sequence
  source 1..1791: mol_type = other DNA
atgagccccgtgcggcggtggggcagcccctgcctgttccccctgcagttattcagcctctgctgggtgctctcagtcgcacagtccaaaactgtgcggtactctactttcgaggaagatgccccgggcaccgtgatcgggaccttagccgaagatttgcacatgaaggtaagcggggacactagctttaggctaatgaaacaatttaactcatctttactccgcgtccgagagggggacggacagctgacagtcggcgatgcaggactggacagggagcgcctatgtggtcaggccccgcaatgtgtgcttgccttcgacgtcgtgtccttctctcaggaacagtttagactggttcatgtcgaagtggaggtaagggatgtgaacgatcacgctcccgtgctggtgcatccagcccccgctaatggcagtctcgaagtcgcagtgcccggccgaaccgccaaggataccgttgtcgcacgcgtgcaggctcgcgacgcagatgagggcgcaaatggggaactggcttttgagttgcagcagcaggaacctagggaggcctttgcaattggacgtaggaccggagagattttgttgactggagacctaagccaagagccgcccgggcgggtgttccgcgccctgctggtgatttcggacgggggcaggcctccactaacaaccacggctaccgttagcttcgtcgtgaccgctggcggcgggcgggggccagcagctcccgcttccgccggatctcccgaacgttccaggccccctggctcaaggctcggcgtgtctggttccgtgctgcaatgggatacaccgcttatcgtgatcattgtgctggcgggatcctgcacgcttcttctggcagccattattgccatagccactacctgcaaccgacgaaagaaggaggtcaggaaagggggcgcactgagagaggaaagaccaggcgccgccgggggaggtgcatctgccccaggcagtcctgaggaagccgctcgtggcgctgggccaagaccgaacatgttcgatgtgctgaccttcccagggactggaaaggcgcctttcgggagcccggctgccgatgctccccctcctgccgtcgctgccgccgaggtcccagggagtgagggaggaagtgctactggcgagagtgcgtgccactttgagggacaacagaggttgaggggcgctcatgccgaaccatacggggctagcccaggcttcggcaaagagcccgctcctcccgtggcggtgtggaaagggcattccttcaataccattagtggaagggaggccgaaaaattcagtggtaaagacagcggtaaaggggactcggatttcaacgacagcgattcagacatcagcggagacgctcttaagaaggatctcatcaaccatatgcagagtggcctttgggcttgcaccgcagaatgcaagatcctggggcactcagatcgatgctggtccccctcctgctccgggccaaacgcccacccttcgcctcacccccctgctcagatgtccaccttctgcaagtcaacttcccttccacgggatcctttgcggcgagataactattatcaggctcaacttcccaagaccgtaggactgcagtcagtatacgagaaggttctgcaccgcgattacgatagaactgtgacacttctgagcccgcctagaccagggcgtctcccggatcttcaggagatcggggtgccgctgtaccagtcacctccaggaagatatttaagtcctaaaaagggcgctaacgagaatgtgtag

SEQ ID NO: 201881 - DNA, 2742 bp, synthetic construct
  misc_feature 1..2742: note = Description of Artificial Sequence: Synthetic coding sequence
  source 1..2742: mol_type = other DNA
atgagccccgtgcggcggtggggcagcccctgcctgttccccctgcagcttttttctttgtgttgggtgctaagcgttgcacagagcaagaccgtccggtacagtacattcgaagaagacgccccaggcacggtgatcggtaccctggctgaagaccttcatatgaaggtgtctggcgatacttccttcaggctgatgaagcagttcaacagcagcttgcttagagtgcgcgagggggacgggcagctcactgtgggcgacgccggcctggatagggagcggctgtgcggccaggctcctcagtgcgtgctggcatttgacgtggtgagtttttcccaagagcaattccgacttgtacacgtggaagtggaagtacgggatgttaacgatcatgcacctcgcttcccacgcgcacaaataccggtggaggtgtctgaaggagccgccgttggcaccagaattccacttgaagtgcccgtggatgaggacgttggtgcgaatggactgcagaccgtgaggctggcggagccccacagcccattcagggttgaactacaaactagggccgacggggcacaatgtgctgatctggtgcttcttcaggaactggacagggaatcccaggccgcttatagcttagagctcgttgcccaggatggtgggaggccacctagaagcgccacggccgccctttccgtgagggtccttgacgccaacgaccactcccctgcattcccacagggagccgtggcagaagtggagctggcagaggacgcccccgtgggcagtttgttgctggatcttgacgctgctgaccccgacgagggccctaatggtgacgtggtattcgcctttggagcccgcaccccgcccgaggctaggaggctttttcggttagaccctcgcagcggtaggctgacacttgcgggacccgttgactacgaaagacaagatacctacgagcttgacgtcagagcccaggacagaggacccgggccgcgggccgcgacgtgtaaagtcattgtccgaattagggacgtgaacgacaacgcccctgacattgccataaccccccttgccgcccctggggccgggaatttaactcttcgccgaaacggccaagtgacttacaggctgttagaggcagaagtgggcagggcgggcggggccgtgtctacatacgtgtcagtcgacccagccaccggcgccatctacgccctaaggagcttcgattatgagaccttgcgccagttggatgttagaattcaggcaagcgatggtggcagtcctcagttaagtagtagtgcactggtgcaggttagggttctggatcagaacgatcacgctccggtgctggtccacccggcccctgcaaatggctccttggaagtggccgtccccgggcgcacggctaaagatactgttgtggcacgtgttcaggccagggatgccgatgagggtgcgaatggggaattggccttcgaacttcagcagcaagagccaagggaagcgtttgccattggtcgcagaaccggggaaatcttgctgacaggtgatctaagccaagaacccccaggccgagtgtttagagcccttcttgtgattagcgatggaggcagaccccccctgactaccaccgcaacagtgagctttgtggtcaccgctgggggtggcaggggacccgcggcccctgcctctgcaggctcacctgaaagaagtcgaccacccggatcaagactaggcgtgtccggctcagtgcttcagtgggatacaccattgattgtaatcattgtcttggctgggagctgtacgttgctgctggctgcaattattgccatcgcaacaacatgcaaccgccgtaagaaagaagtgcgcaagggtggcgctctgcgggaagagcgcccaggagctgccggtggaggtgcctctgcccctgggtctcctgaggaggccgcgagaggcgccggcccacggcctaacatgttcgatgttctgacatttcccgggactggtaaagctcccttcgggtctcccgcagccgacgcgccgcccccagcggttgccgcagccgaggtcccggggtctgagggagggagcgccacaggtgaaagtgcatgccactttgagggccaacagaggctgagaggcgcgcatgccgagccctacggtgcctcaccaggtttcggcaaggagccggccccccctgtagccgtgtggaaaggccactcttttaacaccatcagtggtcgggaagctgagaagttcagtggcaaagactctggaaaaggagattccgacttcaatgacagtgattctgatatctctggtgacgcactgaagaaagatcttatcaatcatatgcagagcggattgtgggcgtgcacagccgagtgcaaaattctggggcattcagatcgctgttggtctccaagttgcagtggacccaatgcacatccaagcccccacccaccagcccaaatgtctactttctgtaagtctacaagcctgcctagagatccactgcggagagataactattaccaggctcaactcccgaaaactgttgggctgcagagcgtctacgagaaagtgttgcatcgggactacgatcgtacagtgacactcctgtcccccccaaggcccggaagattgcctgatctccaggagatcggggtgccgctttatcaatctccccctggtcgctacctgagtcctaagaagggtgccaacgagaatgtgtag

SEQ ID NO: 201882 - DNA, 3612 bp, synthetic construct
  misc_feature 1..3612: note = Description of Artificial Sequence: Synthetic coding sequence
  source 1..3612: mol_type = other DNA
atggacctgcgggacttctacctgctggccgccctgatcgcctgcctaagattggacagtgctattgcccaagaactgatctacaccatccgggaggaactcccagaaaacgtgcccataggaaatattcccaaggatcttaatattagtcacatcaacgctgccaccgggacctcagcttcactagtttaccggttggtgtccaaggcaggggacgctcctctagtaaaagtctcctcatcaacaggagagattttcactacctctaaccggatcgacagggagaaactttgtgccggcgcaagctatgccgaggagaatgaatgtttctttgagttagaggtggtgatcctgccgaatgattttttccgactgattaagatcaagataatcgtgaaggacacaaacgataacgctcctatgttcccctcccctgtgattaatatctcaattcccgaaaatactctgattaactcccggtttcccatcccatccgccacggatcccgacacaggtttcaatggggttcaacactatgaattacttaacggacaaagcgtttttggtctggacattgtggagacccctgagggagagaagtggccacagctaatagtccagcagaatctcgatagggagcaaaaggacacctatgtgatgaagataaaggtcgaggatggggggacaccccaaaagtcatccaccgccatcctgcaggtcactgtctcagatgttaacgacaacagacctgttttcaaggagggacaggtagaggtacacatcccagagaatgcacctgtgggcacctctgttatacagctccacgctaccgacgccgatataggtagcaatgccgagatccggtatattttcggtgcccaggtggcccctgccactaagagattatttgcactcaacaacaccaccggtctgattacggttcagcgaagtctggacagggaagaaactgctatccacaaagtcactgttctagcatcagacggcagctcaacccctgcacgggccacagtcacaatcaacgtaaccgacgtgaacgataacccaccaaatattgacctgagatatatcatcagtcccatcaacggcactgtctacctctccgagaaggatcctgttaatactaagatcgctctgatcacggtgagtgacaaggacaccgacgttaatggcaaggtgatctgcttcatcgaacgggaggtgcctttccacctgaaggccgtgtacgacaaccagtaccttctggaaacctcctcactcctggactacgaaggcacaaaagagtttagtttcaagatcgtggctagcgacagcgggaaacccagtctgaaccagacagccttggtccgagttaaactggaggacgaaaacgataatccaccaatttttaaccagccggtgattgagctgtctgtaagcgagaataataggagaggcctctatctgacaaccattagcgccactgatgaagactctgggaagaatgccgacatcgtgtaccagttggggccaaacgcgagctttttcgatctcgaccgtaaaactggggttctaacagcctccagagtgtttgaccgagaagagcaggagcgattcatttttacagttaccgcccgcgataatggaaccccacccctgcagagccaggccgctgtgatcgtcacggtgctcgacgagaatgacaactcacctaaatttacacacaaccactttcagttcttcgtgtctgaaaatttgccaaaatacagcacggtgggcgtcataacagtcactgatgctgacgccggagagaacaaggcagtcaccctctcaatactgaatgacaacgacaattttgtgttggatccatacagcggcgtcatcaagtctaatgtgtcgttcgacagagaacagcaatcttcctataccttcgacgtcaaagccacagatggaggacagcctccccggagtagcacagcgaaagttactataaacgtgatggatgtcaacgacaactccccagtcgtgatctcccctccttcgaacacaagcttcaagctcgtgcccctatcagccatccctgggtcggtcgttgccgaggtctttgcagtcgatgtggataccggcatgaacgccgagctcaagtacactattgtatctggaaataataagggtctgtttcgcattgaccctgtcactggcaacattactctggaagaaaagcccgcccctacggacgtcgggctgcatcgcttagttgtcaatatcagcgacctggggtaccctaagagtctgcacactctggtgttggtgttcctgtacgttaatgatacagccggtaacgcctcttacatctacgatctgatacggagaactatggagacccctctagatcgcaacatcggagatagctctcagccgtatcagaacgaggattacctgaccatcatgatcgcaatcatagccggcgccatggtagtgattgtggtcatcttcgtaacggtactggtgcggtgtaggcacgcttcgagattcaaggctgcccagcggtccaaacagggggcagagtggatgagcccaaaccaagagaacaaacaaaataagaagaagaaaagaaaaaagcgaaaatcccctaaatctagcttacttaacttcgtgaccatcgaagaatctaagccggacgatgcagtacatgagcccattaacggcacaatcagcctccccgccgagctcgaggaacagtccatagggcgattcgactggggaccagcaccacctactacttttaagcccaactcccccgatctggccaagcattacaagtccgcctcccctcagccagcgttccatctaaagcccgatacccccgtgagcgttaaaaagcatcatgtgattcaggaactgccattagataatacatttgtggggggttgtgatacactatctaagcgatctagcacctcttcagaccacttttcggcgagtgaatgctctagtcagggtgggtttaagaccaaaggccctctgcatacacgacagagtcagcgccgggtcactttccacttgcccgatggcagtcaggagtcatgcagtgatagcggcctcggggaccatgagccagtcggcagcggcaccctgatctctcatccccttccactggtccagccacaggacgaattttatgaccaggcctctcctgacaaaaggacggaggccgatggcaatagcgaccccaactctgatggaccgctcggaccaaggggcctggctgaagccacagaaatgtgtactcaggagtgcttggtactgggccattccgataactgctggatgccccccggtctgggaccttatcagcatccaaagtcccctttatctacattcgcacctcagaaggagtgggtcaagaaggataagttggtgaatggccataccctcacccgggcttggaaagaagacagcaacagaaaccagttcaatgatcgcaaacagtatggtagtaatgagggccactttaataacgggagccacatgacagatattccgctagctaatctgaaatcctacaagcaagccgggggagccaccgagagcccaaaggaacaccagctgtag

SEQ ID NO: 201883 - DNA, 3099 bp, synthetic construct
  misc_feature 1..3099: note = Description of Artificial Sequence: Synthetic coding sequence
  source 1..3099: mol_type = other DNA
atggacctgcgggacttctacctgctggccgccctgatcgcctgcctgcggctggacagcgccatcgcacaagaactgatttatacaatccgagaggagctaccggagaatgtacccatcggtaatattcctaaagatctgaatatcagccatattaatgctgcgaccggcactagcgcctcattggtttataggctggtatccaaagccggcgacgcccccctggtgaaagtgtcatcatctactggagagatcttcacaacttcaaataggatcgatagagagaagctgtgtgccggagccagctacgccgaagaaaatgagtgcttttttgagctggaagtcgtgattctgcctaatgatttttttcggctgattaagattaagatcattgtgaaagacactaatgataacgcccccatgtttccttctcccgtcattaacatctctatcccagaaaatactcttattaattcccgattcccaatcccatctgccacggatcccgatacgggcttcaacggggtgcagcattatgagctcctgaacggtcagtctgtgttcgggttggacatagtggagacccccgaaggagaaaagtggcctcaactcatcgtgcaacaaaatctagacagggagcagaaagatacctatgtgatgaagattaaggtggaggatgggggtaccccccaaaaaagctccaccgccatattgcaggtcaccgtgtctgatgtcaatgacaatcgccccgtgttcaaggaagggcaggtcgaagtgcatatccctgaaaatgcgcctgtgggcacatccgttatccaactacatgctactgatgctgatatcggttccaatgccgaaatccgatatatctttggcgcgcaagtggcccccgccaccaaacggctattcgctcttaacaatactacgggtctgattaccgtacagcgctccttagatagggaggagacagcaatccacaaagtgaccgtgctggcaagtgatggatcgtctactcctgcgagagccaccgtgactatcaacgtgacagacgtcaacgataacccacctaatatcgaccttcgctatatcatatctcccatcaatggcacagtgtatttaagcgagaaggacccggtgaataccaaaatcgcattaattactgtctcagacaaagatactgacgtgaacggcaaagtcatctgtttcatcgaaagggaggttccgtttcatcttaaagccgtttatgacaaccaatatctcctggaaacgtccagtctgctggattacgagggcacaaaggagttcagttttaagatagtggcatccgactctggaaagccttctctgaaccagacagccctggttagggtgaagctcgaagatgaaaatgataatccacctatatttaatcagcccgtcattgagctgagtgtgagcgagaataacaggcgcgggctgtacctgaccacaattagcgccaccgatgaggattcagggaaaaatgccgatattgtgtatcaacttggaccaaatgcatccttctttgatctcgaccggaaaacaggcgtcctgactgcctcgagagtgttcgaccgtgaagagcaagaacgattcattttcaccgtgaccgcacgggataacggcacaccacccttgcagtctcaggcagccgtcatcgtcactgtacttgatgaaaacgacaatagccccaaatttacccataatcacttccagtttttcgtttcggagaacctaccgaaatactcaaccgtcggggtcatcaccgtcactgatgctgatgctggagaaaacaaagctgtcacacttagtatccttaatgacaacgataatttcgtgcttgacccctactccggtgtgatcaagagcaatgtttcattcgacagggagcagcagagcagttacaccttcgacgtgaaagctaccgacgggggacagccaccacgatcatctaccgccaaagtgacaattaacgtgatggacgtgaacgacaacagcccagtggtgatctctcctccctctaacacctcatttaagttggtgccactgtccgctatcccaggatcagtggttgcggaagttttcgcagttgacgtcgacacaggaatgaatgctgagttgaaatatacaatagtctctgggaacaacaagggcctgtttcgcatcgaccccgtgacaggcaatataacgctggaggaaaagcccgcccctacagacgtggggcttcacagacttgtagtgaacattagtgaccttgggtatcccaagtcactgcacacactggtcctggtatttctctacgtaaacgacacagccggtaatgccagttacatctacgacttgatcagaaggacgatggaaaccccactggataggaatattggggatagttcgcagccgtatcagaacgaagactacctaactattatgatcgccatcatagccggagctatggtggtcattgtcgttatattcgtgactgtcctggtccgctgtcgacacgcttccagattcaaggcagctcagcgaagtaagcaaggagccgagtggatgtccccaaatcaagaaaacaaacaaaacaagaaaaaaaagcggaaaaagaggaaatcccctaagtcctcattgcttaactttgtcacaatcgaggaaagtaagcctgatgacgcagtgcatgaaccgatcaacggcactatctctctgccggcagagctcgaagagcagagtatcgggcgtttcgactgggggcccgctccccctaccacctttaaacccaattctcctgatctggcaaagcactacaagagcgcctcgcctcagccagctttccatctgaaaccagatactccagttagtgtgaaaaagcatcacgtcatccaggaactccctctcgacaatacctttgttggtggctgcgatacgttatccaagcggagctctacgtccagcgaccatttttccgcctctgagtgttcgtctcagggtggatttaaaacgaaaggcccactgcataccagacaggtcaacgaacatttttactggagcatctcaactgcctacaagtgtccggttaatcagtactag

SEQ ID NO: 201884 - DNA, 3714 bp, synthetic construct
  misc_feature 1..3714: note = Description of Artificial Sequence: Synthetic coding sequence
  source 1..3714: mol_type = other DNA
atggacctgcgggacttctacctgctggccgccctgatcgcctgcctgcgcttggactcagccattgcccaggagctgatttacacaattcgggaagaactcccagagaatgtgcccataggtaacatccccaaggatctgaatatctcccatattaatgcggctaccgggactagtgcaagccttgtttaccgacttgtgtctaaggccggggacgcccccctcgtgaaggtgtcctcaagtacaggagagatctttacaacaagcaaccgcatagacagagagaaattatgtgcaggggcctcctacgctgaagaaaatgagtgctttttcgagcttgaggtcgtaattctgcccaacgactttttccggctcattaagataaaaatcatagtaaaggacacgaacgataatgctcctatgtttccgtcacctgtaatcaacattagcattcctgaaaacaccctgattaactctagattccctatccccagcgcaaccgatcccgacacaggttttaacggggtacaacattatgaattgctgaacggccaatccgtctttggcctggacatcgtagagactccagaaggagagaaatggcctcagctaatcgtgcagcagaacttagacagagagcagaaggatacttacgttatgaagattaaagtggaggacggcggaaccccccagaagtcctctacagccatcctgcaggtgacggtttcagacgtcaacgacaatcgacccgtcttcaaggagggtcaggtagaggtccacatccctgagaatgcgcccgtcgggacctcagttatacagctgcacgcaaccgatgccgacatcggatccaatgccgaaattcggtacatcttcggtgcacaggtggccccggctacgaagaggctctttgccctgaacaatactaccggcttgataactgtgcagcgctcattggatagggaggagacggcaattcacaaggtcactgtcctggctagcgatggttcttcaacaccagccagagctaccgtgactataaatgtaacagacgttaacgacaaccctccaaatattgatctgcgctacatcatctcccccatcaacgggacagtatacctctcagagaaggaccctgtaaatactaagattgccctgattaccgtgagtgataaggacacagacgtcaatgggaaagttatttgctttattgaaagagaggttcccttccatctgaaagctgtttacgataatcagtacctccttgaaacaagcagcctgctcgactatgagggcactaaggaatttagcttcaaaatcgtggcgagtgacagcggtaagccaagccttaatcagaccgccctggtgcgcgtaaagttggaggatgaaaatgataacccgccgatctttaaccaaccggttatcgagcttagcgtgtccgaaaataaccggcgaggcctttaccttacaactatctctgccactgacgaagactctggaaaaaacgctgatatcgtgtatcagcttggacctaacgctagttttttcgatctcgatcggaagactggagtgctcaccgcctcccgggtatttgaccgggaagagcaggaaagatttattttcactgtcactgctagagataacggcacaccccccctacagtcccaggcagctgtaatcgttactgtgctggatgaaaatgacaatagtccgaaattcacgcacaaccacttccaatttttcgtaagcgagaacctgccaaaatattcgacggttggagtgatcacggtcacagatgccgacgcgggcgagaacaaggcagtgacacttagtattctgaacgataacgataacttcgtgctcgacccatactccggggtgataaaaagtaacgtatcgttcgatcgggaacagcagagctcctacacattcgatgtaaaggccacagatgggggccagcctcccaggagtagcaccgccaaagtgacaatcaacgtcatggacgtgaacgacaactcgcctgtggtaatcagcccccctagtaacacttcatttaaactagtaccgttgagcgctatcccggggagcgtggtcgctgaggtgtttgcagttgatgtagacacaggtatgaacgccgagctgaaatacacaatcgtctctggaaataataagggtctttttcggatcgacccagtcactggaaacatcacactggaagagaaaccggccccaaccgatgtcggcctgcacaggctcgttgtgaatataagcgacctcgggtatccgaaatcgctgcatacactggtgctcgtttttctatatgtcaacgacactgccgggaacgcctcgtatatatacgacctgattcgcaggacaatggaaacgcccctggacaggaacattggagactcttctcaaccctatcagaatgaggattatctcactataatgatcgcaatcattgcaggagccatggtcgtcattgtggtgatctttgtgacagtgctggtccgttgccgccacgccagtaggttcaaggctgcgcagcgctccaagcagggggccgagtggatgagccccaaccaggaaaacaaacaaaacaagaagaagaagcggaaaaaacggaagtcccctaaatcttctctcctcaattttgtgacgattgaggagagcaagcccgatgacgcggtacatgaacccatcaacggcacaattagcctgcccgctgagctagaggaacaatccatcggccgcttcgattggggccccgcccctccaactacttttaagcccaattctcccgatctggccaagcattacaagtccgcttcgccccagcctgccttccatctcaaacccgacacacctgtgtccgtcaagaagcaccacgtgatccaggaactgcccctcgacaatactttcgtcggtgggtgtgatactctatcaaagcgatccagcacctcttccgaccacttctccgcctccgagtgcagctcccaaggcggcttcaagaccaaaggacccttacacacccgccaatgcaactcccatagcaagtctgataacatccctgtcacaccccagaagtgcccttctagtaccggcttccacatccaggaaaatgaggagtctcattacgaaagtcaaagaagggttacattccacctgccagatggatcgcaggaatcctgctccgattctggtctcggagaccacgagcctgtgggctctggcacccttatttcccacccacttccattggtccagccacaggatgaattttatgatcaggcttcacccgataagcgcacggaggccgacggaaatagcgaccccaattcagacggcccattagggcccagaggcctggctgaggcaactgaaatgtgtacacaggaatgcctggtgctcggccactccgacaattgctggatgccacctggactgggaccctatcaacacccaaaaagccccctttctaccttcgccccacagaaggagtgggtgaagaaggacaagcttgtgaacggccacacacttaccagagcgtggaaagaagacagcaatcggaaccagtttaacgaccgcaagcaatatggatcaaacgaaggtcactttaacaacggaagccacatgactgacattcctctggccaacctgaagagctataagcaggctggaggggcaacagagtcacccaaggagcatcagctgtag

SEQ ID NO: 201885 - DNA, 3612 bp, synthetic construct
  misc_feature 1..3612: note = Description of Artificial Sequence: Synthetic coding sequence
  source 1..3612: mol_type = other DNA
atggacctgcgggacttctacctgctggccgccctgatcgcctgccttaggctggattccgccattgcccaggagttgatctacacaatccgggaggagctgccagagaatgtaccgatagggaatatcccaaaggatttaaatataagccacatcaatgccgcaaccggaacatctgcttctcttgtgtaccgtttggtctccaaagcgggggatgctccactggttaaagtaagctcatccaccggcgagatctttactacgtctaaccgaattgacagggaaaagctgtgtgccggcgcttcttacgccgaagagaacgagtgtttcttcgagctcgaggtggttatcctgccgaatgattttttccggttgatcaaaatcaagatcattgtgaaagatactaatgacaatgctccgatgttccccagtcctgtgattaacatctccattcctgaaaacaccctcatcaattcccgatttcctattccctctgccaccgatcccgacactggttttaacggcgtgcagcattacgagctcctgaacggtcagtcagtgtttgggttagacatcgtagaaacaccagaaggcgagaagtggccccagttaatcgttcaacagaaccttgatagggaacagaaggatacctacgtgatgaaaatcaaggtggaggatggaggcacaccacagaagtctagtactgccatcctgcaagtcacagtgagcgacgtaaatgacaaccggcccgtgttcaaggaaggtcaggtcgaggtccatatccccgaaaacgcaccggtggggacaagcgtaattcagctccacgcaacggatgcggatataggatcaaacgccgagatcagatatattttcggagcacaggtggcaccagcgaccaagcggctgtttgccttgaataatacgactggtttaatcacggttcagcggagtctggatcgagaggagaccgctatccacaaggtcaccgtcttagcgtccgacggctctagcacccccgctcgagccactgtgaccataaatgtaacagatgtgaatgacaatccccccaacatcgatctcaggtacatcatttccccgatcaacggcaccgtttacctgtcagaaaaggaccctgtgaataccaaaatagcactgattactgtgagcgataaggatactgacgtgaatggcaaggtgatttgtttcatcgaacgagaggtgccgtttcacttgaaggctgtgtatgacaaccagtacctgctggagacaagttctctgctggattacgaaggcaccaaggagttcagctttaagatcgtcgcctccgactctggtaagccaagcctaaaccagactgccctcgtacgcgtgaagttagaggatgagaacgataatcctcctatctttaatcaaccagttatcgaactgtcagtcagcgagaataatcgcaggggattatatctaacaacaatcagtgccaccgatgaagactccgggaagaacgcagatattgtgtatcagctcggacccaatgccagcttcttcgatctggaccggaagaccggcgtgctgactgctagccgggtgttcgaccgggaggagcaggaaaggtttattttcactgtgacagcaagggataatgggacccctcctctgcaatcgcaagcggcggtgatagtcactgtgctcgatgaaaacgacaacagccctaaatttacacataaccattttcagttcttcgtgtctgagaacttgcccaaatattcgacagtgggagtcatcacagtcacggatgccgacgccggggagaacaaagctgtaactttgtccatccttaacgataatgataacttcgttctagatccctactccggggtcatcaagtctaacgttagcttcgaccgcgaacaacaatccagttatacctttgacgtgaaagccacagacggcggtcagcctccccggagtagtaccgccaaagtgacgattaatgtgatggacgtaaacgataatagccccgtggttatctctccgccaagtaatactagtttcaaactggtgcccctgtcagccatcccgggatcagtcgtcgcagaggtctttgctgtcgatgtcgatactggcatgaacgccgaactgaaatataccatcgttagcggcaacaacaaaggcctgtttcggatcgaccctgtgactggcaacatcaccctggaggaaaaacccgctcccaccgatgtgggtctacaccggctcgtggtaaacatcagcgacctagggtatcccaaaagcctgcacacactcgtgctcgtgttcctgtacgtaaacgacactgctgggaatgcaagctatatttacgatctcattagaaggacgatggagaccccattagacaggaacattggtgattcaagtcagccttatcagaatgaagattaccttacaatcatgattgctatcatcgcgggcgccatggtggttatcgtggttatatttgtaaccgtgctagtgaggtgccggcacgcttcccggttcaaagcagcccagaggtctaaacagggggccgaatggatgagtcccaaccaggaaaacaagcagaacaaaaaaaaaaagcggaaaaaacgaaaaagcccaaagtcctctctgctgaactttgtcactatagaagagtccaagccagacgatgcggtacacgaacctatcaatggaaccatcagcctgcccgccgaactggaggaacagagtataggacgctttgattgggggccagctccccccacgactttcaagcccaattcccccgaccttgccaagcactataaatccgcctctcctcagccggcgttccaccttaagcctgacacaccagtaagtgtcaagaagcaccacgttatccaggagctgccactcgataacacgtttgtaggaggctgcgataccctctcaaaaaggtcctcgacttctagcgaccattttagcgcctccgaatgcagcagccagggaggttttaagactaagggtccgctccacactcgacagtcccaaaggagggtaaccttccacctccccgatggtagccaggaatcatgttccgattcggggctgggggaccacgagcctgtgggttctggaacattaattagtcaccccctcccactggttcagccccaggacgagttctacgaccaagcatctccagacaagcgtacggaggccgacggaaactcagatcccaatagcgatggccccctaggaccacggggtctggccgaggctacagaaatgtgcacgcaagagtgcttggttttaggtcattccgataactgttggatgccacccggacttggaccttaccagcatcctaaaagtcccctgtcaacatttgcaccccaaaaggagtgggtcaaaaaggacaagctggtcaacggtcacactctgacgagggcttggaaggaggactcaaacagaaatcagttcaacgacagaaaacagtacggatctaatgagggtcactttaacaacggatcacacatgacggacatccccttggctaacttgaaaagctacaaacaggccgggggcgctacagagtccccaaaggagcatcagttgtag

SEQ ID NO: 201886 - DNA, 3714 bp, synthetic construct
  misc_feature 1..3714: note = Description of Artificial Sequence: Synthetic coding sequence
  source 1..3714: mol_type = other DNA
atggacctgcgggacttctacctgctggccgccctgatcgcctgcctgagactggattccgctatagcccaagaactcatttatactattagagaagagctccccgaaaacgtgccaattggcaatattcccaaggacctgaacatttctcacatcaacgcagcgactggcacatcggcttctctcgtgtaccgtctcgtttcgaaagctggcgacgcacctctcgttaaagtaagcagctcaaccggggaaattttcacaacgtcgaaccggatcgaccgggaaaaactgtgcgcgggggcaagctacgccgaggagaacgagtgtttcttcgagttagaggtggtaatcctgcctaacgacttttttcgccttataaaaatcaagatcattgtgaaagataccaacgataatgcccctatgttcccttcaccagtcatcaacatttccattcccgagaacacacttatcaatagcaggttccctatccccagcgcgacggacccagacaccggttttaacggagtgcagcattacgaattgctaaatggacaaagtgtgtttgggctagatatagttgagaccccagaaggcgagaagtggccgcagctgattgtacagcagaacctggacagggagcagaaggatacgtacgtgatgaaaattaaggtggaggacggcgggactccccagaaaagttccacagcaatcctccaggtgactgtgtctgatgtgaatgacaaccgacccgtatttaaggaaggccaggttgaagtgcacatccccgagaatgcacccgtgggaacatcagttattcagctccacgcgactgacgccgacatcggctcaaacgctgaaatacggtatatctttggtgcccaggtggcccccgcaacaaagagactgttcgcattaaataatactaccggattgattaccgtgcagcgctctctcgaccgggaagaaacggcgatccacaaagtgactgtgcttgcttcagacggttcttccacacctgcgcgcgccaccgtgacgataaatgtgaccgatgtgaacgataacccccccaatatcgatctgagatacatcatttctcccatcaatggaactgtctacttgtctgaaaaggacccagttaacacaaaaatcgccctgataaccgtgagtgataaggacacagatgtgaatggcaaggtaatctgcttcattgaaagagaggtcccatttcacctgaaggcagtgtacgataaccagtaccttctggaaactagttcacttctcgactatgaaggaaccaaggagttcagtttcaagattgtcgcttccgactcaggaaaaccctccttgaatcagaccgcacttgttcgggtcaaattagaagacgagaatgataatccaccgatttttaatcagcctgtgattgagctgtctgtgagcgaaaataacagaaggggattgtaccttaccaccatttctgccacagacgaagacagtggaaaaaacgcagacatcgtttatcagctcggccctaacgcctccttttttgacctggaccggaaaactggagtgcttacagcatctcgcgttttcgatagggaggagcaagagcgatttatatttaccgtcaccgccagagataacggcacaccacctctccaatcgcaagccgccgtgattgttactgtgctcgatgaaaacgacaattcccctaagttcacgcataaccactttcagttcttcgtctcagagaaccttcccaaatatagcaccgttggcgttatcacagttacagatgccgatgccggcgagaacaaggccgttacactctcgattctgaacgacaacgacaacttcgtactagacccatattctggagtcataaaatctaatgtgtctttcgacagggagcaacagtcaagctacacattcgatgttaaagccactgacggaggacagccaccacgctcttctactgctaaggtgacaatcaacgtgatggatgtgaatgacaactctcccgtggtcattagccctccaagcaacacctccttcaaactggtgcctctcagtgccataccaggaagcgttgtggccgaagttttcgccgtcgatgtggatacagggatgaacgcagaactcaagtacactattgtgtcagggaataataaggggctgtttagaatcgatcccgtgaccgggaatatcaccctcgaggagaaacccgctcctacggatgtgggactccatcggctagtggtcaatatatcagatctggggtatccaaaaagtctgcacaccctggtgctggtgttcctgtacgttaacgacactgctgggaatgcaagttacatctacgacctcatccggcgcactatggagacccctttggataggaacatcggagactcatcacaaccataccagaacgaggactatctgactattatgatcgccatcattgcaggcgccatggtggttattgtcgtgatattcgtgaccgtgttggtccgatgccgccacgcctccagatttaaggcggcccagcggtctaaacagggcgccgaatggatgtctccaaaccaggagaacaagcagaataaaaagaagaagcgcaagaagagaaagagtccaaaatccagtctgctaaactttgttacaatagaggagtccaagccagatgatgccgttcatgagccgataaatggaaccattagcctgcccgcagagctggaggaacagtccatcgggcggtttgattggggtccggcacctcctactactttcaagcccaactctcctgatctggcaaaacactacaagagtgcaagtccacaacccgcattccacctcaaaccagacactcccgtctctgtgaagaagcaccatgtgatacaagaactccccttggataacacttttgttggaggttgtgataccctaagtaagcgctcaagcacgtcctccgatcacttctcagcatcagagtgttcatctcagggcggcttcaagactaaggggcccctgcacacccgccagtgtaactcacacagcaaaagtgataacatcccagtgaccccccagaagtgcccctcaagcaccgggttccatatacaagagaatgaggaatcgcattatgagtcccagagacgagtaacttttcatctgcctgatggatcacaggaatcctgttcagatagtggtctgggagaccatgagccagtagggtcaggcaccctgatttcccacccactgccattagttcagccacaagacgaattttatgaccaggcatctcccgacaaaaggactgaagccgacggcaatagtgatcccaacagcgacggccccctggggcctcgtgggttagccgaggcgacagagatgtgcacgcaggaatgcctggtgttaggacatagtgataattgttggatgcctcctggtctgggcccatatcagcatccgaagagccccctcagtacgtttgccccacagaaggaatgggtcaaaaaggataaacttgtaaatgggcacaccctgacacgggcgtggaaggaagacagtaacaggaaccagtttaacgacagaaagcaatacggcagtaacgaagggcacttcaataacggaagtcacatgacagacatcccactggccaatttgaaaagctacaagcaagccgggggagccacagaatcccctaaggaacaccagctttag

SEQ ID NO: 201887 - DNA, 2424 bp, synthetic construct
  misc_feature 1..2424: note = Description of Artificial Sequence: Synthetic coding sequence
  source 1..2424: mol_type = other DNA
atggtgttcagccggcggggcggcctgggcgcccgggacctgctgctgtggctcctccttctggctgcatgggaggttggcagcggtcagctacactacagcattccagaggaggctaaacacgggactttcgtgggtcgcgtcgcccaggacctagggctcgagctggctgaactggtaccccggttgttcagggtggccagcaagactcacagagatctcctggaggtcaacttacaaaacgggatcctttttgtgaacagcagaatcgatcgagaagagttgtgtcagtggagtgccgagtgttccattcacctggagttaatagccgataggcccctgcaggtattccacgtagaggtcaaagtaaaggacatcaacgataacccaccggtgtttagaggccgagagcagattattttcattccagagagccggctgctaaatagtcgtttccccatagaaggggccgctgacgcggatatcggagcaaatgccctccttacatacaccctgtctccttccgactacttttcgctggatgtggaggctagtgatgagctgagtaaatccctgtggcttgagctgagaaagtacttagacagagaagagactccggaactacatttactactgacggccactgacggggggaaaccagagctccaaggcacagtcgaacttctgattacagtgctagatgtgaacgataatgctcccttgttcgatcaagctgtgtaccgggtccatcttttggaaaccactgcaaatggcactcttgtcactactctaaatgcctcggacgcggatgagggtgtcaacggggaagttgtgtttagttttgatagcgggatctcccgggacatacaggaaaagtttaaggttgactcatccagcggggaaatacgactgattgacaagctagactacgaggaaacaaaatcctacgagattcaagtcaaagcagtagacaaggggagccccccaatgtccaatcactgtaaagtgctagtcaaggttttggatgtgaacgataacgcccctgagttagccgtgacctcactgtatctccctatcagagaagacgccccactctcaaccgtgatcgctctgattaccgtttctgaccgggactcaggggccaatggccaggtgacctgctccctgatgccccatgtgcccttcaagctggtctccacttttaagaattactactcactggtgcttgatagtgcactggacagagagtctctcagtgtctacgaactggtggtgaccgcccgcgacggtgggagtccgtccctatgggctaccgccagggtgagtgttgaggttgcagatgtgaatgataacgcccctgcctttgcccagcctgaatatacagtgtttgtcaaagagaacaatcctccgggatgccacatctttacggtgtccgcccgcgacgccgacgcccaggaaaatgcactggtttcatattcgctcgttgagagaagggttggggaaagggctctgagtaactacgtgtctgtgcatgcagagtctggcaaagtgtatgctctgcaaccattggatcacgaggagctagagcttctgcagtttcaggtttctgcgcgcgacgcaggcgtgcctccccttggctcaaatgtgacattacaggtctttgtcctcgatgaaaacgacaacgcccccgcactcctggcgccgagagtgggcggcactataggagcagtgtctgaactagtgccacggctggtgggtgccggacatgtggtggcaaaagtgagagccgtggatgcagatagtggatataatgcttggctgagttatgaactgcagcctgccgccggcggcgctcgcattccctttcgcgttgggctgtatactggcgaaattagcacaaccagggtgcttgatgaagccgacctgagtagataccgcctcctggtgctggtgaaggatcacggagagcccgccctcactgccactgccactgtgctagtgagcctggtagagagcggccaggcgcccaaggcgagcagtcgagctagtgtaggcgtcgctggccccgaggctgctttggttgatgtaaatgtttacctgatcattgcaatctgtgccgtctcgtctcttttagtgcttactttgctgctgtacacagctctccgctgttctgttccccctaccgagggggcctacgtgccaggaaagcctacactggtctgcagctctgcactgggatcttggagcaactctcagcaacggaggcagcgagtttgtagcagtgaggggccaccaaaaaccgacttgatggccttttctccgggattatctccaagtctaaatacttcagagcgcaacgagcagcctgaagcaaacctagatctctccggaaatgtttctccgacctttgagttctggctgtag

SEQ ID NO: 201888 - DNA, 2061 bp, synthetic construct
  misc_feature 1..2061: note = Description of Artificial Sequence: Synthetic coding sequence
  source 1..2061: mol_type = other DNA
atggtgttcagccggcggggcggcctgggcgcccgggacctgctgctgtggcttttgctcctggccgcctgggaagtgggatcaggccagttgcactattcaatccccgaggaagccaagcatggaaccttcgttgggagggtggcccaggatctcggtctggagctagccgaactggtgccgagactgtttagggttgcctccaagacccatcgcgaccttcttgaggttaatctgcaaaatggaatcttgttcgttaatagcagaatcgacagggaggaactttgtcagtggagtgccgagtgttctattcacttggaacttatcgccgatcggcctctgcaagttttccacgtggaggtaaaggtgaaggatattaacgacaatccaccggtttttagaggcagggagcagattatatttatcccagaatcaagactcctgaactcaagattccccatagaaggagctgccgacgccgacatcggcgcaaacgctctgttgacctacaccctcagcccctccgattactttagcctagacgtcgaggcatccgatgagctcagcaaaagtctgtggctggagttaaggaagtacctggatcgggaggagacccccgagctccatctactgctaaccgcaacggacgggggcaagcccgagctacagggcaccgtcgaactgctgataactgtgttggacgtgaacgacaatgccccgttgtttgaccaggccgtgtatcgggtccatttactagagacaaccgcaaatggaactctagttaccacactgaatgcgagtgacgccgatgagggggtaaacggagaagtcgttttcagcttcgactcagggattagcagggacattcaggaaaaattcaaagtggactcatcttctggagagatccggttaatcgacaaattggattatgaagagaccaagagttacgaaatccaggtaaaggctgtagacaaggggtcacctcccatgagtaatcattgcaaggtcctggttaaagtgctcgacgtaaatgataatgcccccgagctcgcggtgacgtctctctatcttccaatccgtgaggatgccccgctgtccactgtcatcgcgctgatcaccgtctccgacagagactccggcgccaatggccaggtgacttgttccttgatgccgcatgtgccattcaagctcgttagtacattcaagaactactacagcttggtgctcgattccgcgcttgaccgtgagtcattgagtgtgtacgagttggttgtgacagcacgagacggggggtctccctccctctgggctaccgcaagagtctccgttgaggtcgctgatgtgaatgataatgcacctgcttttgctcagcccgaatacacagtattcgtcaaggagaataatccacctgggtgccatatcttcacggtgtcagcacgtgatgccgatgctcaggagaacgcgctggtaagttattcccttgtagaacgacgggtcggtgagcgggcactctctaattacgtcagcgttcacgccgaatccgggaaggtttatgccttacagccattggaccacgaggagctcgagttgctacagttccagccccggcagcccaaccccgactggagatacagcgcctcgctgcgcgccggaatgcacagcagcgtgcacctggaagaggcaggaatattgagagcaggcccaggaggtccagaccaacaatggcctactgtcagcagcgccacccccgaaccggaggcgggcgaagtgtctccgccagtgggcgccggggtcaactccaattcctggacctttaagtatggccccggcaatcctaagcagagtgggcctggcgaactcccggacaaatttataattcccgggtcccccgcaataatctctattcggcaggaacctactaacagccagatagacaaatctgattttatcaccttcggtaagaaggaagagacaaaaaaaaagaagaaaaaaaagaaagggaataagacacaagaaaagaaggagaaggggaactctactaccgataacagcgaccagtag

SEQ ID NO: 201889 - DNA, 2853 bp, synthetic construct
  misc_feature 1..2853: note = Description of Artificial Sequence: Synthetic coding sequence
  source 1..2853: mol_type = other DNA
atggtgttcagccggcggggcggcctgggcgcccgggacctgctgttatggcttcttctccttgctgcctgggaggtcgggtccggccaacttcattattccatccctgaagaagctaagcacgggacatttgtgggacgagtggcccaggacctgggactggagttggctgagctagtgccccgactgttcagagtggcgtcgaagactcatcgtgatcttctggaagtgaacctgcaaaacgggatcctgttcgtcaatagccgcattgatagggaggaattgtgtcagtggagtgctgagtgttccattcacctggaacttattgccgataggccgttacaggtgtttcacgtggaggttaaggtcaaagacatcaacgacaatccccccgtcttcaggggccgtgaacagatcatcttcatcccggagagccggcttctgaatagccgctttcctattgagggtgcagcagatgctgacatcggagccaacgctctgctcacttacacactatcccctagcgattacttctcccttgacgtggaggcctccgacgagctgtccaagagcctttggttagaactcaggaagtacctggatagagaagaaactcctgagctgcatctcctgctcacagccacagacggcggaaagcccgagctccagggcaccgttgaactgctgataacagtgctggacgtcaacgataacgctccccttttcgaccaggccgtataccgggtccacctgctggaaacaacggctaatggcaccctcgtgacaactctgaatgcgagtgacgccgacgaaggggtgaatggcgaagtcgtattctcctttgacagtggaatcagcagagacatccaggaaaagttcaaagtagatagcagttccggtgagattagactgattgacaagttagactacgaagaaaccaaaagttatgagatccaggtcaaggccgtggacaaggggtcgcctccgatgagtaatcactgtaaggttctcgtgaaagttctcgatgtgaacgacaacgctcccgagctggccgtaactagtctgtacctgcccatacgggaggatgctcccctctccactgtcatagccttgattacggtgagtgacagggatagcggagctaacgggcaggtaacatgtagcttgatgccccacgtcccgttcaagttggtgagcacctttaaaaattactatagtctcgtgctggattctgccttagaccgagagtctctctctgtctacgagctggtggtgacggctagggatggtggatcccctagtctgtgggctactgccagagtgagcgtcgaagtagccgacgttaacgacaatgcacctgcttttgcccagccagagtatacagtgttcgtaaaggaaaacaatcccccgggttgccacatatttacagtgtctgctagggacgccgacgctcaggagaatgctctggttagctattctctggtcgagcggcgcgttggggaaagggcattgtcaaattacgtgagcgtgcatgccgagagtggcaaggtgtacgctctgcagccattggaccacgaagagctggagcttctgcagttccaggtaagtgccagagatgctggcgtgcccccactcggatccaatgtgaccctgcaggtgttcgtgctggatgagaatgataatgcacccgccctcctggccccaagagtaggcgggaccatcggtgctgtgtcagaactcgtcccccgcctagtgggcgccggtcacgtagtggctaaagtgagggccgtggacgccgacagcggttacaatgcctggctcagctatgaactgcagcctgcagccgggggtgctcgcatcccattccgcgtggggctctatactggagagataagcacaacacgcgttctcgacgaagcagacttgtcacggtacaggctgctggtcctggtgaaggaccatggagagcccgcactgacagctaccgctaccgtcctggtgtccttagtcgaatccggccaggccccgaaggcttccagcagggccagtgttggagtcgcgggcccggaggctgcactggtcgatgtcaatgtctacctgatcatagccatctgtgctgtttcttctcttctcgttctcacccttctcctctacaccgcattacgatgctcggttccaccgacagagggcgcctatgtgcccgggaagcctacattggtgtgcagcagcgcccttggatcttggagtaactcccagcagaggaggcagagagtgtgcagtagcgaagggccacctaaaaccgacttgatggccttcagccccggcctgtctcctagcctgaatactagtgaacgcaacgaacaacccgaggccaatttggacctgtccggcaatcctcgacaacctaaccccgactggcgttattccgcaagcctgcgcgccggtatgcactctagtgtccacttggaagaggctgggatcctccgtgcgggacctggcggccccgatcagcagtggcccacagtatcaagcgctacacccgaacccgaggctggcgaggtcagtccccccgtgggggccggtgtaaattctaattcatggacattcaaatacgggcctggaaaccccaaacagtccggacccggcgaactgcccgacaaatttattatccccggaagccccgccattatttcgatacgccaggagcccaccaattctcagatcgataagagtgatttcatcaccttcggcaaaaaggaagagaccaagaaaaagaagaagaaaaagaaaggaaataagactcaggaaaaaaaagagaaagggaattcaactacagataactctgaccaatag

SEQ ID NO: 201890 - DNA, 2847 bp, synthetic construct
  misc_feature 1..2847: note = Description of Artificial Sequence: Synthetic coding sequence
  source 1..2847: mol_type = other DNA
atggtgagccggtgcagctgcctgggcgtgcagtgcctgctgctgagccttttgctgctggctgcctgggaggtcggctccgggcaactgcactactccgtctacgaagaagccaggcatggcaccttcgttgggagaatcgcacaggacctaggcctggagctggccgagctggtgcagcgcctcttcagagtggcaagcaagcgacatggagatctgcttgaggttaatctccagaacggtatcctattcgtaaactcacgcatcgatcgggaggagctatgtggtagatcagtggaatgtagcatccacctggaggtaattgtcgatcgacctctgcaggtttttcatgttgatgtggaagttaaggacatcaatgataatcccccccgatttagtgtcaccgaacagaaactcagtatccctgagagtagattgcttgatagtcgctttccactggaaggcgcttctgatgctgatgtgggagagaacgcactcctgacctacaagctgagccccaacgaatattttgtccttgacatcataaacaaaaaggacaaggacaaattcccagttttggtacttcgcaaactactggatcgggaagagaatcctcaacttaaactcttattgaccgccaccgatgggggaaagcctgagtttaccgggtcagtctcacttctgatcctggttctggacgcaaacgataacgcccctatcttcgatagaccggtttacgaggtcaagatgtacgaaaaccaggtaaatcagacattggttatcaggcttaatgctagcgattccgatgagggaatcaacaaggagatgatgtattcctttagcagcttagtgcctcccaccatccgccgtaaattctggataaacgaacgaactggcgagatcaaggtcaatgacgcgatagatttcgaggattcgaacacatacgagatccacgtcgacgtgaccgataaagggaacccaccaatggtaggacactgcacggtgctggttgaactgctggatgagaacgataattcccccgaagttatcgtaactagcctgtccctccccgttaaggaggatgcgcaggtggggaccgtgatagcattaattagtgtttcagatcacgatagcggtgcgaacggtcaggtaacatgttcattgacaccacacgttcctttcaaactcgtcagcacatacaagaactactactctcttgtacttgattcagcacttgatcgagagagagtgtccgcctacgagctggttgtgactgccagggacggtggctccccgcccttatgggcgactgctagcgtgtccgtcgaagtggccgatgtgaatgacaacgctcctgctttcgcccagtcagaatacaccgtgttcgtgaaggagaacaacccacccgggtgccacattttcactgtttccgcctgggatgccgacgcacaggaaaatgcactggtgagttatagtcttgttgaacggaggttgggagaacgctcgctctcttcctatgtgtctgtgcatgctgaaagtggcaaggtatatgccctgcagcctttagaccatgaggaactagagctgttgcagttccaagtgtcggccagagatggaggcgtgcctccactgggtagcaatctgacgctccaggtgtttgttttagatgaaaacgacaacgctcccgcattactggcttctcctgccgggtctgctggaggagcagtgagtgaattggtgcttcggagcgtcgtggctggccacgtggtggcaaaagtcagggccgtagatgctgatagcgggtacaacgcttggttatcttatgagctgcagtcagccgcggtgggggctcggatccccttcagggttggcctgtacaccggcgaaatatcaaccacacgtgcccttgatgagacagattccccaaggcagcgacttttggtcctcgtaaaggaccacggagagccttccctgacagccaccgcaacagtgctggtctccctagtggaagggtctcaggcaccaaaagctagctcacgggcaagtgtgggggtggccccagaagtagcattggtggacgttaatgtttatctgataattgcaatttgtgcagtgtcgagccttcttgtgctgaccttacttctgtatacagcactccgctgctctgcagctccaacagagggagcctgtgggccagtgaagcctactctggtgtgtagttctgcagtgggaagctggtcgtattcccagcaacgccgacaaagagtgtgttccggcgaaggcctacctaaggctgatctgatggccttctcaccctccttaccaccctgcccgatggttgacgtggatggagaggaccaatccattggcggggatcactcacggaagccgcgccaacccaaccctgactggcgatatagtgcatccctgagagcaggtatgcatagtagtgtgcatctggaagaggccggcatccttcgagcaggacctggcggccctgaccagcagtggcccacggtcagtagtgctacacccgagcccgaggccggggaggtgtcccccccagtcggagcaggagtgaattctaactcttggacatttaagtacggaccaggtaaccctaagcagtcaggtcctggagagcttcccgataaattcatcattcctggcagcccagctattataagcatccggcaggaacctactaattcccagattgataagtccgattttatcacatttggcaaaaaggaagagactaaaaaaaagaagaagaagaagaagggaaataagacccaagagaagaaagaaaagggcaattccaccactgacaatagcgaccagtag

SEQ ID NO: 201891 - DNA, 2058 bp, synthetic construct
  misc_feature 1..2058: note = Description of Artificial Sequence: Synthetic coding sequence
  source 1..2058: mol_type = other DNA
atggtgagccggtgcagctgcctgggcgtgcagtgcctgctgctgtccctcctacttcttgctgcctgggaagtgggctccggccagctccattactccgtatacgaggaagctcgccacggcacgttcgtcgggagaattgcccaggacctggggcttgagctggccgaattggtccagaggctcttcagagtggctagtaaaagacatggagacttgctggaggtgaacctacagaacggcattctcttcgtcaatagcaggattgacagggaagaactgtgtggacggagcgtggagtgttccatacacttagaagtgatagtggataggcccctccaagtatttcacgtagacgtcgaggttaaggatattaatgataaccccccccgattcagcgtcacagagcaaaaactctccatcccggagtcaaggttgttggattctagatttccactggagggcgcttctgacgctgacgtcggagaaaacgctcttctgacctacaagctgagtcctaatgaatacttcgtgttggacatcattaacaaaaaggacaaagacaaatttcccgtcctcgtgctcagaaaactactagatagggaagagaatccacagctcaagctgcttctgaccgctactgatggggggaaacctgaatttacaggtagtgtgtcactgctcattcttgtcctcgacgcgaatgacaatgccccaatatttgataggccagtctacgaggtcaaaatgtacgaaaaccaagttaatcagacgctcgtgatcagactgaatgccagtgattctgatgaggggattaacaaggagatgatgtattccttcagtagcttggtgcctccaacgatccgccgtaaattttggataaatgagaggaccggggaaatcaaagtaaacgacgcaatagacttcgaagacagcaacacatatgaaatccacgtcgacgtgacagacaagggcaacccgcccatggtaggccattgtactgttctagtggagctgcttgatgaaaacgacaactctcctgaagtaatcgtgacaagcttgagtttacctgtgaaggaggacgcccaggtgggcacagtgattgctcttatatcagtgtctgatcatgacagtggggccaatggccaggtcacttgtagcttgaccccacacgtacccttcaagctcgtgagcacatacaaaaactactatagccttgtgctggactccgcacttgatcgcgagcgggtgtctgcatatgagctggtagtaacggcacgagatggaggcagccccccactatgggcaaccgccagcgtctcagtggaagttgccgacgtgaatgacaacgctccagcattcgcgcagagcgaatatacagtgtttgttaaggaaaacaacccacccggctgtcatatctttactgtgagtgcttgggatgctgacgctcaggagaacgctctggtgtcgtactcactagttgaaagacgattgggtgagaggtctctttctagttatgtgagcgttcatgcggagtccggtaaggtttatgcattacagccactggaccacgaggaactggagttgttgcagtttcagccaaggcagcccaatcccgattggagatactccgccagcttgagagcaggaatgcatagctccgtgcatctcgaggaagccggaatacttagggcgggccctgggggcccagatcagcagtggcccactgtgagctctgccacaccagagcccgaggccggcgaggtgtcccctccggttggggccggggttaatagcaatagttggacgttcaaatacggaccggggaatcccaagcaatccggcccaggggaactccccgataaattcattatccccggttcccccgcgattattagtatccgccaggagccaacaaacagccagatcgacaagtccgatttcatcacgttcggcaaaaaggaagagacaaagaaaaagaagaaaaaaaagaaggggaataagactcaggaaaagaaagaaaaagggaactcgactactgacaactcagaccagtag

SEQ ID NO: 201892 - DNA, 2850 bp, synthetic construct
  misc_feature 1..2850: note = Description of Artificial Sequence: Synthetic coding sequence
  source 1..2850: mol_type = other DNA
atgttcggcttccagcggcggggcctgggcaccccccggctgcagctgtggctgctactgctcgaattttgggaagttgggagtggccagctccactactccgtgagcgaggaggctaaacatggcacctttgtgggtcggattgctcaggacctcggactcgaacttgccgaacttgtacaacgcctgttccgtgtggcaagcaaaacacacggcgatctgctggaagttaacctgcagaacgggattctgtttgttaactctagaattgacagggaggagttgtgcggccagagcgccgagtgctccattcatctggaggtgatcgtggatagacccttacaagttttccacgtcaatgtagaggtgaaggacatcaatgataatcccccagtgttcagcctgcgggaacagaagcttttgatcgccgaatccaaacagagcgatagtcgcttcccactcgagggagcctccgacgcggatattgaggagaatgcgctgctgacatatcgcctgtccaaaaatgaatacttctcactggactctccaactaatggtaaacagataaaacggctgtcactcatcctgaagaaatcgctagatcgtgagaagacgccagaactcaacctactgctcaccgctactgacggaggaaagccagagctcacaggcaccgttcgacttttggttcaggtgcttgatgtcaatgataacgatcccgaattcgacaaatccgaatacaaggtgtcactgatggagaatgccgcgaaagagaccctggtcttaaaattgaacgcaacggacagggatgaaggcgttaacggggaagttacgtacagtttaatgagcattaagccaaacggcaggcatctctttaccttagaccaaaataatggcgaggtccgggtgaatggtactttggactacgaggagaataagttctataagattgaagtgcaagctaccgacaaaggaactccccctatggccggccactgcacggtatgggttgagatcctggatactaacgataactcccctgaagtcgcagtaacgagcctgagcttgcctgtacgggaagacgcccaaccctcaactgtcattgcgctgatttcagtgtcagaccgggattccggagttaatggacaggttacctgttctctgacaccgcacgtgccttttaagcttgtcagtacatttaaaaattactactcattagtactcgacagcgctctggacagagagaacgtgtgggcatacgagctggtggttactgcccgcgacggtgggagcccctcattgtgggctacagctagagtgtcagtggaggtagccgacgtcaacgacaatgcccctgcatttgctcagcccgagtatacagtctttgttaaagagaacaatccacctgggtgccacattttcaccgtctctgctagggatgcggatgcccaagagaatgccctggtcagctacagtttggtggagagaagactgggagaccgcgctctatcatcttacgtatctgtgcacgccgaatccggtaaagtctacgcccttcaaccactcgaccacgaagagcttgaactcttacagttccaagtgagcgctcgtgacgcaggcgtcccaccactatcatccaacgtgactttgcaggtcttcgtgctggacgaaaatgacaacgcgcctgccttgcttgcaacccaggccggttccgccggcggagctgtgaacaaacttgtgccacgctccgtgggagccggacacgtggtggccaaagtgagagcggtagatgcggactcaggctacaacgcctggctttcgtacgaattacagcccgctgctggtgggagccgtataccctttcgagtcgggctctacaccggggaaatttctacgaccagggcactggacgaggcggactcaccgcgccaccgacttctggtattagtaaaggatcacggcgaacctgccttaactgccaccgctaccgtactggtctctcttgtcgaaagtggacaggcgcctaaagcatcttctcgaacgctggccggagccgcctctccagaggctgccctggtcgatgtgaacgtttacttgatcattgctatatgcgttgtctcatccctccttgtgctcactctgcttctgtataccgctctgtggtggagcgctacccctacggagggcgcctgcgcgcccgggaagccaaccttggtttgctctcgcgcagtggggagctggtcctattctcagcagcgaagacaacgggtttgtagtgaggagggaccgcccaaaaccgacctgatggccttctctccatcgctgccactagggctgaataaagaggaggagggtgaaagacaagagcccggttctaaccaccctggtcagcctcgtcaaccgaatccagactggagatatagtgcgtcattaagggccgggatgcattcatcagtccatcttgaagaggccggcatcctccgcgcaggccctggtggaccagatcagcagtggcccacagtcagtagtgccacaccagaaccagaggctggggaagtgagtcctcccgtgggagcgggagttaacagcaattcatggacctttaagtacggcccagggaaccccaaacaatccggtccgggcgaactgcccgacaagttcatcattcccggctctcccgccattatctcaattagacaggagccaactaattcccagattgacaagagtgatttcataaccttcgggaagaaggaggagactaagaaaaagaagaagaagaagaagggtaacaagactcaagaaaagaaggagaaaggcaacagtacaacagacaattccgatcagtag

SEQ ID NO: 201893 - DNA, 2826 bp, synthetic construct
  misc_feature 1..2826: note = Description of Artificial Sequence: Synthetic coding sequence
  source 1..2826: mol_type = other DNA
atggtgatcatcggcccccggggccccggcagccagcggctgctgctttctttgctgttactggccgcatgggaagtgggaagcggccaactacattatagcgtctacgaggaggcaaagcacggcacttttgtaggccgcattgcacaagacttgggtctcgagctcgcggagctggttccccgcctgttccgggtggcaagtaagcgccatggagacctgctggaggtcaaccttcagaatggcatcctgtttgtgaactccaggatcgatcgcgaaaagctgtgtggccggagcgccgagtgctcgatacacctggaagttattgtagatcgacccttacaggtgttccacgtcgacgttgaagttaaagatattaatgacaaccccccggtgtttcgtgagcgtgagcaaaaagtccccgtgtcagagagtgcccccctggacagtcactttcccctggaaggcgccagcgacgccgatataggcgtcaattcacttctcacctacgcgctctccctgaatgagaactttgaacttaagataaagaccaaaaaggacaagagtatcctgcccgagctcgtgctgagaaagctgttggatagagagcagactccaaaactgaatctccttttaatggtcatagacggagggaaacccgaactcactggttcagtccagattcaaataactgttctggatgtgaatgacaatgggccggctttcgacaagccgagttataaggtcgtccttagcgaaaacgtgcaaaacgacactcgcgttatacagctgaatgcaagtgacccagacgaaggattgaatggcgagatttcttatggtatcaagatgatcctccctgtcagcgaaaaatgtatgttcagcattaatccggatacgggggaaataagaatctatggcgaacttgactttgaggagaacaatgcctacgagatccaagtgaatgcgattgacaagggcataccaagtatggctggacatagcatggtgttggtagaagtgctcgacgtgaatgacaacgtgcccgaagtaatggtaactagcctttcactacctgttcaggaagatgcccaagtggggaccgtcattgcgctgatatctgtcagcgacagagattcaggagctaatgggcaagtcatttgctctctcaccccccacgtgccctttaaattggtgagcacttataaaaattattattcacttgtattggactcggcacttgacagagagagcgtgagcgcctacgagctagtcgtcacagccagagatggagggagcccttctttgtgggctaccgcgagggtatccgtggaggtcgcagacgtgaacgataatgctccagcattcgcgcagcctgaatatacagtttttgtcaaagagaataatcctccgggatgccacatctttacagtcagtgcctgggacgcagacgcccagaagaatgcactagtcagctattcactagtcgaacggcgggtgggggagcatgccctgagttcgtatgtgtcagtgcacgccgagagcggcaaagtctatgcattgcaaccattagaccacgaagaacttgaactgctccaatttcaggtaagtgctcgagatgcaggtgtccctcccttgggatcgaatgtgactctccaggtgtttgtcctggacgaaaatgacaacgcccccgccctgctggccacccctgcaggttctgcagggggcgcagtctctgagctggtcccacggtctgtgggagctggccatgtagtggccaaggtgcgggccgtggatgcagactccggctacaatgcatggctgtcctacgagctgcagcccgccgccgtaggcgcgcacatcccattccatgtgggcctttatacaggagaaatttctactacccggattctcgatgaagccgatgctccacggcacagactgctggtgttggttaaggaccacggggaaccggcattaaccagcacagccaccgtgttagtctcactggtggaaaatggtcaggcccccaaaacgtctagtagagcaagcgtgggggccgtggaccctgaggccgccctggtggacataaacgtttacctaatcattgccatctgcgcggtgagctctctgctggtcctgacgctgctcttgtatacagctctgagatgttccgcaccacccaccgtttcacgctgcgctcctggtaagcctactcttgtgtgttcttccgctgtgggatcatggtcatacagccagcagcgtcgacagagggtgtgctcggccgagtcgccccctaagacggatctgatggcattctcgccctctttgcagctaagtcgggaggattgtctcaaccccccatccgaacctcggcagccaaatcccgactggcgatacagcgcttcccttcgcgctggcatgcacagttcggttcacctggaagaggcaggaatcctgcgggcaggaccaggggggcccgaccaacagtggcccactgtgagttcagccacccccgaacctgaggctggggaggtgtccccaccagtgggcgcgggggtgaattccaactcctggacatttaaatacgggccggggaacccaaagcagagcggccccggcgaacttcctgataaattcataattccaggctctccagccataatcagcattaggcaggagcctaccaattcccagatcgacaagagtgattttataactttcggaaaaaaggaggagacaaagaagaaaaaaaagaagaaaaagggcaataaaacacaggaaaagaaagagaagggaaattcaaccacagacaattccgaccagtag

SEQ ID NO: 201894 - DNA, 2853 bp, synthetic construct
  misc_feature 1..2853: note = Description of Artificial Sequence: Synthetic coding sequence
  source 1..2853: mol_type = other DNA
atgctgagcagctggcagggcggcccccggccccggcagctgctgctatggctcctgatcctggccgcgtgggagaccggaagtggacagctgcattactccgtacctgaggaggcaaagcacggcacgtttgtggggagaattgctcaggacctggggctggagctggcagaactcgtacccaggctgtttagagttgcttccaaacgccacggggatctgcttgaggtcaatctgcagaatggtatcttattcgtgaattccaggattgaccgtgaagagctctgtggcaggagtgcggagtgttcgattcatctggaagtcatcgtcgatcgtccgctccaggtgtttcatgtagaagtgaaagtaagagacatcaacgacaaccctcccatattccctgagagcaagaaacgcatcatcatagctgaatcgaggccccctgagaccagatttcctctcgacggggcttccgacgccgatatcggggtaaattctgctctgacttatcgcctcgatcccaacgattatttcactctggatgcacagaactctttggaacagatgtctagcttgtctcttgtccttcgcaagaccctggaccgagaagagatccaagagcactccctactgttaaccgctagtgacggtggtaaacccgagctcactgggacagtccaattgttaataaccatcctcgatgtgaatgataatgccccagagttttatcagtcagtctacaaggttactgtcctggaaaacgcttttaacggaacactcgtgattaagctcaatgctaccgaccccgatgacgggactaatggcgacattgtgtacagttttagacggccggtctggccagccgttgtgtacgccttcactatcaaccctaacaatggggagattaggactaagggaaaactggacttcgaagaaaagaaactctacgagatttcggtggaagcagtagacaaaggcaatatccctatggcagggcactgtacgctgctggtcgaggtcctcgatgtgaacgataacgcacccgaggtcactatcacctcgctctctctgccaatccgcgaagacacacagccatctgctatcattgcgctgatttctgtaagcgaccgagatagtggtagcaatgggcaagtcacctgcactctgacaccccatgtgccatttaaactggtttccacttacaagaattattacagtctcgtactggattccgccttagaccgcgaatccgtctcagcatacgaacttgtcgtcacagctcgcgacggcggtagtccatcgttgtgggcaaccgcttctgttagcgttggagtggccgatgtgaacgacaacgcccccgccttcgctcagcctgaatacactgtcttcgtaaaggaaaacaacccacctgggtgccatatcttcacagtgagcgcgcaggatgcagatgcccaggagaatgctctcgtctcatactccctcgtcgagaggcgcgtgggcgagagagcgctgtctagttacgttagcgttcatgctgagagtggtaaggtttacgccctgcagcctctggatcatgaggagctagagctccttcagttccaagtgtctgcaagagacagcggcgttccaccactgggatctaatgtcactttacaggtatttgtcctggacgagaacgataacgcacctgcgctcctgaccccaggcgctggttctgccgggggcactgtttccgaattgatgccccgctctgttggtgcaggacacgtggtggcaaaggtgcgggcggtcgatgccgactccggttacaatgcctggttgtcttacgagctgcaactggccgctgtcggggcgcgcattcccttcagagtagggctctataccggggaaatctctacgacccggcctcttgacgaggtagatgccccacaccacagactgcttgtactggttaaggatcacggtgagcctgctctgactgctacggccaccgtgctgttaagcctggtcgagagtggtcaggccccacaagctagtagcagggcctctgccggagcagtggggcccgaagctgccctcgttgacgttaacgtgtatcttattatagccatttgtgctgtgtcttctttgctggtcctgaccttactcctctacaccgctttacgctgcagtgctccgccaaccgaaggcgcttgcgcccccgggaaacctaccctggtttgcagctccgccgctggaagttggagttacagccagcagcgccggcccagagtgtgttccggtgaagggccacacaagaccgacttgatggccttttccccttcactcccaccttgcttgggtagcgccgagggcactggacagcgggaagaagatagtgagtgccttaaggaacctcgccaacctaaccccgactggagatactctgcttcactacgcgcaggcatgcactcctctgttcatctcgaggaggccggcattttgagagctggacctggcggtccagatcaacagtggcctactgttagctccgccacccctgagccggaggcaggcgaagtgagcccccccgtgggagcgggcgtgaactccaattcctggacctttaagtacgggcccggtaatccaaaacaaagtggacccggagagctgccggacaaatttataattccaggctcccccgctataatctctatccgtcaggaacccactaactcccaaattgataagagtgactttattactttcggcaagaaggaagagaccaaaaagaagaagaaaaagaagaagggcaataagacacaggaaaagaaagagaaggggaactcaacaactgacaattcagatcaatag

SEQ ID NO: 201895 - DNA, 2715 bp, synthetic construct
  misc_feature 1..2715: note = Description of Artificial Sequence: Synthetic coding sequence
  source 1..2715: mol_type = other DNA
atgctgagcagctggcagggcggcccccggccccggcagctgctgctgtggctcctgatcctggctgcatgggagactggctcaggccagttgcattactccgtcccagaagaagctaaacatggcacatttgtcggacgtatagcccaggatcttggccttgaactggctgagctagtaccacgcctcttcagggttgcttctaagcgacacggggatctcttagaagtgaacctgcagaacggaattctgtttgtgaattcccgaattgatcgcgaggaactttgcggacggagtgctgagtgcagcatccacctcgaagtcatagtggatcgacctcttcaggtctttcatgtggaggtaaaggtgcgagacattaatgataatcctcccattttccctgagtccaaaaaaaggattattatcgccgagtctcgcccgcccgagactagatttccccttgatggcgcctcagatgccgatatcggagtcaatagtgcactgacctatcgtctagaccccaacgattacttcaccctggacgcccagaacagcctcgagcaaatgagctctttatcccttgttctgagaaagactctggatcgcgaggagatacaggagcacagcctgcttttgaccgcgtccgatggtggcaaaccagagctgacaggtacagtacagttactgataacaatcttagacgttaatgataacgcccccgagttctatcaatctgtctacaaggtaacagtgctggagaatgcttttaacggtacgcttgtgatcaagctgaacgccacggacccagacgacgggactaacggcgacatcgtctactctttcagacggccagtatggccagctgtcgtttacgccttcaccattaaccctaacaatggggagattaggaccaagggcaaactggacttcgaggagaaaaaactgtacgaaatctctgttgaggcagtcgacaaaggcaacattccaatggccggccactgtaccctccttgtcgaggttttggatgtgaatgataacgctcctgaggtaactatcacatccctgagcctgcctattagagaagacacacaaccatctgctatcattgccttgatatctgtcagtgaccgcgacagcgggtctaatggtcaggtcacttgcactctgactccccacgttccatttaagctcgtgagtacgtataaaaactattatagcctcgtcctggatagtgctctcgaccgcgagtccgtgagtgcttacgagctggttgtgactgcccgcgacggcggcagtccaagcctgtgggcgaccgcctcagtttcggtgggtgtagcagatgtaaatgataacgcccccgccttcgcccagccggaatatactgtgtttgtgaaggagaacaatccgcctggctgccacatcttcaccgtttcagctcaagacgctgatgcgcaggagaatgctctggtatcgtattctctcgtggaacggcgggtgggggaaagggcactgtcctcttacgtgtccgtgcacgcggagagtggcaaggtgtatgcactccaacctctggatcatgaggagctagagcttctccaatttcaggtgtccgctagggactcaggcgtccctccactggggtctaacgtgactctgcaagtatttgtgttggatgagaacgataatgccccagcacttctaaccccaggcgccgggtcagctggcggtacagtttcagaattaatgcctagaagcgtgggagccggccacgtagtggccaaggtccgggcggtagacgctgattcagggtataatgcctggctctcatacgagctgcagctggccgcagtcggcgcacgcattccctttcgggtgggactctatactggagaaatcagcaccacccgccctctggacgaagtggacgcacctcaccacagactgctggtgctggtaaaagaccacggagaaccagcccttacagcgaccgctaccgtccttctgtccttagtcgaatcaggtcaggcgccccaagctagcagtagggcttcagctggcgccgtgggtccagaagctgcactggttgacgtgaatgtctaccttatcatagctatctgcgccgtttcatctctgttagtgctgacactgcttctgtataccgcactgaggtgtagcgcaccccctaccgagggcgcgtgtgccccgggaaagcccacactcgtgtgctccagtgcagctgggtcctggagttacagccaacagaggcggcctcgtgtgtgtagtggcgaaggtccacataagactgacttgatggccttcagcccctcactacctccttgtctcggaagtgcggaaggtaccggtcagagggaggaagattccgaatgccttaaagagccacggcagccgaatcccgattggcgctactctgcttctctgagggcagggatgcactctagcgtgcatctggaagaggcggggatcttgcgggctggccccggaggacctgaccagcagtggccgacagtaagctccgcaacacccgagccggaggccggggaggtcagccctccagtcggcgctggagttaatagcaactcctggactttcaagtatgggcccggcaaccccaagcagtccggacccgaacctaagaaacaaacgcaggtaagtttcctgcttcggcggaaaggcgaagcctctcagccgaggcagtag

SEQ ID NO: 201896 - DNA, 2475 bp, synthetic construct
  misc_feature 1..2475: note = Description of Artificial Sequence: Synthetic coding sequence
  source 1..2475: mol_type = other DNA
atggccagcagcatccggcggggccggggcgcctggacccggctgctgtccctgctgctgttagccgcatgggaggttggctccggtcagctgcgctattctgtacctgaagaggcaaagcacggaacctttgtggggagaatcgcacaggatcttgggctggaactggaggagctcgttccccgtctctttagagtggcctccaagaggcacggagacctgttagaggttaatctccagaatgggatcctgttcgtgaattctcgaatagacagagaagaactctgtggtcgatcagcggaatgttctattcacgttgaggtcattgttgatcgacccttacaggtttttcatgtagaggtggaggtcaaggatattaatgacaacccccccatctttcctatgacagtgaagacaattaggtttcccgagagccgcctactcgattccaggtttcctctcgagggcgcctccgatgcagacatcggggtgaacgccttgctgtcttacaaattgtcatcaagcgaattttttttccttgatattcaggctaatgacgagctttccgagtcattaagcctggttctgggaaagtccctcgatcgagaagagactgccgaggtcaaccttctacttgtagccactgatggaggcaagcctgagctgacaggcaccgtacaaattctaatcaaggtgctagacgtgaacgataacgagcccacattcgctcagtcagtgtacaaagtgaagctgctggaaaacaccgccaacggcactctggtggtgaagctgaacgcctctgatgccgatgagggccccaattcggagatcgtgtattccctcggcagtgatgtcagttccactatccaaaccaaatttactatcgaccccatcagcggagagattcggaccaaggggaagctcgactatgaagaagccaaatcctacgagattcaggtgaccgctacagacaaaggcaccccaagcatgtctgggcattgcaagatctcattgaaactggtggatattaacgataacacacccgaggtaagcatcacttctctgtcattaccgattagcgagaatgcctcgctgggcacagtgatcgccctgatcaccgtatctgaccgtgattccggtaccaatggccatgtgacgtgctcattgaccccccatgtgccatttaagctcgtgtccactttcaagaactattatagcctggtactggacagcgctctggacagggaatcagtcagtgcgtatgagttggtcgttaccgcgagagatggaggcagcccatccttgtgggccactacgagtgtgtccatcgaggtggccgatgtgaacgataatgctcccgctttcgcccagccggaatatactgtgttcgttaaggagaacaatcctcccggatgccacatctttactgtctccgcctgggatgcggacgcacaagagaacgccctggtcagctactcattggtggagcgacgggtgggcgagagggcactgtccagctatgttagcgtccatgccgagtcaggcaaggtgtatgcgcttcagcccctggaccatgaggaggtcgagctcctccaatttcaggtaagcgcacgcgatgctggcgtgcccccactgggttctaacgttacactccaagttttcgttcttgatgagaatgacaatgctcctgccctcctggcgcccagggccggtacagctgccggggcagtaagtgaactggtgccctggtcagtgggagcggggcatgtcgtcgcaaaggtgcgcgctgtggatgccgactctggctacaacgcttggctctcctacgagctccagctggggactggatccgctcgcattccgttccgcgttggcctgtataccggcgaaatttcaaccacacgagctttggacgaggccgacagccctcgccacagactgttggtcttagtaaaagaccacggcgagcccgccctgaccgccaccgctactgtgctagtatcccttgtcgagtctgggcaagcccctaaggcttccagccgagcgtgggtgggtgccgccggctccgaagctactttggttgacgtcaatgtttatctaatcattgccatttgtgcagttagctccctgttagtcctgacggtcctgctgtacacagccttgcgatgttccgttccccctaccgaaggcgcgagagccccagggaagccaaccttagtctgtagctctgctgtgggctcttggtcctattcccaacagcgaagacagagggtgtgcagtggcgaggacccccctaagacagatctcatggccttcagtccatccttaagtcaggggcccgactctgccgaggagaagcagttgagtgaaagtgagtacgtgggtaaggttagcctgttactttttctggctaacagtaagatcgtactgtttaaaaaattttacatgatcagtacttcctacctcgattcctag

SEQ ID NO: 201897 - DNA, 2847 bp, synthetic construct
  misc_feature 1..2847: note = Description of Artificial Sequence: Synthetic coding sequence
  source 1..2847: mol_type = other DNA
atggccagcagcatccggcggggccggggcgcctggacccggctgctcagtctgcttttactagcagcatgggaggtgggatccggacagttaaggtactccgtgcccgaggaagccaagcatggcacgtttgttggacgaatagctcaggatctgggtctggaattggaggaattggtgcctcggttgtttagggtcgccagcaagcgtcatggtgacctcctggaagtgaacctccagaacggaatactattcgtgaactcccgaatagacagagaggagttgtgtggaaggtccgctgagtgtagcatccatgtcgaagttatcgtggatcgtcctctgcaggtgttccacgtcgaggttgaagtgaaggacataaatgataatccacccatctttcctatgactgtcaagacgatccgattccctgagtcacgattattggattcccggtttcctctggagggagctagcgacgccgacatcggcgtcaatgcccttctgtcttacaaactctcctcctcagagtttttcttcctcgatatccaggctaatgatgagctgtccgaaagcctcagcctcgtgctgggtaagagtctggaccgtgaggaaactgcagaagtgaacctcttgctcgtcgctactgatggggggaaaccagaactgactggaaccgttcagattctgatcaaagttctcgacgtcaacgataacgagccaacttttgcccagagcgtgtataaggtcaagttgttggagaatacagctaacggaacactggtcgtcaagttgaacgctagtgacgctgatgagggtcctaactctgaaattgtgtacagcctgggctcagatgtctcgagtacaatacaaacaaaatttacaatagatcccatttctggagagattcgcaccaagggaaagctggattatgaagaggcaaagagctatgagattcaggtgaccgcaacagataagggcacacccagcatgagtgggcattgcaagatttccctgaaactggtggacataaatgataacactcctgaagtatcgatcacatctttgtctcttccaatcagtgaaaacgcatccctgggaacagttatcgccctgattactgtttctgacagggactcgggcacaaacggccacgtgacctgcagtctgaccccacacgttccattcaagctggtctcgacattcaaaaattattattcactggtgctggattcggccctggacagagagtccgtgtctgcctacgaactcgtcgtaacggcaagggacggtggcagtcctagtctttgggcaactaccagcgtgagcatcgaagttgctgacgtgaacgacaacgcgcctgcctttgctcaacccgagtataccgttttcgtaaaggagaacaacccccccgggtgccacatatttactgtgtcggcctgggacgccgacgcacaggagaatgcattggtgtcgtactcgctggtggagaggagggtgggggaaagggctctcagcagttatgtgagcgtgcacgccgagagtggcaaggtatatgccctccagcctttggaccacgaggaggtggagctgttacagttccaggttagcgcgcgggacgccggcgtacctcctcttggatctaatgtgacactgcaagtcttcgtactggatgaaaatgataacgcccccgcgctgttggcaccaagggcaggaaccgcagccggcgctgtgtcggaactagtcccatggtcggtgggagccggccacgtcgtggctaaggtgcgagctgtggatgccgacagtgggtataacgcttggctaagctatgagcttcagttgggaactggctccgcacggatccctttccgggttgggctgtacaccggagaaatctctaccacacgcgctttggacgaggcagattcgccgcgccaccggttgctagtgctcgtcaaggatcacggggaaccagccctgaccgccactgccaccgtgttagtttccctcgtggaatccggtcaagcccccaaggcatcttctagagcctgggtgggggcagccgggtctgaggccacccttgtcgatgtgaatgtctatctgattatagcgatttgcgcggtgtcaagcctgttagtgcttaccgtgctgctgtacacagctctccgctgctctgtaccgccaacagaaggagcaagggcccctggtaaacctaccttagtctgctctagcgccgtcggctcttggtcctattcccagcagagaaggcagcgtgtctgctctggcgaagatcctcctaaaactgacttgatggctttctctccttcattgtcccaaggacccgatagcgctgaagagaagcagctgtccgagagcgaatatgttggaaaaccacgccagccaaatccggactggcggtattcagcatctcttagggccggcatgcacagctccgttcatctggaggaggcagggatcctccgcgctggaccaggaggacccgaccagcagtggcccaccgtgtccagcgcaaccccagagccagaagcaggagaggtgtctccgcccgtgggagccggagtgaactctaatagctggacctttaagtacggacccgggaatccgaagcagtcaggccctggcgagctgccagacaagttcatcatcccaggatctcccgctatcatttccatccgacaggaacccacaaattctcagattgacaagtctgattttataaccttcggcaagaaagaggaaactaagaagaaaaaaaaaaagaagaaaggcaataaaacgcaggagaagaaggagaagggaaatagcactacagacaacagcgaccagtag

SEQ ID NO: 201898 - DNA, 2853 bp, synthetic construct
  misc_feature 1..2853: note = Description of Artificial Sequence: Synthetic coding sequence
  source 1..2853: mol_type = other DNA
atgctgttcagctggcgggaggaccccggcgcccagtgcctgctgctttctcttttgctgcttgcggcgagtgaagtcggtagcggacaactgcattactcagtctctgaagaagctaagcacggcaccttcgtaggacggatcgcccaagatctggggctggagctggccgagctcgtgcctagactatttcgagtcgcctccaaaaggcacggagatctgctggaagtcaacttgcagaatggaattctgtttgttaactcccggatcgatcgtgaagaattgtgtggtagaagtgctgagtgctccatacaccttgaagtaatcgtggaccggcccctgcaagtgtttcacgtggaagtggaagtgaaggatattaacgacaatgctccagtcttcccaatggcagtgaagaatttgttcatctccgaatctcgccagccagggtcccggttctcactagagggggcctctgacgccgacattggcacgaactccctgctgacctattccctggattccaccgagtacttcactctggacgtgaagaggaatgacgaggagataaagtcgcttggattagttctcaaaaagaatttgaatcgagaagatacgccgaaacattacctcctaattactgccatagatggtggaaaacctgagttaactggtaccacccagctgaagattaccgtgctggatgtgaacgataatgcccccgccttcgaacggacgatatacaaggtaaggctgcttgaaaacgcgcccaatggcacactcgtcgtcactgttaacgcaactgatctggatgagggcgtcaacaaggacatcgcttattctttcaacactgatatgagtgctgatattctgtcgaaattccacctggaccccgtcaatggtcagatcagtgtcaaaggcaacattgattttgaggagagtaagtcatatgagattcaggtggaggctactgataaaggtaatccaccaatgagcgatcattgcaccgtccttctcgagatagtcgacattaacgacaatgtccccgaactggtgattcagtcactgtccttaccggtccttgaggatagccctttgtctacagtaatcgccctgatcagcgtgtctgatagggatagtggcgtaaacggccaggttacgtgttccctgaccccacatgtgccattcaagcttgtgagtaccttcaaaaactattacagcttggtgttagacagtcctttggatagggaatccgtgtctgcgtatgagcttgtcgtgaccgcacgcgacggggggtcgccaagcctgtgggccacggcctctgttagtgttgaggtcgccgacgtaaatgataacgcgcccgcattctcccagtctgagtataccgtgtttgtgaaagagaacaaccccccgggatgtcacatcttcaccgtgagtgctcgagatgctgatgcgcaggagaatgccttggtgagctacagcctggtggagcgtcgggttggtgaacgggctctttctagttacgtgagtgtgcatgccgagtcagggaaagtctatgccctacaacccctggaccacgaagaactggagcttctgcagtttcaggtatccgcaagagatgccggcgtgcctccacttggaagcaacgtgaccctgcaggtcttcgtgctggatgagaacgacaacgcccccgcccttctgatgccaagagtggggggcattgggggtgctgtgtctgaactggtaccgcgctccgtcggggccgggcatgtggtcgcaaaggttcgcgccgttgacgccgattccggctataacgcttggctgtcctacgagttgcaacccggtacaggcggggctaggataccattccgagtcgggctatacactggcgaaatcagcaccacacgcgccctggacgaggtcgatgcaccgcgtcacaggctactcgtcctcgtcaaggaccatggcgagccgtccctgactgcgaccgccactgtgctggtgtccctggtcgaatctggccaggcacctaaagcttcttcccaggccagtgccggcgcaactggccccgaagccgcactcgtcgacgtgaatgtttatttgattgtggctatttgtgctgtttcaagtctacttgtgctgacactgctgctttacacggctctgcgctgttccgcccctcccacagaaggcgactgtggccctggcaagcccacactggtgtgttctagcgccgtgggctcctggtcatactctcagcaacgacagcagcgagtgtgctcaggcgagggcctgcctaaaaccgatctgatggcctttagtccctctctcccaccctgccctatttccagagacagagaggagaaacaagacgtggacgtagacctgagtgcaaagccaagacagccgaatcctgactggagatactctgcaagcctgagggcaggaatgcattcatcagtgcatctggaggaggcggggattttgagagctggacccggaggccccgatcagcagtggcctacagtttcttctgcaacccctgagcccgaggctggcgaagtgtctccccctgtaggggctggtgtgaacagtaactcatggacatttaagtatggtccaggaaatccgaagcaaagtgggcccggagagctcccggataagtttattattcccggcagccctgccatcatcagcataagacaggagcctacaaactcacaaattgacaaaagtgactttatcacttttgggaagaaggaggagacaaaaaaaaaaaagaaaaagaaaaaaggaaataagacacaggagaagaaggagaaaggcaatagcactacagacaacagtgatcagtag

SEQ ID NO: 201899 - DNA, 2475 bp, synthetic construct
  misc_feature 1..2475: note = Description of Artificial Sequence: Synthetic coding sequence
  source 1..2475: mol_type = other DNA
atgctgttcagctggcgggaggaccccggcgcccagtgcctgctgctcagtctcctgctgctcgcagcttccgaggtaggatctggccagctccactatagtgtttctgaggaggctaaacacggcaccttcgtcgggcgcatagcccaggatctgggactggaattggcggaacttgtcccccggctatttagggtggcgagtaaaagacacggagatttgctagaggtaaatctccagaacgggatactcttcgtaaactctagaattgatagagaggagttgtgtggtcggtctgctgagtgctctatacacctggaagtgattgtggatcgtccactccaggtgttccatgtggaagtggaggtaaaggatattaacgataatgcacccgttttccctatggcagtcaagaacttgttcatctccgaatctcgacagcctggatctcggttctccctcgagggggcttctgacgccgacatcggcacaaactcccttctcacttatagtttagacagcacagagtatttcactctcgacgtcaaaaggaacgatgaggagatcaaatccctggggctagtactgaaaaaaaatttgaaccgcgaggacactccaaaacactacctgctcataactgccattgacggaggtaagcctgaacttaccggaacaacccagctgaaaatcaccgtcctggacgttaatgataatgccccagcctttgagaggacaatctataaagtgcggttgctggaaaacgcccctaatggtaccttagtcgtgacagtgaatgctacagatttagacgaaggcgtgaacaaggacattgcatatagcttcaacactgacatgtctgcagatatcctctccaaattccatctcgatccggtgaacggccagatctcagtgaaggggaatattgacttcgaagaaagcaaaagctatgagatccaggtcgaagccactgataagggaaacccaccaatgtcagatcattgtacagtgctgctcgaaatcgtcgacattaatgataacgtgcccgaactggtaattcagtctcttagtctgcccgtcctcgaggatagcccacttagtactgtcattgcgctaatctccgtgagcgacagagattctggcgtaaacgggcaggtgacttgcagcctcacgcctcacgtgccctttaaactggtgtccacctttaaaaactattactctttagtcctggacagtcccctagacagggaaagtgtgagcgcttatgagctcgtggtcacagctcgggatgggggaagccctagtctgtgggcgaccgcaagcgtgagcgtcgaagtggccgatgtcaacgacaacgcgcccgccttctcacaaagcgaatacaccgttttcgttaaagagaacaacccccctgggtgccacatattcactgttagtgccagagacgccgatgctcaggagaacgcgctggttagctattctctggtggagcggagagtaggcgaacgcgccctaagcagctatgtcagtgttcacgctgaatccgggaaggtctatgccctgcagcccttggatcatgaagaattagaattattgcaatttcaggtctcagcccgagatgccggagtcccaccactggggtctaatgtcacacttcaagtatttgttcttgacgagaatgacaatgcgcctgccttgctgatgccgagggtggggggcatcggcggtgctgtgtccgaactcgtcccaaggtctgtgggagccggacacgtggtggcaaaggtgcgcgccgtggacgctgattcaggttacaacgcctggctgtcctacgaacttcagcccggcacagggggggccaggataccattcagagtcggtctgtacaccggcgaaataagcacgactcgcgctcttgatgaagttgacgctccccggcaccgactcctagttctcgtgaaggatcacggagagcctagtctgacagccactgccaccgttctggttagtttggtcgagtctgggcaggcgcctaaggcgtccagccaagctagtgcgggggcaacaggacctgaggccgcgctggtggacgtaaacgtatacctgattgtggctatttgtgccgtttcctcactcttagtgctgacgctcttactatacactgccctgcggtgttctgcccctcccacggagggcgattgcgggcctggcaaacccaccctggtctgctcttcagccgttgggtcctggtcttacagccagcagagacagcagcgggtgtgtagcggcgagggtctgcctaagacagatttaatggcattttccccctctctccccccctgtcccatctcacgggatagagaagaaaaacaggacgtcgatgtggatctgagcgcaaaggtgtcgaacttctatctgttctttccaaagtgtctgtgtttcagtttccttaacgtgagtacacccctcgagattcactag

SEQ ID NO: 201900 - DNA, 2451 bp, synthetic construct
  misc_feature 1..2451: note = Description of Artificial Sequence: Synthetic coding sequence
  source 1..2451: mol_type = other DNA
atggtgtacagccggcggggcagcctgggcagccggctgctgctgttgtggctattattagcgtattggaaggcgggatcaggacagttgcactactccattcctgaggaggccaaacatggaaccttcgtggggcggatagcacaggacctgggcctcgagctcgctgaattggtcccgaggctgttccgggtcgcttcaaagggacgcggtgatctgctcgaagtcaatcttcaaaatgggatcctgtttgtgaattccaggatcgaccgggaggaattgtgtcgtagaagggcagagtgctcaattcacctagaggttattgtcgaccgccctctacaagtgttccacgtggaggtggccgtgaaggacattaacgacaatcctcctcgcttttctcggcaggagcagagactctttatcctggagtctcgaatgcccgattcacgcttcccactggagggtgcttcagatctcgatataggtgccaacgcgcagctgcggtaccgcttgaatcccaacgaatatttcgatctcgatgttaaaacaaacgaagaagagacgaacttcttggagctcgtgctgcgcaagtctcttgatagagaggaaactcaggaacacaggctgctggtgatcgctaccgacggcggcaagcccgaactgacaggaaccgtccagctgctgataaacgtgttagatgctaacgacaacgctcctgaatttgataagtcaatctacaatgtgcggcttttagaaaacgccccttcaggaacccttgtcatcaaattaaacgctagcgacgccgatgaaggcataaataaagagattgtgtacttctttagtaatcttgtgctcgatgacgtcaaaagcaagttcattattaacagcaacactggcgagatcaaggtgaacggcgagctggactacgaggactacaattcctatgaaatcaatatcgacgccatggataagagcaccttccccttatcggggcactgtaaggtggttgtgaaactgctcgacgtgaatgataacaccccggaaatggcgattactaccctgtttcttcctgtaaaggaggatgctcctctgtctacagtcatagccctgatttcagtgtctgaccgcgactccggggccaatggccaggtgacatgcagtttaatgccgcacgtgcccttcaagttagtgtctacctttaaaaattattactccctggtcctcgattcagccctggaccgtgagtccgtgagtgtatacgagcttgtagtaacagcccgtgacggaggcagtccatctctctgggccaccgcctcggtttctgtcgaagtggcagatgtgaacgataatgcccccgcctttgcgcagccccaatacactgtgttcgtaaaagagaataaccctccgggctgtcacatcttcaccgtgtccgctcgcgatgccgatgcccaggagaatgctcttgtgagctactctttagtagagaggcgagtaggtgaaagaccgctgtcttcctacgtgtctgttcatgctgaaagtggcaaagtctacgccctgcagccgctagaccacgaggaggttgagttgctgcagttccaggtgagcgcaagggacgctggggttcctcccttgggctcaaatgtgaccctgcaggtattcgtcctggatgaaaacgacaatgcaccggccctcctggtaccaagggtcggggggacaggaggcgctgtgagcgagctggttccacggtccgtgggggccggtcacgtcgtcgcgaaggtccgcgccgttgaccccgatagtggctacaacgcttggctgtcctatgagttacagccggccccaggatctgctagaattccattccgggtggggctgtacacaggtgagattagcaccaccaggagcttggacgagaccgaggctccacgccataggttgctggtgcttgtaaaagaccatggggagcccccacttacagctaccgcaacagttctcgtgtctctagtcgaaagtggccaagctcccaaggcctcttctagagcaagtgctggagcggtcggccctgaggctgcattagtcgacgtcaacgtttaccttataatcgcgatttgcgcggtctcctccctgcttgtgctcactctcctcctttacactgcactccggtgcagcgctcagcctaccgaggctgtctgtacacggggtaagccaactttactgtgttcttccgccgttgggtcttggagctactcccagcagaggcgtcagagggtttgtagtggcgaggccccccccaaaacggacctgatggccttttctccctctttacctcaagggcccacatcaacggataacgtatccttcctcatcctgacttccattttcccttcgcagttcagtaacataaagtgccacatccacccactgttcttgtatctcaaaatcatgagttag

SEQ ID NO: 201901 - DNA, 2673 bp, synthetic construct
  misc_feature 1..2673: note = Description of Artificial Sequence: Synthetic coding sequence
  source 1..2673: mol_type = other DNA
atggtgtacagccggcggggcagcctgggcagccggctgctgctgctgtggctcttactcgcctattggaaagcggggagtggtcagttgcactatagcattccagaagaggctaagcacggcacctttgtcggtcgtattgcacaggatctgggccttgaactagccgagttagtgcccagattattcagagtcgcaagcaagggacgaggtgatctgctggaggtgaacctgcagaacggtatcctctttgtgaatagccgtatcgaccgggaagaactgtgcagacgacgggccgaatgtagcattcatttagaggtcattgttgaccggccacttcaggtctttcacgtagaggttgctgtgaaagatataaacgataatcccccccgtttctcacggcaggaacagagactgttcatcctggaaagtcggatgcctgacagtagattccccctagagggggcgagtgatctggacatcggtgcgaacgctcaactccggtacaggctcaatcccaatgagtattttgaccttgacgtgaagaccaacgaggaggagacgaacttccttgagctggtgcttagaaagtctctggaccgtgaagaaacgcaggaacataggttgctggtcattgctaccgatggcggaaagcctgaactaaccggaacagttcaactgttgatcaacgtgctcgacgctaatgataacgcccccgaattcgacaagtccatatacaacgtgcggctgttggaaaacgctccatcagggaccctggttattaagcttaatgcttcggatgcagatgaaggaattaacaaggaaatcgtctatttctttagcaacctggtcctcgatgatgtgaaaagcaagtttattatcaattctaacacaggggaaattaaggtcaacggtgagcttgattatgaggactacaattcctacgagatcaacatcgacgccatggacaagagcacgttccctctgagcggacactgtaaggtcgtcgtaaaactcctagacgttaatgataatactcccgagatggctattaccaccttatttttacctgtgaaggaagatgcaccactttctaccgtgatcgcccttatatccgtgagcgaccgagatagtggcgcgaatgggcaggtaacctgttcccttatgccgcacgtgccttttaagctggtttccacctttaaaaactattactctctagtcttggactccgccctcgaccgggaatcagtcagtgtctatgagttggtggtcacggcgcgtgacggaggtagtccctcactctgggccacagcttcagttagcgtggaggttgccgacgtcaatgataatgcacctgccttcgcgcagccacagtacacagtgttcgtgaaagaaaacaatccacctgggtgccacatcttcacggtgtctgcgcgagacgccgatgctcaggaaaacgctctggtcagctattcactcgtcgagcgaagggtaggcgaacgccctctttcgagctacgtgtctgtgcatgccgaatctggcaaagtctatgccctccaaccactggatcacgaggaggtggaattactgcagttccaggttagtgccagggatgctggggtgccgcctctcgggtctaatgtcacactacaggttttcgtcttagacgaaaatgataacgccccggccctgcttgtacccagagtcggcggcactggaggagcagtttctgagctggtacctcggtccgttggagccggccacgttgtggctaaagtgagagcagtcgatccagattctggctataatgcatggttgtcctatgagctccagcccgcaccaggatcagcgagaatcccatttcgcgtgggcctttacactggggagatcagcacaacccgctcattggatgagactgaagcccctagacaccggctactggttctagtgaaagatcacggcgaaccgccacttaccgccacagctaccgtgttggttagtctggtggagagtggccaggcccccaaagcgagctcacgcgcttctgctggcgctgtcggcccagaggctgcactggtggatgtgaatgtgtacttaattattgccatctgcgctgtgagttctctgctggttctaacgctcttgctatacaccgccttgagatgctccgcccagccaacagaagctgtatgtacgaggggtaagcccacattactgtgtagtagcgctgtgggcagctggtcttacagccaacagaggcggcagcgagtgtgttcaggagaagccccgcccaagaccgatctcatggcgttttccccttctctgcctcagggccccacatccaccgacaatccaaggcagcctaatccggattggagatattccgcaagtctccgggccggcatgcactccagcgtgcacctggaggaggctggaatcctgcgcgcaggtcccgggggccctgatcagcagtggcctacagttagctcagctacccctgaacctgaagctggcgaagtgtcacctcccgtaggagccggagttaactccaatagttggaccttcaagtacgggcctgggaatccgaagcagtcagggccagagcctaaaaagcagacccaggttagcttcctgctgagacgcaagggggaggcctctcagccacggcagtag

SEQ ID NO: 201902 - DNA, 2811 bp, synthetic construct
  misc_feature 1..2811: note = Description of Artificial Sequence: Synthetic coding sequence
  source 1..2811: mol_type = other DNA
atggtgtacagccggcggggcagcctgggcagccggctgctgctgctgtggctgttactggcttactggaaggcagggagtgggcagctgcattactcaatccccgaggaagcgaaacacggcacatttgtcggacgtattgcccaggacctcggactggagctggccgagctggtcccgagactgtttcgggtggccagcaagggacgaggggatcttctcgaagttaatctgcaaaacgggatcctttttgttaactcacgtatagatcgggaggagttatgtagacgtcgcgccgagtgttcaattcatctggaggtgatagtggacagacctttgcaggtgtttcacgttgaggtagcagtgaaggacatcaacgataatcccccccgtttcagccgacaggagcaacggctctttatcctggaatcaagaatgcctgacagtcggttcccgcttgaaggcgcgtccgacttggatataggcgccaatgcccaattgagatatcgactgaaccctaatgagtactttgacttagacgttaaaaccaacgaagaagaaactaatttcctggaattagtattacgtaagtccctcgacagagaagaaacacaggagcacagactgctcgtaatagcgactgacgggggaaagccggaattgacaggcaccgtacagctgctaatcaatgtattagatgccaatgacaacgcacccgagttcgataagagcatctacaatgttcgcttgctggagaacgccccaagtgggacactagtgatcaaactgaacgccagcgatgctgatgaagggataaacaaggagatcgtctatttctttagcaacctggtcttagacgatgtgaagtcaaagttcatcatcaacagcaatacaggggaaataaaagtcaatggagagctggattacgaagattataatagctacgagataaacatcgatgcaatggataagtccaccttccccctgtcaggccattgcaaggtggtggtcaagctgctggacgtgaatgacaatacaccggagatggccatcacgacactgtttctccctgtcaaagaagacgctccgctctccacagtgatcgcgctcatctctgtgtcggatcgagactctggagcaaatggccaggtgacctgctcccttatgccccacgtcccattcaagttggttagcacgttcaaaaattactattctctggttctggactctgccttggatagagaatccgtgtccgtgtatgaactggtggtaacagctcgggatgggggtagcccaagcctgtgggccacggcctctgtgtctgtggaggtggccgacgtgaatgacaatgcacctgcatttgcccaacctcagtataccgtgtttgtcaaggaaaataaccctcctggctgtcatattttcaccgtgtccgccagagatgccgatgcccaggaaaatgctctggtgtcttatagtctcgtagaaaggcgggtgggcgagcgcccactgtccagttacgtttccgtccacgcggaatctgggaaagtctacgccctacagcccttagaccatgaggaggtagaacttctccagttccaagtgagtgcacgagacgccggtgtaccaccattaggctcgaacgttaccttgcaggtctttgtgctggatgagaacgacaacgcaccagcactcctcgtccccagggtcggtggaaccggaggggcggtctccgaactcgttccccgttccgttggagctgggcacgtggtggcgaaagtgagggctgttgatccagactctggttataacgcctggctttcatatgagttgcaacccgctcctggcagcgcccggattccctttcgcgtggggttgtacacaggtgaaatctctaccacgcggtcactggatgaaacagaggccccccggcacaggctactggtgcttgttaaagatcacggcgagccaccccttacagctaccgcaaccgtgctggtcagcctggtggagtcaggacaggcccctaaagcatccagcagagccagtgcaggcgccgtggggcccgaagccgctctagtggacgtgaacgtgtatctcattattgcaatctgtgctgtttcgtctctgctggttctcacacttctgctgtataccgccctgagatgcagcgctcagcctacagaggccgtgtgcacccgaggcaaaccaaccctattgtgcagtagcgctgtgggcagctggtcctatagccagcaacgaagacagcgcgtttgctccggcgaggccccacctaagacagatcttatggctttttctcccagcttgcctcagggacctacatccactgacaatcctagacaacccaatcccgattggcggtattctgccagtttgagggctggaatgcactccagcgtacaccttgaagaggccggaatcctccgagccggacctggaggtcctgatcagcaatggcccacagtatcctccgccacccctgaacccgaagctggcgaggtatctccacccgtgggggcgggcgtcaattccaattcttggactttcaagtacggccctggcaacccaaagcagagcggacccggagagctccccgacaaattcattatccctggcagtcccgcgatcatttctatccggcaggagcctacgaacagccaaatcgataagtccgatttcattactttcggtaagaaagaggaaactaaaaaaaagaaaaagaaaaagaagggaaataagactcaggaaaagaaggaaaagggcaattccaccacagataattcagatcagtag

SEQ ID NO: 201903 - DNA, 2061 bp, synthetic construct
  misc_feature 1..2061: note = Description of Artificial Sequence: Synthetic coding sequence
  source 1..2061: mol_type = other DNA
atggtgttcacccccgaggaccggctgggcaagcagtgcctgctgctacctctcctgctgctggccgcctggaaggtgggcagcgggcagctacactacagcgtacctgaggaagctaagcacggtaccttcgtaggcaggatcgcacaggatctgggcttggaacttgccgagcttgtgccccggctgtttcgcatggcgagtaaggatcgtgaggatctgctcgaagtgaatcttcaaaacggcatcctgtttgtcaactcgcgaatcgatcgcgaggaactttgtggaagaagcgcggagtgtagcatccatcttgaagtgattgtggataggccactccaagtatttcatgtggacgtggaagtccgcgacataaatgataacccacctctgttccccgtggaggagcagagggtgttaatttatgaatcccggcttcctgactcagtcttccctctagaaggcgcctccgatgccgatgtgggatcaaatagtatcctgacctataagctgagctcttcggaatatttcgggctggatgttaagatcaatagtgatgataacaaacaaattggactcctgcttaagaagtcccttgacagagaagaggccccagcccataaccttttcttgaccgcaaccgatggcgggaagcctgagctgaccgggaccgtgcaattgctggtaacagtgttggacgttaacgacaacgccccaaccttcgagcagtccgagtatgaagtgcgcatcttcgagaacgccgataacgggactacagtgattagactgaacgctagcgatagggatgaaggcgcaaatggggccatatcctatagttttaactctctggttgccgcgatggtgatcgaccatttctcaattgacagaaatacaggggagatcgtgattcgcgggaatttggatttcgagcaggaaaacctgtataagattttaatcgacgcgacagacaagggacaccctcctatggccggtcactgcacagtactagtgagaatactagacaaaaacgacaacgtgcctgaaatcgctctcactagcctcagcctgcctgtgagggaagacgcgcaattcggaaccgttattgccctcatatctgtgaacgatctggattcaggagcgaacggccaggttaactgttctctcacaccacatgtgccattcaagcttgtttccacatttaaaaattattactccctggtcttggactccgcccttgatagagagagcgtgtctgcatacgagctagttgtgaccgcacgcgacgggggctctccgtcgttgtgggccaccgcctcgctgtcagtggaggtagcagacatgaatgacaatgcccccgcatttgcacagccagaatacacggttttcgtaaaggagaacaatccgccgggttgtcatattttcactgttagcgctagagacgccgatgcccaggaaaacgcattggtttcctactcactggttgaaagaagagtgggcgaaagagcactctcaagctacatttctgtgcatgccgagtccggaaaggtgtatgctcttcagcccttggaccatgaagagctggaactgttgcaatttcagccccgccaacccaatccagactggcggtacagtgcctccttgcgcgctggaatgcattctagtgttcatctggaagaggcgggaatcttgcgagccggaccaggcggccctgatcagcaatggcccaccgtaagctctgccacacccgaacccgaggcgggagaggtgagccccccggtcggtgctggcgtcaattctaatagttggaccttcaaatatgggcccggaaatcccaagcagtctggtcccggagaactaccagacaaatttatcattccgggtagccccgccatcatcagtattaggcaggagccaaccaacagtcagattgataagagcgacttcatcacttttgggaaaaaagaggaaacaaagaagaaaaaaaaaaaaaaaaaaggtaataagacccaggagaagaaagaaaaaggaaactctaccactgacaattctgatcagtag

SEQ ID NO: 201904 - DNA, 2853 bp, synthetic construct
  misc_feature 1..2853: note = Description of Artificial Sequence: Synthetic coding sequence
  source 1..2853: mol_type = other DNA
atggtgttcacccccgaggaccggctgggcaagcagtgcctgctgctaccactgttgcttctggcagcctggaaagtgggctctggccagctgcactactccgtgccagaggaggcgaaacatggtacttttgtagggaggatcgcgcaggacctcggactggagctcgcagagttggtcccccggctgtttaggatggcttctaaagaccgcgaggatctgttagaggtcaatcttcagaacggcattttgtttgtcaactcacgcattgatagagaggagttgtgcggtcggagtgccgagtgctccatccatttggaggtcatagttgatcggcccctccaggtgtttcatgttgacgtggaggttcgtgacatcaatgataacccacccctgttcccggtcgaagagcagagagtgctcatctatgagtccaggctgccagacagcgtctttccattggaaggagcttccgacgcggacgtcggcagcaattcgatcctgacttacaaattatcttccagcgagtacttcggacttgatgtgaaaataaactccgacgataataaacagatcgggctcctgttgaaaaaaagcctcgacagggaggaggcacctgcccataacctgtttctcactgccacagacggaggtaaaccagaacttacagggactgtgcagctactggtgacagtgctcgacgtgaacgataacgccccaacatttgagcagtccgagtacgaagtcagaatcttcgagaacgccgacaacggtaccaccgtgatcaggcttaatgcgtccgaccgggacgaaggagccaacggcgccatctcttatagcttcaattccctagtagccgcaatggtgatagaccacttcagtattgaccggaacacaggtgagattgtcatcagaggtaacctcgattttgagcaggagaatttgtacaagatcctgatagatgccacagataagggccacccccccatggctggccattgtacggttctggtgcggattctcgacaaaaatgacaacgtgccggagatcgccctgacttccctgagcttaccagttagagaagacgcacagtttggcactgtcattgccctgattagcgtgaatgatttagattcaggcgcaaacggtcaggtcaactgttcactgacacctcacgtgcccttcaaactagtgtctacctttaagaattactacagtctggtgctcgattccgctctggatcgggagagcgtgagcgcgtatgagcttgttgtgacagcacgggatggaggatccccatccctgtgggcaaccgcatcccttagcgttgaggtggctgacatgaacgataatgctccggcatttgctcagccggaatacaccgttttcgtgaaggagaacaaccctccaggatgtcacatcttcacggtttctgccagggacgccgatgctcaggagaatgcgctcgttagctattcactcgtggagcgccgggtgggcgagcgtgccttgagctcttatataagcgtgcatgctgagagtggcaaggtttacgccctccagccactggaccatgaggaacttgagctcctgcagttccaggttagcgcacgagatgccggtgtccctccactggggagtaacgtgaccttacaggtttttgtccttgacgagaacgacaacgcaccagctctactggcaccacgcgttggaggcacgggtggagccgtgagcgagctggtcccacgttccctgggcgccggccaggtagttgctaaggtccgagccgtcgacgccgattctggttataatgcctggctgagctacgagctgcagcctccagcctcttctgcacgattcccgtttcgggttggtctgtataccggcgaaatctcaacaacccgggtgcttgatgaggctgattcaccgcgccacagacttctcgttctagtgaaagaccatggcgaacctgccctgaccgctaccgccaccgttctcgtgagcctggtggagagcggtcaggctcccaaagcctcgtcacgcgcaagtgtaggcgcagctggacccgaggctgcgctggtggatgtaaatgtttatcttatcatagctatttgtgccgtgtcatccctgctcgttttgacgctgctactctatactgcattaaggtgctcagccccacccacagaaggggcatgcacggcggacaagcccactctcgtatgttcatcagccgttgggagctggagctacagccagcagcgccgacagcgcgtctgcagtggagaggggccgcccaaaatggatttaatggctttttcaccttcattatccccatgtcccataatgatggggaaggccgaaaatcaggaccttaacgaggaccatgacgccaagcctcgtcagcctaacccagactggaggtacagcgcttccttacgcgctgggatgcactcttccgtccaccttgaggaggccggaattctgagagcaggccctggtggacccgaccaacagtggcccaccgtgagttcagccactcccgaaccagaggccggtgaggtatcccctcctgtgggggccggggtcaactcaaattcctggactttcaagtacggtcccggcaatcccaaacaatctggcccaggcgagctgccggacaaatttatcattcctggctcacccgctatcatcagcattcgccaggagccaacgaatagccagatagacaaatccgacttcattaccttcgggaagaaggaagaaacaaaaaagaagaaaaagaagaagaagggcaataagacacaagaaaagaaggaaaaggggaacagtacaactgacaactcagaccagtag

SEQ ID NO: 201905 - DNA, 2370 bp, synthetic construct
  misc_feature 1..2370: note = Description of Artificial Sequence: Synthetic coding sequence
  source 1..2370: mol_type = other DNA
atggtgtgccccaacggctacgaccccggcggccggcacctgctgctcttcatcatcatactggctgcctgggaagctgggcgaggccagctgcattactccgtgccggaggaagctaaacacggaaactttgtgggccggatagcccaagatctgggcctcgaactggctgaactcgtaccacgattgttccgagcagtttgtaagttccgcggggacctcttggaagtgaatttgcagaacggcatcttgtttgtcaattcccgtatcgatcgggaggaactgtgtggtcgctccgccgagtgctctatacacctggaggtgatcgtggagaggccattgcaggtgtttcacgtggacgttgaagtcaaggatatcaatgacaatcccccggtgtttcccgccacacagcgcaatctgttcatcgctgagtcacggccactggacagtcggttccctcttgagggggcgtctgacgccgatatcggggaaaatgctctgctgacatacagactcagccccaacgagtactttttccttgatgtccccacatccaaccaacaagtgaagccgttggggctagttctgcggaaactgctggatcgagaagaaaccccagagctacacctcctcctcacagcgacggatgggggaaagccagaacttacaggaacagttcagctgttgatcacagtgctagacaataatgacaacgctcctgtctttgacaggacactgtatactgtaaaacttcccgagaacgtctcaattggcacacttgtaattcatccgaacgcatctgatttagatgagggcttgaatggagatattatatactccttcagctcggacgtctcgcccgatatcaagtccaagtttcatatggaccctttgagcggggcaattacggttatcggccatatggatttcgaggagtccagggcacacaagatcccagtggaggccgtggacaaaggtttccccccactagctgggcattgcacagttttagtagaggtggtcgacgtcaacgacaacgccccccaactcacactgaccagcttgtcccttcccattcctgaggatgcgcagcccggcacagtcatcactcttatttcggtgtttgatcgggactttggggttaacgggcaagtgacttgcagtcttaccccaagggttcccttcaaacttgtatccacgttcaagaactattatagtcttgtgctggattcagcccttgaccgggaaagcgtgtctgcatacgaactcgttgtgactgcccgagatggcggatctcctagtctgtgggcgacagcttccgtttctgtggaggtggccgacgttaatgacaacgccccagcttttgcacagcctgagtacaccgtgttcgtgaaggaaaataacccccctggctgccatatcttcacagttagtgctggtgacgccgatgctcagaagaacgcgttggtcagctattccctcgttgaactgagggtgggcgagcgagctctctcctcatacgtgtcagtgcacgctgaaagcggcaaagtttacgccctccagcccctggatcatgaggaactggaactgctccagttccaggttagtgccagagatgctggagtacctccgctcgggtctaacgtaaccttacaagtatttgtgcttgacgaaaacgacaacgcccccgctttactggccccccgggtggggggaacaggaggcgcggtcagggaattggtgcctaggtcagtgggcgccggccatgtggtggctaaagtgcgcgctgtcgatgctgactccggttataatgcttggctctcttatgagttgcagccggttgctgcgggcgcgtcaatcccctttcgcgtcgggctttacacaggagagatatccactacgcgagcgctggatgaaaccgacgccccgcgccatcgcttactcgtgctggtgaaggaccacggcgaacccagcttaaccgctaccgccactgttttagtctcacttgtagagtccggacaggcccccaaagccagttcccgcgcttctctgggcatcgcaggacctgagacggagctggtggacgtcaacgtttatcttatcatcgccatttgcgcagtgagttcgctcctggtacttacgttactcctgtatactgccctgcgttgctcagctccctctagtgagggagcttgttccctggtgaagccgaccttggtgtgtagtagcgctgtcggtagttggagtttctcacaacagcggagacagcgcgtctgctctggagagggccccccaaagacagatcttatggccttctccccttcacttcctcagggtcccagttccaccgataatgtgtctcacaaatag

SEQ ID NO: 201906 - DNA, 2814 bp, synthetic construct
  misc_feature 1..2814: note = Description of Artificial Sequence: Synthetic coding sequence
  source 1..2814: mol_type = other DNA
atggtgtgccccaacggctacgaccccggcggccggcacctgctgctttttatcattatcctcgccgcttgggaagccggtaggggccaactacattatagcgtgcctgaggaggctaaacacggaaacttcgtggggcgcatagcccaggatttggggttggaacttgctgaactggtccccagactattccgtgccgtttgcaagtttcgcggcgatttattagaagtcaacttgcagaacggtattctgtttgttaactcgagaatcgacagagaggaactgtgcgggcggtccgctgaatgtagtatccacctggaggtgatcgtggagaggccacttcaggtgtttcacgtggacgtagaagtgaaagatataaacgataaccccccagtcttccctgctacacaacgcaacctgttcatcgctgaaagtcggcctctggactcacgcttccctctggaaggcgcttctgacgctgatattggggagaatgctcttctaacttacagactgtcgcctaatgaatactttttccttgatgtgcctacgtctaaccagcaagttaagccactcgggcttgtgctgagaaagctcttggatcgagaggagacacccgagttgcatctgctgctgactgcaaccgatggcgggaagcccgagttgaccgggacggtgcagctcctgattacagtgttggataacaacgacaacgccccggtgttcgaccggactttgtacaccgtaaaacttccagagaatgtgagtatcggaacgctggtgatccaccccaatgcaagtgatttggacgaaggccttaatggcgatatcatctattcctttagtagcgacgtatctcccgacatcaaatctaagttccacatggatccactctccggcgcaatcacagttattggccatatggacttcgaagagagccgggcgcataaaatcccagtagaagctgtagataaggggtttcctccattggccggccattgcactgtcctcgtcgaggtggttgacgttaacgataacgctcctcagctgaccctgacaagcctttccctgccaattcccgaagatgcgcagccagggacagtgattactcttattagtgttttcgatagagactttggcgtaaatggccaggtcacctgctctcttacccctcgcgtgccctttaaactcgtgtcaacatttaagaactactatagtctcgtgctcgactcggcattggatagagaatccgtttcagcttacgagttggtggtgaccgcgcgagacggaggatccccctctctctgggctaccgcctcagtgagcgtggaagttgcagacgtgaacgataatgctccagccttcgctcagcctgaatacacagtgttcgtgaaggaaaacaaccccccaggctgtcatatctttacagtcagtgcaggggatgcggacgcccagaagaacgccctcgtgagctatagcctggtggagttaagggtgggtgaaagagcactgtcatcatacgtgtcagtgcacgccgagtctggcaaggtgtacgcgcttcaacccctggaccatgaggagctggagttgctgcagttccaagtgtccgctcgcgacgctggggtgccacccctagggagcaacgtgactcttcaggtgttcgtcctcgatgaaaacgacaacgcacctgcccttctcgccccaagagttgggggcacaggaggcgccgtcagagagttagttccccgcagcgttggcgcaggtcacgtagtcgctaaagttcgagcggtcgatgctgactccgggtacaatgcgtggttatcttatgaactgcagcccgtggctgccggagctagtatcccttttagagttggcctctacaccggagaaattagcaccacgcgggcactggacgaaaccgatgctccgcgacatcggctccttgtcttagtcaaggaccatggggaaccctcactgacagcaacggctacggtgctggttagtctcgttgagagcgggcaggcgcccaaggcaagctcccgggcttctctgggcatcgctggcccagaaaccgagctggttgacgtcaatgtgtatctgattatcgccatatgtgcagtaagttccttactagttctgaccctattgctgtatacagctcttcgctgtagcgcaccttcctctgagggggcttgttctctcgtaaagcctactctggtgtgtagctccgccgttggatcatggtcctttagccagcagagacgccaacgtgtatgctccggggaaggtccacccaagacggatctgatggcattctcgccttcactgcctcaggggccctcgtctaccgacaacccccgccagcctaatcccgactggcggtattcggcttccctgagggctggcatgcactcgagcgtccacctggaggaggccggaattctccgcgcgggcccgggaggcccagaccagcaatggcctacagtgtcatcggccacccccgagccggaagcaggggaggtgagcccacctgtcggggccggggtaaactctaatagctggactttcaagtatggccccgggaatcccaagcagtcaggcccaggcgagcttccggataaatttatcataccagggagcccggctattatcagtattagacaggagcctacaaactcccaaatcgataagagcgatttcattacgtttgggaaaaaggaagagaccaagaaaaaaaaaaagaagaagaaaggaaataaaactcaagagaaaaaggagaaaggcaattccacaacagacaattccgaccagtag

SEQ ID NO: 201907 - DNA, 2445 bp, synthetic construct
  misc_feature 1..2445: note = Description of Artificial Sequence: Synthetic coding sequence
  source 1..2445: mol_type = other DNA
atggactaccactggcggggcgagctgggcagctggcggctgctgctcttgctgttactgcttgccgcatggaaggtggggagcggtcagctgcactactcagtgcccgaggaggccaagcacggcacctttgtcggcaggattgcacaggacctcggacttgaactggccgaactggtaccccgtctgttccgggtcgcttccaagagacacagagacctcctggaggtgagccttcagaatgggattctgttcgtgaactctcgaatcgaccgcgaagagctatgcggccggtccgccgagtgcagcatccatctcgaagtgatagtagatagaccactgcaagtattccacgttgacgtggaggtaaaagacgtgaacgacaatccaccagttttcagggtgaaggaccagaagttgttcgtttcagagtcacgaatgccggattccagatttccactggaaggagcctctgacgcagacgtcggtgctaatagcgtcttgacctaccgtttgtcgtctcatgactattttatgttagacgtcaactctaaaaacgatgaaaacaagcttgtggaactggtactgcggaagagtttggacagggaggacgcacccgcacaccacctgtttctcactgccacagacggcgggaaaccggagcttactggaaccgtgcagttactcgtaacagtgctagacgtcaatgacaacgcaccaacttttgagcagtccgagtacgaggttcgtatcttcgaaaacgcagataatggaaccaccgtgattaagttgaatgcctctgatccagacgagggcgcgaatggtgccatttcatattccttcaattcgctggtggagaccatggtgatagaccatttttctattgaccgaaacactggcgaaatagtgatccgggggaatctggacttcgaacaggagaacctctataagatattgatagatgctacagataagggccacccgccaatggcagggcactgcactgtcctggtgagaatcctcgataaaaatgacaacgtgcctgaaatcgctttgacttccctgagcttgccagtgcgggaggacgcacaattcggtactgtcatcgcactcatcagtgtgaatgacctcgattcaggtgctaacggccaggttacctgctctctgatgccccatgtgcccttcaaactggtctccacttttaagaactactactccctcgttctggactcagcactggatcgtgagcgagtatctgcctacgagctcgtggtcaccgcccgggacggcgggtcgccaagcctatgggccactgcgtccctgtcagtggaggtggccgatgttaatgacaatgcacctgccttcgctcagccagagtataccgtgtttgtgaaagaaaataaccccccggggtgtcacatttttaccgtctctgctcgggacgccgatgcacaagagaacgctctggtgagctactcattagtggagcggcgcgtcggcgaaagaagcctgtcctcctatatctctgtgcacactgagagcggcaaagtgtatgcccttcagcccctggaccatgaggaactggagcttctgcagttccaagtgtcagcgagggatgctggggtgcccccccttggcagcaacgtgacacttcaggtcttcgttctggacgaaaatgataatgccccggccctgctcgagcctagagtgggcgggaccggtggggcagcctccaaactggtgcctcgcagtgtaggtgccggccatgtggtggccaaagttagggcggttgacgcggacagcggctataacgcctggttgtcttacgaattacagccagctgcttcctcccccaggattcctttccgagtcggactgtataccggagagatctccactactcgcgtattagacgaggcggactctcctcgtcaccgactcctcgtccttgtgaaggaccacggcgagcccgccttaactgcgaccgctactgtgctggtctcactggtagagagtgggcaggctcccaaggcctcatcacgtcaatccgctggcgtcctcggccctgaggccgcactcgtggatgtgaacgtctatctgattattgccatttgcgctgtgtcgtcactactcgtgctcaccctgttgctgtacacggccctcagatgctccgccttacccaccgagggaggttgtcgggcagggaaaccgacgttggtgtgctctagcgctgtgggctcctggtcttacagtcaacagcagccacaacgagtgtgctcgggtgagggtccacccaagactgaccttatggctttttcaccatgcctgccccctgacttggggtcagtggacgtcggcgaggaacaggacttgaacgtggaccatggtctcaaggtgtcccctttcaaattccggacgcataagttctatttgtggaaactgtag

SEQ ID NO: 201908 - DNA, 2853 bp, synthetic construct
  misc_feature 1..2853: note = Description of Artificial Sequence: Synthetic coding sequence
  source 1..2853: mol_type = other DNA
atggactaccactggcggggcgagctgggcagctggcggctgctgttgcttctgctattacttgctgcctggaaagtgggctctggacaactccattacagcgtgcccgaggaggctaaacacggaactttcgtcggccgtattgcccaggatctgggccttgagttggccgagttggtcccacggcttttcagagtcgcttcaaaacgccaccgcgacctgctggaggtgtcgcttcagaacgggatcctgttcgtgaatagccggatagatagagaggagctctgtggacggagtgctgagtgttctatacatctcgaagtcattgtggacaggccactacaggtgttccacgtcgacgtggaggtcaaggacgtcaacgataatcccccggtgttccgagtaaaggatcagaagctctttgtgtccgagtccaggatgccagatagtagatttcccctggagggagcctccgacgctgacgtcggcgccaattccgtgctcacataccggttaagtagccacgactactttatgctggatgtcaattcaaaaaatgacgagaataaactcgtggagttggtcttaaggaagagcttggacagggaagatgcacccgcccatcacctttttctcaccgcgactgatggcggaaaacctgagctgacggggaccgtgcaactcctggtgactgtgctggatgttaacgacaatgcacctacattcgagcagtcggagtatgaggtgcggatttttgaaaatgccgataacggtactactgtcattaagctgaacgcatctgaccccgatgagggcgctaatggcgctattagctacagcttcaactcactcgtagaaaccatggttatcgaccacttttccatcgatagaaacacgggcgagatcgtcatcagagggaacttggatttcgaacaagagaacctgtataaaattttaattgatgccactgacaaaggtcatcctccaatggctggccactgtaccgttctagtccgcatactggataagaatgataatgtcccagagatcgctcttacaagtctatctttgccagtgcgggaggacgcccagttcggaacagttattgcactgattagtgtcaacgaccttgatagcggcgcgaatggtcaggtaacctgctccttgatgcctcacgtcccgtttaagctagtatctacttttaagaactattacagtctcgtcctggacagcgccctggacagggagagagtgagcgcttatgaacttgtggtgaccgcaagggacggcggaagcccttcactttgggctaccgcttcactctctgtggaggtcgccgatgtgaacgacaatgccccagctttcgctcaaccagaatacacagtgttcgtcaaggaaaataatccccctggatgccacatctttactgtgtccgcacgtgacgctgatgcacaggaaaatgctctggtgagctattccctggttgagcgaagagtcggagagcggtctctttcgtcatacatcagcgtacataccgaatctggtaaagtgtatgctctgcaaccactcgatcacgaggaactggaactgctgcagttccaggtctccgcaagagacgcgggtgtgccccctctcggctcaaatgtgacactacaggtgtttgtgttggacgagaatgacaacgcccccgccctgctggagcctcgcgtggggggaaccgggggtgccgcctcaaagctggtccccaggtcagtgggagcaggacacgtggtggctaaggtgcgtgccgtggatgctgactctggctacaacgcatggctgagctacgaactgcagccagctgcatcttctccacgcattcccttcagagtaggactgtatacaggagagatatccacaacaagagtcctggacgaagctgatagcccacggcatagactgctggtgttggttaaagatcacggcgaaccagcactgacagctacagctaccgtcctggtcagtctggtggagtccggccaggcccctaaggcctctagccggcagtcagccggggtactgggaccggaggcagcactggtggacgtgaacgtgtacttgatcatcgcaatctgcgccgtgagctctttgctcgtgctgaccttgcttctgtacacggccctaagatgctcggcattaccaacggaaggcgggtgtagagccggaaagccaaccctggtctgctcgagcgcggtgggctcgtggagctatagccagcagcagccacagagggtgtgcagtggtgaaggacctccgaagaccgatcttatggcattttcgccttgtctgcctcccgatcttggctcagtggatgtaggcgaggaacaggaccttaacgtcgatcacgggttgaaacccaggcaaccaaatccagattggcggtacagcgcatcgttgcgcgccggcatgcactcatcagtgcatcttgaggaggccggaatcttgcgcgccggccctggtgggcctgatcaacagtggcccactgtgtctagcgctacacctgaacctgaagccggggaggtctcccctcccgtaggagccggtgtaaactctaattcctggacattcaagtacgggcccgggaatccaaagcagtccgggccaggggagctgccagataagtttatcattccaggatcaccagctatcataagcatcagacaggagcctacaaattctcagattgacaagtccgatttcattacattcggtaagaaggaagaaactaagaagaagaaaaagaagaagaaggggaacaagacccaggagaagaaagagaagggcaatagtactacagacaattccgatcagtag

SEQ ID NO: 201909 - DNA, 2529 bp, synthetic construct
  misc_feature 1..2529: note = Description of Artificial Sequence: Synthetic coding sequence
  source 1..2529: mol_type = other DNA
atgctgtacagcagccggggcgaccccgagggccagcccctgctgctgagccttctcattctagccatgtgggtagtcggctcaggccagcttcattactcagtgcccgaagaggccgagcacggtaccttcgtgggaagaattgcccaggacctggggctggagctggctgagttagtgccaagattgttccagttggacagcaaaggcagaggcgatctcctcgaagtcaacctgcaaaatgggattttattcgtgaatagccgaatcgatcgcgaggaactgtgtgggcgcagcgcagaatgctctattcatctggaagtcattgtcgatagaccactccaggtgttccacgtagacgtcgaagtgaaagatatcaacgacaatcctccagtttttcctgctacgcagaagaacctctttattgctgagagcagacccctcgactcaaggttccctctggaaggtgcttctgatgctgacataggggagaacgccctcctgacctaccgcttatcgcccaacgaatacttcttcttagacgtaccaacatccaaccagcaggttaaaccactaggcctggtgctcaggaaattattggatcgggaagagacacctgagctgcatctccttctcaccgctacagacggaggaaagccagaactaaccgggactgtgcagctgctaataaccgtcttagataacaacgacaatgcccccgtattcgacagaaccctctacaccgtaaagctgcccgagaacgtctctatcggtacattggtgattcacccaaacgcctctgacctagatgaaggattaaacggggatatcatctattcgttttcaagcgacgtgagccctgatatcaaatccaagttccatatggaccccctgagcggtgccattactgttattggacacatggattttgaagagtcacgggcccataaaatcccggtagaagccgttgataagggttttcctcctctggcaggccactgcacactgctggtcgaggtagttgatgtgaatgataacgcacctcaactgaccatcaaaacgctgagtgtgccggtgaaagaagacgcgcagctcgggacagttattgcactcatttctgttattgacctagatgcagacgccaacggccaggttacctgttccctgacgccacacgtgccttttaaactcgtgtcaacatacaagaattactacagcctggttttggaccgggcccttgatcgggagagtgtgtcagcctacgaactagtggttaccgcgcgcgatgggggctccccgagcctgtgggccactgcacgtgtctctgtcgaagtggctgatgtaaacgataacgcaccggctttcgcacagagtgagtacactgtgttcgtgaaggagaataacccccccgggtgtcatatatttacggtgagcgcaagggatgcagacgcccaagagaacgctctggtctcgtattccctcgtggagagaagattgggcgaacggagcctttcttcctacgtctctgttcacgccgagtcgggaaaggtttatgctctccagccactcgatcacgaggaacttgaactactccaattccaagtctctgcgagagacgcgggagtaccacccctgggctccaatgtcacactacaagtgtttgtcctggacgagaacgataacgccccagcgttgctaactccacgtatgcgcggtaccgatggagctgtgagcgaaatggtgttgagatcagttggagctggggtcgtagttggcaaggtaagggctgtggacgccgattcaggatacaacgcatggctgtcttatgaacttcagcctgagacagcatctgcaagcatacccttcagggtaggtctctatactggcgagataagcacgactcgcgcgttagacgagaccgatgcacctcgccaaaggctgttggttctggttaaagatcacggcgagcccgccctcacagcgaccgccaccgtgcttgtgagtcttgttgaaagtggccaagcgcccaaatcttcctctcgcgccagcgtaggcgcaacaggccccgaagtgaccctagtggacgtaaatgtgtatctgatcattgccatctgcgcagtgtcctccctcctcgtcttgacgcttcttctctatacagttctgcgctgctccgccatgcccaccgaaggagagtgcgctccgggaaagcccacactcgtttgttctagcgccgttggctcttggagctactcacaacaaagacggcagcgagtatgcagtggagaggggaaacagaaaacagacctcatggcattcagcccaggcctcagcccctgcgctggaagtactgaacggaccggcgagcccagcgccagtagtgatagcactggaaaagtgggcttcagctcaattctgtttatctacatcattttcttcctggagcggtattacagactgctccccggagccgtgcagatcgtgctgtttatctttttagaaattcagcaaatcttcttcctcattaaatag

SEQ ID NO: 201910 - DNA, 2853 bp, synthetic construct
  misc_feature 1..2853: note = Description of Artificial Sequence: Synthetic coding sequence
  source 1..2853: mol_type = other DNA
atgctgtacagcagccggggcgaccccgagggccagcccctgctgctatccctgctcatcctggccatgtgggtagttgggtcaggccagctgcactacagcgtgcctgaagaagctgagcatggtactttcgtagggcggatcgctcaggacctgggtttggaactcgcagaactggtaccacggttgtttcagctggactctaaaggacggggggatctccttgaggtgaacttgcagaatggtatcctttttgtgaactctagaatcgaccgggaggaactctgtggtcggtccgcagaatgctctatccacctggaagttatcgttgatcgtccattgcaagtattccatgttgacgtggaggtgaaggatattaatgacaaccctcctgtgttccctgcaactcagaagaacttattcattgcagagagccggccactcgactctcgctttccactcgaaggcgcttctgacgcggatatcggcgagaatgcccttctgacatacaggttgtctccaaatgaatacttcttcctcgatgtccccacaagtaatcagcaggtaaagccactggggttggttctcagaaaattgttggatagggaagagactcccgaactgcacttgctgttgacagctacagatggaggaaagccagaactgacagggaccgtgcagctcctcatcactgtactggacaataatgataacgctccagtgtttgatagaacactttataccgtaaaactgccagaaaatgtgtctattggtacattggtcatacacccaaacgcttccgacctcgatgaaggactgaatggagatatcatttattcgttctcatctgacgtgtctccagatatcaagtctaaattccatatggatcccctgagtggcgccattacagtgattggacacatggatttcgaagaatcccgtgcgcataagatccccgtggaggcggtggacaaagggtttccgccactggccgggcactgcaccctcctagtggaagtggtcgacgttaatgataacgcccctcaactgacaattaaaaccctttcagtgccggtcaaggaggacgcccagctggggacagtaatcgcacttatcagtgtcattgacctcgatgctgatgccaacggccaggtgacctgcagcttgaccccccacgtgccctttaaattggtctctacctacaagaactactactctctcgtgctggatcgagcccttgatagagagtcggtgtccgcatatgagcttgttgtgaccgcacgagacggtgggtcgcctagcctatgggcgacggcacgggtctctgtcgaggtggccgatgtaaatgacaacgctcctgcctttgctcagagtgagtacaccgtgtttgttaaggaaaataatcccccaggttgccatattttcaccgtgtcagcacgagacgccgatgcccaggagaacgccctagtgagctacagcttggttgaacggcgcttgggcgaacggtccctctcttcttatgtctcagtgcacgctgaatcaggaaaagtgtacgctctgcagcctttggatcacgaagaactggaactattacaatttcaagtgtcagctcgcgacgccggcgtgccaccactgggatccaacgtaacactgcaggtcttcgttctcgatgagaatgataacgcccctgcattgctgactccaagaatgcgggggacagatggagcagtctctgaaatggtgctgagatcggtcggagccggcgttgtggtcggcaaggtaagagcggtcgatgctgactctgggtataacgcctggttaagctacgaattacagcccgagacggcatctgcttccattcctttcagagtgggactctacaccggcgaaattagcaccaccagagccctggacgaaactgatgccccccggcagcgtttgctcgtgctggtcaaagaccacggggaacccgctcttactgcaacagctactgtcctggtctccttagttgaaagcggccaggccccaaagtcctctagtagagcctccgtcggggccacgggccccgaggtgacactagtggacgttaacgtatacctaatcatcgccatatgtgctgtctcaagcttactggtgctgacgttgttactctacacagtcctacgctgcagcgcaatgccaaccgaaggagagtgtgccccgggcaaacccacactggtgtgcagcagtgccgtaggatcatggagttattcacagcagcggagacagcgggtgtgttcaggagaggggaaacagaaaaccgacctcatggcgtttagtccaggcctctcgccctgtgctgggtctaccgaaagaacgggagaaccctccgctagtagcgactccaccggaaaacccagacagccaaacccagattggaggtacagcgccagcctgagagccggcatgcactcttcagtgcacctggaggaagccgggatcctgagagccggtccaggtgggccagaccaacagtggccaactgtatcttcagctactcccgagccagaggccggggaagtttccccgccagtaggagccggcgttaactccaactcttggacatttaagtatggacccggaaatcccaagcagtctggccccggggaactgcccgataaatttatcattcccggctcacccgccataatctctatcagacaggaaccgactaacagccagattgataaaagtgacttcattacgttcggaaagaaggaggaaaccaagaagaagaaaaagaagaagaagggtaataaaacacaggagaagaaagaaaaaggtaacagtactacagataacagtgatcagtag

SEQ ID NO: 201911 - DNA, 2892 bp, synthetic construct
  misc_feature 1..2892: note = Description of Artificial Sequence: Synthetic coding sequence
  source 1..2892: mol_type = other DNA
atggtgggctgcggcgtggccgtgctgtgcctgtgggtgagctgcggcgccgctgctggccaactggagtactccgtcccggaagaaacagaacgcggagtggcggtgggaaatctgagcgcagacctgaggcttccagctgccgcaatgagctctcggaatttccgattcctctcgtcccatcgtgagctgtattttggggttgatctgccctctggcaaccttgttgttcgcgagccagcagatcgggagcagctgtgcagggctaaggcggcttgtgtgctcacatacgaccttgtcctggaagatccactcgagttgcacaaaatccgtattcatgtgctggataccaatgacaattctccactcttccccgctggcgacgtgcagctgcacatcccggagtttctgacacccggggctagattcacgctccctaatgcccaggacgatgatgaaggatccaacggcatcctcagctatagccttagccctagccagcactttcgtctcgacatgggaagcagagtcgatggctctgaatatcctgaactggtacttgaaaaagccctcgatcgggagcagagggctacacatctactggtgcttaccgctcgcgacggggggcttccggccagatcaggtgacgctcaggtcactatcatcgtcgtggacaccaacgataacgcccccgttttcgaaagatctgtatatcgaactaaggttcctgaaacagcccccaatgggacagtcttgttcagggtgcaggcactggatcccgatgagggatctaacggagaggtgcagtactctttatcgaattctacacaagctgagttgagacatcgtttccatgtccaccccaagagcggggaagtacaggttgcagcctctctcggccccccagagacactcctggaggcctatatcgaggcccgcgacgagggtgtgttcggcctcgcttcaactgcgaagctgctagtagaagtcactgatgtgaacgatcatgcgccagaactggatttcctcacattatcaaaccccgtacccgaggatgccgcacctggtacagtgatagccctcttttcggtgaaagatgaagatcttgatagtaacggcagagtgatctgcgggatgagtagtgcaggcccattccagctgaccgccagctttgataactactactctctccttatcgatggccccttggaccgagaacaaatctctgagtaccaagtgctgattacggccagcgattctggatcgccgccattgagcacaaggagaacaataaccgtttccgtggccgacgtgaacgacaatacccctaactttcctcagccccagcaggagttgtttgtcgctgagaataacggccccggggcctcattaggtagggtctttgcacaggacccagacctggggaaaaatgggctcgtgtcctatgagttgttggatgtcattagcgaggggcctagtgcctcaagcctcttagccgtagagagcagttccggggccataacggctaaaaccagctttgacttcgaacagctccgtggctttcatttccaagtggaagggagagacggcgggatccccccacgatccgccactgtgaccattaacctttttgtggtggacagaaacgacaactatccagttatactctttccattaccacggaatgggagcgtgccagttgagatcgtccctaggagcgccaggaccggtcatttggtgacaaaagtcgtcgcggaagatgctgactctggttccaatgcgtggctctcctatcacatttcgagagcttccgacagctctctatttcggatttccgctaacatcggagagctgcggacagcccgattagtgctacccactgatgccgtcaaacagagagtggtggtggtggtccgtgaccacggcgacccacccctgagttcctccgtgactctgggggtgttgttgagcaattctgtcccccagctgttacctgatttcgaggatgtttgggaaccagggggccagttgtctgcccagaacctatatctggtcatcgctctcgcctgcattagctttctctttcttgggtgcctgctgttttttgtttgtaccaagctgcaccagtcgcccggctgttgcgcgcaatcttgctgtagatccactgaagacctccggtatggctctaagatggtatccaacccttgcatgaccagcgcgactattgacgtaacaaccgttgagcgccttagccagacttatctgtatcgagcctctctcggtcttgggtcagacaataattctctcctcttgagaggtgagtataacgccgcagatctaagaaaccttgcgacgggagtggggctgaacttgcctatctcctgtatccagataaggaatagaaaaggggaccacgccaatgtcaacgcaatgcccaggcagccaaacccagactggagatacagcgcaagcctccgggccggcatgcactctagcgtccacctggaggaagcaggcatccttcgagctggaccggggggccccgaccagcagtggccaacagtatcatctgccacgcccgagccagaagctggcgaggttagtcccccagttggcgcgggcgtgaactccaactcatggaccttcaaatatggtccaggaaaccctaagcagagcgggcccggcgagctgcctgacaagttcattattcccggatctccagctattattagcatcagacaagagcctacaaattcacagatcgataaaagtgacttcatcacattcggtaaaaaggaagaaacaaaaaaaaagaaaaaaaaaaaaaagggcaacaagacacaggagaaaaaagagaagggaaattctaccacggacaatagtgaccagtag

SEQ ID NO: 201912 - DNA, 2457 bp, synthetic construct
  misc_feature 1..2457: note = Description of Artificial Sequence: Synthetic coding sequence
  source 1..2457: mol_type = other DNA
atggtgggctgcggcgtggccgtgctgtgcctgtgggtgagctgcggggccgccgctggccagctggagtacagcgttcccgaggagactgagaggggcgtggccgtcggcaatctgagcgctgacctgcgtctcccagccgcagcaatgtcatcccgaaatttccgcttcctgtcttcacatcgagagctgtacttcggggttgacctccctagtggcaatctggtggtccgggagcctgctgaccgagagcagttatgtcgagccaaagccgcttgcgttctgacttacgatctggtattggaggacccattggaacttcataaaattagaattcacgtgctagataccaatgataactcacccctttttccagcaggcgatgtgcaactccacatccccgagttcctgactccgggggccagattcacactgcctaacgctcaagacgacgatgaggggtccaatggcatcctgtcatattccctgtccccttcacaacactttagactggacatggggtcacgggtagacggctctgagtaccccgaactggtattggaaaaggcactggatcgggaacagagagcaacccacttactcgtcttgacagcccgagacggaggcttgcctgcccggtcaggcgacgcacaggtaaccatcatcgttgtggatacaaatgacaacgctcccgtcttcgagcggagcgtctaccgtactaaggttccagaaacggcaccaaacggcacagtgctcttccgcgtgcaggctttagaccctgatgagggcagcaatggcgaggtgcagtacagcctctccaactctacccaagccgagctacgccacagatttcatgtccatccaaagagcggcgaggtgcaagtagctgcgtctctgggacctcccgagacactgcttgaggcctatattgaggctcgggacgagggagtttttggactggcttccaccgctaaactcctggtagaggtcaccgatgttaacgaccacgcaccggagctcgacttcttgactcttagcaacccagtccctgaggacgctgcacctggcacagtgatcgctctcttttccgtgaaggacgaggatcttgactctaatgggcgcgtgatatgcggcatgtcgtctgccgggccttttcaacttactgccagcttcgacaactactactctcttttaatcgacggtccattggaccgcgaacagatctccgagtatcaggtgctgattaccgcatccgactctggatcacccccactgtctacccgacgtacgatcacagtttctgttgctgacgtgaatgataacacacctaattttccgcagccacaacaggagctcttcgtagcagaaaataatggtcccggcgcttctctgggccgggtgtttgcccaggacccggacctgggcaaaaatggcctggtgtcctatgagcttctcgatgtaatctcggagggccccagtgcgtcctcactgctcgccgtggagagttccagcggagcgatcacagcaaagaccagtttcgactttgaacagttacgcggattccactttcaggtagagggcagagacgggggaattcccccccgctccgcaaccgttaccattaacctcttcgtcgtggaccggaacgacaattatcccgtgattttatttccactgcctaggaatgggtcggtgcctgtcgagattgtgccgcgatctgcacgcactggacatctggtgacaaaagtagtggccgaagacgcggattcgggctctaacgcctggttaagttatcacatctctagagcttctgactcatctctgtttcgaatcagtgctaatataggggagctgcgaactgcgcgactggtgcttccaacggacgccgtgaaacagcgggtggtggttgtcgttcgtgatcacggcgatccccccttgagttcctccgtgacactgggggtgctgttgagcaattccgtcccacagttgttaccggatttcgaggatgtgtgggagcctggcgggcagctctcagcccagaacttgtacctggtgatcgccctcgcctgtatatcctttcttttcctgggatgcctcctattctttgtgtgtacaaaattacatcaaagccccggttgttgcgcgcaatcatgctgtcgctcaaccgaagatcttcgctatggatccaaaatggtgtcaaatccttgtatgacaagcgccaccatagacgtgactaccgtagagcgactcagtcagacatacctgtacagagcctccctgggattgggttcagataataacagcttgttgcttcgcggtgaatataatgctgccgacctgaggaatcttgccacgggcgttgggcttaacttgcctatttcatgcatccagattaggaatagaaagggggaccacgcaaacgtgaacgccatggtgtctaaattctatggtatatag

SEQ ID NO: 201913 - DNA, 3024 bp, synthetic construct
  misc_feature 1..3024: note = Description of Artificial Sequence: Synthetic coding sequence
  source 1..3024: mol_type = other DNA
atggagcaggccggcacccggcccgccgccaccgagcacccccggctgaggcggcccatgccctggttgctactcctgcctctacttctgctgctgcttcttctgctccccggccccgccgcctcccaacttcgatatagcgtacccgaggaacaggctccgggtgccttggtgggcaatgttgcacgggctttagggctcgaactgcgccgactcggtcctggatgcttgcgaattaatcacttaggtgctccgagcccacgctatctcgagctggacctcactagcggggcattgttcgtaaatgagaggatcgatagggaggctctgtgcgagcaacgcccacgttgcctcctctcactggaggtgctggcccataaccctgtggctgtgagcgctgttgaagttgagatacttgatatcaatgacaattctcctcggttccccagaccaaattaccagctccaagttagcgaatctgttgcccctggggctaggttccatatagaatctgcccaggaccctgatgtcggcgccaattcagttcagacttatgaattgtccccctctgagcattttgagctggatcttaagccattgcaggaaaactccaaggttcttgaactggttctgcgtaagggcctggaccgggaacaggctgccctacatcatctggtgcttaccgctgtggatggcggtatccctgcacgatcaggcacagcccagatcagcgtgagagtcctggataccaacgataacagtcccgcatttgaccagtccacataccgtgtgcagctccgcgaggattccccgcccggaaccctggtggttaagctaaatgcaagtgatcctgacgaaggtagcaacggcgaactgcggtacagtctgtcttcatacaccagcgatcgggagcgccagctctttagcatagatgcctcaactggagaagtgagggtgattggtggcctggattatgaagaggcttcgtcgtaccaaatttacgtgcaagccactgaccgaggaccagttcctatggccggtcactgcaaggtcctggtcgacattgttgatgtcaatgacaatgcccccgaggtcgtgttgactgacctctactctccagtgccagaaaacgctacccctaacaccattgtggcagtgctgtctgtgaacgaccaggatagcggccctaaccggaaagtgtcgttaggcctagaagccacacttccgttcagactcaacggattcggcaactcttacaccttggtagtctctgggccactggatcgggaacgggtcgccgtctacaacatcaccgttacagccaccgatggcggaatcccccagctgacaagtctgaggacactgaaggtcgaaatttccgatattaatgacaacccgccatcctttctggaggactcatacagtatctacattcaagagaacaacctcccgggtgtgttgctgtgcacagtacaggctacagatcccgatgagaaagaaaatgcggaggtgacttactctcttctggaacgtgagattcagggcctgccagtcaccagctacgtcagcatcaattccgcctccgggtcactttacgcagtgaattcgtttgattacgagaagtttcgggaattcttcgtgactgtggaagcccaggataagggctcacctcccttgtcctctaccgttaccgctaacgtgtacgtggtggatatgaatgatcacgctccacatattctgtacccaacatcaacgaattcaagcgccgcctttgagatggtgcctcgcaccgcacccgccgggtatctcgtgaccaaggtcatcgctatggacagtgactccggccagaacgcatggctgttttatcaccttgcccagaccagtgatttagacctgtttaaggtggagttgcacacgggagagattaggactacgcgtaagatgggcgatgaaagcgggtctacctttaatctgaccgtggtggtgcgggacaacggagaacccagcctctccgcctcagtggcaatcaccgtagcagtagtggaccgcgtgtccaaaattctgccggacactcagagacatgtcaagagcccccggacctatagcgagatcactctctacctgatcatcgccttgtccacggtttcatttatcttcctattgaccataattatcttaagcattatcaagtgctaccgctacactgcctacggaaccgcctgttgtggcggcttctgtggtgtccgggaacgaagccccgccgagctgtacaagcaggccaataacaacatcgatgcccgaattccgcacggattaaaggtgcaaccccatttcattgaggtgagaggaaacggaagcctgacaaagacgtactgttacaaagcatgtctcaccgccggttccggttcagacacatttatgttttataatacaggcgcacagacagggccaggcccaagcggggcccaggccgcagtgaccgacagtcggaatttgaccggacaatctggccaaaacgcgggaaacctgataattcttaaaaatgaagccgtgtcgcagaatgaacctcgccagccaaatccagactggaggtactccgcaagcctgcgcgccggaatgcacagctcagtgcacctggaagaggcggggattctcagagccggccccggtggacctgaccaacaatggccaacagtgagctccgcgactccggagccagaagctggagaggtctccccgccagtcggcgctggggtgaattccaacagctggactttcaagtatgggcctggaaacccgaagcagtccggacccggagagttacccgataaatttataatccccggatccccagcgattatcagtatcagacaggagcccaccaacagccagatagataagtctgactttattactttcggaaaaaaagaagagaccaagaagaaaaaaaagaaaaagaaaggtaataaaactcaggaaaaaaaggagaagggaaactcaacgactgacaattccgaccagtag

SEQ ID NO: 201914 - DNA, 2457 bp, synthetic construct
  misc_feature 1..2457: note = Description of Artificial Sequence: Synthetic coding sequence
  source 1..2457: mol_type = other DNA
atggccggcacccggcggaagagcctgcagaaccggcaggtgggctcccttctaatcttcctttgcattagtgttggcgacgctacaactatccggtattcggtcgccgaagagatggaaagtgggtcctttgtagccaacgtggcaaaggatctgggactggaggtggggaagctggcggcgcgcggggcacgcctcgtgagcgagggtaataaaatgcacttcagactgcacagaaagacaggcgacttgtttgtgaaagagaagttggatcgggaatccctgtgcggcaaagccgacccttgcgtgctgcactttgaggtggtcctagtggagcccctccagagttttagagccgaggttcgcgtgttcgatattaatgataatgcgcccgtgttcctgaacaaggagccactgctgaaaatcccagaaagcactccactgggcagtaggtttccgctgcagagtgcccaggacctggacgtagggctgaacgggctgcagaattacacacttagtgctaacggctatttccacctgcatacacggttctgcagtcatggccccaaatatgccgaactggtgctgaataagcctctcgatcgcgaggagcaaccagaagttaatctaacaataacagccgtcgacggagggagtccaccaaaatccgggactgcacatatccacgtggtcgtgctggacgttaacgaccacgtgccccaattcagccgcctggtgtatagagcccaagtctccgagaactcacctaacgggagtctggttgccactgtcacggcagttgacctggacgaagggacaaacaaagcaatcacctattcgctggcccagaacccggaggcgattctgaaaacgtttcagatcgacccccaaaatggggaagtgcgcctccgcggccccctcgacttcgaagcaattgagacctacgatatcgatatacaagccacagacggaggaggtctcagcgcgcactctaaggtgctggttgaagtcgtcgacgtcaatgataacccccctgaagtcatggtatcatctgttagctcccccctgcctgaagactccccacctcaaaccgttgtcgcactgttcaccatcagagaccgcgacatccgtgtcgggggcaaggtgacctgttttctcagggaggaccttccatttgtgatcaaacctactttcggtaatagttactctctggtgaccgacagaagtctggaccgcgaggaggtgtcaggctataacatcacaatcgtggccatggacactgggccaccctcgctgagtgcagagactatgattgaagtgctgatttctgacgttaatgataatccaccaatctttagagaggattcttatatcctgacggtgagggagaacaactcacctgccgtgtttatcggaaaggtgcatgcggaagatctggatttaggcgaaaacgctcagattacttacagtctgctgccacccaaaaatggcgacttatccgtgtttgcctacatcagcatcaattcgggtaacggcaaactgtacgcactcagaactatggactatgaggccatccaggatttccagttcgtggtcaaggcaactgatggaggctttctcagtctgtcttctcaagtgacagtgcgcgtagtggttctggatgacaacgataatcggcccatgattctgtaccctctgcagaacggcacactcccctgtaacgacctggtaccacggtcagccgaggctggctatctggtcaccaaggtggtggctgtggatggcgatagcggtcaaaatagttggctctcatatcacctgctgaaagctacggatctgggtctcttctcagtgcagagacagaacggggagattcatacccttcggcagatctctgaaagggacccgatgatgcagaagctgatcatcctcgtccaggatcatggccagcccgctctctccaccacagtgagcctcaacattctcctagtggacggcttttcagaaccctatctgcagttccaagatcccactaagcactcacgaaaagtgaacccctctaccaagtacttagtgatttcattagtgattctctcattccttttccttctttccgtgatcgtgatctttatcattcatgtgtaccagaaaattaagtatagggagaagtttacaattcaggagcatttctacgatgactgtaacttcagtaacaacctggtgcagggtcaaggcaatggctccctgtctagaccatgtccctacgaaatgtgcagcgccaccggaacaggaaacagcgaattcagatttctgaagcgctttatgcccaacttcccctttccccacgcaaccggcgagattaagatggaagcaggatcctcgctccctccaaactctgaccggaacaagtcccaaaggctcgaagggcacgaccaagtgtctgacgattacatgtag

SEQ ID NO: 201915 - DNA, 2394 bp, synthetic construct
  misc_feature 1..2394: note = Description of Artificial Sequence: Synthetic coding sequence
  source 1..2394: mol_type = other DNA
atggagaaccagggcacccggacccagcagatccggcaggtgctgctgctgttcgtgctgcttgggatgtcccaagccgggagcgagacctggtctttttctgtagccgaggaaatgcagtcaggctcatttgtgggaaatttggcaaaggatctcggtctcaaggttcgggaattgagctcccgcggcgctcgggtagttagcaacgataaaaaacagagattgcaattggatatcaatactggtgacttacttctgtctgagacgctggatcgggaggaactttgtggaagtatagaaccctgcgtgctgcacttgcaggtcctgatgcagaatccgacacaatttcttcaaatcgagttacaagtgagagatatcaacgaccacagtcctattttcagcgaaaagcagatgcttttagagatccccgagaacagcccggtcggagctgtgttcctgctggagagcgcgaaagacttagatgtcggtatcaatgccgtgaagagctacacgattagtcctaactcccacttccacataaagatgcgcgttattccagataatcgaaaataccccgagctggtgcttgacaaggccctggattatgaggagctccctgaactgtccttcatcctgagcgctctggatggcgggtcacccccccgttctggaactgctctggtgagggttgtggttgtagatataaacgataattcccccgaatttgagcaagcgttctatgaggtaaaaatccgggagaattcaattctcgggagccttattctaatagtgagcgcctgggatctcgactctggcacaaacggggaaatttgctatactttctcccacgcctcagaagacattcgaaaaaccttcgaaattaatcagaaatctggagaaattacacttcgagcccccttggactttgaaacaattgagtcctattctataatcattcaggctaccgacggcggcgggctgttcggtaagtccacagtcattattcacgttatagatgttaacgataatgcccccgagatcacagtgtcttctataactagtccaatacctgagaacacacccgaaaccgtagttatggtattcagcatccaggacattgacagtggagacaacgggcggatcgtgtgttctatcccagaagacctgccgttcgtgcttaagagttccgtggagaactattacacactggagactgagagacccctggacagggaatcaacggctgaatacaacataactattaccgtaaccgatctcggaattcctcgactaaaaactgagcacaatactaccgttttagtcagcgacgttaacgataatgcccctactttcacccaaacatcttatacactgtttgtgcgcgagaataactcccctgccctgcacattggaagtgtgagtgccactgaccgcgactcaggcactaacgcacaagttaactattccctgctgcccccccaggatctgcatttgcccctcgcctccctagtttccataaacaccgataacggacatttattcgccctgaggtcccttgattacgaggccctacaggcttttgattttagagtgggagctacagacagggggagccccgctctgtcctccgaagcacttgtaagagtcttagtgcttgatgcaaatgataattcgccatttgtattgtacccgctccagaacggatccgcaccatgcacggaactggtcccgagagcagcagagcccggatatctggtaacgaaggtggtggctgtagatggtgacagtgggcagaacgcctggctgagctaccaactgcttaaggcaacagaaccaggactctttggagtgtgggctcacaacggtgaagtgcgtaccgctcgcctcctcagtgagagggatgctgccaaacacagactggtggtgttagtcaaagataacggcgaaccaccacgctcagccaccgcaaccctgcaggttctccttgttgatgggtttagccagccttatctgccactgccggaagccgctccagcccaggcccaggccgatagcctaaccgtgtacttggtcgtcgcactagccagtgtgtccagtctgttcctcttcagcgtgctactcttcgtggcagtccgattgtgtcgaaggagcagggccgcctcagtgggctcttgttctgtcccaaaaggcccatttcctggccatctggtggatgtgtccggcactggaactttgtcccagagttaccagtatgaggtttgtcttacgggcgggtccgagacaaatgaattcaagtttttaaaaccagtgattccaaatatccaagccaagggtctagggaagaactcggaggaaaatagcacttttcgtaacagcttcgggttcaacttctag

SEQ ID NO: 201916 - DNA, 1299 bp, synthetic construct
  misc_feature 1..1299: note = Description of Artificial Sequence: Synthetic coding sequence
  source 1..1299: mol_type = other DNA
atggtgttcagcatccaggacatcgacagcggcgacaacggccggatcgtttgcagcatccccgaagacctgccttttgtgctcaagagtagcgttgagaattattatactctcgagactgagcgccctctcgaccgtgagtcgaccgccgaatacaatatcacgataacggtgacagacttgggcatcccaagactgaaaactgaacacaatacgaccgtgctggtgagcgacgtcaatgacaatgccccgacattcacacagaccagctacaccttgttcgtgagagaaaacaatagccctgccctgcacattggttcggtttccgcgaccgatcgcgacagtggcactaatgcacaggttaactatagtctcttgcctccacaggatttacacctgccgctcgcctctttggtaagtattaacaccgacaatggacacctctttgctctgaggagcctagactacgaggccttgcaggcatttgacttccgtgttggtgccacggataggggcagccccgcactcagctccgaggctctcgtacgcgtgctggtgctcgacgcaaacgacaactcgccttttgtactctaccctctgcaaaacgggtcagctccttgcactgaactcgtcccccgagccgccgagccaggatacttggtgacaaaagtagtagcagtggacggcgattctgggcaaaatgcctggctctcctaccagttgctgaaggccaccgagcccggactctttggtgtatgggctcacaacggcgaggtgagaactgctaggttgctgtcagagcgcgacgcagcgaagcaccggctcgtggtgttggtgaaggacaatggagagcccccgcgcagcgctactgcaacacttcaagtactcttggtcgatggattcagtcagccatacctgcccttgccagaggcggccccagcacaggcccaggcggactcactcactgtttatctcgttgtagcgctagctagcgtgagtagcctattcctcttttctgtgctgttgttcgtggctgtgagattgtgtaggaggagccgcgctgcgtctgtcggtagctgctccgtgccgaagggccccttccccggccacctggtcgacgtaagcggaactggcacgctctcccagagctatcagtatgaggtgtgccttactggcggaagcgaaacgaatgaatttaagtttttaaaacctgtgattccaaatatccaggccaaggggctcggaaagaatagcgaggaaaatagtaccttcagaaacagcttcggttttaacttttag

SEQ ID NO: 201917 - DNA, 399 bp, synthetic construct
  misc_feature 1..399: note = Description of Artificial Sequence: Synthetic coding sequence
  source 1..399: mol_type = other DNA
accatcgagagctacagcatcatcatccaggccaccgacggcggcggcctgttcggaaagagcacagttataattcatgtcatcgatgtcaatgataatgcccctgagatcacagttagtagcataacaagtccaatccccgaaaacacgcctgaaactgtcgtcatggtttttagcatccaagacatcgatggtactaccgaagaactgttcgtgccattccgcaagacgagtcacgttctcaaaagtagtgtggaaaactattataccttggagactgaaagacccctagacagagagagtactgccgagtacaacatcactatcacagtgaccgatctgggcatcccacgactcaaaactgagcataacaccacggtgctcgtctcagacgtgtag

SEQ ID NO: 201918 - DNA, 2388 bp, synthetic construct
  misc_feature 1..2388: note = Description of Artificial Sequence: Synthetic coding sequence
  source 1..2388: mol_type = other DNA
atggagaacggcggcgccggcaccctgcagatccggcaggtgctgctgttcttcgtcctcctgggcatgtcccaagctggctctgaaactgggaacttcctggtgatggaggaattgcagtcaggtagttttgtgggcaacctcgcaaaaactctcggattggaagtctccgaactcagttcgcgaggggcaagggtggtgtcaaacgacaataaggagtgccttcagcttgacaccaacacgggcgatttgctgctccgggaaatgttagatcgagaggagctgtgtggttcaaatgagccttgtgtgctctactttcaagtactgatgaaaaacccaacacagttcctccagatagagttgcaggtcagggatatcaacgaccacagtcctgtgttcctggagaaagaaatgctgttggaaatccccgaaaactcccctgtcggcgctgttttcctgttagaatccgctaaagatctagacgtggggattaacgccgtaaagtcgtacaccataaatcctaattcacattttcacgtgaaaatccgggtcaaccctgataacagaaaataccccgaactggtgcttgataaggccctcgattatgaagagagacccgaactgagctttattctgaccgcccttgacggcggtagtccccctcgtagcggcactgcattagtgagggtcgtggtcgttgatattaacgacaacagtcctgagtttgagcaggccttttacgaggtaaagattctggagaacagcatcctcggcagcctcgtcgtgaccgtatcggcctgggatctggactccggcacaaactctgagttatcttatacgttcagtcacgcctccgaggatatccgcaagacctttgaaatcaaccaaaagagcggcgacataaccctgaccgcaccgctggattttgaggccatcgaatcttactccatcatcattcaggctacggatggcggggggctgtttggtaagtcgacagtgaggatacaggtcatggatgttaatgacaatgcgccggaaatcacagtatccagtataactagccctatccctgaaaacacacctgagacagtggtcatggtgttcaggatccgagaccgggacagcggggacaacggtaaaatggtatgcagtatccctgaggatattccatttgttctcaaaagttccgtgaataactactacaccctagaaactgaaaggcctctagaccgggagtcacgggccgaatataacataaccatcacagtgactgatttgggaactcctagactgaagacagaacacaacatcaccgtgctggtgagcgatgtgaatgacaacgcccccgcgttcactcagacgagttacgccctgttcgtcagggagaataattctcccgcactgcacattggcagcatcagtgccacagacagagattccggcactaacgcacaggtcaattacagtcttctcccttcacaggacccacatctccccttagcatctctcgtgagcatcaatgcagacaatggccatctgtttgcgctgaggtccctggattacgaagcactgcagggattccaatttagggtgggtgccaccgatcacggcagccctgctctgtccagcgaagccctcgtgagagtcttggtgcttgatgctaacgataattcgcctttcgttttgtatccactgcaaaatggttccgctccctgcactgagctggttccatgggctgccgaaccaggatatctggtgacgaaagtggtcgccgtcgacggggacagcggccaaaacgcatggttgtcatatcagctgctcaaagccactgaaccgggtctgtttggcgtatgggctcacaacggcgaggttaggaccgctcgcctgttgagcgaacgagatgctgccaaacacaggctggtggttttggtcaaagataatggagagcccccccggtctgcgaccgctacattgcatgttctgctcgtggacggtttttctcagccttacctgcctcttcccgaagctgcccccgcacaggcccaggcagacagcctgactgtatatctggtcgtggccctagcctcggtctctagcctatttctcttctccgttctgttgttcgtggccgtgaggttatgtagaaggtcgagggcagcaccagtgggtagatgttctgtgcctgagggtccattcccgggccatctggtggacgtgtctggcactgggaccttgagtcaatcataccattacgaggtgtgtgtcacaggtgggagtcgcagcaacaaattcaaatttcttaagccaatcattcccaacttcctgcctcaaagtacgggctctgaagtcgaggaaaaccccccgttccagaataacctcggattctag

SEQ ID NO: 201919 - DNA, 1257 bp, synthetic construct
  misc_feature 1..1257: note = Description of Artificial Sequence: Synthetic coding sequence
  source 1..1257: mol_type = other DNA
atggtgtgcagcatccccgaggacatccccttcgtgctgaagagctcagtgaacaattactacaccctcgagactgaaaggccgttggaccgcgaatctagagcggaatacaatattaccatcactgtcaccgacctgggtacgccacgacttaaaaccgagcataatataaccgttctggtgtcggacgtgaatgataatgcgccagccttcactcagacctcttatgccttattcgtccgcgaaaataactccccagccctccatattggcagtattagcgccacagacagggattcaggaactaatgctcaggtgaactacagcctcctgccttcccaggatccacatctacccctggcatccctcgtaagtatcaacgctgataatgggcatctgtttgctttgagaagtctggactacgaggcactccagggttttcaatttcgcgtgggcgccacagatcatggatctcctgcgctgtcgtcggaagcgttggtgcgcgtgctggtgcttgacgctaatgataattcccctttcgttctttatcccctgcaaaacgggagcgctccttgtaccgagctggtgccttgggcagctgagcctggatatctggtaaccaaggttgtggccgtggacggggattctggtcaaaatgcctggttgagctaccagctactgaaggccacagaacccggactattcggggtgtgggcccacaacggcgaggtgcgtaccgccagactcctaagcgagagggacgctgctaagcataggcttgtggtgcttgttaaagacaacggcgagccccctaggtctgccaccgccactctgcacgtcctgcttgtcgacggattcagtcaaccctacttgcccctgcctgaagctgcaccagcccaagcacaagcagattcgctgacggtttacctggtagtggcactcgcctccgtgagcagtttgtttctgttttccgtactcctttttgtcgctgtacgcctatgtcgacggtctcgggctgccccagtgggtcggtgctctgttcctgagggaccctttccaggccatctggtagatgtgtcaggtaccggaacgttaagtcagtcttatcactatgaagtgtgtgtgactggaggatcccggagcaacaaattcaaattcctcaagcctattatccctaacttcctcccccagagcaccggtagtgaggtcgaagagaatcctccttttcagaataacctcgggttttggatccagtag

SEQ ID NO: 201920 - DNA, 1377 bp, synthetic construct
  misc_feature 1..1377: note = Description of Artificial Sequence: Synthetic coding sequence
  source 1..1377: mol_type = other DNA
atggacgtgaacgacaacgcccccgagatcaccgtgagcagcatcaccagcccaatacccgagaacacacccgagactgtggtgatggtcttccgtataagggacagggactccggcgacaacggaaagatggtgtgcagtatccctgaagacatcccgttcgtgctcaagagcagcgtaaataattactacacactggagactgagcggcctctggatagggaaagcagagcagaatacaacatcaccatcacggtgacagacctgggaactccccggttgaagaccgagcataacatcactgtgctcgtgtctgatgtcaatgacaacgcacctgcgtttacccagacatcgtacgcattattcgtgcgggagaacaatagccccgcacttcatatcggctccatctccgctactgaccgcgattcagggacaaacgcccaggtgaattactctcttttgccgtctcaggaccctcatctgccactcgccagtcttgtgtcaattaatgcagataatggccacctgtttgctctgcggtccctggattatgaggccctgcagggcttccagttcagagtcggggcgacagatcacggctcccctgctctcagctccgaagcactcgtgcgtgtcctggtgcttgatgctaacgacaactctcctttcgtattgtacccgctgcaaaatggctccgcgccctgcaccgaactggtaccctgggccgcagagcctggatatttagttacgaaggtggtggccgttgacggagactccgggcagaatgcatggcttagctatcagctgctgaaggctacggagccagggctgttcggagtctgggcccacaacggtgaggtcaggaccgctcgcttgctatccgaaagagatgccgccaagcatcgactagtggtgctggtgaaagacaacggggaaccaccccggagtgcgacagctacactgcatgttctgctggtagacggtttttctcaaccctacctacctctgcccgaagccgccccagcgcaggctcaggctgacagcctgacagtctatctcgttgtcgcgttggcttcagtgtcatcactcttcctgttctctgtgttgctctttgtggccgtccggctatgtcggcgcagcagggctgcacctgtagggcgatgttctgtccctgaggggccctttccgggccacctggtcgatgtcagtggaaccggaacactctcacagtcctaccactatgaagtctgtgtgaccggcggttcccgctctaacaagtttaagtttctgaagcccatcatccctaactttctcccccagagcacaggaagcgaagtcgaagaaaacccaccttttcagaataatctcggcttctag

SEQ ID NO: 201921 - DNA, 2397 bp, synthetic construct
  misc_feature 1..2397: note = Description of Artificial Sequence: Synthetic coding sequence
  source 1..2397: mol_type = other DNA
atggaggccagcggcaagctgatctgccggcagcggcaggtgctgttctcattcctcctcctgggtttgtccctggcaggggcagcagaaccaagatcatacagcgtagtggaggagactgagggaagctctttcgttacaaatttagccaaagacctgggacttgagcagcgagaattttcccggagaggcgttagggttgttagcaggggtaataagttacatttacaactgaatcaggaaaccgctgacttgctcctgaatgagaagctggacagggaagatctgtgtgggcatactgagccgtgtgtgcttcgttttcaagtgttacttgagagtccttttgagttcttccaagccgaacttcaggtcatcgatattaatgaccactccccggtttttttggataaacagatgctcgttaaggtgagtgaatctagcccaccaggtacgactttcccacttaagaacgccgaggacttagacgtgggccagaataatatcgagaattatatcatcagtccaaacagctacttcagagtccttacacgaaaaagaagtgacggcaggaagtatcccgaacttgtgctcgataaggcactggaccgggaggaggaagccgaactccggttgactctgacagcccttgatggcggatcaccaccacgctctggaaccgctcaggtatatatcgaggttttggatgtgaatgataatgcgccagagttcgagcagcctttttatcgcgtgcaaattagcgaggattcccccgtcggcttcctggtggtgaaagtcagcgccacggatgtggacaccggagtgaatggcgagattagctacagcttgtttcaggctagtgaagagatcggaaaaacctttaaaatcaacccactcaccggagagatagagttgaaaaagcaactcgattttgaaaaactccagagttatgaggtgaatatcgaagccagagatgccggtacattctcaggaaagtgtactgtgctcatacaagtgattgacgtgaatgatcacgcccccgaggtcactatgagcgccttcacctccccgatacctgaaaatgctcccgaaaccgtggtagctctgttttctgtgagtgacctcgacagcggcgaaaacggtaaaatttcttgcagcattcaggaagatctcccttttctgctaaagtcagccgaaaacttctatactctacttactgaacgaccattagatcgagagtctcgcgccgaatacaacataacgatcacagtcaccgacttggggactcctatgctcatcactcagctcaacatgaccgtgctgatcgcggatgtgaacgacaatgccccggcctttacccaaacttcttatactctgttcgtcagagaaaataatagtccagcccttcatatacgctctgtctccgccacagaccgcgatagcggtacgaatgcccaggtgacctattccttgctccccccccaggatccccaccttccgctgacatccctggtctccatcaatgctgataacgggcatctgtttgcactacgctctttagattacgaagcactgcagggcttccaattcagggtgggcgcttcagatcacggaagcccagccctttccagtgaagctctggtgagggtcgttgtgctcgatgctaacgataactcaccatttgtcctgtatcccctgcagaatgggagcgctccttgcacagagctggttccaagagctgccgaaccagggtatctcgtgactaaagtcgtggccgttgacggcgatagtggtcagaatgcctggctgtcttatcagctcctgaaagcgacagagctcggactgtttggcgtctgggcccacaatggcgaagtaaggacagcacggctgttatccgagcgtgacgcagccaagcatcgcctggtcgtactggtaaaggacaatggggagcctccacgaagcgctaccgccacactgcatgtcctgctggtggatggctttagtcagccctatctccctttacctgaagccgctcctactcaagcccaggctgacctcctgaccgtgtatctcgtggtcgcactggcttcagtgtcatcactctttctgttctctgttctcttattcgtcgccgtgcggctgtgtagaagaagtcgtgcggcgagcgtgggacggtgcctggtgccagagggacctctaccgggccacctcgtagacatgtccggaacccgtacactctcacagtcttatcaatacgaggtgtgcctggccggggggagtggtacaaatgaatttaaattcctgaaacctatcataccaaacttccccccacagtgtccaggtaaggaaattcagggcaattcgactttccccaacaacttcggctttaacatacagtag

SEQ ID NO: 201922 - DNA, 2235 bp, synthetic construct
  misc_feature 1..2235: note = Description of Artificial Sequence: Synthetic coding sequence
  source 1..2235: mol_type = other DNA
atggaggccagcggcaagctgatctgccggcagcggcaggtgctgttctcttttctgctcctaggactgtctttagcaggtgccgccgagcctagaagctattccgtggtggaggagacagaagggtcctcctttgtgaccaatttagccaaggatttgggattagagcagagagagttttcccggcgaggagtccgggtcgtgagccggggcaacaagctgcatttacagttaaatcaagagacagccgaccttctgctgaatgagaagctggatagagaggatttatgcggacatacagagccttgtgttcttagattccaggtgctcctagagtctcccttcgaatttttccaagctgaactccaggtaatcgatattaacgatcactccccagtattccttgataagcagatgctcgttaaggtctccgaaagtagtcccccggggaccacattcccgctgaaaaacgccgaggacctggatgtgggtcaaaataacattgaaaactatatcattagtccaaattcctactttagggtgctgacgcgtaagagatctgacgggcggaaatatccggaacttgtactggacaaagccttggaccgcgaggaggaggcggagctaagactgacgctcaccgctctggacggggggtctcccccgcgctcagggacggctcaagtttatatagaggttctggatgttaacgacaacgctccagaattcgagcagcctttttaccgcgtccagatttctgaagatagccccgtggggttcctcgtcgtcaaggtgtcagctaccgacgtggacacaggggtaaatggggagatctcttacagcctcttccaggcaagtgaggaaatcggaaagacctttaagatcaatccactgacaggcgagatcgaattaaaaaagcagctcgactttgagaagttgcagtcatatgaggttaatatagaggcaagggatgccggtaccttttcaggcaaatgcacagtcctgatccaagtgattgatgtgaacgaccacgccccagaagtgaccatgtctgcattcactagtccgataccggagaatgcccccgagacagtggtggcactgttctctgtatccgacctcgattcaggtgagaatggcaagatatcttgcagtatacaggaggatctaccattcttgttaaagagtgctgagaacttttatacactgctgaccgaacgtcctctcgacagagaatcgagggccgagtataatatcactattaccgtgaccgatttgggaacccctatgctgatcacccagcttaatatgacagtgttgattgctgacgtgaatgacaatgcccctgctttcacccaaacaagctatactctgtttgtgcgcgagaacaatagcccagccctccacatccgcagtgtaagtgctaccgatcgtgatagcggcacaaatgctcaagtcacatactcactcttgcccccgagagtggtggtgcttgacgcaaatgacaatagcccgttcgtgctgtacccactccagaatggttccgccccttgtacagaactcgtcccgagggccgccgaacccggctacctggtcaccaaggtggtggccgtcgacggtgattctggccagaacgcctggctctcgtatcagctgctcaaggcaacagaactggggttgtttggtgtgtgggcccacaacggcgaggttagaaccgcacggttactctccgagagggatgcggccaaacataggttggtggtgcttgtgaaggataatggtgaaccacctcgctcagctaccgcaacactccacgttttgctggtcgatggcttctcacaaccttacctgccattgccagaggccgcaccaacacaggcccaagcagacttactcacagtgtatcttgtcgtcgccctagcatctgtctcgtccttattcttattcagcgtgctgttgtttgtggcggtcagactgtgccggaggtcccgcgcagctagtgtgggtcgctgcttagtccccgaaggacctctgcccggccatctggtggacatgtctggtacccgtacattatcccagtcctaccagtacgaagtgtgtctcgcaggcgggtccggaactaacgagtttaagtttctcaagcctatcattcccaacttcccaccgcagtgccctggaaaggaaatccagggaaactctacattccctaataatttcggttttaacattcagtag

SEQ ID NO: 201923 - DNA, 2409 bp, synthetic construct
  misc_feature 1..2409: note = Description of Artificial Sequence: Synthetic coding sequence
  source 1..2409: mol_type = other DNA
atggaggccagcggcaagctgatctgccggcagcggcaggtgctgttctcattccttctgctaggcttgtctctggctggggctgcggaaccaagaagctactccgtcgtagaagaaactgagggctcctcatttgtgacgaacctcgcaaaagatctgggactagagcagagggagttttcccgccggggcgtgcgtgtggtgtctaggggaaacaagttgcatttacagttgaaccaggagactgccgatcttctgctgaatgagaagctggacagggaagacttgtgcggacacacggaaccttgtgtgctgcgctttcaggtgctgctggaatccccgttcgaatttttccaagccgagcttcaggtgatagacattaatgatcattctcctgtgttcttggacaagcagatgttagtgaaagtgagtgaaagctccccaccaggcaccactttcccactgaagaacgcggaggacctggacgtcggccagaacaacattgagaactatattatttcccctaattcttattttagagtgctaaccaggaagagatccgatggacggaaataccccgaactggttctggataaggccctcgaccgagaagaggaggctgagctgcgcctcactctgactgctctcgatggaggatcccctcctcgatctggcacagctcaggtgtatattgaagtgctcgatgttaatgacaacgcccccgaattcgaacagccattttatagagtccagatcagcgaagatagtccagtgggctttcttgtggtgaaagttagcgccactgatgtggataccggagtgaacggagaaattagctacagtctcttccaggcttcagaggaaattggtaagacattcaagattaaccctcttactggcgagatcgagctcaagaagcagctggatttcgagaagttacagtcttacgaagttaatattgaagccagggatgcaggcacatttagcggtaagtgtacggtgctgattcaggttatcgatgtgaacgatcacgccccggaggttaccatgagcgcatttaccagccccatccctgaaaatgcccccgagactgtggtcgcactcttctcagtcagcgacctcgactccggggagaacggtaagatttcctgtagcatccaagaagacctgccttttctgctgaagagcgctgaaaatttttatactctcctcacagaaaggcccttggacagggaatctcgggccgaatataacataactatcaccgtcactgacctcggtacacccatgcttatcactcagctcaatatgacagtcctgatcgccgacgtgaatgataacgctccggcgttcacacagacatcatacacactctttgtgcgcgagaataacagcccggccttacacataaggtcagtcagtgcaacagacagagactcgggaacgaacgcacaagtgacatactctcttcttcccccgcaggacccgcatctgcctttgacctctctggtgtcaatcaatgccgacaacggccatctgtttgctctgcgcagcttagactacgaggcgctgcaagggttccaattccgtgtgggagcttctgatcatggaagtcccgcattgtcgagcgaagcgctggtcagagtcgtggtcctggacgcaaacgataactcacctttcgtgctgtacccgctgcaaaatggatcagctccatgtaccgaactggtgccccgggccgcggaacctgggtaccttgtgaccaaggtggtcgccgtggatggagattctggccagaatgcctggttatcctaccagctgctcaaggccaccgagcttggactttttggcgtttgggcccacaacggagaggtcaggactgccagactgctcagcgagcgcgacgcggccaagcatagattggttgtattagtgaaggacaacggcgaacctccaaggagcgccactgcgacactgcatgtactgctggtcgacgggttctctcagccctatcttcctcttcctgaagcagctcctacccaagctcaggcagacctgctgaccgtgtatctagtggtagccctagcctcagtctcttctctattcttattttcggttctcctatttgtggctgtgagactttgtcggcggagccgtgccgcttccgtaggccgatgtctcgtaccagaggggccacttccgggacacctcgtggatatgagtggtacacgtaccctgtcccaaagttatcaatatgaggtgtgcctcgctgggggcagcgggacaaatgaatttaaattcctgaagcctatcattccgaacttcccaccacagtgcccaggtaaggagatccagggcaacagtaccttccccaatttatgtgtgtgtaatatcgtaagaatttatagctag

SEQ ID NO: 201924 - DNA, 2397 bp, synthetic construct
  misc_feature 1..2397: note = Description of Artificial Sequence: Synthetic coding sequence
  source 1..2397: mol_type = other DNA
atggagatccggggcgccctggacctgcggaagcggcaggtgctgatcttcctagtgctcctgggcttgtcacgcgccggcaccgagtcagcccactactccgtggctgaggaaacagaaattgggtctttcgtggccaatcttgcccgggacctcgggttgggagtggaggagctgtcttctagggaggcccgggtggtgtctgacgacaataagaagtatctgcacttggacctccttaccggcaacttgctgctgaacgaaaaattggatcgagatgagctttgcggatcgaccgagccatgcgttctacactttcaggttgtgctagagaaccccctgcagttctttaggtttgaactctgcgtgaaagacatcaacgatcatagccccaccttcctggataaagaaatcctgataaaaatctcagagggtaccactgttggcgccacttttctaatggaaagcgctcaggacttggatgtcggttccaatagtctccagaattacacaatctcacctaattcccatttttacattaagatacccgatagttccgatcgtaagatatacccagaattggtgctagatagggccttggattacgagcaggaggcggaactgcgtttgactcttacggcggtggacggaggctcaccgcccaagagcggcaccactctcgtcctgatcaaagtgctcgacattaatgacaacgcccccgagttcccacagagcctctacgaagtgcaggtccccgaagataggccactcggatcatggatcgcaacgataagtgccaaggacctggatgctgggaattatggcaagatctcatacaccttttttcatgccagcgaggatatccggaaaactttcgagataaaccccatctcaggggaagttaatttgcggagtccactggatttcgaagtgattcaaagttacactataaatatccaggccacggatgggggggggctgtccggcaaatgtaccttactggtgaaggtgatggacataaatgacaacccgcccgaggtgaccataagtagcattactaaaaggattcctgagaacgcctccgagaccctagtggctctcttctcaattctcgaccaggatagcggggataatggtcgcatgatttgttccatccaggacaacttaccattttttttgaagccgaccttcaaaaacttttttacgctcgttagcgaaaaggctttggatcgagagtcccaagccgagtacaatatcactatcaccgtgaccgatctgggtacccctagattgaagacagagtacaatattacagtcctcctttctgacgttaatgacaatgctccaacattcacacagacaagctatacactctttgtgagggaaaacaatagcccggctcttcatatcggtagcgttagcgctacagatcgcgattcagggactaacgcccaggtgaactatagccttcttccgccacaggatcggcacctccctttagcctcccttgtctccattaacgccgataacggacatcttttcgcacttagaagcctggattatgaggccctgcaggagttcgaatttcgggtcggagcaaccgaccgcggctctccagctctcagcagtgaggctttggtgcgtgtgctcgtgcttgacgcaaatgacaattccccttttgtcctgtatcctctgcagaacggcagtgctccgtgcacagagctggtgccacgagctgctgagcccggctatctcgtgaccaaagtggtcgccgttgatggtgacagtggccaaaacgcatggttatcttatcagctgttgaaggctaccgagccagggctgttcggcgtttgggctcataacggggaagttcggactgctcgcttactgagtgaacgagacgccgcaaagcacagactggttgtcctcgtgaaggacaatggtgaaccaccacgttctgctaccgcaacgctgcatgtgctcctcgtcgacgggttttcccaaccatacctccctctcccagaggccgctccagcacaggcacaggccgacagcctgacggtgtacttagtcgttgcactggcatctgtgtctagtcttttcctgttctcagttctgttatttgtggctgtgcgactgtgtcgtaggtcaagggcggcctcagtaggtcgctgcagcgtgcccgagggccccttccctggacaccttgtggatgtgtctggcaccggcaccttgtcccagagctatcagtacgaggtgtgcctcacaggtggatctggaacaaatgaatttaagttcctcaaacccattatacctaattttcaggtgcacgatactggaagaaacatgggggagattgaaaattttcgaaactctttcggtctgaatattcagtag

SEQ ID NO: 201925 - DNA, 1938 bp, synthetic construct
  misc_feature 1..1938: note = Description of Artificial Sequence: Synthetic coding sequence
  source 1..1938: mol_type = other DNA
atggagagcgcccaggacctggacgtgggcagcaacagcctgcagaattataccatatctccaaattcacacttctacatcaaaattccagatagcagcgaccgcaagatttaccccgaactggtgctcgatagagccctggactatgaacaggaagccgaactcagactgacactgacagctgtagacggagggagccctcctaagagtggcaccacactggtactcattaaggtgcttgatatcaacgacaacgcgcccgagtttccccagtccttatacgaggtccaggtcccggaggatagacccctgggatcctggatagccaccataagtgctaaagacctggacgctggcaactatgggaaaataagctacaccttctttcacgcctcagaagatataagaaaaacctttgaaattaatcctattagtggcgaggtcaacctgcgcagtccactcgatttcgaggtcatccagtcctacaccatcaatatccaagccactgatggcgggggtttgtcaggcaagtgtactttattggttaaggtgatggatatcaacgacaaccccccagaagtgacgatcagtagtataaccaagagaatcccagagaatgcctccgaaacactggtcgcattgttctcgatcctggatcaggattccggtgacaatggcaggatgatctgttcaattcaggataacctgcctttcttcctgaaacccacgtttaaaaatttcttcacattagtaagtgagaaagccctcgaccgcgagtcacaggccgagtataacattacaatcacagtgacggacctcggtacacccaggctgaagacagaatacaacataaccgtcctgttatcagatgtaaatgataacgcccccacctttacccaaaccagttatacgctgtttgtacgggagaacaatagtccggcactacatattggcagcgtctctgccacggaccgggactctggtaccaacgctcaggttaattattctctgcttccccctcaggatcgccacttgccactggcctcccttgtgagcatcaacgccgataatggacatctcttcgccctcagaagcctggattatgaagcacttcaggaatttgagttcagagtgggagcgaccgaccgagggtcccccgctttgtccagcgaggccttagtgagggtgctggtcctcgatgccaacgataactcccctttcgtcctatacccattacaaaacggctctgccccgtgtaccgagctggtgccaagggccgcagaacccggctatctcgttacaaaagtcgttgctgtggatggagatagcggccaaaatgcctggctgtcctatcagctgctcaaagcaacagaaccaggcctattcggtgtgtgggcccataacggtgaggtgaggactgcccggctgctgagtgaacgcgatgcggcaaagcaccgccttgttgtgttggtgaaggataatggtgagccacctcgatccgctactgctacactccacgtgctactggtcgatggcttctcacagccctatcttccactccccgaggccgcccccgcacaggcccaggcagattctcttaccgtgtacttggtggtggcgcttgccagcgtgtcgtctctctttctgttctccgtcttgctctttgtagccgtccgtctgtgcagaaggagccgggccgcaagcgttggccgatgcagcgttcccgaagggccattcccgggacacttggtggatgtgagcggtacaggcactctgtcacagagttatcagtatgaggtctgcctgacaggcgggagtgggacgaatgaatttaaattccttaaacctatcatcccgaacttccaggtacatgatacagggcgcaacatgggggagattgagaatttccgcaattcttttggtttaaatatccagtag

SEQ ID NO: 201926 - DNA, 2382 bp, synthetic construct
  misc_feature 1..2382: note = Description of Artificial Sequence: Synthetic coding sequence
  source 1..2382: mol_type = other DNA
atggaggcccgggtggagcgggccgtgcagaagcggcaggtgctgttcctctgtgtcttcttgggtatgagctgggcaggggcagagcctctgaggtactttgttgcggaggagacagagaggggaactttcttaaccaatctggctaaagacttagggcttggggtgggagagctccgcgcccgcggaacccgtattgtcagcgaccaaaacatgcagattctgttgctgagctcactgacaggcgatcttctcttgaacgaaaaattggaccgtgaggaattatgtggtcccagagaaccctgtgtgctgccctttcagctgctgctcgagaaaccattccagatttttagggctgaactgtgggtgcgcgacatcaatgaccacgcccctgttttcttggaccgggagataagccttaagattctggagtccaccacacccggcgccgctttcctacttgaaagtgctcaagatagtgacgtgggaaccaactctctctctaattatacaatctctccaaacgcatactttcatattaatgtccatgatagcggcgaagggaacatttacccagagctcgtgctgaatcaggtgctggatcgggaagaaattccagagttctccctgacactgaccgcattggacggaggcagccccccgcgtagcggtacagccctagttcgaattctggtgttggacgtcaacgataacgctcctgatttcgtgaggtcactgtacaaagttcaagtaccagagaactccccagtcgggagcatggtagtgtcggtgagcgctcgtgatctggacactggtagcaacggagagatcgcatatgcgttttcctacgccacagagcgtatcctaaaaacctttcagataaacccaacctcaggctctcttcatctgaaagcacagctcgactacgaagcaatccagacatacacactcaccatacaagcgaaggatggtggtgggctgtcgggcaaatgcactgtggtggtggacgtgaccgacataaacgacaatcgtccagaactgctgctgtctagcctgaccagtccaattgctgagaattcaccagagactgtcgttgctgtcttccgcattagggatcgggatagcgggaataatgggaagacagtgtgcagtatacaggatgacgtgcccttcattctcaagcctagtgtggaaaacttttacacactggttactgaaaaacccctggacagggaaagaaatacggaatacaatattacaatcactgtcactgacctcggaaccccccgtcttaagactgaacataacatcactgtgctggtgagtgacgtcaatgataacgcccctgcattcactcagacaagctacacactgttcgtccgcgagaataacagtcctgccctacctattggcagcgtgagcgcaactgacagggatagcggcaccaatgcccaggtgatttatagccttctgccctcacaggacccacacttaccgctggctagcctggtgtctattaatgcagacaatggtcacctattcgccttgcggagcctggactatgaggcactgcaagcctttgagttccgggtgggagctacagacagagggagccccgccctctcctccgaggctctcgtgcgcgtcttggtactggacgccaatgataactcgcccttcgttctctacccactccaaaattcttcagctccttgcacagaaccattgccacgcgcagccgaacccgggtacctggtcacaaaggtcgtagccgtggatggggattctggacagaacgcttggctgtcgtatcagctgcttaaagcaaccgagccggggctcttcggcgtgtgggcccataacggcgaggtgagaaccgctagactgctgtccgagagagacgccgccaaacagcgcctggtggtgctcgtgaaggacaacggcgagccacctcgcagtgccactgccactctgcacgtgctcttagtggacggcttcagtcaaccgtatctgcggctcccagaggccgctcccgatcaggccaacagtctgacagtctatttagtagtcgcgctggcgagcgtgtcctccttattcttgctgagcgtgttgctattcgtggctgtaagactctgccgccgatctcgcgctgcccctgtcgggcgctgcagtgtgcccgagggcccgttcccgcgccatctcgtcgatctgagtggaaccgggacactttcacaaagctatcagtacgaggtttgcttgaccggggggagcggcacgaatgagtttaagttcttaaaacctataatccccaacctcctgccccaatcaactgggcgggaagtggaggagaacaggccatttcagaataatctgggtttctag

SEQ ID NO: 201927 - DNA, 2331 bp, synthetic construct
  misc_feature 1..2331: note = Description of Artificial Sequence: Synthetic coding sequence
  source 1..2331: mol_type = other DNA
atggagatcggctggatgcacaaccggcggcagcggcaggtgctggtgtttttcgttctgctgagcctgtctggggccggggccgaattgggaagctactccgtagtggaggagacagagaggggctctttcgtagccaacctgggcaaggacttgggcctgggtctgactgaaatgagcacccgcaaggctcgtatcattagtcaaggcaataaacaacacctgcagcttaaagcacagactggtgatttgcttattaacgagaaattggaccgagaggagctctgcggccctacagagccctgtattttgcactttcaggttctgatggagaacccccttgaaatcttccaggccgagctgcgggttatagacataaatgatcattctcctatgttcacagaaaaggagatgatactcaaaatcccagagaactccccccttggtacagaattccccctgaatcatgccttggatctggacgtgggatctaacaatgtgcagaattacaaaatatccccatcctcccactttcgcgtattaatccatgaattcagagacggtcgcaagtaccctgaattggtgctcgataaggagctggaccgggaggaggagccccagctgcgtctgactttgacagctctggacgggggttcccctcctaggtccggaactgctcaagtccgtatcgaagtcgttgatatcaacgataatgccccggaattcgagcagcccatttataaagtgcagattccggaaaactccccattgggtagtctcgtagctacagtgagcgcacgggatctggacgggggtgcgaacggaaaaatcagttatacactgtttcagccttctgaagatatcagtaaaacactagaagtcaatcccatgactggagaagtgcggctgaggaagcaggtcgatttcgagatggtgactagctacgaggtgcgcattaaggcaactgatggggggggactgtctggcaagtgtaccctcctgctgcaggttgtcgacgtgaacgataatccaccccaggtgactatgtctgccctgacatcccccatacctgagaacagccccgaaatcgttgttgcagtctttagcgtgtctgatccagacagtggcaataacggaaaaaccatttccagtatccaggaggatttgccctttctgctaaaaccatccgtgaagaatttctacacccttgtgaccgaacgcgccctggatagagaagctcgagccgaatataatataacactcaccgtaacagacatgggcaccccaaggctgaagacggagcacaacatcacagtgcagatatctgatgttaatgataatgccccaacatttacccaaacgtcctatacactgtttgtgagagaaaataatagcccagcccttcacattggctcagtgtctgcaaccgatagagactctgggactaacgctcaggtcacctattcactgctcccaccacaagacccccatctgcctttggccagtctggttagtattaacgccgacaacggccatttgtttgctttaagatccctcgactatgaggccttacgcgagtttgagtttagggtctccgctacagacaggggtagtcccgctctctccagtgaagccctggtgcgggtcttagtgctcgacgcaaacgacaatagcccatttgtcctctaccccttacagaacggatctgcaccatgtactgaactcgtgccccgcgctgccgagcctggttacctggtcactaaggtggtcgccgttgatggcgactccggacagaatgcatggctcagctatcaactgttaaaggctacggaaccgggccttttcggcgtgtgggctcacaacggggaagtcaggacagctcgcctgctgagcgaacgggacgccgctaaacagcggctagttgttttggtgaaagacaatggagaaccccctaggtctgccaccgctacactacacgtactcctggtggatggattctcccagcctttcctgccactccctgaagcggcccccgggcagactcaggctaattctttgactgtgtacctcgtggtggccctggccagcgtgtcaagcctgttcttgtttagcgtactgctgttcgtagccgtcagactttgtcgtcggtcccgtgccgcaagcgtcggtagatgtagcatgccagaggggccttttccgggcagattagttgatgtgtcaggaaccggaacattatctcagagttatcagtatgaagtatgtttaactgggggctcggaaacctccgaatttaaattcctcaagcccatcattcccaatttttctccctag

SEQ ID NO: 201928 - DNA, 2397 bp, synthetic construct
  misc_feature 1..2397: note = Description of Artificial Sequence: Synthetic coding sequence
  source 1..2397: mol_type = other DNA
atggaggccggcgagggcaaggagcgggtgcccaagcagcggcaggtcctgattttctttgtgctgctcggaattgctcaggcatcgtgtcagccaaggcactactctgtggccgaggagacagaatcggggtctttcgtggccaatctcctcaaagacctggggcttgagatcggcgagctagctgttagaggtgcccgagtggtaagcaagggcaagaagatgcatctgcaatttgatcgtcagaccggcgacttgctactgaatgagaaactggacagggaggaactgtgtggcccaactgagccatgtgtgcttcccttccaggtgctgctggaaaatcccctacagtttttccaggccgaactgaggatacgcgacgtcaacgatcacagcccagtctttctcgataaggaaattctgctgaagatacctgaatctatcacacccggcacaacatttctgatcgaacgcgcgcaggatctggacgtgggcaccaactcactgcagaattacaccataagcccaaatttccactttcatcttaatttgcaggatagtcttgacggtatcatcctcccccagctggttttgaacagggcacttgatagagaagagcagccagaaatccggttgaccttaactgccctggacggcggatccccacctagatccggcacggccctcgtaagaatcgaagtagtagacattaacgataacgtccccgaatttgccaaactgctgtacgaggtgcaaatccctgaggacagccccgtcggcagtcaggtggcgatcgtgagcgctagagatctcgacataggtacaaacggggagatctcctatgcgttctcccaggcatctgaagatatccggaaaacttttcggctgagtgctaagagcggagaacttttgcttcggcagaaacttgacttcgagagtatccaaacttacacggttaacatacaggctacagatggcggcgggctgtcaggaacgtgtgtggttttcgtgcaggtgatggacctgaatgataatccccctgagctgacaatgagcacactgattaatcagatcccagaaaatctacaagacacattgattgcagtgttctcggtctcagatccagactctggcgataatggaagaatggtgtgtagcatccaagacgacctcccttttttcttgaagcccagtgtggaaaatttttacacacttgtgatttcaaccgcattggacagagaaacaaggtctgagtacaatatcaccatcactgtgaccgattttggaactcctaggttgaaaaccgagcacaacatcaccgttctggtgtccgatgtgaatgacaatgcacccgcattcacacagaccagctataccctctttgttcgggagaacaatagccccgccctgcatatcggttcagtatctgcaacagatagagattccgggactaatgctcaggtcacatactcattactgccaccgcaagatccccacctcccattggcctctctggtttctataaatgccgacaatggacatctcttcgcgctgcagagcctggactacgaggccttgcaggcattcgaattccgggtgggtgccgccgaccggggtagccctgccctttcctccgaggcactggttcgtgtcctggtgctcgatgcgaatgataactcccctttcgtgctttatcctcttcagaacggctccgccccctgtacagaactggtgccgcgagctgcagaacccggctacctggtaacgaaggtggtagcggtggacggtgactctggccagaatgcttggctttcatatcaacttctcaaggcaacagagcccgggctgtttggggtctgggcccataacggagaggttcgtacggcaagactgctcagggagagggatgccgccaaacagcgcttggtcgtgcttgttaaagacaacggcgaaccccctagaagcgcaacagccactttgcacgttctactcgtggacggattctcacagccttatttgctgctgcccgaggccgcaccagcccaagcacaggccgatcttctaacagtttatctggtggtagccctggctagtgtgagcagcctctttctgttcagcgtcttactcttcgttgccgtaaggctgtgtcgaaggtctagggctgcctccgttggacgatgtagcgtccccgaagggcccttcccaggccagatggttgacgtctctgggacgggtacgttaagccagtcttaccagtatgaagtctgcctgactggagggtccggaacaaatgagtttaagttcctaaagcctataatcccgaattttgttgcccaaggagcggagcgtgtgagcgaagctaaccccagtttccgtaaaagtttcgaatttacatag

SEQ ID NO: 201929 - DNA, 648 bp, synthetic construct
  misc_feature 1..648: note = Description of Artificial Sequence: Synthetic coding sequence
  source 1..648: mol_type = other DNA
atgaacctggtgggcagctacgcccaccaccaccaccaccaccacccacacccagcacaccctatgctccatgaaccattcctgttcggccccgcctccaggtgccaccaggagaggccatacttccagtcctggctgctgagtccagccgacgctgctcccgacttccctgccggaggaccgcctcctgccgccgccgctgccgctacagcttacggccctgatgctcggcccggacagagtcccgggagacttgaggcactgggtgggagacttggtaggcgcaagggcagcggcccaaaaaaagagcggagaaggactgaaagcattaacagcgctttcgcagagctgagggagtgtatacctaacgtgccggctgatactaaactctcgaagatcaaaacccttagactagctacctcttatatcgcctacctgatggacgtactagccaaggatgctcagtccggagatcccgaagcattcaaggctgagcttaagaaagcagacggaggccgcgagagcaaaaggaaacgggaactccagcagcacgagggcttccctcctgccctgggtccagtggaaaagagaataaagggtcggactgggtggcctcagcaggtttgggcactagagctgaaccaatag

SEQ ID NO: 201930 - DNA, 2388 bp, synthetic construct
  misc_feature 1..2388: note = Description of Artificial Sequence: Synthetic coding sequence
  source 1..2388: mol_type = other DNA
atgaagaagctgggccggatccaccccaaccggcaggtgctggccttcatactcatggtcttcctgagccaggtgagactggagccaattcgctattctgtgctcgaggaaactgagtcgggcagcttcgtggcccacttagccaaagacttgggcttggggatcggagagctggcctcccggtccgccagagtgttaagcgacgatgacaaacagcgcctgcaactcgacaggcagaccggagatctcctcttaagggagaagttagatagagaagagctctgcgggcctattgagccctgcgtgctgcatttccaggtatttctcgaaatgcccgtgcagttttttcagggggagctgctgatccaggacatcaatgatcactcacccatattccctgaaagagaagtgctcctcaaaattctggaaaacagccagcctgggacactcttcccattgctgattgcagaggacttggatgtgggctctaatggcctgcagaagtacaccattagccccaacagccatttccacatcttaacacgcaaccattccgagggaaaaaagtatcctgatctggtgcaagacaagccgctggacagagaggaacagcccgagttttccctgacactggttgccctggacggcgggagcccccctagaagcgggacagtgatggtacggattctgatcatggacattaatgataacgccccagagtttgtgcacacaccttatggggtccaggtgttggaaaattccccactggattccccaatagtgcgtgttctggcgcgcgacatcgacgcaggaaatttcgggtcagtctcatacggcctgttccaggcctccgatgaaatcaagcaaactttctctataaatgaggttaccggcgagatcctcctcaaaaaaaagttggatttcgagaagatcaagtcctaccacgtcgagatcgaagctacggatgggggtggactgagcggaaagggaaccgttgtgatcgaagttgtggacgtaaatgacaatccacctgagctgatcattagtagcctgacatcttcaattccagagaacgcacccgagacagtggtttcgatcttcaggatccgagacagggactccggggagaacggcaagatgatctgttcaattccagataaccttccgtttatcctgaagcccactctcaaaaatttctacacactggtcaccgaacgccctctggatcgcgaaactagtgccgaatacaacattaccatcgcggtgaccgatctcggcacaccacggttaaaaacccagcagaatatcactgtgcaggttagtgacgtcaatgacaatgcgccggctttcacacaaacttcttacaccttgtttgtgagggagaataacagccctgcgcttcatataggaagcgtgtccgccaccgatagagacagcggcactaatgcccaggtgacatactcgttactccctccccaggatccacacctgcctctggcctcacttgtgagcatcaatgccgacaacggtcatctcttcgcccttagatctcttgactacgaggccttacaggccttcgagttcagagttggagcttcagaccgcggctcgcctgcactgagttctgaagccttagtccgggtgctggttctagacactaacgataatagccctttcgttctctaccccttgcagaacggctccgcgccttgcacggagttggtacctcgtgcagcggagcccggttacctcgtgacaaaagtggtggccgtggatggggactcaggccaaaacgcttggctatcttaccagttgctgaaagctacagaaccaggcctttttggcgtgtgggcgcataatggcgaggtccgtaccgcacggctgttaagtgaacgagatgccgctaagcatagactggtggtcctggtgaaggataatggggaacccccaaggagcgccaccgccaccctgcacgtgctgttagttgatggattcagccaaccctacctgccactaccagaggccgcacctgctcaagcgcaggctgatagccttacagtttacctggtggtcgccctggcatctgttagcagcctgtttttattttccgtgctgctgttcgttgccgtccgcctatgccgtcgatcccgggctgctagcgtggggaggtgctctgtcccagagggccccttccctggtcacctcgtggacgtgagcgggacaggaaccctcagccaatcataccagtatgaagtatgcctgaccggcgatagcgggacgggggagtttaagtttttgaaacctatattcccaaacctcttagttcaggacacggggagggaagtcaaagaaaatcctaagtttaggaatagcctggtgtttagctag

SEQ ID NO: 201931 - DNA, 2391 bp, synthetic construct
  misc_feature 1..2391: note = Description of Artificial Sequence: Synthetic coding sequence
  source 1..2391: mol_type = other DNA
atggaggccggcggcgagcggttcctgcggcagcggcaggtgctgctgctctttgtgtttctcggaggcagcctggccggttccgaatctaggcggtatagcgttgcagaggaaaaggaaaagggatttctgattgctaacctcgccaaggacctcggccttcgcgtcgaggaactcgcggcaaggggagcccaggtcgtaagcaaaggcaataaacaacacttccagctgtcacaccagactggtgatctgcttctcaacgagaagctggacagggaagagctgtgcggccccaccgagccatgcatacttcactttcagatcctgttacagaaccccctacagttcgtgacaaacgagctacggattattgatgttaacgatcactcacctgttttctttgagaatgaaatgcacctcaagatattggagtcgaccctccctggcaccgttattcctctgggtaacgctgaggatctggacgtgggtcgtaattctttacaaaactatacaatcacccccaattctcatttccacgtgctgactcggtctcgaagagacggaaggaagtatcccgaactggtgctggacaaggctcttgacagagaggagcaaccagagctttccctgaccttgacagcactggatggtggctcgccgcctagaagtggaaccgcacagattaatatccaagtactggatattaacgacaatgcccccgagttcgcccagcctctgtatgaagtggccgtgcttgagaacacccctgtgaattcagttattgttactgtgagcgccagtgacctggatacaggatcattcggcactatctcatacgccttcttccatgcctccgaggaaattcgtaagacattccagttgaatccaatcaccggggacatgcagcttgtgaagtacctgaacttcgaagctattaactcttatgaggtggatatagaggccaaagacggcggcggcctttccggtaaaagcaccgtgattgtgcaagtggttgatgtcaacgataacccaccagaacttacactttcatcagtgaattccccgatccctgagaattcgggtgagacagtcctcgcggtgttttcagtttcagatctggactctggagacaatggacgcgtaatgtgctctatcgagaacaacctgccattttttcttaagccctctgtggaaaacttctacacattagtctctgagggcgctctagatagagagaccagaagtgaatataatattactattacgattaccgatctgggcacccctaggcttaagacgaagtacaatatcaccgtactagtttctgacgtgaatgacaatgcgcccgctttcacgcagataagctacactctgttcgtgcgggagaacaactccccagcccttcacattggaagcgtgtcagcgactgatcgggatagtgggactaatgctcaggtcacttacagcttactaccgccccaggatccacaccttccactgagtagtcttgtgagcataaatgccgacaacggacacttgttcgccctgcgctcactggactacgaagcattgcaggcattcgaatttcgagtgggcgcaacagatcgcggatcaccggcactgtcatctgaggctctggtaagagtccttgtccttgacgccaacgacaactcaccattcgtactgtaccccctgcaaaatggaagtgcgccatgcaccgagctcgtgccgagagccgcagagccaggatacttggtcaccaaagtcgtagcggttgacggggacagtggccaaaatgcctggctcagttaccagctcttaaaggctacagagcccggcctatttggagtgtgggcccataacggtgaagtgcgcacggctcggctgctcagtgaaagagacgctgcaaaacatcggcttgtcgtgttagtcaaagacaacggcgagcctcctaggtcagcgaccgccacactgcatgtattgctggtggatggtttttcccagccctatttaccactgcctgaagccgcaccagcccaggcgcaggcggaccttctgaccgtgtatctcgtggtggccctagcctctgtttcatctctgttcttgttctctgtgttgctgttcgtcgctgtgagactatgccggaggagccgtgctgcaagcgttgggcggtgttctgtgccagaaggtcctttccccggccagatggttgacgtgagcgggacagggactcttagtcaatcctatcagtatgaagtttgcctcacgggcggctcgggtactaacgaattcaagttcctgaaacctataatccctaatttcgtggcccagggggccgaaagggtcagcgaggcgaatccatcgttccggaagagctttgaattcagctag

SEQ ID NO: 201932 - DNA, 1107 bp, synthetic construct
  misc_feature 1..1107: note = Description of Artificial Sequence: Synthetic coding sequence
  source 1..1107: mol_type = other DNA
ggcggcgcccccccccggagcggcaccaccaccatccggatcgtggttttggataacaacgataatgcaccagagtttctgcaatccttttacgaagtgcaggtgccagaaaattctcccctgaactcattagtggttgtggtttctgctagagacttggacgccggggcgtacggttctgtggcgtatgccctctttcagggtgatgaagtcactcagcctttcgtcattgacgaaaagactgcagagattcgcctgaaacgagctctggactttgaggccacaccttattacaatgtcgagatcgtcgcaacagacggtggaggattgtccggcaagtgcactgtggctatagaagttgtggacgtaaacgataacgccccagaactcacaatgagcacccttagttccccaacaccagagaatgcaccagagaccgtcgtcgctgtgtttagcgtgtccgatcccgattctggggacaatggccgcatgatctgcagtatccaaaacgacttgccctttctgttgaagcctaccctaaagaatttttatacgctggtgacccaacgaaccttggatagggagtctcaggctgagtataacattacaattaccgtgaccgacatgggcacccccaggctgaaaactgaacataacattactgttctggttagtgacgtaaacgacaacgctcctgcatttacccagacttcctacactctctttgtaagagagaataattctcctgcattgcacattggttcggtgtctgctaccgatcgcgactctggcactaatgcccaggtgacatacagtctcctgccaccccagaatccgcatcttagattggcctccctagtaagtatcaatgccgacaacgggcatcttttcgccctccgaagcctggattatgaagcactgcaggcatttgaatttagagtaggagctacagatcgaggctcacctgctctgagtagtgaggctcttgtgagagtgctatgctggacccccaccaccacccgaccgagttgttgtataaggtgccgcaccgcacggcgcttggcgccttcttggtgtccaggaaggcctagtagagctacatggtag

SEQ ID NO: 201933 - DNA, 2388 bp, synthetic construct
  misc_feature 1..2388: note = Description of Artificial Sequence: Synthetic coding sequence
  source 1..2388: mol_type = other DNA
atggagaccgccctggccaagaccccccagaagcggcaggtgatgttcctcgccatacttctacttctctgggaggccggcagcgaggctgtgcgatattcaattcctgaggagacggagagcggctactctgtcgctaatctcgcaaaggacttaggcctcggggtgggggagctcgcaactaggggggctagaatgcactacaagggcaacaaagaactcttacagctggatattaagacaggcaacttgctgctgtatgagaaactggatcgagaagtcatgtgcggtgctaccgagccttgcatcctgcacttccagctgctgctggaaaaccccgtgcagtttttccagacagacctgcagcttaccgacataaatgatcatgcccccgaatttccagagaaggagatgctcctcaagatccccgagagtacacagcccggcaccgtgtttcccctcaaaattgcccaggactttgacattggctctaataccgtgcagaactacaccatttcacccaatagccattttcacgtcgcgactcacaacagaggcgatggtaggaaataccctgagctggtgttagacaaggccctagaccgggaagaaagacctgagctgtctttaaccctgacagctctggatggcggtgcacctcccaggagcggaacaaccactatcagaatcgtggtgctagacaacaatgacaacgcacctgagtttcttcagtctttctatgaagtacaagtaccagaaaattcaccactgaatagcctagttgtggtcgtgtcggcccgcgacctcgatgccggggcttatggctccgtagcctatgcactctttcagggggacgaggtgacacagccattcgttattgacgagaaaaccgcagagatccgactgaagcgtgctttggactttgaggctacaccctattacaacgttgaaatcgtcgcgaccgacggcggaggcctttccggtaagtgcaccgtcgctatcgaggtggtcgatgtgaatgataatgccccagaactgaccatgtcgacactctcctcacccacacctgagaacgcacccgaaacggttgtggccgtgttctcggtatctgaccctgactcaggggataacggcaggatgatctgcagcatccaaaatgaccttcctttcttactgaagccaaccttgaagaatttttatacactggtaacccagcgtaccctggatagagagtcccaggctgagtacaatataactatcaccgttactgacatgggcactccacggctgaaaactgagcataatataactgtcctggtatctgatgttaacgacaacgccccagcattcacccaaactagttatacccttttcgtgcgtgagaacaatagcccagccctgcacattggcagcgtcagcgcaactgacagagatagcggcacgaacgcccaggtgacgtattcacttctccccccccagaacccccacctccgcctggcctccttggtttctataaacgcagacaatggacacctgtttgccctccgttcacttgattatgaagcattacaagcctttgagtttagggtgggcgccactgaccgtgggtccccggccctgtcatcagaagccctggtgagggtactggttctggacgccaacgataactcacctttcgtactgtacccgttgcagaacggttccgccccatgcacggagctcgtgccacgggccgctgagccggggtacctggtgaccaaagtggtcgccgttgacggggattccggccaaaacgcctggttgtcctaccagttgctaaaggccactgagccgggacttttctccatgtgggctcacaacggggaggtgcgaactgcgcggctgttatcagagcgggacgctgccaagcaccggctcgtggtgctggtcaaggataacggggagcccccccggtcagccaccgctacattacacgtgttgctggtcgacgggttcagtcagccctatctccccctgccagaggccgcaccagctcaagctcaggcagattccctgaccgtgtatttggtcgtagccctggcgtccgtgtctagcctatttctgttcagcgttcttttgttcgtggccgtccggctctgcaggcgatctagagccgctagcgtgggacgatgctccgtcccagaggggccattccctgggcaccttgtcgatgtgtccggcactggcaccctttctcagtcttaccactacgaggtctgcctaactggagacagcggcgcaggcgagtttaagttcctcaaacctataatccccaatcttctcccacagggagcaggagaagaaattgggaaaacagccgcctttcgcaacagcttcggattaaactag

SEQ ID NO: 201934 - DNA, 1107 bp, synthetic construct
  misc_feature 1..1107: note = Description of Artificial Sequence: Synthetic coding sequence
  source 1..1107: mol_type = other DNA
ggcggcagccccccccggagcggcaccagcgagatccagatccaggtactggacattaacgataacgtgcccgaattcgcccaggagttatacgaagcccaggtgcccgaaaataaccctctgggaagccttgtgatcaccgtgagcgcacgggatctggatgctggaagtttcggcaaggtctcttatgccttatttcaagtggatgatgtaaaccaacccttcgaaattaacgccatcaccggggagatccgattacgcaaggcattggacttcgaagaaattcagtcctacgacgttgacgtcgaagctactgacggaggagggctgtcagggaagtgttccctggttgtcagagtgttagacgtaaacgacaacgccccagaactcacaatgtcttttttcatctcccttattcctgagaaccttccagagattaccgtggcagtgttttctgtcagcgatgctgatagcggacataaccagcaagtgatttgctccatagagaacaacctgcctttcctattaaggccttctgtagagaacttctatactcttgtcactgaaggcgctctggaccgagaaagcagagccgagtacaacatcaccatcacggtgaccgacctggggacgcctcgacttaaaacacagcagagtatcactgtccaagtgtcagacgtaaacgataacgttcccgcatttacccaaacatcatatactctcttcgtcagggagaataatagccctgccctccatatcggatctgttagtgccaccgatcgtgacagtggtatcaacgcacaagtgacctacagtctcctgccaccccaggacccacacctgcctctgagcagcctcgtctcaattaacgcagataatggacatcttttcgccctgcgctccctggactatgaggctcttcagagctttgagttccgggtgggtgcaacggatcgggggtcccctgcgcttagctccgaagccctcgtcaggctcctgtgttggacaccaacaactacaaggcccagttgctgtaccaggtgtcgaactgcccccagacctgctccctcatggtgtcctggacgcccttccagagcgacctggtag

SEQ ID NO: 201935 - DNA, 1977 bp, synthetic construct
  misc_feature 1..1977: note = Description of Artificial Sequence: Synthetic coding sequence
  source 1..1977: mol_type = other DNA
atgctgctgaagatcagcgagatcaccatgcccggcaagatcttccctctgaagatggcccacgatctggacactgggtcaaacggcttacagcggtatactatttcaagtaaccctcactttcacgtcctgaccaggaaccggagcgagggacgcaaatttcctgaactagttctggacaaaccacttgatcgcgaagagcagccacaactgagactcacactcattgccctcgatggtgggagtcctccgcggtccggcacaagtgagatccaaatacaggtgcttgatatcaacgataatgttcccgagttcgcacaggagctttacgaggcccaggtgccggagaataatcctttggggtcactggtcatcacggtgtctgcccgcgacctggatgctggctccttcggcaaggttagctacgccctgtttcaggttgacgatgtaaaccagcccttcgaaatcaacgctatcaccggggaaatcaggcttcgcaaggctttggactttgaggaaattcaatcctacgacgtcgacgtcgaggcaacagatgggggagggctatccgggaagtgctctctggttgtaagggtgcttgatgtgaacgataacgcaccggaactgacaatgagtttctttatttcccttatccccgaaaatcttcctgaaatcacggttgcagtattttctgtgtctgacgctgattcagggcacaatcagcaggtgatctgtagcattgaaaataaccttccctttctgctgcgtccaagcgtcgaaaacttctataccttggtcactgaaggtgcactggatagggagagccgcgctgaatataacattacgatcacagtgaccgatttgggaaccccacgactgaaaacacagcagagcataaccgtacaggtgtccgacgtgaatgacaatgtgcccgcctttactcaaacgtcatatacactgtttgttcgggagaacaacagtccagcacttcatattggctcagtcagtgccactgaccgggatagtggtattaacgcgcaagtgacttatagtctacttcctcctcaggaccctcatctccctctgagcagtttagtatcaatcaacgccgataatggccatctgttcgcacttagaagcctggactatgaagcccttcagagcttcgagtttcgagtgggcgccaccgaccggggcagccccgccctctcctcagaagcgctggtgcgtttgttggttctcgacgccaacgacaactcccctttcgtgttgtaccccctgcagaacggcagcgcaccctgtaccgagctcgttcctcgcgccgcagaaccaggctacctggtcacaaaggtcgtggctgtcgacggcgactcaggtcaaaacgcctggctgagctaccagttgctaaaggctactgaacttgggttgtttggggtgtgggcacataacggggaagttagaactgcacgcctcctctctgagagggatgctgccaagcacaggttggtcgtgctggttaaagacaacggcgaaccccccaggagcgccactgcaacactccacgtgcttctggtggatggctttagccagccgtacctgcccctcccagaagccgccccagcacaggcacaagccgacagtctgactgtatatctggtggtggcccttgcatcggtgagctccctttttctgtttagcgttctcctctttgtggccgtgcgcctgtgtagacgatctcgggccgccagtgtcggtcggtattccgtccccgagggccctttcccaggacatttggtagacgtgtctggaacgggaaccctgtctcagtcctaccagtacaaggtgtgtttgactgggggctccgagaccaacgagttcaagtttttgaaacctatcatgccgaacttccctccgcaaggcacagagcgcgaaatggaggaaacgccaacaagcagaaattccttccccttcagctag

SEQ ID NO: 201936 - DNA, 2385 bp, synthetic construct
  misc_feature 1..2385: note = Description of Artificial Sequence: Synthetic coding sequence
  source 1..2385: mol_type = other DNA
atgatgcagaccaaggtgcagaacaagaagcggcaggtggccttcttcatattactgatgttatggggtgaggttggctcggaaagtatacagtactctgtcttggaagaaaccgagtctggcaccttcgtagccaacttgactaaagacctgggacttcgagttggcgagctggccagccgcggagccagagttgtgtttaaaggcaacagacagcacctgcagtttgatcctcagacacatgatttactcttgaatgagaaactggatagagaggaactgtgcggaagtactgagccatgtgttctccctttccaggtgctcctggaaaacccactgcaattctttcaggcatctttgcgggtgagagacatcaatgatcatgcccctgagttcccggcccgtgagatgctactgaagatctccgagataacaatgcctggaaagatattcccactgaagatggctcatgatttagacaccggaagtaacggactgcaaaggtacacaatcagcagtaatccacacttccacgtgctgactaggaacaggagcgaaggcaggaaatttccggagctcgtcttggacaaaccactggatcgagaagagcaacctcagctgagactgacccttattgcactcgatggaggtagcccgccaagatctggcaccagcgagatccagattcaggtgctcgatatcaatgacaacgtgccggagtttgcgcaggaactgtacgaggctcaggtacccgagaataaccctctgggatctctggtcattacagtgagcgcccgggatctggacgccggatcatttggaaaagtgtcatatgctctgttccaggtggacgatgtgaatcagcccttcgagataaatgccataacaggtgaaatacgcctgcgaaaagccctcgacttcgaagagatccagtcctatgacgtcgatgtggaggctaccgacggaggcggcctgtcgggcaaatgctctcttgttgtccgagtgttggatgtcaatgacaacgcaccggaactcaccatgtcattctttatcagcctgatccccgagaatcttcccgaaattaccgtggcggtcttctcagtgtcggacgcagacagcggtcataaccagcaagtcatttgttctatcgaaaacaatttaccttttctgctaaggccaagcgtagagaacttctatactcttgtgacagagggagccctagaccgggaaagcagggcagagtataatataaccattacagtgactgatctgggcacacccagactaaagacccaacagtccattacagtccaggtgagcgatgtcaacgacaacgtccccgctttcacacagaccagctataccctgttcgtgcgggagaacaattctcctgccctgcatattggatcggtgagcgccaccgatcgcgattcaggcattaacgcacaggttacatactcactcttgccaccacaggatcctcacctgccattaagcagcctggtttcaattaacgctgacaacgggcatctgttcgctcttagatccctggattacgaggccctccagagctttgaatttcgcgtgggcgcgaccgatagaggatcacccgctctctctagtgaggccctggtgcgcttattagtcctagatgccaatgacaacagcccctttgtcttatatcccctccagaacggcagtgccccatgtactgagctggtgccccgggctgccgagcctggatatctggtgacaaaagtggtcgccgtcgacggagattccggccagaacgcctggctgagctaccaattgctcaaagctacagaattgggcctattcggggtgtgggcgcataacggtgaagttaggaccgcccggttgctgtctgaacgggatgctgctaagcatagattagtggtgctagtgaaggataacggcgaaccaccaagaagcgccaccgccaccctgcacgtcttactcgtagacggcttttcccagccttatctgccactgcctgaggccgctcctgcccaggcgcaagcagactctctgaccgtgtatctggttgttgccctggcatctgtgtccagcttatttctctttagtgtcctgcttttcgtcgccgtgcgcttatgtcggaggagccgagccgcatctgttggacgctattccgtccctgagggaccctttccgggtcacctggtagacgtctcgggcaccgggactctttcacaatcttatcaatacaaggtatgtctgacgggcggctcagagaccaatgaattcaaatttttaaaacctatcatgcctaacttccccccgcagggtaccgaacgcgagatggaggagacaccaaccagccggaactcatttccattctcttag

SEQ ID NO: 201937 - DNA, 1107 bp, synthetic construct
  misc_feature 1..1107: note = Description of Artificial Sequence: Synthetic coding sequence
  source 1..1107: mol_type = other DNA
ggcagccccccccggagcggcaccgccctggtgcggatcctggtgctcgacgttaatgacaacgccccagactttgtacgttccctgtacaaggtgcaagtacctgagaattcacccgtcggaagtatggtggttagtgtgtccgctagagatctggatacaggttctaacggggagatcgcctacgccttctcatacgctaccgagcgaatattgaagacattccagataaacccgactagtggatcgttacatcttaaagcacagctggactacgaggctattcaaacatatacacttactatccaggccaaagatggaggaggcctgtcaggaaaatgtactgtggtggtggatgtaactgatatcaatgataaccgcccagaattgctccttagtagcctgacctccccaatcgctgagaactctcctgagaccgtggtggccgtctttcgcatcagagaccgggacagcgggaataatggaaagaccgtgtgttcaatacaggacgatgtgccatttatattgaagccctccgtggaaaatttctacactctagtgaccgagaaacccctggatcgcgagcggaataccgaatataacatcacaattacagtgactgacctcggcactccccggctgaagactgagcataacattacggtgctcgtaagcgacgttaacgataacgcccccgccttcacccagacctcctacacactttttgtgagggagaacaactcccccgccctgcctatcggttcagtcagcgcaacagaccgagactcaggcaccaatgcacaggtaatatattccttgctcccctcccaggatcctcacttgcctttggccagcctggtttccatcaacgctgacaacggacatttgttcgcattgcgctcccttgactacgaggcactgcaggctttcgaattccgggtgggagccaccgaccgcggttctccagccctttcttcagaggccctcgtccgggttctctgctggactccgaccacaacccggccgagctgctgtactcggtgtcgcaccgcccctagacctgcacctagccgatgccccggtcggcccagcagagctacatggtag

SEQ ID NO: 201938 - DNA, 2406 bp, synthetic construct
  misc_feature 1..2406: note = Description of Artificial Sequence: Synthetic coding sequence
  source 1..2406: mol_type = other DNA
atggaggccagcggcaagctgatctgccggcagcggcaggtgctgttttcctttctcctgcttgggttaagtctcgctggcgcagcagaaccaagatcgtatagtgtggtggaagagaccgaagggtccagtttcgttaccaatcttgccaaggacctgggcctggagcagagggagttcagccggagaggtgtgagggtggtgtcaaggggtaataagctccacctccaactgaatcaggaaactgccgacctcttgttgaatgaaaaactggacagagaggatttgtgtggtcacaccgagccatgtgtgctgcgcttccaagtgctgctcgaatcgccattcgagttttttcaggctgagttgcaagtgatagatatcaacgatcactcaccagtattccttgataaacaaatgctcgtcaaagtgtcggagagttctccgcccggtaccgccttcccactcaagaacgccgaggacttggatattggtcaaaataacattgagaactatatcatctctccgaactcgtatttcagggtgctcactcgcaagcgcagtgacgggagaaaatacccggaattagtgctggataaagcattggatagggaggaagaggccgagctgaggctgactttgaccgccctcgatggcggttcgccgcctcgcagcggtaccgctcaggtgtatatcgaagtggtcgatgttaacgacaacgctccagagttcgaacagcctttctacagggtccaaatctcagaagacagccctatctcattccttgtcgtgaaggtttccgctaccgacgtggacactggcgttaacggtgagatcagttactcacttttccaagcatcggatgaaatatcaaaaactttcaaagtggacttcctcacaggcgagatcagattgaagaaacagcttgactttgagaagtttcagagctatgaggtgaacatcgaggccagggatgctggagggttctccggaaaatgcacagtgctaattcaggtcatcgatgtgaacgaccacgcccctgaggtcacaatgtccgccttcacaagccctattcccgagaacgcaccagagactgtcgttgctctcttttccgtgtcagacttggactccggcgagaatggcaagatctcatgttccatacaggaagatctgccgtttctcttgaagtcaagcgttggtaacttttacaccctgcttactgaaaccccattggacagggagagcagagctgaatacaatgtcaccatcacagtcacagatttgggtacccctcgattgactacacacctcaacatgacagttcttgttagcgatgtgaatgacaacgcacctgcatttactcagacatcatacacattgttcgtaagggagaacaattccccagccctgcacattggatcggtaagtgctaccgatcgcgattcaggaaccaacgcacaggtgacatactctctgctcccgccccaggatccgcatctgcccctagcctctctggtgagtatcaataccgataacggacatctgtttgcactccgatctttggattatgaagccctccaggcgttcgaattccgagtgggtgctagtgatcgagggtcacctgctctcagttctgaagctctggtccgagtgttggtgctggatgccaatgacaattctcctttcgtgctctacccactgcagaacggctctgctccttgcactgaattggttcctcgagcggccgagcccggttacctggtgaccaaggtggtcgcagtggatggggactcagggcagaacgcgtggctctcctatcaactgttgaaggcaacggaaccaggactattcggggtgtgggcccacaacggcgaggtgcggaccgcccgtttgctaagcgagagggacgccgccaaacaacgcctcgttgttttggtgaaggataatggggaacccccatgctcagccacagccactctgcacctcttactcgtagatggattctcacagccgtacctcccccttccagaagctgcccccgctcaggggcaggcagacagcctgacggtctacttggtcgtggccctcgccagcgtctctagtcttttcctattttccgtgctactgttcgtagctgtgcttctgtgcagacgttctagggcagcgtctgtcgggcggtgtagtgtgccggagggccccttcccgggtcacctcgtggacgtgcgcgggacaggtagtttgtctcagaactaccagtacgaggtatgccttgctggcggttccggaaccaacgagtttcagtttctcaaacctgttcttcccaatattcagggacactcattcggacctgagatggaacagaatagtaatttccgaaacggattcggattcagcctgcagctcaaatag

SEQ ID NO: 201939 - DNA, 2472 bp, synthetic construct
  misc_feature 1..2472: note = Description of Artificial Sequence: Synthetic coding sequence
  source 1..2472: mol_type = other DNA
atgaagatccagaagaagctgaccggctgcagccggctgatgctgctgtgcctctccctagagttgctgctggaggcgggcgctggcaatatccattactctgttccggaggagaccgataagggcagctttgtggggaacattgcaaaggacttaggcctccagccacaggaattggcagatggtggggtgagaatcgtttctcgtggcaggatgccactgttcgctctcaaccctagatccggctcactcatcaccgcccgtagaattgatagagaggaactctgtgctcagtcaatgccttgcctggtcagttttaatattcttgttgaggacaagatgaaactgttccccgtggaggtggagattatagacattaacgataacacgccacaatttcagctggaggaattggagtttaagatgaatgaaatcactacccccggcacgagggtgagccttccgttcggccaagacctggatgtgggaatgaactccctccagtcctatcagctctcttccaacccccactttagcctggacgttcagcaaggggctgatggaccacagcatcccgagatggtgttacagagccccctggaccgggaggaggaagcagtgcaccacttgatactcaccgcgtccgacggcggggagcctgttcgctcaggtacgctgaggatctatatacaggtcgtggacgctaacgacaaccctcctgctttcacccaggcccagtatcacattaatgtacctgagaacgtgccattaggcacacagctcttaatggtcaatgccactgaccccgatgaaggtgccaacggtgaggtcacttatagcttccacaacgtggaccaccgggtcgcccaaatttttcgactcgatagctacaccggcgagatttcaaacaaggagccgttggacttcgaggaatataaaatgtactctatggaggtgcaggcacaggacggagcaggactcatggcaaaagttaaggtcctaattaaggtcctggatgtcaacgataacgcccctgaggtgacaattaccagcgtgacaactgcagtgcctgaaaattttccccctggtactattatcgcccttatctcagttcacgaccaagactcgggcgacaatggatacacgacttgctttatcccaggaaaccttccttttaagttggaaaaactcgttgataactattaccgtctcgttactgagcgtaccctcgacagagaacttatctccgggtacaacatcaccatcactgctattgaccagggtaccccagcgctatcgacggagacccacatcagcctcctcgtaacggacattaacgataactcgcctgtgtttcaccaggattcatattctgcatacattcctgagaataacccaagaggggctagcatatttagcgtgcgggcacacgacctggatagtaacgagaacgcccagatcacttactcccttatagaggataccatccagggagctcccctgtctgcctacctttccattaactctgatactggggttctctacgcactgagatccttcgattatgagcagttccgggacatgcagctcaaggttatggcacgcgactctggtgacccacctttgtcgtcgaacgtgtctctgagcttatttctgcttgatcaaaacgataatgcccccgaaattttgtacccagccctccctactgacgggagtactggggtggagctggcacccttgtccgctgagcccggctacctggtgaccaaggtggtggctgtcgatagagattcaggccagaacgcatggctgagttacaggctgttgaaagcctctgagccaggactgttcagtgtggggctccacactggggaagttcgcacagctcgtgctttacttgacagggatgcccttaaacaatctctcgtggtggccgtccaagatcacggccagccgccactgtcagctaccgtcactttgacagtcgccgttgccgatcgtatttccgatatcctcgctgacctgggctcccttgagccttcggccaaacctaacgattccgacctcaccttgtacttagtagtggccgctgctgccgtgtcttgtgtcttcctagcattcgtgatcgttctgttagcccacagacttcgacgctggcataagtctagacttctccaggcatccggcggcggcctcgcttcaatgcccggctctcactttgtgggggttgacggcgtgagggccttcttgcagacttattcccacgaagtgagcctgacggcggattcacggaagagtcacctcattttcccccaaccgaactatgcagacacattgatttcacaggaaagctgtgagaagaaagggtttctgtctgccccgcagtcactacttgaagacaagaaggagcctttcagccaggtgaacttttgtgacgaatgtatttcctatctcgagaagaataattcttag

SEQ ID NO: 201940 - DNA, 2796 bp, synthetic construct
  misc_feature 1..2796: note = Description of Artificial Sequence: Synthetic coding sequence
  source 1..2796: mol_type = other DNA
atgaagatccagaagaagctgaccggctgcagccggctgatgctgctctgtttgtctctggaacttctgcttgaggccggagccgggaatatccactattcggtgccagaggaaacagacaagggcagcttcgtgggcaacatagctaaggatttggggctgcaaccccaagaactggcagacggcggagttcgcattgtctctcgcggcaggatgccgttatttgccctgaaccctcgaagtgggtccctaataacagcacgacggatcgaccgggaggagctatgcgcacaatcaatgccctgtctcgtgtcctttaacatactggtagaggataagatgaagctattccctgttgaggtagaaattatcgacatcaacgacaataccccccagttccagcttgaggaacttgagtttaaaatgaacgagattaccactcccggcacacgcgtgtctctgcccttcgggcaggacctggacgtcggcatgaactcccttcagtcttatcagctgtcatccaatccacactttagtttggatgtacaacagggcgctgacggacctcagcaccctgagatggttctgcaaagcccacttgatcgcgaggaggaggccgtccaccacctgatcttgaccgccagtgatgggggagagccggtgcgcagtggaacgctgcggatttatatacaggtggtcgatgccaacgacaatcccccagccttcacacaggctcagtaccatataaatgtgccggagaatgtcccactcggcacccaactcctgatggttaacgcaaccgatcccgacgagggcgctaatggagaggtaacatactctttccacaacgtggaccatcgcgtggcccagatcttcaggctcgactcatataccggtgagatcagcaacaaggaaccactggactttgaagagtacaagatgtattctatggaggttcaagcacaagacggtgcggggctgatggcaaaggtcaaggttttgattaaagttttggatgtcaatgataacgcccccgaagttaccatcacttctgtcacgactgctgtccctgagaacttccctcctggaactattatagcgcttattagtgtacacgatcaggactcgggcgataatggttataccacctgtttcatccctggcaatctgccgtttaaattggagaagctggtcgacaattactacaggctggtgaccgagcgaactctcgatcgggaattgatttcaggttacaacatcacaattacagccatcgaccagggtactcccgctttaagcactgagacacacatcagcctcctcgtgactgacattaatgataatagcccagtttttcaccaggactcctactcagcttacattcccgaaaataaccctcgcggcgcctctatcttctcagtacgagcccacgatctcgattcgaatgaaaacgcccaaatcacatactccctgatcgaagatacaatccaaggggcaccactctcggcctatctgtctattaatagcgacaccggcgttctttatgcgttgcggtcattcgactatgagcagtttcgtgacatgcagctgaaggtgatggcccgagactctggcgatcccccactttcatctaacgtaagtctttctctctttcttttagatcaaaatgataacgcaccagaaattctttatcctgctttgccaaccgatgggtcaacaggcgtcgaactggcgcctttatctgctgagcctggctacttggtgaccaaagtggtggccgtcgatagggacagcggccagaacgcatggctgagctacagactcctgaaggcctcggagccagggctgttctcggtcggactccatacgggagaggtgagaactgctcgggcgctgcttgatcgggacgccctgaaacagagcctggtggtggcagttcaggatcatggtcaaccaccactgtcggctactgtgacactgacagtagccgtggcagataggataagtgacattcttgccgacctgggcagtctggagccttctgctaagcctaacgacagcgacctcaccctgtacttggtagttgccgcagccgctgtgtcctgtgtcttcttggcttttgtaattgtgctactcgcccatagactacgcaggtggcacaagtctaggctactccaggccagtggcggaggtcttgcatcgatgcctggcagccactttgtgggagtggatggggtaagagcctttcttcagacctacagccatgaggtgtcactcaccgccgactctcgcaagtcacatctgatctttccacagccaaattatgccgatacgttgatctctcaggagtcctgcgaaaagaaaggattcctgagtgcacctcagtctctgttagaagacaaaaaagagccgttctcccagcaggcacctcctaacacagactggcgcttctcacaagctcagcgcccaggtacctccggctcacaaaatggggatgatacgggaacctggccgaataaccaatttgacaccgagatgttgcaggcaatgatacttgccagcgcctccgaggctgccgacggctcttcgacccttggcgggggggcgggcacaatgggattgtccgcccgatacggcccccagtttacgcttcagcacgtgcccgattataggcagaacgtgtatatccctggctcgaacgccaccctaaccaacgcagcaggaaagagagatggaaaagctccggcgggcggaaatggaaataagaagaaatccggaaagaaagagaaaaagtag

SEQ ID NO: 201941 - DNA, 2811 bp, synthetic construct
  misc_feature 1..2811: note = Description of Artificial Sequence: Synthetic coding sequence
  source 1..2811: mol_type = other DNA
atggccgcccagcggaaccggagcaaggagagcaaggactgcagcggtctggtgctgctgtgcctcttcttcggcattccttgggaagccggagcccggcagatctcttattccattccagaagaattggaaaaagggtcatttgtgggaaacatctcaaaagacctggggttggcccctagagaactggccgagcggggagtgaggatcgtcagccgcggtcggacacagctgttttcccttaatccaaggagcggtagcttgatcacagctggaaggattgatcgtgaggaactgtgcgctcagagtgccaggtgtgttgttagctttaacatcctcgtggaggatcgcgtgaaattgtttggtatcgagattgaagtgaccgatattaacgacaatgcaccaaagtttcaagctgagaatctcgacgtgaagataaacgaaaatgtcgccgctggaatgcgctttccgctgccggaagcaattgatccagatgtcggcgtgaactccctgcagtcataccagctgagccctaataaacatttttcgctccgtgtgcagtctagggcaaacggggtcaaataccccgagctcgtacttgagcacagtctcgatcgagaggaggaggctattcatcacctagtgcttacagcatcggatggtggtgatcctctaagaagcgggaccgtgctcgtctctgtgacggtttttgatgccaatgacaatgcccctgtgttcaccttaccggagtatcgagtgagcgtgccagagaatcttcccgttggcactcagcttctaactgtcacagctaccgatcgagacgaaggagcaaacggcgaggtgacttactcatttagaaagctgcctgatacccagctcttaaaattccagctaaataagtacacgggtgagatcaagatcagcgagaacctcgactatgaagaaaccggcttttatgaaatcgaaatccaggctgaagatggcggagcctacttggcaacagccaaggtgctaattacagttgaggatgtcaacgataacagcccggagctaacaatcacctccttattctccccggtgacagaggactctccactgggaacagtggtggccctgctgaacgttcacgacctcgactctgagcaaaatggacaggttacctgtagtatcctggcttaccttccgttcaaactggagaaaagcattgattcatactacagattggtgatccacagggctctggaccgcgagcaggtgagctcttataacatcactgttacagcgaccgatggagggtctcctccgttgtctactgaggcacattttatgctacaggttgccgacattaacgacaatccacccaccttctctcaagtgtcttacttcacctatatcccagaaaataacgcaaggggcgcaagtattttttctgtcaccgcactcgatccagatagcaaggaaaacgcccagatcatctattccctggccgaagataccatacagggcgttccgctgtcctcctacatctccatcaactccgacacaggtgtactttatgccctgaggtcattcgactacgagcagttccacgagcttcaaatgcaggtgactgcgtccgacagcggcgatccgcccctatccagcaacgtgtcactgtctttgtttgtgctggaccaaaatgacaatgcccctgaaatcctctatcccgccctcccgactgatggcagcaccggcgtggagcttgcaccaagatcggccgaacctggctatctcgtcactaaagttgttgcagtcgatagggactcaggccagaatgcctggttgagctaccggctgcttaaagcctcagagcctggtctgtttgccgtcggcgagcataccggagaagtgagaacagcccgcgctttgctcgatagagatgccctgaagcagtccctcgtagttgccgtgcaggatcacggccagccccccctgagcgctaccgtgaccctgaccgtagcagtcgctgatagtatcccgcaggtgctggcggatcttgggtccttcgagtcaccggctaattccgagacgagcgatctcactttatatttggtggttgccgtggccgctgtaagctgcgtgttcctggccttcgtgattgtcttgctggcgcacagattgcgccgctggcacaaatctcgtctcttacaagcctctggaggaggcctgactggcgtgagcgggtcccacttcgtgggcgtcgacggagtcagggcatttctgcagacatactcacacgaagtgagccttactgccgattccagaaagtcccacctgatttttccccagcccaactatgcagacacactgatatctcaggaaagctgcgagaagaatgatcctctttccctgttggacgactccaagttccccatagaagacacacccctggtcccacaggcaccccccaatactgactggcggttttcccaagctcagcggcccggcaccagcggctcacagaacggcgacgatactgggacctggccaaacaatcagtttgatacagaaatgttgcaggccatgatcctggcctcagcttctgaggcagccgatggcagcagtacattgggcggaggagctggaactatgggcctgtcagcgcgctacgggccacaattcactctgcagcacgtccctgattatcgtcagaatgtctacattcccggtagcaacgctaccctgactaatgccgccggtaaacgcgacggcaaagcccctgcaggtggtaacggtaacaagaaaaaaagcggcaagaaggaaaagaagtag

SEQ ID NO: 201942 - DNA, 2808 bp, synthetic construct
  misc_feature 1..2808: note = Description of Artificial Sequence: Synthetic coding sequence
  source 1..2808: mol_type = other DNA
atggccaaccggctgcagcggggcgaccggagccggctgctgctgctgctgtgtatcttcctgggaactctccggggcttccgcgccaggcaaatcaggtattccgtgcctgaggaaactgagaaaggcagtttcgtcggcaacatctccaaggaccttgggctcgagcccagggagctggccaaacgaggcgtgcggatagtgtctcgtgggaagacccaactgttcgcagtcaaccctagatccgggtcacttatcactgctgggagaattgatagggaggaactatgcgagacagtctcgagttgcttcctgaacatggagttacttgtagaggatacattaaagatttacggcgttgaagtggagatcatcgacattaatgacaatgctccttcttttcaagaggacgaggtggaaattaaagtctcagagcacgctataccaggcgcgaggttcgccctccccaacgctcgcgatccagatgtcggcgtgaactctcttcagtcataccaacttagtcccaataactatttttccctccagttgaggggaagaactgatggcgctaagaatccagaacttgtgctggaaggttcactggacagggagaaggaggccgctcacttgctgctgctgactgctcttgatggcggcgatccaataagaaaaggcgccgtaccaatcagagttgttgtgttagacgtcaacgaccatatccctatgttcactcaaagtgtctacagagtgagtgtgccggaaaacataagctctggaacccgcgtgttaatggttaatgccacagacccagacgaagggattaacggggaagttatgtactcgtttcggaacatggagtctaaggcgtcagagatttttcagcttgactctcagactggggaagtccaagtgcgcgggtcccttgactttgagaaatacagattctacgagatggagattcaggggcaggatggcgggggtctcttcactacaacaactatgctgatcactgtcgtggacgtgaatgacaacgctccagaaatcactataacaagctccattaattccatcttggagaatagcccgcctggtacagtgatcgctttactgaacgtacaggatcaggacagcggagaaaacggccaggtcagctgctttattccaaatcacttgccattcaagttggagaaaacctatggcaattattacaagttgattaccagccgcgtcctggatcgtgagctggtacagagttacaatataacactgaccgcaaccgatcagggcagtcctcccttgtcagccgagacccacgtgtggcttaatgttgcagacgacaacgataatccacctgtgttccctcattcttcatattcagcgtatattcccgagaataaccctagaggtgcttccattttctctgtgacggccctggatcccgatagcaaacaaaatgcgttggtgacttattctctgactgatgatactgttcagggcgtgccgctttccagctacgtatctatcaatagtaatactggcgtgctctatgcactccaatcattcgactacgagcaattccgtgatctggagttacgagtaatcgcccgagactcaggcgatccccctttgtcatccaacgtcagtctgagtctgttcgtactggatcaaaacgacaatgcccctgagatactctacccggcattgccaaccgatgggagcactggggtggagctcgctcccagatctgctgagcccgggtacctcgtcaccaaggtggtagccgtcgataaggattccggccagaacgcctggctcagctatcgacttttaaaagccagcgagcctggactgttcgctgtgggagaacataccggagaggtcagaaccgcccgagcactgctggatagagacgcattgaaacagagtcttgttgtggccgtgcaggaccacgggcagcccccactttcggccactgtgacgctgaccgttgctgtggccgactcaattcctgaagttctggctgatctggggagcctggaaagtctggccaactccgaaacttctgacttatccttgtacttagtggtagccgttgccgctgtgtcctgtatctttctagtgttcgtgattgtccttttggccctgcggctgtggcgctggcacaaaagccgtctactgcaggcttccgaaggagggctggcaggcatgcctaccagtcatttcgtgggggtcgatggcgtgcaagcttttctccagacgtactcgcatgaagtgagcctcattgcggactctcagaaatctcatctaattttcccccagccaaactatggggataccctaatcagccaggagagctgcgagaaatccgagcccttacttattgccgaggatagtgccattattctgggaaaatgcgatcctaccagtaatcagcaagcccctcccaacaccgactggagattcagtcaggcacaaaggcccggcacctctggatctcaaaacggtgatgatacaggtacctggccaaataaccagttcgacaccgagatgcttcaggccatgattttggccagcgcaagtgaggctgcagatggatcttctacgctgggcgggggcgccggcaccatgggactttcagcccgttacggcccacaattcactctccagcacgttcctgattatcggcaaaatgtgtatatacctggatccaatgccaccctcactaacgccgcaggaaagagagacgggaaagcacctgctggtggaaacggtaataaaaaaaagagcggaaagaaagaaaagaaatag

SEQ ID NO: 201943 - DNA, 2253 bp, synthetic construct
  misc_feature 1..2253: note = Description of Artificial Sequence: Synthetic coding sequence
  source 1..2253: mol_type = other DNA
atggccaaccggctgcagcggggcgaccggagccggctgctgctgctcctgtgtatcttcctaggaacgctgaggggatttagggctaggcaaatcaggtactcggtaccagaggaaactgaaaagggatctttcgtgggcaatataagcaaagatctggggcttgaaccacgggagctagctaagcggggcgtcaggatcgtaagccgaggaaagacacagctgtttgccgtgaatcctagatcagggagcctgattaccgccggccgtatagaccgtgaggaactctgcgaaaccgtgtccagttgcttcctgaatatggaactcctggtggaagataccctgaagatctacggagtggaggtggagattattgacatcaacgacaatgcgccttcgttccaggaggacgaagtggagatcaaggttagcgaacacgctatcccgggggctcggttcgcactgccaaatgcacgggaccccgatgttggagtgaacagtttgcagtcataccaattaagtcccaataactacttctccttgcagcttagaggtcgaaccgacggggctaagaatccagagctcgttctggagggtagcctcgatcgggagaaggaggccgcgcacttgttgcttctgaccgccctggacggcggcgacccaataaggaaaggagcagtgccgatccgggtggtggtgctcgacgtcaatgaccacatccccatgttcacccagtctgtttacagggtctcagtgcctgagaatatctcaagtggtactcgcgttcttatggtgaatgcaactgaccctgacgagggaattaatggggaagtaatgtatagcttcagaaatatggagtctaaggcttccgaaatctttcagctagacagtcagacaggagaggtacaggtgagggggtcattggactttgagaaataccggttttacgaaatggaaatccaaggacaggacggaggcggactgttcacgaccaccaccatgttgatcaccgttgttgacgtgaatgacaacgctcccgagatcactataacttcatcaataaacagtatccttgagaattccccacccggaaccgtgatagcgctactgaacgtccaggatcaggactctggcgaaaacggccaagtctcctgcttcatacccaatcacttaccttttaaactcgaaaagacttatggtaactattataaactgatcacttctcgggtgctcgacagagaattagtgcaaagctacaacatcacattaaccgccaccgaccagggatcccctccgttgtctgcagagactcacgtctggctgaacgtggcagatgataatgataatccccctgttttccctcactcatcttattcggcatatattcctgagaataaccctaggggagcctccattttttccgtgacagctttggaccccgacagtaaacagaatgcccttgtcacatactcactgacagacgatacagtacagggggtacctctcagcagctatgtttcaatcaattcaaacacaggtgtcctttatgcactccagtcttttgattatgagcaatttcgggatctcgagctgagagtcattgctcgcgacagcggcgaccctcctctgtcatcaaacgtgtctttaagtttgttcgtgttagaccagaatgacaacgctccggaaatcctgtaccccgccctgcctacggacggcagcacgggagtggagctggctcccagatccgctgagccgggataccttgtaactaaggtagtcgccgtagataaggactcaggacagaacgcttggctgtcatacagactccttaaggcttcagaaccagggcttttcgccgtgggtgaacacacgggagaacaagcccctcccaacacggactggaggtttagccaggctcagagacccggcacctcaggaagtcagaatggggacgacacagggacatggcccaacaatcagttcgacacagagatgctccaggctatgatcctggcgtccgcctctgaggccgctgacggttcgagcaccctgggagggggggctggtactatgggactatcggcccgttatggtccacaatttaccttgcagcacgtacctgattaccgtcaaaatgtttacattccagggagtaatgcaacattgactaacgctgccggtaaacgcgacgggaaagcgcccgccggaggtaatggaaacaaaaaaaagtcaggcaaaaaagagaagaagtag

SEQ ID NO: 201944 - DNA, 2799 bp, synthetic construct
  misc_feature 1..2799: note = Description of Artificial Sequence: Synthetic coding sequence
  source 1..2799: mol_type = other DNA
atgatccccgcccggctgcaccgggactacaagggcctggtgctgctgggtatcctgctggggaccctgtgggagacgggctgcacccagattagatactcagtcccagaagagctggaaaagggcagccgagtgggcgacatcagcagggatctgggactggaacctagggagctggccgaaaggggtgtcaggataattccacgcggaaggacacaactcttcgcacttaaccctaggagtggtagcttggttacagcaggccgcatcgatagggaggagctgtgcatgggggccatcaagtgtcagctcaatctggatattcttatggaagacaaggtcaaaatctacggggtggaagtggaggtccgagacataaatgataatgcaccatactttcgggagtccgagctcgagataaaaatcagcgaaaatgcagcaacagagatgcggttccccctgccacacgcctgggatcctgacatcgggaagaacagcctgcagtcatatgagctgtcacccaatacgcatttcagccttatcgtccagaacggtgcagatgggagcaaatatcccgagctcgtactgaagcgagccctcgatcgcgaggagaaggctgcccaccatctcgtactcactgcttctgatggaggcgaccccgttcggactggaaccgcccgcatacgggtcatggtcctggatgccaatgacaacgcaccggcatttgctcaaccggagtatcgggcttcggtacccgaaaatctggcgttgggcacacagttactagtggtcaatgcgactgacccagatgaaggagtcaacgccgaggtgagatactcgtttcgctatgtggacgacaaggctgctcaggtgttcaagctggactgcaattcaggcacaatctctacaattggcgagctcgatcatgaagagagtgggttttaccagatggaggtccaggccatggacaacgccggatattctgcccgcgctaaggtgctgatcactgtgctggacgtgaacgataacgcacccgaagtggttctgacttccttagcttcgagcgtcccagagaacagcccccggggcaccttgattgccctcctcaacgtgaacgatcaggactccgaagaaaatggccaggtaatctgtttcatacagggaaatctgcccttcaagctggagaagagctatggaaattattactcgctggtcactgacatcgttttagatagggaacaggttccaagttacaatatcacagttacagcgacagacagggggaccccaccgctcagtactgaaacccacatctccctgaatgtagcggataccaacgataatcctccggtgttccctcaggcctcttacagtgcctacataccagagaataacccaaggggggtgagtctcgtgagcgtgacagcccacgaccctgattgtgaggagaatgcgcaaattacgtattctctcgcagagaacacaatccagggggcaagcctatccagctacgtcagcatcaattctgatactggcgtgctgtatgccctttcctcttttgattatgagcaattccgtgacttacaggttaaagtgatggctagagataatggccaccctccactcagctcaaatgtgagtctgtcactgtttgttttggaccaaaacgacaacgcgcctgagattttgtaccctgccctgccgaccgatggcagtactggcgtggagctcgcacctcgcagcgcggagcccggatacctggtcacgaaggtcgttgccgtcgaccgagattcagggcagaatgcctggctgtcatatcggttgctgaaggcttcagagcccggccttttctccgttggactgcacacaggggaggtgcggactgctcgggcactgcttgaccgggacgccctcaagcagagtcttgtggttgccgttcaagatcacggccaaccacctttatctgctaccgtgaccctcactgtcgccgtggcagacagcattccccaagtgcttgctgatctgggctcattggaaagccccgccaactcagagacctcagatttgaccttatacctcgtggtggctgtggccgcggtgagctgtgtctttctggccttcgtgattttgctcctggccctgcgcctgcggcgttggcacaagagtcggctcctgcaggcttctggggggggcctgactggcgcacccgccagccactttgtgggagtagacggcgttcaggctttccttcagacttattcccacgaagtgtctctcaccaccgattctcggaaaagccatttgattttccctcagcccaactatgcagatatgctggtgtcccaggagtcattcgagaagtccgaaccactgctgctgtcaggcgattccgtattttccaaggattcacacggccttatagaacaggcgccccctaacaccgattggcggtttagccaagcacagaggcccggtaccagtggatcccagaatggtgacgatactggaacctggcccaacaaccagttcgacaccgaaatgctgcaggccatgattctcgcctctgccagtgaggccgccgacggctcatccactctggggggcggagccggcacaatggggctgtctgccaggtacggaccccagtttaccctgcaacacgtgcctgattaccgccagaacgtgtacattcccgggagcaacgcgacccttacgaatgctgcgggaaaacgggacggtaaggcccccgctggcggaaatggaaacaagaaaaagtccggaaagaaggaaaagaaatag

SEQ ID NO: 201945 - DNA, 2799 bp, synthetic construct
  misc_feature 1..2799: note = Description of Artificial Sequence: Synthetic coding sequence
  source 1..2799: mol_type = other DNA
atggccgccctgcagaagctgccccactgccggaagctggtgctgctctgcttcctgctcgcaactttgtgggaggcacgcgccgggcagataagatattccgtcagagaagagatcgatcgtggctccttcgttggcaatatcgccaaggatctgggactggagcctctggcactcgctgaacagggtgtcaggattgtatctcggggaaggtctcagctcttcgctttgaatcctaggtctggttctctggtgaccgccaatcggatcgaccgagaggaactctgcgctcaaagcgctccatgtctcctgaattttaacatactgctagaggacaagctgactatctactctgtggaggtcgaaattaccgacatcaatgacaatgcacctcgctttggggtcgaggagttggagttgaagatctccgagaccactacacctgggttcagaattcctctgaagaacgcgcatgacgccgacgtgggcgagaacgccctgcagaaatatgccttgaacccaaacgatcactttagcttagacgtacgtcgcggcgctgatggcaacaaataccccgaactggtgttggagcgaagcttagatcgagaggaggaggccgtgcaccacttagtactggtcgcaagtgacggtggagatccagtactaagtggcacctcccgcatctgcgtcaaagtcttggatgcaaacgacaacgcccctgttttcactcagccggaataccgcattagcatcccagagaatactctcgttggaacccggatccttacggtgaccgctactgatgccgatgagggctactatgcccaggttgtctatttccttgagaaatcgcctggggagacatctgaagtcttcgagctaaagtccacaagcggagagctgactattatcaaggacttggattatgaagatgccacctttcacgagatcgacattgaggcccaggatggacctggattgctaactagggcaaaagttatcgtgacagtgctggacgtcaatgacaacgcccccgaattttacatgactagtgccaccagcagtgtgtccgaggactctttacccggaacaatcattggcttgttcaacgtgcacgatcgagactcgggccagaacgcattcactacttgttctctccccgaggacctgccgttcaaactagaaaagagtgtggacaactactacagacttgtcaccacacgggcactcgaccgtgaacagttctcattttataatattactctgacagctaaagacggcggcaaccccagcctgtcaacagatgcccatatccttctgcaggttgctgacattaatgacaatgcacctgcgtttagccgcactagctatagtacatacatacccgagaacaatccacgcggcgccagtgtgttctccgtcacagctcatgaccctgattctaacgataatgcacacgttacctatagcttcgcagaagacaccgtccagggcgccccgcttagtagctatatcagcattaattccgataccggcgtgttatatgcactcaggagcttcgattacgagcagctgagagatctgcaagtatgggttattgctcgtgacagcggcaatcctccgctgtccagcaatgtgtccctgagtctgttcgtgctggatcagaatgataacgctcccgagattctgtaccctgccttcccaacagacgggtccaccggcgttgagctcgccccaagaagcgccgagcctggctatctcgtaacaaaagtagtagctgttgatcgcgattctgggcagaacgcctggctgtcgtatcacctgctgaaggcttcagaaccgggactatttagcgtgggactgcataccggtgaggtcaggaccgcgcgagcgctgctggacagggatgccttgaaacagtcacttgtcgtcgcgatccaggaccatggacagcccccactcagtgccactgtgactctgactgtcgcagtagccgacagaattcctgacatcctggctgacctcgggtcgttggaaccttctgctatccctaatgacagcgacctgactctctacctggtggtcgccgtggccgcggtgtcctgcgtgttcctggcgtttgttatcgtgttactggcgcatcggctccgtaggtggcacaagagtagacttctccaggccagtggcggctccctcaccggtatgcaaagctctcactttgtgggcgtggacggagttcgcgctttcctacagacctactcccatgaagtgtctctaacggctgattccagaaagtcacacctgatttttccccagcctaattatgcggacacactcatctcgcaagaaagctgcgaaaaaaaagattttttatctgccccacagtcccttttagaggaggagcgtgaggagacattctcccaacaggcgccaccaaatacagattggaggttctcccaagcacagagacccgggaccagtggctctcagaacggggacgatacaggcacttggccaaacaaccagtttgataccgagatgctgcaggcaatgatcttggcctccgcatccgaggccgcagacggctcttcaactctcggagggggagccggcaccatgggcctgtccgcacgctacggccctcagttcactttgcagcatgtaccggattacagacagaacgtttatataccagggtctaacgccacactgaccaatgctgctggtaagagagacggcaaggcccctgcgggtggaaacgggaacaaaaagaagagcggaaaaaaggagaagaagtag

SEQ ID NO: 201946 - DNA, 2799 bp, synthetic construct
  misc_feature 1..2799: note = Description of Artificial Sequence: Synthetic coding sequence
  source 1..2799: mol_type = other DNA
atgaccaactgcctgagcttccggaacggccggggcctggccctgctatgtgctctcctgggcacactgtgtgagacgggttctgggcagatcaggtacagcgtgagcgaagaactggataaaggctccttcgtgggcaatattgctaacgatctaggtttagagcccagagagcttgcggagagaggagtccgcattgtaagcaggggtcgaacccagctgttcagtttaaaccctcagtccggatctctggttacagccgaaaggattgatagggaagagctttgtgcccaaatccctctgtgtttagtcaagataaacatactagtcgaggataagctcaagattttcgaagtggagatcgagatcaaagacatcaacgacaatgctccaaactttcccaccgaggaactcgagatcaaaatcggggaactgacggttccagggactcggtttcctataaagaccgcgttcgaccccgacgttggtattaacagtcttcagaactataagttgtcacccaacgattacttttcccttgccgtgaactccgtgtcagaaggggctaaataccctgagctggtgctagaacgggcactagatcgggagaaaaaggaaatccatcagctcgtgttggtagcatccgacgggggggaccctgtacacagcggtaatttgcacatacaggtcattgtcctggatgcaaacgataacccccccatgttcacccagccagaataccgagtgtctgtatgggaaaacgttccggtgggcaccaggctgctgactgtgaacgctacagatccagacgagggttttaatgcccaggtctcttatatcctggataaaatgcccgggaagatcgccgaaattttccacctgaacagcgtttccggcgaggtgagcattctaaagtcactggattacgaggacgcaatgttctatgagattaaaatcgaggcccaggacggccccggccttctcagcagagctaagattttggttacagtcctggatgtgaacgataatgcccctgagatcactataacaagcttaacttcttccgtgccagaagaggggacggtgggccgcgaaatagccctgatcgatgttcatgatcgcgattctggacagaatgggcaggtagaggtgttcgtcctaggtaacctgccctttaagcttgaaaaatccatcgaccaatactaccgactggttactgctacatccctggatcgcgaacaaattagcgaatacaacataagccttcgtgcgtctgatggcggcagccctcccctgtccacagaaacgcacattactctgcacgtaatcgatattaatgataatcctccaacttttccccacttgtcttacagtgcatatattccagagaacaacccaaggggcgcgtctattttcagtgttactgcccaagaccctgactccaataacaacgctcgtattacctacgccttgacagaggacaccctccaaggtgctcccttatccagtttcgtgagtatcaactctaacaccggggtcctgtatgcccttcgctcatttgattacgagcaatttcgggaccttaaactattggtaaccgcttcagatagtggcaacccacctctgtcatccaacgtgagtctgaatctgttcgtgctggaccagaatgacaatgcccctgaaatcctgtatcccgccctgccaacagacggtagtactggggtggagctggctccacgtagcgctgagcccggttacctcgtgaccaaggttgtcgctgtcgaccgagactcagggcaaaacgcctggctctcttatcggctgctgaaggccagtgagcctggtctcttcagcgtcggcctgcataccggcgaagtgcgaactgctagagctctgcttgatagggatgcactaaagcagagcctggttgtcgcagtgcaagaccacggacagcccccgctgtcggccacggtcacactcacagtcgctgtcgccgatagaatcccagatatcctcgcagatttgggatcactggagccctcggccaagccaaacgacagcgatctgactctgtatctcgtggtggcagtggcagccgtgtcatgcgtgtttctagcctttgttattgtgttgctggcactccgacttaggcgctggcataagagtcggcttctccaggcatcgggaggggggctggcaagcacccctggatctcacttcgtgggcgccgatggagtccgtgcctttcttcagacatacagccacgaagtgtccctgactgctgactccagaaagtcccatctgatatttccccagcccaactacgccgacaccctgattagtcaggagtcctgcgaaaagagcgagccactgcttatcacccaggacttattagaaatgaagggggattcaaacctgctacagcaggctcctccaaataccgactggagattcagccaggctcagcgaccgggcacctctggcagccaaaacggcgacgataccggaacttggccaaacaatcagtttgacaccgagatgctgcaggcgatgatcctggcaagcgcatcagaggctgccgatggatcaagcaccctcggtggcggggcaggtacgatgggactgagcgcacgatatggccctcaattcaccctacagcatgtcccagattatcgccagaacgtttacatcccaggtagcaacgcaactcttactaatgccgctggcaaacgggacgggaaagcgccagccggagggaacggcaataagaaaaaatccggcaagaaggagaaaaaatag

SEQ ID NO: 201947 - DNA, 2796 bp, synthetic construct
  misc_feature 1..2796: note = Description of Artificial Sequence: Synthetic coding sequence
  source 1..2796: mol_type = other DNA
atggccagccccccccggggctggggctgcggcgagctgctgctgccttttatgcttctggggaccttatgcgagcccggctccggccagattcgctactccatgcctgaggagctggataaggggtcgtttgtgggcaatatcgccaaggaccttggactggaacctcaggaactggctgaacgcggggtgcgtatcgtttctcggggaagaacccagctgttcgctctgaatcctcggtcagggagcctggtcaccgccggccggatcgatcgggaagaactgtgtgcccagagccctttatgtgtggtcaatttcaatatactggtcgaaaacaagatgaagatttacggcgtggaggttgagatcattgacattaacgataatttcccgaggttccgagacgaggagctcaaggtgaaggttaacgagaacgcggccgccggtacaaggcttgtcctgccttttgccagagacgcagacgttggtgtgaactcacttcggagctaccaactgtcatccaatctgcacttctccttagatgtcgtctccggaacagacggtcagaaatacccggagttggtcctggagcagcctctggacagggaaaaggagacggtgcacgatctgctcctgaccgccctcgacggtggcgatcccgtgctgtctgggacaactcacataagagtgacggtgttggatgcaaacgacaatgccccactcttcactccatccgagtattcagtttcagtgcctgagaatatccccgtaggtaccagattgttgatgctaaccgcgactgatcccgacgagggcattaatggtaagctgacatatagcttccggaatgaggaagagaaaatttccgaaactttccaactagattcgaatctgggtgaaatcagcacattgcagtctctagattacgaggaatcgaggttttatctcatggaggtcgttgcccaggacggaggcgccctggtagctagcgcaaaagtggtggtgaccgtgcaggatgtaaatgacaatgcgcccgaggtcatcttaaccagtctcacttcatctattagcgaagattgcctacccggtaccgtcatcgccttgttctccgtgcatgacggtgatagcggagaaaacggagagatcgcttgtagcatccccaggaaccttccatttaagttagagaagtccgtcgataactattaccacctgttaacgacccgggacttagatcgcgaggaaacttcagattacaacattacactgactgtaatggatcacggaacacctccgctctccaccgagtcccatatccctcttaaggtcgccgatgttaatgataatccccctaatttcccacaggcttcttactctacttctgtaactgagaacaaccctagaggtgtgtctatcttctctgtgacggcccacgaccctgattctggggacaacgcccgcgtaacctattccttggctgaggacacgttccagggagcacctctcagctcgtacgtgtcaatcaacagtgataccggggtgttgtatgccttgaggtctttcgactacgaacagttgcgggatttacagctctgggtgaccgccagcgactcaggcaatcctcccctgtctagtaacgtgagcctgtctctgtttgtgttggaccagaacgataatactcctgaaattctgtatccagccctcccaactgatggttctaccggagtggagctggctcctaggagtgccgagccagggtacttggtgacaaaagtggtcgccgtagacaaagattccggccaaaatgcttggctgtcttacagactcctaaaggcaagcgaaccaggattgttcgcagtcggactccatactggcgaggttcgtactgctagggcccttctggacagagacgcccttaagcaatctttggtggtggctgtggaagaccacggccaaccccctctaagcgccactttcactgtgacagtggctgtggccgatcggattccagacattctggcagacctgggcagtataaaaacccccatcgaccccgaggatctcgacttgacactctatctggtggtcgccgtggccgctgtgtcctgtgtcttccttgcgttcgttatagtgttactcgtgctgaggcttagaagatggcacaagtcacgtctgctgcaggctgaagggtcccggctggcaggggtgccagcatcccacttcgttggcgttgacggcgttcgggcgttcctgcagacctatagtcatgaggtgtcactgactgcagactcacgcaagagccacctgatctttccccagccaaactacgccgacacactgctctccgaggaatcatgcgagaagagcgagcctctgttaatgtctgataaagtggatgccaacaaggaggagcggcgggttcagcaggctcccccaaacacggattggcggttcagccaggcccaaaggcctgggacttctgggtcccagaacggtgatgataccggaacctggccaaataaccagtttgacactgagatgctgcaggccatgatcctggcctcagcgtcagaagccgcagacggatccagcacccttgggggaggagcgggtaccatgggcttatctgcccgttatggaccacagttcaccctccagcacgttccggactaccggcaaaacgtctatatcccagggtccaatgccactcttaccaatgccgctggaaagcgcgatggtaaagctcccgctggggggaacggaaacaagaaaaaatccgggaaaaaggaaaagaagtag

SEQ ID NO: 201948 - DNA, 2799 bp, synthetic construct
  misc_feature 1..2799: note = Description of Artificial Sequence: Synthetic coding sequence
  source 1..2799: mol_type = other DNA
atggcccccccccagcggcacccccagcggagcgagcaggtgctgctgctgacactgctgggtaccctttggggtgctgcagcggcccagatccggtattctatcccggaggagcttgaaaaaggatccttcgtggggaacattgtgaaagacctcgggctggaaccccaggagcttgctgagcatggagtcaggatagtcagcagaggacgcatgcagctgtttagtctgaaccctcgaaatggcagtcttgtgactgccggcagaatcgatcgggaagaactttgtgcacaatcacctcgatgtctggtttcattcaacatcttggtcgaggacaagctgaatttgtatcctgttgaggtggaaattgttgatattaacgataatactcctcgtttcctgaaagaggagctagaggtgaagatcctggagaatgcagcgccaagctctcgatttccattgatggaagtatacgacccagatgttggaatgaactctctgcagggctttaagctcagtggcaacagtcatttcagcgttgacgtccaatccgaagcacacggaccaaagtatccagagctcgtcttagaaggcactttagaccgggaaggtgaagcagtctacagactcgtcctcactgcaatggatggcggagatcctgtgaggtcttctgtcgcacagattctggtgaccgtccttgatgttaatgacaacacccccatgttcacacaacctgtgtaccgggtgtctgttccagaaaacctgcctgtggggacgcccgtactcgcggtgaccgcaaccgaccaggatgagggagtacatggagaggtgacatattcatttgtgaagataaccgagaagattagccagattttttgcctcaacgtactcaccggcgaaatttccacatcagccaacttggactacgaggattcctcattttacgaactgggcgtcgaggcccgcgacggtcctggcctccgagatagggctaaggtactgatcactatcctggacgtgaatgataatgttcctgaggtggtcgttaccagtggaagccggactattgctgagtctgccccgcctggcactgtaatcgccctcttccaagtctttgaccgggatagcggtcttaacggattggtaacttgttcaatcccaagatctctgccatttgaacttgagaagagcgtgggaaactattatagattagtaactaatgcagctctggaccgggaagaggtgttcctgtacaacataacagttacagctacagataagggaacaccaccactctctactgaaacaattattagtcttaacgtagcggataccaacgacaacccaccaacttttcctcactcatcatactccgtttacgtgctggagaacaatccacgtggcgcgtccattttctcagtaaacgctctggaccccgatgtagaccagaatgctcaggtgtcgtattcgctggccgaggacacccttcaaggcgcccccttatctagttacgtctctatcaacagcgacaccggcatcttgtatgcattgcggtcctttgattacgaacaattgagagacctccagttatgggtcaccgcctccgatagcggagatcccccattatccagtaatgtttccctgtctctattcgtgttggatcagaacgacaacgcacccgaaatactataccccgctctgcccactgatggatccacgggagtcgaactggcaccgcgatccgcggagccagggtacctggtcacgaaggtggttgctgtagaccgtgattccgggcagaatgcgtggctgagctatcggcttctaaaagccagcgagcccggattgtttagtgtgggtctccataccggagaagttcgaaccgctcgggcgctgttggaccgtgatgcactgaaacaatccctggtcgtggctgtgcaggatcatgggcagccacctctctcagccacggtgactttgacggtcgctgtggcggacagaataccagatatactggctgatctaggcagcctcgagccttcggccaaacccaacgactctgatctgacgctgtacctggttgtggccgtggcagccgtgtcatgcgtcttcctggcgttcgtcatcgtgcttctggcactgcgactgcagcgttggcacaaatcgcggctgctgcaggcctcagggggcggcttggcttccatgcctggcagtcatttcgtgggggtcgagggagtccgggctttcctccagacctactcccacgaagtcagcctgacagccgacagtaggaagtcccacctgatcttccctcagccaaactacgccgacacactgatcaaccaggagtcatatgagaaatcagagcccctcttaataactcaggatttgcttgaaacaaagggcgagccacggcaactacaacaggccccacctaatactgactggagattttcccaggcccagaggccgggcacttccggttcccagaatggagacgacaccggaacttggcccaacaaccagttcgacacagagatgctgcaggccatgatactggctagcgcatccgaagccgcggacggctcctccacactgggaggcggggctgggacaatggggttaagtgccaggtacggtccacagtttacactgcagcatgtccctgactaccggcagaacgtgtacattcctggctccaatgcaaccctgacaaatgccgcgggcaaaagagatggtaaggccccagccggtggtaacgggaacaagaagaaatctggcaagaaggagaaaaaatag

SEQ ID NO: 201949 - DNA, 2799 bp, synthetic construct
  misc_feature 1..2799: note = Description of Artificial Sequence: Synthetic coding sequence
  source 1..2799: mol_type = other DNA
atggccgcccagccccggggcggcgactaccggggcttcttcctgttaagcattcttctgggtacaccctgggaagcttgggccggccgaatcctgtactcagttagtgaagagacggataaaggatcatttgtaggcgacatcgcgaaggacctcggtctagaaccacgggagctcgccgagcggggtgtacgtataatcagcagggggcgcacacagctctttgcgcttaaccagagaagcggaagcctggtgacagccgggcgcattgatagagaagaaatttgcgcacagagcgcccgttgtcttgtgaactttaacattctgatggaagataaaatgaatctgtaccccattgacgtcgagataattgacatcaatgacaacgtacccaggtttctgaccgaagagatcaacgtgaagatcatggaaaacacagccccaggagtacggttccctctgtcggaagctggcgaccctgatgtgggaacgaacagcctgcagtcttatcaactgtccccaaacaggcacttttccctggccgttcagagcggagatgatgagacaaaataccccgagctggtgttggagcgtgtgctggaccgggaggaggaaagggtgcaccatctggtcctgacagcatcagacggcggcgacccaccacggtcctcaaccgcgcacatacaggtcactgtggtcgatgtgaatgatcacactcccgtgttttctctgccgcagtaccaggtgactgtgcccgagaacgtccccgtgggcacccggctgcttacagtgcatgctattgatctcgatgagggagtgaatggcgaggtcacatattctttccgtaagataaccccgaagcttcctaaaatgttccatttgaatagcctgactggggaaatttctaccctggaaggcctggattacgaagagacagcgttttacgaaatggaggtccaggcacaggatgggccaggctccctgacaaaagcgaaagttctcatcacagtccttgatgtcaacgacaatgcacccgaggttactatgaccagcttgtccagttcaatccccgaagacactccgctgggaacagttatagcactcttttacctccaggacagggacagcggcaagaacggggaggtcacctgtaccattcccgaaaacctgccgtttaaacttgagaaatcgattgataattattatcgtctggttactactaagaacctggatagggaaaccctctcattatacaacattactcttaaggccacagacggggggactccacccctcagtagggaaacccacatctttatgcaagtagccgatacgaacgataatcctccaaccttcccgcactcatcctatagtgtgtacatagctgagaacaacccccgaggagcttccatttttcttgttaccgctcaggatcacgattctgaggataatgcccaaatcacctactccctggccgaggacacgattcaaggtgctcccgtgagctcctatgttagcatcaattccgataccggcgtgctgtatgcccttcaatccttcgattatgaacagctgcgcgaactgcagttacgagtgaccgcccatgacagtggtgacccgccactgtcatctaacatgtcccttagtctgttcgttttggaccagaatgacaatcctccagaaatcctgtatcccgccctgccaacagacgggagtaccgggatggaactggctcctagatcagcagaacccggctatctggtgaccaaagttgtggcggtggataaagattcgggtcaaaatgcctggttgtcctatttgcttcttaaggcttcagagcctggactcttcgccgtggggctgtacacgggggaggtccggacggctcgggccttgttggaccgggacgccctcaagcagtccctggttgtagctgtgcaagaccacggccagcctcccctgagcgcaaccgtgacccttactgtagccgtagccgatagcattccggaggtactagcagaccttgggagtttggagccctccgatgggccatacaattatgatctcactctgtatctcgtagtcgcagtcgctacagtgagctgcgtgtttctggccttcgttctcgtcctcctggcacttcgcctaagaagatggcacaaatcccgactactgcaggcatccgaaggtggtctcgctaatgtcccaacgtcacatttcgtgggaatggatggggtccaagctttcctgcagacatacagccacgaggtatctttgaccgcagacagtagaaaaagccacctgatctttccccaaccaaattacgtagacatgttaatttcccaggaatcttgcgaaaaaaacgactcgcttctgaccagcgttgacttccaggagtgcaaggagaacctgccatcaatccagcaggcacctccaaatactgactggcggttctcacaggctcagcgtcccggtacaagtggtagtcagaatggagatgacaccggcacctggcccaataatcagtttgataccgagatgctgcaggcaatgatcctcgcgtctgcgagcgaagccgccgacggttccagcaccctgggaggcggcgccggcaccatgggtctgagcgcaagatatggccctcagttcacactgcaacacgtacccgactatagacaaaatgtctacatccccggctccaacgcaaccctgacaaatgccgccggaaagagggacggcaaagcccctgccggaggaaatgggaataagaaaaaaagtggtaaaaaggagaaaaagtag

SEQ ID NO: 201950 - DNA, 2799 bp, synthetic construct
  misc_feature 1..2799: note = Description of Artificial Sequence: Synthetic coding sequence
  source 1..2799: mol_type = other DNA
atggccgccccccagagccggccccggcggggcgagctgatcctgctctgcgccctactagggacattgtgggaaattgggagggggcagattaggtatagtgtacccgaggagactgacaaaggcagttttgtgggcaatatctccaaggatctaggactagaccctcgcaaactggcgaagcatggagtgaggattgttagccgggggcgcacccaactgttcgcgctcaatcccagatccgggtctctgatcacagcggggcggatcgatcgggaggagctgtgtgcgcagagtccacgatgcctgataaatataaacacactagttgaagataagggaaagctgttcggcgtcgagattgagatcatcgatatcaatgataataatcccaagtttcaggtcgaagatctggaggttaagataaatgagatagcagttccaggggctcgctatccattgcccgaggctgttgatccagacgtgggcgtcaattccctgcagtcctatcagctgtctccaaaccaccacttttcgctcgacgtgcagacgggcgacaacggtgccattaatcccgagctggtgctggagagggcgctggatagagaagaagaagctgctcatcatctggttttaaccgcatccgatggtggaaaacctccccgctcctcaaccgtgcgaatccatgtcactgtccttgacaccaatgacaacgctcccgtctttccccacccgatttatcgcgttaaagtcctcgagaatatgcctcctggaaccaggctgctgaccgtcaccgcttccgacccagacgaggggatcaacgggaaggtggcttacaagttcagaaagatcaacgagaagcagacacctctgttccagcttaatgagaataccggcgaaatctccatcgctaaatctcttgactacgaggagtgcagcttctacgagatggagatacaagcggaagacgtgggggccctgctcggcagaactaaactcctgatctcggtggaagacgtcaacgataaccgacccgaggttatcatcacgagcttgttttctccagttctcgaaaactctttgcccggaacagttatcgcttttctgtccgtccatgatcaggactctggcaagaatggacaggtggtctgctacactcgcgacaatcttccttttaagctcgaaaagtcaattgggaactactacaggctggtaacacggaagtacctcgatcgggagaacgtgagcatctacaatatcaccgtgatggctagtgacctcggcacacccccattatccactgaaacgcaaatcgcactgcatgttgcagacattaacgataaccccccaacctttccccacgccagttacagtgcctacatccttgagaataacttgcgaggcgcctctattttcagcctgactgcgcatgatcctgactctcaggaaaatgcccaggtcacatactctgtaaccgaggacactctgcaaggggcaccattaagctcctacatctctatcaatagcgatacgggtgtactatacgccctgcagagttttgattacgaacagattagggacctgcagcttctggtcaccgccagcgattcgggtgatcctcccctgtctagcaacatgtcgctcagcctcttcgtccttgaccaaaacgacaacgcgcccgagatcctgtatccagctcttcctaccgatggcagcaccggcgttgagctcgccccacggtccgccgaacgcgggtacctcgtgaccaaggttgttgctgtggatcgggactccggtcagaatgcatggctgagctacagacttctgaaggccagcgaaccggggctattttccgtcggcctacatacgggggaggtacgcactgcccgggccctcctggacagggatgctctcaagcagagcctggtggtcgccgtccaggatcacggtcagcctccgctgtctgcaaccgttaccctaaccgttgccgtggcagactcaatccccgaagtgctaactgaactcgggagcctcaaaccctcggttgaccctaacgattctagtctgacgctatacctggtcgtggctgtggcagcgatatcctgtgtctttctggcgttcgttgcagttctgttggggttgcgcctccgcaggtggcacaagtcacggctcttgcaagattctggcgggcgtctcgttggcgtcccagcttcccactttgtgggggtcgaagaggtccaggcattccttcaaacctactcacaggaggtctcacttacagccgacagtcgcaagagccatctgattttcccacagccgaattacgcagatatgctgatctcacaggaaggatgcgagaagaatgatagtctgctgacttcagtggattttcacgagtacaaaaacgaggccgatcatggacagcaggcccccccgaataccgactggagattcagccaggctcagcgacctggaacaagtggcagccagaacggtgacgacacgggaacatggccgaataatcagtttgacaccgagatgctgcaggcgatgatcctggctagtgcgtccgaggcagcggacggttcgtccaccctagggggaggggctggaaccatgggattatccgctcgctatggcccccagttcactctgcagcatgttcccgattatcgtcaaaatgtgtatattccaggcagcaatgcaacactgaccaacgcggcagggaagcgggatggaaaggcccccgcggggggcaacggaaacaaaaagaagtctggaaagaaggagaaaaaatag

SEQ ID NO: 201951 - DNA, 2784 bp, synthetic construct
  misc_feature 1..2784: note = Description of Artificial Sequence: Synthetic coding sequence
  source 1..2784: mol_type = other DNA
atgcagcgggcccgggaggccgagatgatgaagagccaggtgctgttcccttttttgctttcccttttctgcggagccattagccagcaaatccggtataccatccccgaggaactggcgaatggctcacgtgtaggaaagcttgcaaaggacctggggctgagcgtgagggaactcccaacacgtaagcttagggtttcggcggaggactattttaatgtctcgctggaatccggtgaccttttggtgaacgggaggattgatagggagaagatctgcggacgtaaactggaatgtgcactcgaatttgaaaccgtggcggagaacccaatgaatgtgttccacgtggtcgtagtgatccaggacatcaacgataacgcaccgcggtttgtggccaaaggaattgatttggaaatttgcgagagtgcgcttcccggggtcaaattttccctggactctgcccaggacgcggacgtcgagggaaattcgttgaaactgtatacaatcaaccctaaccaatacttcagtcttagcaccaaggagtcccccgacgggagtaaataccccgtgttattactagagaagcccctcgatcgggagcaccagtctagtcatcgcttgatcttgaccgcaatggacgggggcgatcctcctctaagtgggactacccacatctggatccgcgtgacagacgccaacgataacgcccccgtattttctcaggaagtctatagggtgtctctgcaggagaatgtgccctgggggacaagcgtgctgcgagtcatggccacggaccaagatgagggcatcaatgctgagataacttacgcatttctcaattcaccgatttccacatcactgttcaacctcaatcctaataccggcgatatcacaacaaatggtacgcttgatttcgaggagaccagcagatatgtactgtctgtggaggcaaaagatggcggggtccacactgctcattgcaatgtgcagatcgagattgtagatgagaacgataacgcgccagaagtaacttttatgagtttctccaaccagataccagaggactccgacctgggcacagtgatcgccttgattaaggtgcgcgataaggacagcggccaaaacggcatggtcacctgctatacccaggaggaagtcccattcaagctcgaaagtaccagcaaaaactattataagctcgtcatcgcaggagccctcaaccgggagcagaccgctgactacaacgtgactatcatcgccactgacaaaggtaagcctgccctgtcttctcgtaccagtatcacattacatattagcgacattaatgacaacgcgcccgtcttccaccaggcatcatacgtcgttcatgtgtctgaaaataaccctcctggcgcttccattgcacaggtttccgcttccgatccggacctggggcctaatggccgagtgtcttattccattctggcctcagacttagagccaagggagctgctgtcctacgtgagcgttagcccgcagtctggagttgtgtttgcacagagagcttttgaccatgagcagctccgcgcctttgagttaacactgcaagcacgggatcagggatctccagctctgagcgccaacgtctcactccgggtacttgtgggagatcttaatgataacgccccccgcgtcctgtaccccgctttgggcccggacgggtcggccctcttcgacatggtgcctcgcgccgccgaaccaggatacttggttacgaaagtggtggctgtagatgccgactccgggcacaatgcatggttaagttatcacgtgctgcaggcctctgagcccggcctgttcagtctcggtctgcgaacaggggaagtgagaacagcaagagccctaggcgatcgggatgcagcccgccagcgcctgctggtggcagttcgagatggaggacagccacccctcagtgcaacggctacgcttcatttaatattcgctgattcactgcaggaagtactgccggatctttccgaccggcccgaaccctctgacccacagactgagcttcaattctacctagttgtggccctggcacttatttcagtcctgtttctcctcgctgtgattctggctattgcactacggctgcgtcgtagcagctcgctcgataccgaaggatgcttccagaccgggttgtgcagcaagtctggccccggtgtacccccaaatcatagtgaggggactctaccctattcttataatctatgtatcgcctctcatagcgctaagaccgaatttaattccttaaacctaacaccagagatggctccacctcaggacctcctctgcgatgatcccagtatggtggtgtgcgcctctaacgaagatcacaagatcgcatatgatccttctctttcatcccatcaagcccctccaaacacagactggcgattttcccaggcccagcgtcctggaactagtggatcccagaacggggatgacaccgggacgtggcccaacaaccagtttgatacagagatgcttcaagccatgattctcgccagtgccagtgaggcggctgacggctcatcgacactagggggcggggccggaacaatgggactttcagctcgctatggcccccagttcacccttcaacacgttcccgattacagacagaacgtatacatccctggcagcaacgccacgcttaccaatgccgctgggaaacgggacggaaaggcccccgccggagggaacgggaacaaaaagaaatctggaaaaaaagaaaagaagtag

SEQ ID NO: 201952 - DNA, 2796 bp, synthetic construct
  misc_feature 1..2796: note = Description of Artificial Sequence: Synthetic coding sequence
  source 1..2796: mol_type = other DNA
atgaaggccagcagcggccggtgcggcctggtgcggtggctgcaggtcttgctgccttttctcctttcattgttccctggtgcactccccgtgcagattcgttactccatacccgaggagctcgcaaagaactccgtggtggggaacctcgctaaagaccttggcttatccgttcgggacctgccagcgcgcaaattacgggtgtcagcagagaaggagtacttcactgtcaatcctgaatctggagacctcttagtttctgatagaattgatcgcgaacagatatgtggaaagcagcctttatgcgtgctggacttcgatactgtcgccgaaaatccccttaatattttttacatagcggtgattgtacaagacatcaacgacaacacccctctctttaaacagaccaagattaaccttaaaattggcgagagcaccaaaccagggaccacgttccctctcgacccggccctggactctgacgtcgggcctaattccctgcaaagatatcatctgaacgacaacgaatactttgatctggccgagaaacagacccccgatggcagaaagtatcccgaattaattttgaaacattcgctcgatcgcgaggagcacagtttgcaccagcttgtgctaacagcagttgatggtggagatcctccccagagcggcacaactcagattcggattaaagttaccgacgctaacgacaatccacctgttttttcccaggatgtctacagagtcactcttcgcgaggatgttccgccaggcttttttgtgctgcaggtcacagccactgaccgcgatgaagggatcaacgcggagattacctacagcttccataatgtggacgaacaggtgaagcattttttcaacctgaacgaaaagacaggcgagattactaccaaagacgaccttgactttgaaattgcatcctcctatactctgagcatcgaggctaaggaccccggtgaccttgctgcccattgctccattcaggttgagattcttgacgataacgactgtgcacctgaggtaattgtgacctcagtatccaccccattgccggaggatagtcccccaggtaccgttatcgctctgatcaagacgagagacagggatagcggagagaacggtgaagtttattgtcaagtgctcggcaacgctaaatttatcttaaagtcatcatctaagaattactacaagttggtgactgatggtgcactggacagagaggagataccagagtataatttgactatcacagcgactgatggcgggaagccaccactgagcagcagcatcattgtgacactgcacatttctgatgtaaacgataacgcaccagtgtttcagcaaaccagctacatggttcatgtagcggagaacaatccccctggcgcctcaattgcccaaatcagtgccagcgatccagatctcggtccatccggccaggtctcctatagtatagtcgcttctgatctgaagccgagagagattttgtcttacgtgtcagtctccgcccagtcgggtgtggtcttcgcacagcgggctttcgatcacgagcaactccgggccttcgagctgactctgcaagcccgtgaccagggctcccctgccctgtccgctaatgtgtcattgagagtgctggtcggggacctgaacgataacgccccccgcgtgctgtatccagctttagggccggacggatccgcactgtttgatatggtccctcgagcagccgaacctggttatctggtgacaaaggtagttgcagttgacgccgacagtggacacaatgcctggttatcctatcacgtactccaggcttctgagccaggcctgttcagtctgggactgcgaaccggagaggtgcgtactgctcgcgcccttggggaccgtgatgccgcgcggcagcggctactggtggccgttagagatggcggccagccgccgctttcagctaccgcgaccctgcatttgatctttgccgactctctgcaggaggtactacctgacctctctgaccgccgtgaacccagtgatccccaggccaagctgcagttttacctagtggttgccctagcattgattagtgtgctgttttttttggcagttatcctcgccatctccctcaggctcagacttagctcacgtagcgacgcctgggattgttttcagccggggctctccagtaagcccgggcccggtgtcttgcccaattattcagagggtactctcccctacagctataacctatgtgtggcatcccaatcagctaaaacagaatttaacttcctgaacattacacctgaattggtgccggcccaggacctagtgtgcgacaacgccagctgggaacagaacaccaaccacggagctgccggagtcccatttgcctctgacacaatcctgaagcaggcccctcctaatacagactggcggttctcccaagcccaacggcctggcacgagtgggagccagaatggagatgacactggcacatggccaaacaatcagtttgatacagaaatgctgcaggcaatgattctggccagtgcatccgaggctgcggacggctcttcaactctcggtggcggggcggggaccatggggctaagtgcacggtatggaccgcaattcacactgcagcacgttccggactacagacagaacgtatatatccccgggtccaacgcgaccttaacaaacgcggcagggaagagagacggcaaagctccagcaggcggaaatggtaacaagaagaagtctggaaagaaagagaaaaaatag

SEQ ID NO: 201953 - DNA, 2772 bp, synthetic construct
  misc_feature 1..2772: note = Description of Artificial Sequence: Synthetic coding sequence
  source 1..2772: mol_type = other DNA
atgggcagcggcgccggcgagctgggccgggccgagcggctgcccgtgctcttcctatttctgctgtccctattctgccctgctttgtgtgagcaaatacgctatcgcatacccgaggaaatgccgaagggctccgtcgtgggaaatttggcgaccgatttgggttttagcgtgcaagaactgccgactaggaaacttcgtgtatcatccgaaaagccatacttcacggttagcgccgaaagtggagaacttctggtctcttctagattggatagagaagagatttgcgggaaaaagcccgcctgcgccctggagttcgaggccgtagctgaaaatccgctgaacttttaccacgttaatgtggaaatcgaagacattaatgaccacacgcctaaattcacccaaaatagcttcgagttgcagatctccgaatctgcccagcctgggactaggttcatccttggttctgcacacgatgcggacattggaagcaacacactgcagaattatcagctaagcccatcggaccatttctctctcattaacaaggagaaaagtgatgggagcaagtaccccgagatggtccttaaaaccccgttggaccgtgagaaacagaagtcctaccacctgacattgactgccctggatttcggggcgccaccactgtcttccactgcccagattcacgttcttgtcactgatgctaacgataatgctccggtgttcagtcaggacgtatacagggtgtccctctctgagaacgtgtatcctggaacaaccgtactccaggtaaccgccaccgaccaggatgagggcgtgaacgcggagattaccttttcgttcagcgaggccagtcaaattacacagttcgatctcaactcgaatactggtgagattacggtgctgaataccctcgactttgaagaagtcaaagagtatagcattgtgttggaagccagggatggaggaggtatgatcgcacagtgcaccgtcgaggtggaggtgatcgatgagaacgataacgcccctgaagttattttccagtccctccctaatcttattatggaagacgctgaactgggaacacacatcgcattactgaaggtgagggataaggacagcagacacaatggtgaggtgacatgtaaactggaaggtgatgtaccatttaagatccttacttcatctcgtaacacatataaattggtgaccgacgccgtgctcgaccgtgagcagaatcccgagtataatataacagtgacagccaccgatcgtggcaagccaccacttagttccagctcctcaatcactctccatataggagacgtcaatgataacgcgcctgttttctctcagtcttcatacattgttcacgtggctgagaacaatcctcccggcgcttcaatttcgcaggttcgggccagtgacccggaccttggtccgaacggacaggttagctactgtattatggcgtccgacctggagcaaagagagctgtcatcttacgtgagcatttccgccgaatcaggcgtcgtattcgcccagcgagcgtttgatcacgagcagttgcgggccttcgaacttactctgcaggcacgcgaccagggctctccagcgctatcagccaatgtgtcactgcgagtgctggtagacgatagaaatgataacgcgcccagggtgctgtaccctgcgctggggcccgatggttcggcattattcgacatggtgcctcacgcggccgagcccggatatttggtgacaaaggtagtagcagtcgacgctgacagcggacataatgcatggctgagctatcacgtattacaggcctctgagcctggcttgttcagcctcggcctccggacaggagaggtgagaacagcacgggccctcggcgaccgggacgccgtgaggcagaggctgctggtcgccgttcgggatggcggacagccccctctgtccgccactgctactttacacctggtctttgctgatagcctgcaagaggtgctgcccgatatcaccgacaggcccgacccatctgatttacaggcggaattacagttttatctggttgtggccctggccctgattagtgtcttgttcctcgtggctatgatcttggcgatagctctgcgactgcggcgcagcagctccccagccagttggtcgtgctttcagcccggcctgtgcgtgaaatccgaaagcgttgttcctcccaattattcggagggcacgctcccgtatagttataatctctgcgtggcgcataccgggaaaaccgaattcaacttcctaaagtgctcagagcagctaagcagcggccaagatatactgtgcggcgactcttcgggggcactcttcccattgtgcaattctagtgaactaacttcacatcagcaggctccaccaaacactgattggcgtttttcccaggcacagcgcccagggacgagtggctcgcagaacggagacgatacaggaacgtggcctaacaatcaattcgataccgagatgttacaagcaatgatactcgcttccgccagtgaagcagcagacggcagcagtacacttggcggtggtgcagggacaatgggcttaagcgcccggtatggacctcagttcactctgcaacatgtgccagactaccgacagaatgtctatatccccggctcaaacgccacattaacgaatgcggcaggcaaaagagatgggaaggcaccagccggagggaatggaaataagaaaaaatccgggaaaaaagaaaagaagtag

SEQ ID NO: 201954 - DNA, 2793 bp, synthetic construct
  misc_feature 1..2793: note = Description of Artificial Sequence: Synthetic coding sequence
  source 1..2793: mol_type = other DNA
atgggcggcagctgcgcccagcggcggcgggccggcccccggcaggtgttgtttcctctccttctgccactgttttatcccacactgtctgaacccatccggtacagtatccccgaggagcttgctaaggggtctgtggtaggcaacctggccaaagatcttggactgtcagtactggatgtttctgctagaaagctgagagtaagcgcagaaaagctgcattttagcgtagatgcagagtcaggagatttgctagtcaaaaatcgtatcgatcgcgagcagatctgcaaggaaagaagaaggtgcgagctacagttggaggccgttgtggagaaccctcttaacatttttcatgtaattgttgtgatcgaagatgtaaatgaccacgcccctcagtttgacaagaaggagatccatcttgagattttcgagagtgcctcagctggaactcgtctgtccctggaccctgccacagatcccgatattaacatcaattccatcaaagactacaagataaattcaaatccctatttcagcttaatggtgagggtgaatagtgatggaggaaaataccccgagctgtccttagagaagctgctggaccgcgaggaacagcgatcccacagtttaatccttacggctttggacggaggcgacccaccacggagcgccacagcccatatcgagatctccgtcaaggacacgaacgataaccctcccgtgttttcacgcgacgaatataggatttccctctccgagaacctgcctcccggtagtccagttctccaggtaaccgctacggaccaggacgaaggagtgaacgcggaaatcaactactacttccggagcactgctcagtccaccaagcacatgttctctctcgatgagaagactggcatgattaagaacaatcaaagctttgacttcgaagatgttgagcggtatacaatggaagtggaggcgaaggacggaggggggctgtcaactcagtgcaaagttatcattgaaatcctggatgagaacgataactcacccgagatcatcattacttccctctctgaccagatcctggagaactccccccctgggatggttgtcgccctgtttaagactcgcgatctagatttcggcgggaatggtgaagtgcggtgtaacatcgagacggatatcccgttcaaaatatattcaagctcaaacaattactataagctagtcactgacggagctctggatagggagcagaccccagagtacaatgtcacaatagtggccaccgatagaggtaaaccccccctctcatcctcacgttccatcactctctatgtagctgacatcaacgataacgctcccgttttcgaccagaccagttacgtggttcatgtggcagaaaacaacccacccggggcctctatcgcacaggtgtccgccagtgaccctgacctgggcttgaatggacacatctcttacagcatcgtagcaagtgacttagagccactggccgtctcaagctatgtatcagtatcggctcagtccggggtcgtatttgcccaaagggctttcgatcacgagcagctgcgcgctttcgcactcacattgcaagctcgcgatcacggttctcctaccctgtctgctaatgtgagccttagggttcttgtgggggatcggaacgacaatgcacctcgtgttctgtatcctgcgctcggccccgacgggtcagccttctttgatatggtccctcgctccgcagagcccgggtacttagtaacaaaggtcgttgccgtagacgccgatagcggccacaatgcctggctttcatatcatgtcttgcaggcctctgaaccgggcctgttttccctcgggctcagaaccggcgaagtgagaacagcccgggctctcggggatagagatgctgcccgacagcggctgcttgttgccgtccgtgacgggggccaaccaccgctgagcgcaactgccacgcttcacctggtgtttgccgataacctccaggaaattctgcccgatctctcagaccgccctgtattgtcagatccccaagcggagctgcagttttacttggtagttgccctggcgcttatctccgtgctattcttgttggctgtgatccttgccatcgcccttaggttacgaagatcactgtctcctgccacttgggattgtttccaccccggtctctgtgtgaagtcgggtcctgtcgtaccacctaactacagcgagggcacgttgccttactcttataacctgtgcattgcccataccgggacaaaggaattcaacttcctaaaatgcagcgtgcccctccacagcaatgaggacatggtttgttccgtgtcacccggagctctgatccctccacacggcggagaggatctcacatcccaccccgaaaccctgacttcacaagccccccctaatacagattggcgtttctctcaggcacagagaccaggaacttcgggtagccaaaatggggatgacaccggaacgtggcccaataaccaatttgatacggaaatgcttcaggccatgatacttgcttcggcctcggaagcagctgacggatcctcaaccctaggggggggggctgggaccatggggctttccgccaggtatggtccacagtttaccctacagcatgtgcctgactatagacagaacgtgtacatccctgggtcaaacgccactctgaccaacgcggcaggaaagagggacgggaaggcacctgctggaggcaacggaaacaaaaagaagtctgggaaaaaagaaaaaaaatag

SEQ ID NO: 201955 - DNA, 2790 bp, synthetic construct
  misc_feature 1..2790: note = Description of Artificial Sequence: Synthetic coding sequence
  source 1..2790: mol_type = other DNA
atgggcggcagctgcgcccagcggcggcgggccggcccccggcaggtgctgttccctttgctgttgcctctgttctacccgaccctgtgcgaacccattcggtacagcatccctgaagagttggccaaagggtctgttgtgggaaaccttgctaaggacctggggctctctgttttagacgtaagcgctcgcgaactgcgcgtaagcgcggagaaactgcattttagcgtggacgcccagtccggagacctgctggtcaaggataggatcgacagggaacaaatttgcaaagagagacgaaggtgcgaactccaattagaggccgttgttgagaacccgctgaacatcttccatgtgattgtcgtaatcgaggacgtcaatgatcatgctccacagttccggaaggacgaaattaacctcgaaatcagcgaatccgtttcactcggaatgggtaccatcttggagagcgccgaggaccctgatatctccatgaactcgctgagtaagtaccaactgagtcccaatgagtatttcagccttgttgagaaggataatcctgatggtgggaagtatccagaactggtgctgcagaagaccctggacagagagactcagtctgcgcatcatctcgtactgaccgcactggatggcggcgatccaccccggagcggcaccgcacagatacggattttggtgatcgatgcaaatgacaacccacctgtttttagccaagacgtttatagggtcagtcttagggaagacgtaccacccgggaccagcatcctgagagttaaggctaccgaccaggacgagggaattaatagcgagattacctatagtttttttggcgtcgcagacaaagcccagcatgttttttcgcttgattatacaacagggaacatcctgacccagcagcctctggactttgaagaagtggaacgctacaccattaacattgaggccaaggatcgtggctccctttccacaaggtgtaaagtgattgtggaggtcgttgacgagaatgataattctccagagatcatcatcaccagcttgagtgaccagataatggaggattctcctccaggcgttgtcgtcgcgttgtttaaaacacgtgaccaggacagcggtgaaaacggcgaggtgaggtgctctctctctagaggagtgccctttaaaattcattccagctcaaacaattattacaaactggtcactgatgaggcactggaccgcgagcaaacacccgagtacaatgtaactattgccgccaccgatcggggcaaaccaccgctttccagttctaaaaccatcacgctgcatatcactgatgtcaatgataatgcaccagtgtttggccagagcgcttatctggtgcatgtcccagaaaataatcagcccggcgcatcgatcgcccaggtatctgctagcgatccagatttcggcctgaatggacgggtctcttatagtcttatcgctagcgatcttgagagccggactctttcaagctacgtgagtgtttcagcccagtccggcgtggtttttgcccagcgagcctttgatcatgagcagctacgtacatttgagctgaccttgcaggctcgagaccaaggctcacccgctctgtccgccaacgttagtctgcgagtgctcgttggcgatcggaacgataacgcacctagggttttgtacccagctctggggcccgatggctcagcgctgtttgataccgtgcctcgggctgcgcagccggggtacttggtgaccaaagtagttgcagtagacgcagattctggacacaacgcttggctgagttaccacgtagttcaggcaagcgagcctggcctcttctctctgggactcagaacaggcgaagtgcgcatggtccgcgcacttggggacaaagacagcgttcggcaacgtcttctggttgctgtcagggatggtggccagccgcccttgtccgctaccgccacgctgcaccttgtgtttgcagatagcctgcaggaagtccttcccgacttttcggaccaccccacaccctccgactctcaggcagagatgcagttttatttggtggtagcactcgccctgatctcggtcctgttcttgctggctgtgatcttggcaattgctctgcgccttaggcagtccttttcacctaccgcaggcgactgcttcgagtcagttctgtgttccaaaagcgggccagtgggtccacccaactatagtgagggcaccctcccatatgcttacaatttctgtgtgcccggagaccagatgaatcccgagtttaatttttttacgagtgtggaccattgtccagccactcaagacaatctcaacaaggattctatgctgctggccagcatcttaacgccaagcgtggaagctgacaagaagatccttaagcagcaagctccacctaatacggactggcgattctctcaggcccagcggcccggtacatctgggtcacaaaatggtgacgacaccggcacttggcccaacaaccagtttgatacggagatgctccaagctatgatcctcgcctctgcctctgaagctgcagatggctccagcaccctgggtggaggcgcaggcacaatgggccttagtgcccgctatggacctcaatttaccctacagcacgttcctgactacaggcagaacgtgtacatccctggatctaacgccaccctcacgaatgccgcaggtaaaagggacgggaaagcaccggcgggcggcaacggcaataagaaaaagtcaggcaagaaggagaaaaagtag

SEQ ID NO: 201956 - DNA, 2805 bp, synthetic construct
  misc_feature 1..2805: note = Description of Artificial Sequence: Synthetic coding sequence
  source 1..2805: mol_type = other DNA
atggtgcccgaggcctggcggagcggcctggtgagcaccggccgggtcgtgggagttttgctcttacttggcgctctgaataaagcctccactgtaattcactacgaaatcccagaggaaagagagaagggttttgctgttggcaacgtagttgcgaacttaggactggacctcggttcactgtcagctcgaagatttcgcgtggtgtccggggcctctaggagattctttgaggtgaaccgcgagaccggagagatgtttgtaaacgaccgacttgatagagaggagctctgcggcaccttaccttcatgtaccgttacacttgaactggtcgttgagaaccccctcgaactgttctccgtggaggtggttattcaggacattaacgacaataaccccgctttccccactcaggagatgaagctggagatctctgaagctgttgcccccggcaccaggttccctcttgaatccgcacacgatcccgacgttggatccaacagcctgcagacttatgagctgtctagaaacgaatacttcgcgctgagagttcagacccgggaggactccaccaaatacgcggagctcgtcctggagcgcgctctcgaccgagaacgagagccttccctacagctggtgcttactgctctggatggtggcacgcctgcgctgagcgcctctcttccgatccacataaaggtcctggacgctaacgacaacgcacccgtttttaaccaatcactttacagggctagggttctcgaagacgccccatctggcacacgggtggtgcaagtgctggccactgacctcgatgaaggacctaatggagaaataatatactccttcggaagccacaaccgcgccggcgtgagacagttattcgccctagacctcgtgactggcatgctgaccataaagggaagattagactttgaggacaccaagctgcatgagatctatatccaagccaaagacaagggagctaatcccgagggagctcattgtaaagtccttgttgaagtcgtggacgtgaatgacaatgccccagagatcacagttacctctgtgtacagtccagtcccagaagacgctccccttggtaccgtcattgccctgctttcagtaacggatctcgacgcgggcgagaatggcctcgtaacctgcgaggttccgccggggctgccattctctctcacatcatcactaaaaaactacttcacgcttaagacgtctgctgaccttgatcgtgaaacggtgccagaatacaacctatccatcacagctagagatgcaggaacaccttcgctgtctgccctgacgattgtcagggtacaggtgagcgatatcaacgataatccccctcagagttcccagagctcctacgatgtgtatatagaagagaacaacctccccggggcaccaattctgaatttgtctgtgtgggatcccgatgcaccacagaatgctaggctgtcgttcttcttgctcgagcagggcgccgaaactggattggttggacgctatttcacaattaatagagataatggcatcgtctcttcccttgtgcctcttgactatgaggaccgacgagagtttgagctgactgcccacattagcgacggtggtacccctgtgctcgccaccaatatctcagtgaatatatttgtaaccgaccggaatgacaatgcgccccaggtgttgtatcccaggcctggggggtccagcgtggagatgctgcccaggggcacttccgctggacatctcgtgagccgggtcgtcggctgggacgcagacgccggccataacgcttggctctcatattctctgctcgggtcaccaaaccagtcattatttgcgattggccttcatactggccagatcagtacagcaaggccagtccaggataccgatagcccaagacagactttgacggtgctgatcaaagacaatggagaaccttccctgtctacaactgcgacactgacagtgtctgtgaccgaagactcccccgaagctcgtgcggagtttcctagcggcagtgcccctcgcgagcagaagaagaatctgacgttttatctactgctttcacttatactggtttccgtgggctttgtcgtaaccgtgtttggggtgataatctttaaggtgtacaagtggaagcagtccagagatctgtaccgtgccccggtgtccagcttatatcgtacgcccggcccgagtttacacgctgacgcagtcagggggggcctgatgtccccccacttgtatcatcaggtatacctgaccactgattctcgacgctctgatcctctactaaagaagccaggcgccgcctcaccactcgccagcagacagaatactcttcgctcctgtgaccccgtattttacagacaagtgctcggtgccgagtcagcaccacctggccaacaggcaccccctaacacggattggcgattttcacaagcccaacggcctggaacctcaggatcacagaacggagacgatacgggtacttggcccaacaaccagtttgatacagagatgctgcaggccatgatcctggcttccgcgtctgaagccgcagatgggagttcaaccctggggggaggcgccggcaccatgggtctgagtgcaagatatggtccgcagtttacgctccagcacgtccctgactatcgccagaatgtctatatccccggctccaacgccactctgacgaatgccgccggcaaaagagacgggaaagctcccgctggcgggaacggcaataagaagaagagcggcaagaaggaaaaaaagtag

SEQ ID NO: 201957 - DNA, 2817 bp, synthetic construct
  misc_feature 1..2817: note = Description of Artificial Sequence: Synthetic coding sequence
  source 1..2817: mol_type = other DNA
atgctgcggaaggtgcggagctggaccgagatctggcggtgggccactcttttgttcttgttctaccatctagggtacgtttgtggacaaatccgctaccccgtcccggaggagagtcaggaaggaacattcgtgggaaacgtggctcaggacttcttactagacacagattctctcagcgcacgaaggctgcaggttgcaggcgaggtgaaccagagacacttccgggttgaccttgactccggggccctattgatcaagaatccaatagaccgcgaggctctgtgcggcttgagcgccagctgcattgtgcccttggagttcgtgacagaagggccactcgagatgtatagagctgaggtggagatcgtcgacgtgaatgatcatgctccacgatttcccagacagcaactggatctagagatcggcgaggctgcaccacctggccagaggttccccctggaaaaagcccaggatgcagacgtgggatctaactcaatatccagttatcgactgagctccaacgaacacttcgccctggatgtgaagaagaggtcagacggctcattagtccccgagttacttttagaaaaacccttggatagggagaaacagtcggattaccgcttggtgctgactgcagtggacggcgggaacccgccgagaagcggcacggccgagctccgcgtgtctgtgctcgacgtgaacgacaatgccccagctttccaacaatcctcatatagaatctcagtactggagagcgctccggcgggtatggtcctgattcagttaaacgcatctgacccagacctgggaccttctggaaacgttaccttttacttttcaggtcacacccccgaccgagtcaggaatctattcagcctgcaccctacaactggaaaactgacgttgctaggccccctggatttcgagtccgagaactactacgagttcgatgtaagagccagagatggcggcagccctgctatggaacagcattgtagccttagggtcgatctgctggacgtgaacgacaacgcgccctacatcactgtgacaagcgaactcgggacattgcccgagagtgccgagcccgggacagtggtagccctcattagcgtacaagatcccgacagtgggagcaacggtgacgtctcgctgagaattcctgaccaccttcctttcgccctcaagtccgcttttcgcaaccagttttctttggtgacggccggcccccttgacagagaagctaagtccagctatgacatcatggtcactgcctccgatgctggcaacccacccctcagcactcaccggaccattttcttgaacattagtgatgtcaatgacaaccctcctagcttctttcagcgtagtcatgaggtgtttgttccagagaacaacaggccgggagaccttctctgttccctagccgcctctgaccctgactccgggctgaacgcactgatttcttactctctgctggaaccacggaatcgtgatgtgtcggcaagtagtttcatatctctaaatccgcagacaggcgcagtgcatgctactagatcttttgactacgagcaaacacagaccctgcagtttgaagtacaggcgcgcgacaggggcaatcctccgttatcatccacagtcaccgtacgcctgtttgttctcgatctcaacgataatgctccagccgtgctccgcccacgggcccggcctggctccctgtgccctcaggccttaccacccagcgtgggggccggacaccttatcacgaaggttacggccgtagacctggattctggatataatgcctgggtgagttaccagttactagaagctcctgatcccagtctctttgctgtgtcacgatacgcgggggaggtgaggaccgccgtacccattcccgccgaccttcccccacagaagttggtcatcgtggtgaaagactctgggagcccccctttgagtactagcgttactctgctagtgtccctggaagaggacacccaccccgttgtgcccgacctcagagagtcaagcgcgcctagagagggggaatccaggcttacattgtaccttgcagtgtcattggttgctatctgcttcgtcagcttcgggagcttcgtcgcattactgtctaagtgtttacgcggtgctgcctgcggcgtcacctgtttccctgctggcacctgtgcctgtctgactaggagcaggcgcagagagggactgcctccatccaatggtatcctgagaattcaattgggatccgacgatccaatcaagtttgttgacgtgggcggacactcacatgggtgcactcccctggccagcgcacccaccaggagtgatagcttcatgatggttaagagcccgtccgctccaatggccggggagccagtaaggccgtcctgtcctcctagcgatctgttatacggactcgagcaagcccctcccaataccgattggagatttagtcaggcccaaagaccaggcacttcaggctctcagaatggcgatgatacagggacttggcctaataatcagtttgacaccgagatgctccaagccatgatcctggcctctgcatctgaggcagccgatggcagcagcacgctaggcggtggcgcaggcactatgggcctgtccgcacgctatggtccacaattcacactgcaacatgtacccgactaccgacagaatgtgtatattcctggtagcaacgctacactgaccaatgctgctgggaagagggatggtaaagcccccgctggcggtaatggtaacaaaaaaaaatctggtaagaaagaaaagaaatag

SEQ ID NO: 201958 - DNA, 2835 bp, synthetic construct
  misc_feature 1..2835: note = Description of Artificial Sequence: Synthetic coding sequence
  source 1..2835: mol_type = other DNA
atgggccccaagaccctgccccagctggccggcaagtggcaggtgctctgcatgctgagtttgtgttgttggggttgggtgtctgggcagctgaggtactccgtggtagaagagtccgagcctggtacactggtgggcaatgtggcccaagatcttgggcttaaaatgaccgacttgctgagtagacgcctgcaattgggaagcgaggagaatggccgatacttttcactctcacttatgagcggggcactagctgtgaaccagaaaattgatagggagtccttatgcggtgcttcaactagctgccttcttcccgttcaagttgttacggagcatcctctggaactgattcgagttgaagtagagatcctggacctgaatgacaacagccctagttttgcgacaccagagcgtgaaatgcgcatatccgagtccgcggcttcgggggcacggttcccattggactccgcccaggaccctgacgtcggtactaacacagtgtccttctatacgttgtcaccgaattctcatttttcccttaatgtcaaaacactgaaagatgggaagccattccctgagctggtgctggaacagcagcttgacagagaggcccaggcaaggcatcagttggtcctaaccgctgttgatgggggaaccccagccaggtctggaacaacactaataagcgtaatcgtgctcgatattaacgataatgctcccacgttccagtctagtgtgctgcgggtgggaatccctgaaaacgctcccatcgggacattgctcctacgcctgaacgcaacagatcctgacgagggcacaaatggtcaactcgactactcttttggtgatcacacatcggaggccgtccggaatctgtttggacttgaccctagcagcggggctatacacgtactgggtccaatcgacttcgaagagagccgtttttatgaaattcacgcccgagcccgggaccagggccagcccgctatggaggggcattgcgtgatccaggtagatgtgggtgacgtgaacgataatgcacccgaagtgcttttagcctcgctggccaacccggtactggaatccacccccgtaggaacagtcgttgggttgttcaatgtgcgcgatagggatagtggacggaacggcgaagtgagtttggacatctcgccagatcttccatttcagatcaagccatctgagaatcactactccctgctgacgtcgcaacctctggaccgggaagctacctcacactatattatcgagttgctggcatccgacgctggctctccgtctctgcacaaacacttgactattagactgaatatttctgacgttaacgacaacgcgccacgattcaatcagcagctgtataccgcttacatcttagaaaataggcccccaggctccttactatgcactgtggctgcttccgaccccgatacaggcgacaacgccaggcttacatattccattgttgggaaccaggtgcagggcgcccctgcatctagctttgtgtacgtcaaccccgaggacggacgaatttttgcacaaaggacgtttgattacgaattgctgcagatgctccaaatcgtggttggcgtgagggatagtggctcaccaccacttcacgctaatacctcactgcacgtgtttgtgctggatgaaaatgacaatgcacccgcagtgctacaccctcggcccgactgggagcatagtgctccccagcgacttcctcgatccgccccaccaggctcactggttacaaaggtaaccgctgtcgacgccgacgcaggacacaatgcctggctgtcatatagcctgctgccacagagtactgctcccggtctgttcctggtgtccacccacactggagaagtgcggactgcgagagctctcctggaggacgattctgacacccagcaggtggtagtccttgtgagagacaatggtgacccctctctctcgtctacagcaacagtgctcctggttctagaagatgaggatcctgaagaaatgccgaagtcctcagatttcttgattcatcctccagagcgaagcgatttaaccctgtacctcatcgttgctctggctactgtttccctactcagcttagtgacctttacattcctgtctgccaagtgtttgcagggtaatgcagacggggacggggggggagggcaatgttgtcgcaggcaggactcaccatctccggatttttacaagcaatccagccctaatctgcaagtcagctcagatggcactttgaaatatatggaagtgacactgcgacccactgattctcagtcccattgttatcggacttgtttttccccagctagcgacggcagcgatttcaccttcctgcggcccttgtctgtgcagcagcctacagccctcgccctagagcccgatgcgattaggagccgttccaatactctgcgcgagcgatctcagcaggcgccgcccaacacagattggcgattctcacaagcccaaaggccgggcacctccggttctcagaacggagacgacacgggcacatggcctaataatcaattcgacaccgaaatgctccaagcaatgatcttggcttctgcctccgaggcagccgatgggtcatcgactttgggcggaggggccggcaccatggggcttagtgcccggtacggaccccaatttaccctccagcacgtgcccgactacaggcagaacgtctacatcccaggcagtaatgctaccttgacaaacgccgcagggaagagggatggaaaggctccggccggggggaacggcaacaagaagaaatcaggcaaaaaggagaaaaaatag

SEQ ID NO: 201959 - DNA, 5868 bp, synthetic construct
  misc_feature 1..5868: note = Description of Artificial Sequence: Synthetic coding sequence
  source 1..5868: mol_type = other DNA
atgttccggcagttctacctgtggacctgcctggccagcggcatcatcctagggtccttgtttgagatatgcctgggccaatatgacgatgactgtaagctagcgagaggaggccccccagctacaattgtggccattgacgaggagagcaggaatggtaccattctggtggataacatgctgattaagggaaccgcaggcggccctgatcctactattgaacttagcttaaaggataatgtagactactgggtgttgatggaccctgtgaagcagatgctgtttctgaattctacagggcgtgtccttgatagagacccccctatgaatatccactcaatcgtggtacaggtacagtgcatcaacaagaaagttgggaccatcatatatcacgaagtcagaatcgtcgtgagggacagaaatgacaactcacccacatttaaacacgagtcctattacgccactgtgaatgagctgactccagtcgggactacaattttcaccggatttagcggcgataatggcgctacagatatcgacgacgggccgaacggccagattgagtatgtgatccagtacaatccagatgaccctacatccaatgacacctttgagatccccctgatgcttacagggaacattgttctcaggaaacggctcaattatgaggataaaacgaggtattttgtgattatacaggccaacgatagggcccagaatttgaatgagcggcgtaccacaacaacgaccctcactgttgacgtattggatggggacgacctgggacctatgttcctcccctgcgtgctggttccgaatacgcgggattgtagacccctcacttaccaggctgccatacctgagctgcgcacaccggaggagctgaatccgatcattgtcactccccccattcaggctattgaccaggatcggaatatccagcctccctcagacaggccaggcatcttgtattctatcttagttggaactccagaagattatccaaggttctttcacatgcaccccaggacggccgaactgtcactcctggaaccagttaacagagattttcaccagaaattcgatttagtcatcaaagccgaacaagataatggacacccacttccagccttcgccggcctacacatagagatactggacgagaacaatcagagcccttatttcacaatgccatcttatcaggggtacatcttggagtcggctcctgtaggtgctacaatctccgatagtttaaacctcacctccccgctccgcattgtcgctctggataaagacatagaggatactaaggaccccgagttacacctgtttctcaatgactataccagcgtgttcaccgttacacaaaccggaatcactcgttaccttaccctattgcagcccgttgatcgcgaagagcagcagacttacaccttttccataacggccttcgacggcgtccaagagagtgagcctgttatcgtcaatatccaagtaatggatgccaacgacaacacgcccaccttcccagaaatctcatacgacgtttacgtctacaccgacatgcggccaggcgatagcgtcattcagttaaccgctgtggacgcagatgaaggaagcaacggtgaaatcacatatgaaattctggttggagctcagggtgattttatcatcaataaaacaacaggcctgatcactatcgcacccggtgttgagatgatcgtgggcagaacttatgcactgacggtgcaggcggcagataatgccccccccgcagaaaggagaaactccatttgtacagtctatatcgaggttctgcctccaaacaaccaatctccaccgcgcttccctcagctgatgtattcactggagatcagcgaagcaatgagagtgggggccgtgctcctcaatcttcaggccacggatagggagggggactcaattacatatgccattgagaatggtgatccccagagggtattcaacctgtcagaaacgacaggtatcttgacgctaggcaaagcactcgacagggagtcgacagacaggtatatactgatcattactgcttccgacggcaggcccgacgggaccagtaccgctacagtcaacatcgtggttacagacgtaaatgataatgcacctgtctttgacccgtaccttccgagaaacctgtcggtggtggaggaagaggccaatgcattcgtagggcaggtgaaggcaacggacccagacgcaggaattaatggccaggtgcactattccctcggtaactttaacaatctttttcggatcaccagcaacgggagcatatacacggctgtgaaactgaatcgagaagtgcgcgattattacgagctcgtagtcgtggcgaccgacggggccgtccatcccaggcattccactctgacgctcgccataaaggtgctggatattgacgacaattctcccgtattcacgaatagcacttacaccgtcctggtggaggaaaacctgcctgccggcaccaccatactgcagatcgaagcaaaggatgttgatctcggggccaacgtgtcctaccgcatcaggagtcctgaggttaaacactttttcgctctgcatccattcacaggcgaactgagtctcctgcgctctctagactacgaggcttttcctgatcaggaggcctccatcaccttcttagtggaggccttcgacatttatgggaccatgcccccaggcatagccaccgttactgttatcgtgaaggacatgaatgattacccaccagttttttcaaaacggatttacaaggggatggtggctcccgatgccgtaaagggtactcccattactaccgtgtatgccgaagacgcagatccacccgggctgcctgcatccagggtacggtaccgcgtggacgacgttcaatttccataccccgcatcaatcttcgaagtggaggaagactcaggcagggtcattactcgggtgaatttaaacgaagagccaaccacaatatttaaactggtggtggtggcttttgatgacggagagccggtgatgagctcgtctgcaactgtgaagatcctagttctgcacccaggtgagatcccaagatttactcaagaggaatatcgccctcctccagtatcagaacttgctactaaaggcaccatggtcggagttatttcagctgcggccattaaccagagtatcgtttactccatcgtgagcggaaacgaggaagacaccttcggcatcaacaacatcaccggcgtgatttatgtaaatggcccgctggactacgagacaagaactagctatgtgctgcgggtgcaggcagattcgctggaggtcgtgttagccaacctccgggtgccttctaaatcaaacactgcaaaggtgtatattgagatccaggatgaaaataaccatccaccagtgtttcagaaaaaattctatattggaggcgtgagtgaagacgcccgtatgttcacatctgtcctgcgtgtgaaagccaccgataaggacaccggaaactactccgtgatggcttacaggctgattattcctcctataaaggaaggaaaagaaggtttcgtggtggaaacatatacaggattaattaagaccgccatgctgttccataacatgcgtagatcctattttaaattccaggtgatcgccacggatgattacggcaaaggtctgtccggtaaagccgacgtgttagtttcggtggtgaaccagctggacatgcaagttatcgtatcgaacgtaccaccaactttagtggagaagaagatcgaggatttgaccgaaattctcgataggtacgtgcaggagcagattccgggcgctaaagtggtcgtggagtccattggcgcaagacgccacggcgatgcattttcattggaagattacacaaaatgtgacctgacagtctacgccatagacccccaaacaaatcgagctattgaccgcaacgagcttttcaaattcttggacggcaagctcctagacatcaacaaggactttcaaccttattatggagaggggggaagaatactggagattaggacgcccgaagcagtgacgtccattaagaaacgcggtgagtcactgggatataccgagggtgctctgttagctcttgctttcattatcattctctgttgtattccggccatcctcgtggttctggtgtcttatcggcaatttaaggtgcggcaagccgaatgtacaaagactgcacggattcaggctgcgctgccagccgccaagccagccgttcctgcacccgcccccgtggccgcgcccccgccacccccgccacctcctcccggcgcacacctctacgaggaattgggggattcatccatccttttcctcctgtaccacttccaacagtctcggggcaataattctgtcagcgaggatagaaaacaccaacaggttgtcatgccttttagctcgaacaccatcgaagcccacaagagtgcacatgtcgatgggagcctgaagtctaataagcttaagtccgctagaaaattcacctttctctctgacgaggatgatctctccgcacacaaccctctttataaagaaaatataagccaagtttctaccaattccgacatctcccaacgaacagatttcgtggaccctttctcccctaaaatccaggctaaatcgaaatccctacgtggccccagagaaaaaattcagcggctatggtcccagtctgttagcctccctcgtaggctgatgaggaaggtgcccaacaggccagagatcatcgacctccagcaatggcaggggactcggcagaaagctgaaaatgagaatactggcatctgcaccaacaaaagaggtagttcaaatcccctcctcactacagaagaagctaacctgaccgaaaaggaggaaataagacagggcgaaactttaatgattgaaggaaccgagcagttgaagtccctgagcagcgactcttccttctgtttcccgcgcccccactttagtttctctacgcttccaacagtgtccagaacagtggagctgaagagcgaacccaacgtgatctctagccctgccgagtgcagcctcgagctgagtccctctagaccctgcgtattacactcttctctttctcggagagagaccccaatatgcatgctgccaattgagactgagaggaatatattcgagaatttcgcacatccaccaaacataagcccgtctgcttgtccattgccgccgccgcccccgatcagtcccccttctcccccaccagcccccgctcctttggccccaccacccgacattagtccattttcactgttctgtcctcccccaagtccaccgtcaatcccgttacccctccccccaccaacgtttttccccttgagcgtgtcaaccagtggcccccctacacctccccttctgcccccatttccaaccccattacctccaccaccgccatccatcccttgtccaccgccaccttccgcctcattcttgtctactgaatgtgtgtgtattactggggtgaaatgtaccactaacctaatgcccgcagagaagataaaaagcagcatgactcaactttccactaccacagtttgcaagacagatccccagcgggaacctaaaggcattctcaggcatgtcaaaaacctggctgagctggagaaaagtgtcgcaaatatgtactcccaaatagagaaaaattatcttcgtaccaatgtgagtgaactccaaacaatgtgtccgtctgaggtgactaacatggaaattacatcagaacagaataaaggtagcctgaataacatcgtagaaggaaccgagaaacagagccatagccagtctacctcactgtag

SEQ ID NO: 201960 - DNA, 5874 bp, synthetic construct
  misc_feature 1..5874: note = Description of Artificial Sequence: Synthetic coding sequence
  source 1..5874: mol_type = other DNA
atgttccggcagttctacctgtggacctgcctggccagcggcatcatcttaggctccctctttgagatttgtttaggacagtacgatgatgattgcaagctggcccgcggagggccaccagccaccattgtggccattgatgaggagtcccgcaatggcacgatactagtggataatatgcttattaaggggaccgctggtggtcctgacccaacaatcgagctatccctaaaggacaacgtggattactgggtgctcatggatcccgtaaagcagatgttatttctgaactccaccggccgtgtcctggaccgggacccccccatgaatattcattccattgtggttcaagtgcagtgcattaacaaaaaagtgggcaccatcatttatcacgaagttagaattgtcgttagagaccgaaatgacaacagtccaacattcaagcacgagagctattatgccactgtgaacgagctgactcccgtaggcacaaccatttttaccggcttttccggcgacaacggggccacagatattgatgatgggccaaatgggcagatcgaatatgtgattcagtataacccagacgatccaacttcaaacgatacatttgaaataccactgatgctgaccgggaatatcgtgcttcgtaaaagactcaactatgaagataagacaagatacttcgttattattcaggccaacgatagagcgcagaaccttaacgagcgaaggaccactaccacaacactgaccgtggatgtgttggatggagatgacctgggccccatgtttttgccttgtgtgttggtccccaatacccgggattgcagaccccttacgtaccaggcggcaatccctgagctccgtactcccgaggaattgaatccgataattgtaacaccccctatacaggcaatagaccaagaccgaaatatccagccaccatcggaccggccagggatcctctacagcatactcgttggaacccccgaagattacccccggtttttccatatgcatccccgaaccgctgagttgtctctgttggaaccagtgaatcgtgactttcaccagaaattcgatttggtgatcaaggctgagcaagacaatggccatcccctgcctgccttcgctgggctgcatatcgagatcttagatgagaacaaccagtccccctactttactatgccatcctatcaggggtatatactcgagtctgcaccagtcggagcgactatatccgattccctgaatctgactagcccgctccgaattgtcgcactcgacaaggatatcgaagacacaaaggaccccgagctgcatctgtttctgaacgactatacaagcgtctttacagtcacccagaccggcatcactaggtatctgacccttctgcagcccgtcgatagagaggagcagcaaacttacaccttctctataaccgcattcgatggggtgcaagagtccgagcctgtgattgtaaatatccaggtcatggacgcgaacgacaacacaccaacatttccagagatctcctacgatgtctatgtctacaccgacatgaggccaggcgattccgtcatccaactgaccgcagtcgacgcagacgagggttcaaatggtgagatcacttatgaaatcctcgtgggagcccaaggagattttattattaataagaccaccggcctgatcacgatagcccccggtgtcgaaatgattgttggtcgaacttacgcactgacggttcaggcagcagacaatgcccctccagctgagagaagaaactctatctgcacagtctacattgaggtcctgccccccaacaatcagagccctccacgtttccctcaactgatgtattccttggagatctctgaagctatgcgagtcggtgctgtgcttcttaacctgcaggccacggacagggaaggtgacagcataacatatgctatagagaacggtgatccccagagagtatttaatctgtctgagaccacaggcatcctcaccctgggtaaagctttagacagggagtctactgaccggtatatactgataatcacagcctccgacgggcggcccgatggcacctctaccgcaactgttaacatcgttgttaccgatgtaaacgataatgctcccgttttcgatccttacctgcctaggaacctatctgtggtggaagaggaggctaacgcctttgttggccaggtgaaagccaccgacccagacgccggaattaatgggcaggtacactatagcctcgggaactttaacaatttgtttagaataaccagcaacggcagcatttacacagcagttaagctaaaccgcgaagtgagagactattatgagctggtcgtggtggcaacggacggcgccgtgcaccctagacactcaactctgacccttgcgatcaaagtgctggatatcgatgacaattctccagtatttacgaatagtacgtacaccgtgctcgtggaagaaaatttgccagcaggaaccaccattttgcaaatcgaggccaaggatgtggacctaggagcaaatgtctcctacagaatccgtagccctgaagtaaaacacttcttcgcccttcaccctttcacgggtgaattgtcgcttctgcgaagtctggattatgaggcttttccagaccaggaggcctccattaccttcctggtagaggctttcgatatttacgggacaatgccaccaggaatcgctactgtcaccgttatagtcaaagatatgaatgactaccctcctgtgttttccaaaagaatttataagggcatggtcgcccctgacgctgtgaagggaacacccattacgactgtttacgcagaggacgcagacccaccgggactgccagcttctagggtcaggtatagagtagacgacgtccaatttccctaccctgccagcatcttcgaagtggaggaggattctgggcgagtgatcacacgagttaaccttaatgaggaacctacaacaatcttcaaacttgtggttgtggcctttgacgatggagaacctgtgatgtcgtcatccgcaaccgtgaagatcttggttttacaccctggggagatccctcggttcacccaggaggagtaccgaccccccccggtgtccgaactggctactaaaggaacgatggtaggcgtcatctccgcggcggcaatcaaccaaagcattgtttacagcatagtaagcggaaatgaagaggatactttcggaattaacaacattacaggagttatctatgtcaacggccctcttgattacgaaacaagaacaagttacgttctgagggttcaggccgactcactcgaggtggtcttggccaaccttagagtcccaagcaaaagcaatacagccaaagtttatatagagattcaggatgagaataaccatcccccagtattccagaagaagttctatattggcggcgtgagcgaggatgcacgcatgttcaccagtgtgttgagggttaaggccacagacaaggacaccggcaattattccgtgatggcatatcgcctgattatcccccccatcaaggagggcaaagaaggtttcgtggtagaaacctataccgggctgattaagacagcaatgcttttccataacatgcggcgctcttactttaagtttcaagtcattgccacagacgattacggaaaaggtctctctggcaaggcagatgtgctggtcagtgttgtcaaccagctggatatgcaggttattgtttcaaatgtgccgcccaccctggttgagaagaaaatcgaagacttgactgagatcctggacaggtatgtgcaggaacagatccccggggctaaagtggtcgtggagtccattggcgctcggcgccacggggacgcctttagtcttgaggactacacaaagtgcgacctgacggtctacgcaatcgacccacagactaaccgcgcaatcgaccgtaacgagttgttcaagttcctggacggaaagttacttgacatcaacaaggactttcagccgtactatggagagggcggacggattttggaaatccgtactcctgaagcagttacctctatcaaaaaaaggggcgagagtctgggctacaccgagggagctcttttagccctcgccttcatcattattttgtgttgcattcccgcgatcttggtcgtgctggtgagctatagacagttcaaggtccgacaggcggaatgcaccaagacagccaggatccaggcggcactgcccgctgcaaaacccgccgtgcctgcacctgccccggtagcagctccaccccccccacccccaccccccccaggagcacacctgtacgaggagctcggcgattcttccatgcacaatttgttcctactctaccatttccagcagtctcgaggcaacaactccgtatccgaagacaggaagcatcaacaagtggtgatgcctttttcatccaacaccattgaggctcacaagagcgcgcatgtagatggatccttaaaatctaacaaactcaagtcagcaaggaagtttacattcctgagcgacgaggatgacctctctgcccacaatccactctataaggaaaacatttcacaggtctctaccaacagcgatattagccagcgtacggactttgtggatcctttttctcccaagatccaggccaagagcaaaagtctaaggggtccccgcgaaaagatccagaggttgtggtctcagtctgtgagcctgcccagacgtttgatgagaaaagtgcccaaccgccctgagattatcgatttgcagcagtggcaaggtaccagacagaaagcagagaacgaaaacactggcatctgcaccaacaaacgaggttcctccaaccccctgctcaccactgaggaagctaacctgaccgaaaaagaagaaatcaggcagggcgagaccctgatgatagaaggaaccgagcagctgaaatcactgtccagtgattcctccttttgttttcctagaccccacttcagcttttctaccctgccaaccgtatctcggaccgtggaactgaagtctgagcccaatgtgatttctagtccagccgaatgcagcctggagctttcaccctccaggccctgcgtgttgcattcatcgctgagtaggagagagacacctatctgtatgctgcccattgagaccgaacgaaacatcttcgaaaactttgctcacccccctaatatcagccctagtgcctgtccgctgcccccaccccccccgatctcacctccctctccacctcccgcaccagccccactagccccaccacccgatatcagcccattttcccttttctgtccacccccatctcccccatccatccccctccctctgccaccccccacatttttcccactgtcggtttcgacaagcggaccccctacacctcccttgctgccccctttcccaacgcccctgcccccccctccgccttcaataccctgtccaccccctcccagtgccagcttcctcagcacggagtgcgtgtgcattaccggcgtgaaatgtacaactaatctcatgcctgcggagaagatcaagagctctatgacccagctctctactaccacagtgtgcaagaccgaccctcagcgggagccgaagggcatcttgaggcacgtgaaaaacctggccgagcttgagaaatcagttgccaacatgtactcccagattgaaaagaactatttacggacaaacgtctcggagctgcagactatgtgtccatcagaggtcaccaatatggagatcacaagcgagcagaacaagggttctctgaacaatattgttgaagggaccgagaagcagtcacacagccagagcacctccctatag

SEQ ID NO: 201961 - DNA, 2886 bp, synthetic construct
  misc_feature 1..2886: note = Description of Artificial Sequence: Synthetic coding sequence
  source 1..2886: mol_type = other DNA
atgttccggcagttctacctgtggacctgcctggccagcggcatcatccttgggtccttgtttgaaatctgcctgggccaatatgatgatgattgcaagctcgccaggggaggccccccagccactatcgttgctatcgacgaggagagcaggaatggaacaatcctggtcgacaacatgctcattaaagggaccgccggcgggccagaccccactatagaactgagtctgaaggacaatgtcgattattgggttctaatggaccccgtgaaacaaatgctgttcctcaactccacgggcagggtgctcgatagagacccaccgatgaacatccatagtattgttgttcaggttcaatgtattaataagaaagtgggcacaataatttaccacgaggtgcggatagtcgttcgtgaccgtaacgataactcacctacctttaagcacgagtcatattacgccacagtgaatgagttaacacccgtgggtacgaccattttcaccgggttttccggtgacaatggggcgaccgacatagatgatggccccaacggacagattgaatacgttattcagtataatccagatgatcccacatcaaacgatacctttgaaattcctcttatgctgaccggcaacatagtgctcagaaaacgattgaattacgaggacaaaactaggtacttcgttattatccaggctaatgaccgggcacagaatctaaatgagcggcgaacgaccaccaccaccctgacggtggatgtgctggatggggacgacctcgggccaatgtttctcccatgcgtgctcgttcctaatacccgggactgtaggccccttacctaccaagcagccatccccgagctgcgcactccagaagagctaaatccaataatagtgacgccccccattcaggctatcgatcaagaccggaatatacaacctccttccgacaggcctggaattttatactccattctcgtaggtactccagaggactatccaaggtttttccacatgcaccctcgcacagccgagctatctctcctcgaacccgtgaatagagattttcaccagaagttcgatttggtcatcaaggccgagcaggataacggccacccactgccggctttcgccgggctacatatcgagatcctggatgagaataatcagagcccttactttaccatgccctcctaccaagggtacattctggagtcagcacctgtgggggccacgatctccgattcattgaacctgacctctcctcttagaatcgtggccctcgataaagacatagaagatacaaaagatcctgagctgcatctgttcctgaatgactatacgtccgtgtttactgtgacccaaaccggaattactaggtacctcactttactgcagcccgtggatagggaggagcaacagacctatacgttctctatcactgctttcgatggcgttcaggaatcagagccagttatcgtgaatattcaggtgatggatgctaacgacaatacaccaaccttccctgagatcagttacgatgtgtatgtgtatactgacatgcgacctggcgactccgtgattcagctcactgccgttgatgccgacgaagggtctaatggcgagatcacttacgaaatcctggtcggtgcacagggcgacttcatcatcaacaagacaacagggctgataacaatagcccctggtgttgagatgattgtcgggcggacgtatgccctgaccgtgcaggccgcagataacgctccacccgccgagcggagaaactcaatttgcactgtgtatatcgaagtgttgcccccgaataatcagtctccccctcggtttccccagctgatgtattcccttgagatctccgaggccatgcgcgtgggggcagtgttgctgaatttacaggctaccgatagggaaggtgacagcataacctacgctattgagaatggtgatcctcagcgggtcttcaacctgtctgaaaccacgggcatcctgaccctaggtaaggcattggacagggaatctacagaccgatatattctgattattacggcatcagatgggcgccccgatggtacctcgactgccacagtgaatatcgttgtgacagatgtgaatgataacgctccggtgttcgatccttacctgccaaggaacctgagtgtggtcgaagaggaagctaatgctttcgtgggacaggttaaggcaacagaccccgatgcaggcataaacggccaggttcactactcactcggtaattttaataacttattcaggattacctcgaatggatctatctacaccgccgtcaaactgaatagggaggttcgcgactattatgagctagttgtcgtagccactgacggagcagtgcacccgaggcacagtactctgacattagccattaaagtgttggatatagacgataacagccccgtcttcactaatagcacatatacagtgctggttgaagagaacctgccagctggcacaacgatccttcagattgaggctaaggatgtagatctgggcgccaacgtgtcctacagaatcaggtcgcctgaggtcaagcactttttcgcgctccacccatttaccggcgaactatctctgttgcggtctctggactacgaggcctttcctgatcaggaggcctctataacctttctggtagaggcattcgacatctatggaaccatgccccccggtatcgccactgtgaccgttatagttaaagatatgaatgattacccccccgtgttctcaaaacggatatataaagggatggtcgccccagacgcagtgaaaggaacccctatcaccacagtttatgctgaggatgccgacccccccgtttctcgcagacactag

SEQ ID NO: 201962 - DNA, 2430 bp, synthetic construct
  misc_feature 1..2430: note = Description of Artificial Sequence: Synthetic coding sequence
  source 1..2430: mol_type = other DNA
atgttccggcagttctacctgtggacctgcctggccagcggcatcatcttggggtcattatttgaaatctgcctgggacagtatgacgatgggactattttggtcgataatatgttaattaagggcacagccggcggacctgatccaaccattgagctgtccttgaaggacaacgtagattactgggttctcatggatccggtgaaacaaatgttgttcctcaatagcacaggtagggttcttgatcgtgatccgccaatgaacattcacagcatagtggtgcaggtccagtgcatcaataagaaggtgggcacaatcatttaccacgaggtgcggattgttgtgcgcgaccgcaacgataatagtccaacctttaaacacgagagttactacgcaacggtgaacgaactcacacccgtggggaccaccattttcactggtttctcaggagataatggggccactgatatcgacgacgggccaaacggtcagatcgagtatgtgatccaatataatcctgatgaccctacatcaaatgatactttcgagattccactaatgcttacaggaaacattgtactgcgtaagaggctaaactacgaagataaaacccgttacttcgtgattatccaggccaacgaccgcgctcaaaatctgaatgaacgcaggacaaccacaaccacattgacagtggatgtgttggacggcgacgatcttggccctatgttcctcccttgtgtattagtccctaatacacgcgactgtcgcccccttacctaccaggccgctatccctgaactccgaacaccagaggaactgaaccccatcatcgtcacacccccaatccaggccatagatcaagaccggaatattcaacctccaagcgatcgcccaggtatactttattccatcctcgttggaaccccagaggactacccacgcttcttccacatgcacccaagaactgcagagttatccttgctcgaacctgtcaatagagattttcaccagaaatttgatctggtgatcaaagcagagcaggacaatgggcaccctttgcctgcgttcgccgggctccatattgagatactggacgaaaataatcagagcccatactttactatgccatcataccaaggctatattctggagtcagctccagtcggcgctacaattagtgactccctcaatttgaccagccccctcagaattgtggctctggataaagatatcgaagacacgaaagacccagagttgcatctgttcctaaatgattacacctccgtgttcaccgtgacacaaaccggaataactagatatctgactctgctgcaacctgtagatcgggaagaacagcaaacatatacattctcaattacggcttttgatggggttcaggagtcagaaccagttatcgtgaatatccaggttatggatgctaacgataacacaccgacattccccgaaatcagttatgacgtctatgtctataccgatatgaggcccggagatagtgtaatccagctgacagccgtggacgccgatgaaggatcaaacggcgagattacctacgagattcttgtgggcgcccaaggagacttcattataaataaaaccaccggtctcatcactattgcacctggagttgaaatgattgtgggtagaacctatgctttaactgtacaggcggccgacaacgcgcctccagccgagaggagaaattctatatgtaccgtgtacatagaagtgctccctccaaataaccagagcccaccaagatttcctcagctgatgtacagcctggagattagcgaggccatgcgcgttggtgccgtcctcctgaacctgcaagctacggacagagagggcgatagtatcacttacgctatcgagaacggcgacccccagcgtgtctttaacctatctgaaacaaccggaatcctcacgctgggcaaggccctcgaccgggaatccacagacaggtacatactcatcatcaccgcttcagacgggagacctgacgggacctcaacggcgactgtgaacatcgtggtgacagacgtgaacgacaacgccccagtgtttgatccctatttgccacggaacctgagtgttgtggaagaggaggccaatgcctttgtgggccaggttaaactgagcaccacgacggtgtgtaagacagacccacagcgcgagccaaaggggatcttgcgccacgtcaagaatctggccgaattggaaaagtcggttgcaaatatgtatagccaaatagagaagaactaccttcggacaaacgtgagcgaactgcaaaccatgtgtccatcggaagttacaaatatggaaattacctcggagcaaaacaaggggtctttgaacaatatcgtggaaggaactgaaaagcagtcgcacagccaatctacctccctgtag

SEQ ID NO: 201963 - DNA, 5055 bp, synthetic construct
  misc_feature 1..5055: note = Description of Artificial Sequence: Synthetic coding sequence
  source 1..5055: mol_type = other DNA
atgttccggcagttctacctgtggacctgcctggccagcggcatcattctcggttcgctgtttgaaatctgtttgggccaatatgatgacgattgtaaactggctaggggcggccctccagccacaatagtggccattgacgaggagtcccgaaatgggacaatcctcgtcgataatatgctcatcaaaggtactgccgggggccccgatcccacaattgaactttccctgaaagacaatgtggattactgggtgttgatggacccagtgaagcagatgctgtttttaaactccactggtcgtgtgttagatcgcgatcccccaatgaatattcattccatagtcgtgcaagttcagtgcattaataaaaaagtgggtacaattatctaccatgaagtgcggattgttgtgagggaccggaacgataattccccaacattcaagcatgagtcttattacgcaaccgtcaacgaactcactcctgttggtacaaccatattcacaggcttttccggggacaacggagctactgacattgatgacggtccaaatggccagattgagtatgtgatccagtacaacccggacgacccaacatcgaatgatacgtttgagatcccgctgatgctgactgggaatatcgtactgcggaaacgcctcaactacgaggacaagactaggtatttcgtcatcatccaggccaatgatcgggctcagaacctcaacgagcgcagaacgacaacaactactctgacggtggatgtattagacggggatgacctgggacctatgtttctgccttgcgttcttgtgccaaacacacgcgactgcagacccctgacatatcaggcagcgatacctgagttaaggacgccagaggagctgaatcccattattgtgactcccccgattcaagctattgatcaggatagaaacattcaaccacctagtgaccgacccggtatactctactcaattctcgtgggaacgcctgaggattatccccgttttttccatatgcacccgcgtacagctgagctgtctttgttggagcccgtgaacagggactttcaccaaaaatttgacctggtgattaaggccgagcaggataacggacatcccctccctgcttttgcaggcctgcatattgaaatcctggacgagaacaatcaaagtccatactttactatgccttcttaccagggatatattttagagtccgcccccgtaggcgctacaatttccgattccctgaatctcacatcaccattgaggattgttgccctggataaagacatcgaagacgtcccacctagcggagttccaaccaaggatcccgaactgcacctattcctgaacgactatacatctgtatttaccgtgacgcagacaggtataacccgttacctgacgctactgcagcctgtagatcgggaagagcagcagacctatactttttcaatcaccgccttcgatggcgtacaggagagcgaacctgttatagtgaatatccaggtgatggatgcaaacgacaatacccccaccttccccgaaatctcttatgacgtctatgtatacacggatatgaggcctggggactctgtaattcaactcacagccgtggacgctgatgaaggatctaacggagagataacctatgaaatcctcgtaggggcacaaggagatttcattataaataagactacagggctcatcacgatcgctcccggagttgaaatgatcgtggggagaacctacgcactgaccgtgcaggctgccgacaatgcccctccagcagagcgcagaaactctatatgcaccgtgtacatcgaggtgcttccacccaataaccagtcgccccctaggttccctcagctgatgtatagcttggaaatatccgaagctatgcgcgtgggtgcagtcttactaaatcttcaagctactgatagggagggcgactctatcacttatgccatcgaaaacggcgatccacagagggtcttcaacctgagcgaaaccaccggaattctaacactgggcaaggcgctcgatcgggagagtactgatcgatacatcctgatcatcacagcatcagacggcaggcctgacggtacgtctacagctaccgtgaacattgttgtgaccgatgtaaatgacaatgccccagtatttgacccctacctgccgcggaacctttctgtggtggaagaagaagccaatgcattcgtgggacaggtgaaagctacagaccctgacgctggtataaacgggcaggtgcactacagtctcggcaactttaataatctgtttcgtatcaccagcaacggctcaatctataccgcagtaaaattaaaccgagaggtacgcgattactatgagcttgttgtggtggctacagacggcgccgtgcatccacggcactccaccctgacactggcaataaaggtgctggacattgacgacaactctcctgtgtttacaaactcgacctatacagtccttgtggaagagaatctgccagccgggaccactatactacagatcgaagctaaggacgtggacctcggtgccaatgtgtcataccggattcgatcacccgaagttaagcacttcttcgcccttcacccatttaccggcgaactgtcgctgctccgctcactcgattatgaggccttcccagatcaagaggcaagtataacgtttctggtggaggcctttgatatatatggaactatgccacctggcatcgctaccgtaaccgtcattgtgaaggatatgaacgactacccacccgtcttcagtaagcgtatttataaaggcatggtcgctcccgatgccgtcaaaggcaccccgattactactgtctatgcagaggatgctgatccgcccggtcttcccgccagcagagtccgctatcgggtagacgatgtgcagttcccctaccccgctagtatctttgaggttgaggaggacagcggccgagtaataacacgcgttaacctgaacgaagaaccaaccaccatattcaaactggtggtggtcgcttttgacgatggggaaccagtgatgtcctcgtctgctacagtgaagatactcgttctccaccccggagaaatccccagattcacccaagaggaataccgtccacctcctgtatcagagctggccactaaagggaccatggtgggggtaatttcagcagccgcgattaatcagtctattgtgtactccatcgtgtctggaaatgaagaagacacttttgggatcaataatattaccggtgtcatttacgttaatggcccactcgattacgagacgcgtactagctacgtactgagagtgcaggccgacagcctcgaggtagtattagctaatctgcgggtgccttcaaagtccaatacagctaaggtctatatcgagatccaggacgagaacaaccaccccccagtgtttcagaaaaagttctacatcggaggcgtgagtgaagacgcacggatgttcacatcagtattgcgggtgaaggctacggataaggacaccggcaactactctgtcatggcttaccgcctcataataccgcctatcaaggagggtaaggaaggtttcgtcgtcgagacgtataccgggctgattaagaccgctatgctgttccacaatatgaggagatcatattttaagtttcaagtgattgcgaccgatgactatggtaaaggcctaagcggcaaggcagacgttttggtctctgtggtaaaccagttggacatgcaggtgattgtgtcaaacgtaccaccaacacttgtcgagaaaaaaattgaagatctgacggagattcttgatagatatgtacaggaacagatcccgggcgccaaggtggtggtggagtcgatcggggcaagaagacacggggacgccttcagcctagaagattacactaaatgcgacctcacagtatacgccatcgacccacagacgaatcgcgcgatcgatcggaacgagctctttaaattcttggatggcaagctcttagatattaacaaggactttcagccctattatggtgagggagggcgtatcctggaaatccgcacaccagaggccgtgacttccatcaagaagagaggagaaagccttggatacactgaaggcgccctcctggccttagccttcattataatcttatgctgtatccccgctatcctggttgtattggtgtcctacaggcagtttaaggtgagacaagcagaatgtacaaagaccgctaggatccaggctgcattacctgccgctaaacctgcagtgccagctccagctcccgtagctgccccccctccgcctccacccccacctcccggcgcgcacctctatgaggaacttggagacagctcaatgcataaatatgagatgccccagtacggctcacgcagacgcctgctcccaccagctgggcaagaggaatacggggaggttgtgggcgaggccgaggaagaatatgaggaggaagagtgggcccgaaaaagaatgataaaactggtggttgatcgggagtacgagacgagttctactggagaggatagcgcccctgagtgccagcggaatagactgcatcacccatccatccacagcaatatcaacgggaacatctacatcgcgcaaaacggtagcgtggtgagaactaggcgcgcttgtttgacagataacttgaaggtcgcttctccagtgcgtctgggcgggccatttaaaaaacttgataagctcgccgtgacccacgaagagaacgtgcctttgaacaccctcagcaaggggccgtttagtaccgaaaaaatgaatgcgcggccaacactggtgaccttcgccccctgccctgtcggcaccgataacaccgctgtaaagcccctgcgcaaccgtctgaagtctactgtggaacaggaatcaatgatcgacagcaaaaacataaaggaagctcttgagttccactccgaccatacccaaagcgacgacgaagaactgtggatggggccatggaacaatctgcacatccccatgactaaactgtag

SEQ ID NO: 201964 - DNA, 5859 bp, synthetic construct
  misc_feature 1..5859: note = Description of Artificial Sequence: Synthetic coding sequence
  source 1..5859: mol_type = other DNA
atgttccggcagttctacctgtggacctgcctggccagcggcatcatcttaggatctttgtttgaaatttgcttgggccagtatgacgatgattgcaagctggctcggggcggacctcccgcaaccattgttgcaattgatgaagaaagcagaaacggcacaattttggttgataatatgctcatcaagggtacagccggcggccccgacccgactatcgagctgtcccttaaggacaacgttgactactgggtcttgatggacccagtgaagcaaatgttgttcctcaattctacaggaagagtgctggaccgcgacccccccatgaatatccactcgatcgtggttcaggtgcagtgcattaacaagaaagtcggaaccataatctatcacgaggtccgtatcgtggttagggacaggaacgacaattcccccacgttcaaacatgagtcctattacgctaccgtgaacgagttgacccccgtggggaccactatcttcactgggtttagcggcgacaatggagccacagacatagatgacgggcccaatggacaaatagaatatgtcattcagtataacccggacgaccctactagcaacgataccttcgagatccctttgatgttgacgggaaacatcgtcctccggaaacgattaaactacgaagataagacgcggtacttcgtgatcatccaggccaacgaccgggcccagaatcttaatgaaagacgaaccactacaaccacccttaccgtggacgttctggacggtgatgacctgggccctatgttcctgccctgtgttctggtccctaatacacgcgattgtagacccttaacataccaggccgcaatccccgaactgcgaactcctgaggaattgaatccgataatcgtgacgccaccgatccaggcaatcgaccaagaccgcaatatccagccaccctccgaccgccctggcatcctctatagcattctcgtagggacccctgaggactatccaagattcttccatatgcacccccgaactgccgagctttcgctgctcgaaccggtgaatcgcgacttccatcaaaagtttgacctggtaattaaagctgaacaggataacggccaccccctgcctgctttcgctggactgcatatagagatcttggacgagaataatcagtcaccgtatttcactatgcctagttaccagggttacattctggaaagtgctcccgttggggctaccataagcgatagtctgaaccttacgagcccgttaagaattgtagctctggataaggatatcgaggacaccaaagatccagaacttcatctgttccttaacgactatacttcagtgtttaccgtcacgcaaacaggcataactaggtatctcaccctgctacaacccgtggatagagaggagcagcagacatatacattctctattactgcattcgacggagtccaggaatcagagcccgttattgtaaatatccaggtgatggacgcaaatgacaatacacctacatttccagaaataagttatgatgtgtacgtctataccgacatgaggcctggagattccgtgatccaactaaccgcagtagacgctgatgaaggcagcaatggagaaattacatacgagatcctggtgggtgcccaaggcgatttcataatcaacaaaaccactggcctgattacaatcgcccctggggtggagatgatcgtgggtagaacgtacgcattaacggtgcaggccgcggataacgcacctcccgcagagcgccgaaacagtatctgcactgtgtatattgaagtgcttccacccaacaatcagagccccccccgattccctcagcttatgtacagcctcgaaatcagcgaagccatgcgagttggtgcagttctgttgaacctgcaggcaaccgatagggaaggtgactcaatcacatacgcgatcgagaacggggatccgcaaagagtgtttaatctgtccgaaacgaccggcattctcaccctagggaaagcccttgatcgggagtctaccgacaggtatattcttatcattacagccagcgatggccgccctgatgggacttctactgctaccgttaatattgtggtgacagatgtcaacgacaacgcgcctgttttcgacccctacttgcccaggaatctgagtgtggtagaagaggaggcgaacgcatttgtgggccaggtcaaagctaccgatcccgacgctggtatcaatggacaggtgcactattctctgggtaatttcaataatctattcagaatcaccagcaacggctccatctacaccgcagttaagttaaacagagaggtccgcgactattacgagttagtagtggtcgccacagacggtgctgtgcatcctcggcactcaaccctgaccctggcgatcaaggtgcttgacattgatgacaattcacccgtgtttacgaactccacctatactgtgttggtggaggagaacctacccgccggcactacgattttgcaaatcgaagccaaagacgtggacttgggcgctaatgtttcatataggattaggtccccagaggtgaaacatttctttgctctgcatccctttacaggagaattatccctgctaaggagtcttgactacgaagcatttcctgatcaggaggcaagtattactttcttagtggaggcgttcgatatctacggaacgatgccccctggaatcgcaaccgtgactgtcatcgtgaaagatatgaacgactacccaccagtcttttctaagcgcatttacaagggaatggttgcgccagacgccgtcaagggcacgcctataactacagtttacgccgaggacgctgatccgcctggactacctgccagtcgggtgcgataccgcgtcgatgacgtgcagttcccctaccccgcttccatctttgaagtagaagaggattctgggcgggtgattaccagagtgaacttgaacgaggagcctaccacaattttcaaattagtggtggtggcctttgacgacggagaacccgttatgtcctcgagtgccacagtcaaaattctagtcctccatcccggggagataccaagatttacccaggaggagtacaggcccccgccggtgtcagagctcgcaactaaagggacaatggtcggtgtgatatcagctgcagccatcaaccaatctatagtctatagcatcgtgtccggcaacgaagaggacactttcgggattaataatatcacaggcgtgatctacgtaaatggacccctcgactacgaaaccagaactagctatgtgctcagagtccaggctgacagcctggaagtcgtgctcgccaatcttcgagtgccttctaaaagtaacactgccaaggtatacatcgagatccaggacgagaataatcacccccccgtcttccaaaagaaattctatatcggcggagtatcagaggacgctaggatgttcacctccgttctgcgcgtgaaagccactgataaagataccggaaattattccgtgatggcctatcggcttatcattccccctatcaaagagggaaaagagggatttgtggtagagacttacacaggactaatcaaaaccgcaatgcttttccacaacatgcggcgctcctatttcaagttccaggttattgctactgacgattacgggaagggactgtctggcaaagctgacgttttggtgagcgtggtcaatcagctggatatgcaggtgatcgtgtccaacgtgcctcctacactggttgaaaaaaaaatagaagatctgaccgaaatcctcgatcggtatgtgcaagaacagatccccggcgctaaggtagtggtggagagcattggggcacgccgacacggagacgccttctcactggaggactataccaaatgcgaccttacggtctacgccattgacccacagactaatagggctatcgacagaaatgaactgtttaaatttttagacggaaaactactcgatatcaacaaggatttccagccatattatggtgaaggtggtcgaattctcgagatcagaacccccgaagccgtcaccagtatcaaaaagcggggtgaatcgcttggatacaccgaaggagccctcctggctctcgcgttcataataatcctctgttgcatacctgcaattttagtggttttagttagttacagacagagacaggcggagtgcacgaagactgctaggattcaggcagcactgcccgctgccaagccggccgtcccagccccagccccagtagctgccccaccaccccctcctccccctcctcccggcgcccacttgtacgaggagttgggagatagcagcattctgtttctcctgtatcacttccagcaatcacgtggcaacaacagtgttagcgaagatcgaaaacaccagcaagtggtgatgccttttagcagcaatacaattgaggcacataagtcagctcacgtggatgggagcctaaaaagtaataagctcaagtcggctaggaaatttacgttcttgtctgatgaggatgacctgagcgcccacaaccctttgtataaagagaacattagccaagtcagcaccaacagtgatattagtcagcgtactgattttgtggatcctttttctcctaagatccaggcaaaatccaagtctcttcgcggcccacgcgaaaaaattcagaggctgtggtcacagagcgttagccttccccggagattaatgaggaaagttcccaatcgtccagaaatcatagatctccagcaatggcagggaacacgccagaaagccgagaacgagaataccggtatttgtactaacaaacggggatcatctaaccccctcctgactaccgaagaagcgaaccttacagaaaaggaagaaatcaggcagggagagacgttgatgattgaggggaccgaacaactaaaaagtttgtcttccgatagttccttctgttttcctcggcctcacttttcattttcaaccctgccgactgtttcgaggaccgtggagcttaagagcgagcctaacgttatctcctctcccgcagagtgctctttagagctgagccccagcaggccctgcgtgctgcactcttctctgtctcggagagaaaccccgatttgcatgctgcctatcgaaaccgaaagaaatatctttgagaactttgctcatccacctaatatctctcctagtgcgtgccccctacccccccccccccccatttccccaccgagtcccccgcccgctccagccccactggcacctccacctgatattagccccttctcacttttttgcccaccacccagccccccaagcatacccttacctctgcccccgcctacttttttcccactcagcgtgtcgacctctggcccgccaactccccctctgctgcccccctttcccactcctttgccacccccccctccttcgataccatgccctccacctcccagcgcttcctttttgagcacagagtgtgtttgcatcacgggagtcaagtgcaccacaaatctcatgccagccgagaagatcaagagcagtatgactcagctgagcaccaccacagtgtgtaagaccgatccgcagcgcgaacctaaaggaatacttcgtcatgtcaaaaaccttgctgaacttgaaaagtccgtcgccaatatgtatagtcagattgagaagaattaccttaggaccaatgtctccgagctgcagactatgtgccccagcgaagtcaccaacatggagatcacatccgaacagaacaaggggagtctgaataatatagtggaaggcactgagaaacagagccacagtcagagcacctcgctgtag

SEQ ID NO: 201965 - DNA, 5748 bp, synthetic construct
  misc_feature 1..5748: note = Description of Artificial Sequence: Synthetic coding sequence
  source 1..5748: mol_type = other DNA
atgttccggcagttctacctgtggacctgcctggccagcggcatcatccttggcagcctatttgagatctgcctcggccagtacgatgacgactgcaaactcgcccgtggaggcccacccgcaactatcgtggccattgatgaggagtcacgcaacgggacaatcttagtcgataatatgctgataaaagggactgcaggcggaccagatcccacaattgagttatctctgaaggataatgtcgattattgggtcctgatggacccagtcaaacagatgctctttctgaatagtactggaagggtattggaccgggaccctcctatgaatatccatagtatcgtggttcaggtccagtgcataaataagaaagtaggaactatcatataccatgaggtccggatcgtggtacgagatagaaatgacaacagccccacgtttaaacacgagtcttactacgccactgtcaatgagctcactcccgtgggaaccactatcttcacaggcttctccggcgataacggcgcgacggatatcgacgacggcccaaacggccagatcgagtatgtcatccaatacaatcctgacgacccagatagagcccagaatctgaacgagcgcagaaccaccaccacaactctgaccgtagacgtgctggacggggacgaccttggcccgatgttcttaccctgtgtgctggtgcccaacacccgggattgtaggcccttaacgtatcaggccgccattcctgaattgcgaacacctgaggaactgaacccgatcattgtcacgcctcccattcaggctatcgatcaagatcgtaacatccagcccccaagtgacagacccggtatcctgtatagcatcttggtaggcacacctgaagattatcctagatttttccatatgcatccgcgaaccgccgagctgtccctgctggagcctgttaatagagattttcaccagaagttcgacctagtgataaaagccgagcaggacaacggccatccactgcccgcgtttgccggtctgcatatcgaaattctggacgagaataaccagagtccttacttcacaatgccttcttaccagggatatatactggagagtgcccccgtaggcgcaacaatttctgactctctgaacctgacaagccccctcagaatcgtggccctcgataaagatattgaagacacaaaagatcccgagctacatctcttcttgaacgattataccagtgtgtttaccgtgacacagacgggcattacacggtacctgactctcttgcagccggtggatagggaagagcaacagacgtatacattctccatcacagcctttgatggtgttcaggaatcggagccagtgattgtcaatatacaggtgatggatgccaatgacaacactcccacatttcccgagatctcttacgatgtgtatgtgtacacagatatgcgaccaggggacagcgttatccaattgacagctgtggatgctgacgaggggtccaacggtgagattacgtacgagatcttggttggagcgcagggagattttattatcaataagactacagggttgatcaccatcgcccctggggttgagatgatcgtgggcagaacttacgccttgacggtccaggccgccgataatgccccgccggccgagaggaggaatagcatttgtacagtctacatcgaggtactgcctcccaataaccaaagtccaccgcgattcccacagctgatgtacagcctagagattagtgaggcgatgcgagtgggagcagtgcttttaaatcttcaggcaacagatcgcgagggagacagtatcacctacgcaatcgaaaatggagacccccagcgcgtttttaacctttctgagactactgggatcttaacacttggtaaggcgctagaccgtgagtctacagacaggtatatcttgataatcacagcctcagatggaaggcccgacggaacaagtacggcaactgtgaatatagtggtcaccgatgtcaacgataacgctcccgtttttgacccgtacctcccaaggaacctatcggtcgtcgaggaagaagcaaatgctttcgtgggccaggtgaaggctacagatccagatgcgggcatcaatggccaggttcattatagccttggaaatttcaataatttgtttaggatcacttccaacggatccatctacaccgcagttaagctcaacagagaggtgagagattattacgagctcgtagtggtcgctactgatggtgcagtgcaccctcgccacagcactcttaccctggcaataaaggtcctcgatatcgatgataattctcctgtgttcacaaacagcacctataccgttcttgttgaagaaaatctgcctgctggaactactatcttgcagatcgaggctaaggacgtggacttaggggccaacgtgagttataggatacgctcccctgaggtgaagcattttttcgcactgcacccatttacaggtgagctgagccttctgcgatctcttgactatgaagcttttcctgaccaagaggcatccataacctttctggtggaagccttcgatatctatggcaccatgccgcccggaatagccacggtgactgtgatcgtgaaggacatgaatgattatcctcctgtgttttccaaacgcatctacaagggcatggtcgcacctgacgcagttaagggcacaccaataacaaccgtctacgccgaggatgccgacccccctggcctgccggcctcacgcgtgaggtaccgcgtggatgatgtccagtttccatatccagccagtatctttgaggtcgaggaggattcaggacgtgtcatcaccagagtgaacctcaacgaagaacccacaacgatcttcaagctcgtggtagttgcgttcgatgatggggagccagtgatgagctcaagcgccactgtcaagatccttgtcctccaccctggggagattcctaggttcactcaggaagaataccgtccacccccagtttcggaactggccaccaaggggactatggtgggcgtcatctctgccgccgcaattaaccagtccattgtttactcaatcgtgagcgggaatgaagaggatacatttggaatcaacaacatcactggcgtgatctacgtgaacggacccctcgactacgagaccagaaccagttacgtgctccgcgtacaggctgacagcctggaggttgtcttggccaacctgagggttcctagcaaatctaatactgccaaagtctacattgagatacaggacgaaaataaccatccacctgtctttcaaaaaaaattctatataggcggcgtgtccgaggacgccagaatgttcacaagtgttctcagagtaaaagcgactgataaagatactggcaactacagtgttatggcgtaccgactcatcattccaccaatcaaagaaggaaaggaaggattcgttgtggaaacctacaccgggctcataaagaccgcaatgctctttcataatatgagacggtcctactttaaatttcaggtgatcgccactgatgattacggtaagggcctgagtgggaaggcggacgtgctggtttccgtcgtgaatcagttagacatgcaggttatcgtcagtaacgtgcctcctacactggtcgaaaaaaaaattgaagacttgactgaaattcttgaccgatacgtccaggagcagatccctggcgcaaaagtcgtcgtagaatccattggggcaagaaggcacggtgatgccttttcactcgaggattataccaagtgcgatctgacagtgtatgctatcgatccccaaactaaccgggccattgaccgtaacgagcttttcaaatttctcgatggaaagctgcttgatattaacaaggatttccagccatactatggagagggaggtcggatcctggagattcgaacccccgaggcagtgacgtcaataaaaaagagaggcgagagcctgggttataccgaaggagcgctcctcgccctggcattcatcattattctctgttgtataccagccattctggtggtgcttgtttcctatcggcagcgccaggcagagtgcactaagacagcaagaatacaggccgcccttcccgccgctaaaccagcagtaccagccccggctcccgtcgctgcacctcctccccccccccccccaccacctggggcacacttatatgaggaactgggcgactcctccattttgtttctgctctaccacttccagcaatctcgggggaacaattccgtctccgaggacaggaagcaccagcaggtcgtgatgccattctccagcaatacaatcgaggcacataagagcgctcatgtcgacggctccttaaagagcaataagttaaagtccgcgaggaaattcacctttctctccgacgaggatgacctgtcagcccataatcccctgtacaaggagaatattagtcaggtgtctactaattcagatatatctcagaggaccgatttcgtggacccatttagtccgaaaatacaggcgaagagcaagagcctgcgcggcccaagggaaaagatccagaggctttggtcacaatcggtgagtctccctcggaggctgatgagaaaggttccaaataggccagaaatcattgatcttcaacagtggcagggcacccgtcagaaggccgaaaatgagaacaccggcatttgtaccaacaaacgtggctctagtaatccactattgacgactgaggaggccaacctcaccgaaaaggaagagataagacagggagaaacactgatgatcgaagggactgagcagctgaaaagcttgtccagtgacagctccttttgcttcccaagaccccattttagtttctcaacgctccccacggtgagtcgaacggttgaactgaaaagcgagcctaacgttatatcttccccggcagagtgtagcctggaactgtctccatcccggccctgtgtgcttcactcctctctttccaggcgggaaacccccatctgtatgttacccatcgagaccgagagaaacatctttgagaacttcgcccacccaccaaatatctccccctcagcctgtccccttccccccccacctcctattagccctccatcccccccccctgcccctgccccgctcgcacctccaccggacatcagccccttctccctgttttgcccacccccttcacctcctagtattccccttccactgccaccccccacctttttccctttgtctgtttccacctcaggccctccaaccccccccctcctacctcccttccccacccccctcccgccacccccaccatccatcccttgcccacctccgcctagcgcctccttcctgagcaccgagtgtgtttgcatcaccggtgtgaaatgtaccaccaacctaatgcccgccgaaaagataaaaagctctatgacgcagctgtctacaacaaccgtttgcaaaaccgaccctcagagagaacctaaaggaattcttaggcatgtaaagaatcttgctgagttagaaaagagtgtggctaacatgtactctcagatcgagaaaaactaccttcgcacgaacgttagcgagcttcagacaatgtgtccgtctgaagttacaaacatggagattacatcggaacagaacaaggggagcctcaacaacattgtcgagggtaccgaaaaacagtcacattctcagagcacttccttgtag

SEQ ID NO: 201966 - DNA, 5799 bp, synthetic construct
  misc_feature 1..5799: note = Description of Artificial Sequence: Synthetic coding sequence
  source 1..5799: mol_type = other DNA
atgttccggcagttctacctgtggacctgcctggccagcggcatcatcctgggatccctgttcgagatttgtctcggccagtatgacgacggcaccatcttagttgacaatatgctgattaagggcacagcggggggccccgaccctactattgagctgagcctcaaagataatgtggattactgggtactcatggatcccgtgaagcagatgctctttctgaattcaacaggtcgggtgcttgatcgcgacccaccaatgaatattcattcgatcgtggtccaggtccagtgcataaataaaaaggtcggaaccattatctaccacgaagttcgaattgtggtcagggatcgcaacgacaacagtccaacattcaaacacgaatcttattacgcaaccgtgaacgaactcacccctgtagggactactatcttcaccggatttagcggcgacaacggagccaccgatatcgacgacggacctaacgggcagatcgagtacgtgatacagtacaatcccgatgatcctacgagtaatgacacgttcgagatcccactgatgctgactggaaatatagtcctgcgtaaacgccttaattatgaggataaaacaaggtactttgtgattatccaggctaatgaccgagcccagaatctgaatgagcgacgaacaactacaaccacattgaccgtagatgttcttgacggcgatgaccttggccctatgttccttccatgtgtactggtgcctaatacaagagactgcaggccacttacctaccaagcagcgataccggagctgcgaacacccgaagaacttaacccaatcatcgtgactccccctatccaagctatagaccaggacagaaatattcagcccccctctgatcgtccaggcattctttactcaattttggttgggacccctgaggactaccctcgtttcttccatatgcaccctcgcactgcagaactgtcgttactagagcccgtcaatagagatttccaccagaagtttgaccttgtgatcaaggctgaacaagataatggacaccccctccccgccttcgccggcctacacattgagattctcgacgagaacaatcagtccccatactttacaatgccttcgtaccaggggtatatactggaaagtgctccagtgggtgcaacaatctccgacagcctgaatctcacctccccactacgaatcgtggcgttggacaaggacattgaggatactaaggatcctgagctccacctttttctgaacgattatactagtgtatttactgtcacccagactggcataacccgatacttgacccttctgcaaccggtggatcgggaggaacagcagacctatactttttccatcaccgcgttcgatggggtgcaagagtcagagcctgtgattgtgaatatccaggttatggatgccaacgataacactcctactttcccagagatctcatacgatgtgtacgtctacaccgacatgaggcccggcgactccgtcattcaactcaccgcagtcgacgccgacgaagggtcaaatggtgagatcacatacgagatcctggtcggtgcccagggcgactttataattaataagactacgggcctcattactatcgcccccggggtggaaatgattgtcgggcgtacctatgcattaaccgtccaagctgccgacaacgcaccgccagccgagaggcgtaattccatctgcaccgtgtatatcgaggtgctgcctccgaacaaccagagcccccctcggtttccgcagctgatgtacagtttggagatcagcgaagcaatgcgcgttggcgctgtcctgttgaatcttcaggctaccgatcgagaaggagattccattacctacgcaatcgaaaatggagatcctcagagagtttttaatttatccgaaaccacgggaatactgactctaggaaaggccctggacagggaaagcaccgacagatatatcctcatcattactgcgagcgatggcagacccgatggaacgtcaactgcaaccgtaaatattgttgtgacagatgtaaatgataatgctcccgtgtttgatccttatctcccacggaaccttagtgtggtggaagaggaagccaacgcttttgtgggccaggttaaagccaccgatccggatgctggtattaacgggcaggtacactattcactcggcaattttaataatctcttccgcattacctctaacggctctatctacactgccgtgaagctcaaccgcgaggtcagggactactacgagctcgtagtggtggctacggatggcgcagtccaccctcggcattctacgttaaccttggcaataaaggtcttagatattgatgacaattctccagttttcaccaatagtacatacaccgttctagtggaagaaaacttaccggctggtactacaatcttacagatcgaggccaaagatgtcgatctaggagccaatgtaagttatagaattaggagccctgaagttaaacacttttttgcactacatcctttcaccggcgagttgagtctcctgaggagccttgattatgaggcgttcccagatcaggaggcgagcatcacctttctggtggaagcatttgatatttatggcactatgccacccggcatcgcaacagtgactgttattgtcaaggatatgaacgattacccgccagttttttccaagagaatctacaagggtatggtggctcctgatgctgtgaaagggaccccgattactacagtatatgctgaggatgccgatccgcctggcttgcccgccagccgagtgcgttatcgggtggacgacgtccagttcccttaccctgcaagcatcttcgaggtggaggaagacagcgggcgcgtgatcacacgcgttaacctaaacgaggagccaaccactatatttaaactcgtcgtggtggctttcgatgatggtgaacccgtgatgtcctcaagcgccactgtgaagattctcgtgttgcacccaggagagatccctcgcttcacccaagaggagtacaggcccccccctgtttctgagttagccacaaaagggactatggtaggtgtgatcagtgcagccgccattaatcagtctatcgtttactccatcgtcagcgggaatgaagaggatacattcggaattaataacatcactggcgtcatctacgtcaacggtccactcgattatgagaccagaaccagctacgtgctccgggtacaagctgattcacttgaagtggtgcttgccaacttgcgtgtgcctagcaaatcgaacacggccaaggtatatattgaaatccaagatgaaaacaaccatccaccagtctttcagaagaaattttatataggaggcgtatccgaagatgcaagaatgttcaccagcgtgttgagggtcaaggccaccgacaaggacacaggaaactattctgtgatggcttataggctgataatccctccaattaaggagggcaaggaaggcttcgtggtggaaacgtatactggattgatcaagactgcgatgcttttccacaatatgaggagatcctacttcaagttccaggtgatagccacggacgactacggtaagggcctaagcggcaaggcagatgtgctggtcagcgtggtgaaccaactcgacatgcaagtaatcgtgagcaacgtgcctcccactctggttgaaaaaaagatcgaggacctcaccgaaatcctggacagatacgtgcaggagcagattcccggcgcgaaggtggtggtggaatcaatcggagcacggcggcatggcgatgccttttctctagaggattacaccaagtgtgacctgaccgtgtacgcaatcgaccctcagaccaaccgcgccattgatcggaatgagctgtttaagttcctggacgggaaactgctcgatattaacaaggatttccagccttactatggggagggcggtagaatcctggaaatccggacacctgaagccgtgactagcattaaaaagagaggagagtccctcggatatacagaaggcgccctgctggcactggctttcatcattattctgtgctgcattcccgcaattcttgtggtgctggtgtcttacaggcagcgtcaagcagagtgtacaaagaccgcgcggatccaagcagcgctgcccgcagcgaaaccagcagtcccagcaccagcccccgtcgccgcaccaccacccccccccccccctccacccggagcccatctgtatgaagaacttggcgatagtagcatgcataatctgtttctcctctatcatttccagcagtctcgcgggaacaatagcgtgtcagaggataggaaacatcagcaggtcgtgatgccattttcaagtaacacgattgaggcccataagagcgcccatgtcgacgggagtctgaaatctaataagctgaaaagcgcaaggaaattcactttcctcagcgacgaagacgacttatctgctcacaacccgctctataaggagaacatctcacaggtgagcactaacagcgatatatcacagcgaacagatttcgtggacccattcagccccaaaattcaggccaaaagcaagtctctccgcggtccgagggagaaaatacagcggctgtggtcccagagtgtctcgttgccccggaggttgatgcgcaaggtgccgaaccgacccgaaattatcgatttgcaacagtggcaaggcacgcgtcagaaagccgaaaacgaaaatacaggaatttgtactaacaaacgcggaagctccaaccctctattgacaactgaggaggctaacctgactgaaaaagaagaaatacgccagggggagaccttaatgatcgagggcaccgagcagttgaagtcactttcaagtgatagcagcttctgctttcctcggcctcatttttctttctctaccctgccgaccgtcagccggactgttgagctaaaatccgagcccaatgttatcagttcacctgccgaatgctctctggagttgtccccgagccgtccctgtgttctgcactcaagtctgtcgcgaagggagactccaatttgtatgctgccaatcgagaccgaacggaacatctttgagaacttcgctcaccccccaaacatcagcccatcggcttgccccctgccaccaccaccacctattagtcccccgtcccccccacccgctcctgcacccttggcacccccaccagatatcagtccattcagcctcttctgcccgccccctagccccccctccattcctctcccactgccccctccgactttctttccactctcagtgtctacctcaggacccccaacacccccacttctccctccttttccaaccccacttcccccacccccgccatcgataccttgccctccccccccatccgcatcatttttgtcgactgaatgtgtatgtatcactggcgtgaagtgtactactaacctcatgccagctgagaaaataaagagttctatgacgcagctctccactacgacggtgtgtaaaactgaccctcaacgggagccaaagggcatcctccgccatgttaagaacttggccgagcttgagaagtctgtggctaatatgtatagtcagatagaaaagaattaccttaggaccaacgtgagtgagcttcaaacgatgtgcccttccgaagtcacaaacatggagatcacctccgaacaaaacaaaggaagcctaaataacatcgtggagggcaccgaaaagcagagtcattcccagagtacctcactgtag

SEQ ID NO: 201967 - DNA, 4620 bp, synthetic construct
  misc_feature 1..4620: note = Description of Artificial Sequence: Synthetic coding sequence
  source 1..4620: mol_type = other DNA
atgttccggcagttctacctgtggacctgcctggccagcggcatcatcctcggttccctattcgagatatgccttgggcagtatgacgatgactgcaagcttgccagaggcggcccgccagccactatagtggccatagacgaagagtccagaaatggaacaatcctcgtggacaatatgctgatcaaaggcacagcgggcggtccagacccaaccatcgagctgtcactgaaagataatgtcgattactgggtcttaatggatccagtgaagcagatgctattcttgaatagcaccggacgtgtgcttgacagggacccacccatgaatattcactccatcgtcgtgcaggtccaatgtatcaataagaaagtgggaaccatcatctaccatgaggtacggatcgtagtgagagatcggaacgacaatagccccaccttcaaacatgaaagttactatgcaacggttaacgagctcacacccgtgggcaccactatctttaccggcttcagcggcgataacggagccacggatatcgatgacggccccaatggacaaatcgagtacgtgattcaatacaatcccgatgaccctacctcgaacgatacatttgagatcccactgatgcttactggaaacatagtgctgagaaaacgcctcaattatgaggacaaaacgagatacttcgtcatcattcaagcaaacgaccgcgcccaaaacctgaacgaacgccggacaaccaccaccaccctgacagtggacgttctcgacggcgatgatttgggtcctatgttcctcccctgtgttctagttccgaacaccagagactgtcgcccacttacgtatcaggcggccattccagaattgcgtacgccagaagaactgaatcccatcatcgtgacgcctccaatccaagccattgatcaggataggaacatacagcctcctagcgaccggcctggaatcctctactcaatcctggtcggtaccccagaggattaccctaggttttttcacatgcatcccagaaccgccgaattgtcgcttctcgaacctgtgaatagggactttcaccagaaattcgatctggttatcaaggccgagcaagataacgggcacccattgccagcgtttgccgggctgcatattgagattcttgatgagaataatcaaagcccatacttcacaatgccctcataccagggatatatcctagagtccgcccccgtgggagctacaatatcggacagcctaaatctgacgtcgcccctgagaatcgtggcgctggataaggacatagaagataccaaggatcccgaactgcacctttttctgaacgattacacctcagtcttcaccgtgacccagaccggcatcacaaggtatctgactctgctacaacccgtagacagggaagagcaacagacctacactttctccattaccgcattcgacggcgtgcaggagagtgagcctgtcatcgtcaacattcaggtcatggacgccaacgataacaccccaacattccctgagataagctacgacgtgtacgtttataccgacatgcgaccaggtgatagtgtgattcagctgaccgcagtcgacgcggatgagggtagcaacggagagattacctatgaaattctagtgggagctcagggtgatttcatcatcaacaagacgacaggacttatcacaatcgctcccggagttgagatgattgtgggccggacctatgcactgacagtacaggcggccgacaacgcacctcctgccgaacgcagaaacagcatttgcaccgtgtatatcgaagtactgccgccaaataatcagtctcctccgcgctttcctcaactaatgtacagcctggaaatatctgaggcaatgcgcgtcggcgctgttctgctcaatttacaggccacggatagggagggcgatagcataacctatgcaattgaaaacggcgatccccagagggtgtttaacctatccgagacgacagggatcctgacactgggaaaagctctagatcgcgagtctaccgaccgatacattctgattattaccgcatctgacggtaggcccgatggaacctcgactgccactgtcaacattgtcgtgaccgacgtcaacgacaatgcccccgtattcgacccctatctcccgagaaacctgagtgtcgttgaggaggaggcgaatgcgttcgtcgggcaggtgaaggctactgatcctgacgccggcatcaacggccaagtgcactacagcctggggaactttaataatctttttcgtattacctccaatggaagtatttacacagcagtgaaactcaacagggaggtacgtgattactacgagttagtggtagtcgccactgacggcgcagtgcaccccaggcacagtacactaactctggctatcaaggtactggacatagatgacaactctccggtatttaccaacagtacttataccgttttagtcgaggagaatctcccagctggtactacaatattacagattgaggccaaggatgtcgacctcggcgcaaatgtgtcttatcgcatcaggtcccctgaggtcaagcacttctttgcgctgcacccctttacaggagaactgagtttattaaggtcactggattatgaagcatttccagatcaagaggcctctataaccttcttggtggaagcctttgacatctatggaacaatgcctcccggcatcgccactgtgacggtgattgtcaaagacatgaacgattaccctccagtgttctcaaagcgaatttataaggggatggtcgcccccgacgccgtgaaggggaccccaataacaactgtctacgctgaggacgccgatcccccgggcctgcccgcatctcgggttcgctatagagttgatgatgtccaatttccctaccccgcctctatatttgaagtggaggaagatagtggacgggtcattacccgagtcaatctcaacgaggaacccaccacaatattcaagctggttgtggttgcatttgatgacggcgagcctgtcatgagtagcagtgccacggtcaagattcttgtactgcaccccggcgaaatcccccgcttcacacaagaggaatacaggccgccacccgtaagcgaactggcaacaaagggtaccatggttggagtgatttcagctgccgcgatcaaccagagcatagtttactctatcgtgagcgggaatgaagaagacacttttggaattaataatataaccggcgtcatctatgtcaatggaccattggactacgagacaagaaccagttatgtgttaagagtgcaggctgacagtttggaggtggttcttgccaatcttcgggtcccctctaaaagtaatactgccaaggtgtatatcgagatccaggacgagaataaccacccacccgtatttcagaagaagttctacattggcggcgtgtcagaagatgcaagaatgttcacatccgttctccgggtgaaggcaaccgacaaggatactggtaactattccgtgatggcttatagactcattattccacctataaaggaagggaaggagggattcgtcgtggaaacgtacacagggttaataaagacagctatgctatttcacaacatgcgcaggtcctattttaagttccaggtgattgcaacggacgactacggaaaaggtctgtctgggaaggccgacgtactggtctcggtcgtgaaccagctagacatgcaagttatagtgagcaatgtgccacctaccttagtcgaaaagaagatcgaagacctcactgagatcttagatagatacgtccaggagcagatacccggtgcgaaggtggtcgtggagtccattggagcccgtcggcatggggatgcctttagccttgaggactacacaaaatgcgacctcacagtatacgctatcgaccctcagacaaaccgggccatcgacagaaacgaactgttcaagttcctggatggcaagctcctggacatcaataaggatttccagccttactacggcgagggaggacgaatactagaaatcagaacccctgaggctgtgacatcaattaaaaagcgcggggaatccctgggatacacggagggagcgttgcttgccttagcttttatcatcatcctgtgctgcattcctgcaattcttgtggtgctcgtctcctacagacagtttaaggttcggcaggctgaatgcacaaagactgcccgtattcaagcggccctgcccgccgccaagccagctgtccccgcacccgcgcccgtggcagcacccccccctcctccgccccccccccctggagcccatctgtacgaggaactgggggatagcagtatgcacaagaactacccttggtccctggagcttatactggccagaaacatggacaaaattattaccgtgatgtctatggggatgaagtgtctaaacatgggagtcgccgtagactgctatcatcagctagaccggagaaatatggttaggtggctggtaaaactccggaaaaacatgcgccgaaaaagaaagagtcagcggaaattaaagaaccaaaggctcaagcttgagtcactggttcggagaaagaagtag

SEQ ID NO: 201968 - DNA, 2160 bp, synthetic construct
  misc_feature 1..2160: note = Description of Artificial Sequence: Synthetic coding sequence
  source 1..2160: mol_type = other DNA
atgttccggcagttctacctgtggacctgcctggccagcggcatcattcttggatccctttttgagatatgtctgggccagtatgacgatgattgtaagctggctcgcggtgggccacccgcaaccattgtagccatcgatgaggagtcacggaacggaactatcctggtggacaatatgttgatcaagggcactgcaggtggccccgaccctacgattgagctgtcacttaaggataacgtcgattactgggtccttatggatcccgtaaagcaaatgctttttttaaattcgaccgggcgggtgttggaccgggacccccctatgaatattcacagcattgtagttcaggtgcaatgcatcaacaaaaaggtgggcaccatcatataccacgaggtgcgtatcgtcgtgcgcgacaggaacgataattcacccactttcaagcatgaatcatactacgccaccgtgaatgaactaacaccagtgggtacgactattttcacagggttttcgggggataatggcgcaaccgacatagatgatggccctaacggtcagatagagtacgttatccagtacaatcctgacgatcctaccagtaatgacacgttcgagattcccctgatgctaacagggaatatagtcctcagaaagagactaaactatgaagataaaacaaggtactttgttattattcaggccaacgacagggcacagaacttgaacgaacgtcgaacaaccacaaccaccctcacagtggatgttctcgacggggacgacctcggcccaatgttcctgccctgcgttctagtgcccaatacaagggattgtagaccattgacctaccaggcagcaatacccgaacttcgtactccagaggagcttaatccaatcatagtaaccccccctatccaggccattgaccaggatagaaatatacagcctcccagtgatcgccccggtattttgtactccatactcgtcggcactcccgaggattatcctcgctttttccacatgcatcctcgcacagccgagctgtcactgctggaacccgtgaacagagactttcatcagaagttcgacctcgtcataaaggccgagcaggacaatggacatcctctccctgccttcgctgggctgcatattgagatcttagatgagaataatcagtccccatactttacaatgccctcataccaaggatacatactggagtctgcaccagtgggggctaccattagcgacagtctgaatcttactagccctctcaggatagtggcgcttgataaggacatagaggatgaggagcccaagaagatcaaaaagcccaaagttgagatacgggagcctagcgaagaggaggaggtggtagtgacaatagagaaaccacctgcagcagaaccaacctacaccacatggaaacgtgctcggatatttcccatgatctttaaaaaagttaggggactagctgataaacggggaatcgtcgatctggagggtgaggagtggcagcgccgactggaggaggaggacaaagattacctgaaactgaccttggatcaggaggaagcaacagaatctaccgtcgagtctgaggaggagagcagtagtgactataccgagtacagcgaggaagaatccgaattcagtgagtcagagacaacagaagaggaaagcgagtctgaaacaccctccgaggaggaggaaagtagcacacctgagtcagaagaaagcgagtctactgagtcagaaggcgagaaagcccggaaaaatatcgtgcttgcacggaggcggcccatggtggaggaggtgaaagaggttaagggacggaaggaggaaccccaggaggaacagaaagaacccaagatggaggaggaagaacactccgaggaggaagagagcggtcccgcccccgtggaagaatctactgatcccgaggcacaagatattcctgaagagggatctgctgagagcgcctctgtggaaggcggagtagaatccgaggaagagtccgaatctggctccagctcctccagcagcgagtcacagagcggaggcccttggggctaccaagtgcctgcgtacgacagatccaaaaatgctaaccagaagaagtctcccggagcgaattctgaaggatacaataccgcattatag

SEQ ID NO: 201969 - DNA, 1953 bp, synthetic construct
  misc_feature 1..1953: note = Description of Artificial Sequence: Synthetic coding sequence
  source 1..1953: mol_type = other DNA
atgttccggcagttctacctgtggacctgcctggccagcggcatcatactgggaagcctgtttgaaatttgtcttggccagtacgacgatgattgcaaactagcacgtggaggccctcccgctacgatcgtggccatcgatgaggagtctcggaatggcaccattctcgtggacaatatgctaattaaaggtacagctgggggccctgatccaacaatcgagctgagtctgaaagacaacgtagattactgggttctgatggaccctgtcaaacagatgctatttttaaattcaaccgggcgcgtgcttgacagggatccaccaatgaacatccactctatcgttgtgcaggtgcagtgtattaataagaaggtggggactatcatttaccacgaggttcgcattgtagtccgtgaccgaaatgataacagtcctaccttcaaacacgaaagctattacgctactgtcaacgagttaaccccagtggggactactatttttacagggtttagtggggataacggagctaccgacatagacgatggccctaacggacagattgagtacgtcatacagtacaaccctgatgatcctacaagcaatgatacttttgagatcccactgatgctaaccggcaatatagtgctgcgcaaacgcctgaactacgaggataaaacccgctactttgtcattatccaggcaaacgatagagcccagaatttgaatgagcggcggaccactaccactactctgaccgtggatgtgttagacggggatgatctcggccctatgttcctgccatgtgtgttggttcctaataccagagactgcagacccctgacctaccaggctgcaatccctgagctgcgcacccctgaagagctgaatccaattatagtcacacccccgatacaagccattgaccaggatagaaacattcagcctccgagcgatcgacctggcatcctgtactctatcctcgtgggtactcctgaagattacccccggttttttcacatgcatcctcgcactgccgagttatcactgctggaacccgtaaatagggatttccatcagaaattcgatctggttattaaggaagagcctaagaaaatcaaaaagcctaaagttgaaattcgagagcccagcgaggaagaggaagtggttgtcactattgaaaaacccccggcagccgagccaacatacacgacctggaagcgtgccaggatattccctatgatattcaagaaagtaagaggccttgccgataagcgggggattgtggacctggagggcgaagagtggcagcgtaggcttgaagaggaggacaaagactatttgaaactgacgctggaccaggaagaggccacagaatccacggtggagtctgaagaggagtcaagtagcgattataccgaatactctgaggaggaatctgaattcagcgagtccgagaccactgaagaagaatcagagtcggagacgccgtccgaagaagaggagagcagcaccccggagagtgaggagtctgagagcactgaaagcgaaggcgaaaaggcgaggaagaatatcgtcctggcaagacgccgacccatggttgaggaagtgaaagaagtgaagggccgtaaagaggagcctcaagaggagcagaaggagcctaagatggaggaagaagagcactctgaagaagaggagtccggacccgcacccgtcgaggagagcacagaccctgaggcccaagacattcctgaggaggggtctgccgagagcgcctcagtagagggtggagtagagtccgaggaagagtcagagtctggctcctcctcaagttcatcagagagtcaatctggtggcccctgggggtaccaggtgcctgcatatgataggtctaagaatgccaatcagaaaaagagccccggagctaatagcgagggctataatacagctctttag

SEQ ID NO: 201970 - DNA, 5358 bp, synthetic construct
  misc_feature 1..5358: note = Description of Artificial Sequence: Synthetic coding sequence
  source 1..5358: mol_type = other DNA
atgttccggcagttctacctgtggacctgcctggccagcggcatcatcctgggttctttatttgaaatctgccttgggcagtatgatgatgattgcaagttagctcgtggaggaccccccgctacaatcgtggcaatcgatgaggaatctcgcaatggaaccatcttagttgacaatatgctgatcaagggtactgccggtggccccgacccaaccattgaactgtcactcaaggacaacgtggactactgggtgcttatggatcccgtgaagcaaatgctgttcttaaacagcactgggcgcgtcctcgatcgagaccccccaatgaatatacactctattgtggtccaggtccagtgcattaacaagaaggtgggaaccatcatataccacgaggtgcggatagtggtgcgcgaccgcaacgacaacagtccaacatttaaacatgaaagttactacgctaccgtgaatgagctgactcccgtcggaactacaatttttacgggcttcagcggggataacggcgcaacagacatagatgacggtcctaacggacagatcgaatatgtcatccagtacaaccctgacgaccccacctctaatgataccttcgaaatcccgttgatgttaactggtaacatcgtgctccggaagagactgaactacgaggacaagacaagatactttgtgatcatccaggctaacgacagggcacagaatctgaacgagaggcggactaccaccaccaccttgacagttgatgtgttggatggcgacgacctcggcccgatgttcctcccctgcgtacttgttccaaacacgagggattgtcggccgcttacctaccaagccgccattcccgaattacggacaccagaagaattaaatcctatcatagtcacccctcccatccaggccattgatcaagaccggaacatccagccccccagcgataggcccggcatcctctactctattctggtgggtactcccgaggattatccacgattcttccatatgcaccctcggacagccgaactctctcttctcgagcctgtcaaccgagatttccatcagaagtttgacttagtgattaaggcagagcaggacaatggtcatccattgcccgcatttgccggcctacacatagagatattagatgagaacaatcagtctccctacttcactatgccctcctatcaggggtatatactggagagtgcgccagtgggagcaacgatctctgatagtctcaatctgacgtcaccactccgtatagtcgcacttgacaaagatatcgaagacgtgcccccgagtggcgtgcccacgaaggaccctgaacttcacctgtttcttaacgactatacctcggtgtttactgtcactcagaccgggattacgagatacctcactctgctccagcccgtggaccgggaagagcaacagacttacacattcagtatcacagccttcgacggtgtgcaggaaagcgagcccgttattgtgaacatccaggtaatggacgcaaatgataatacccccacttttccagagatatcctatgacgtgtatgtctacaccgacatgcgccccggggactcagtgattcagctgacagcggtggacgctgatgagggctctaatggggagatcacatatgagatcctcgtgggggctcagggcgacttcatcattaacaagacaacagggctcatcacaatcgctcccggggtcgaaatgatagttgggagaacctacgcgctgactgttcaggccgccgataatgccccgcccgcagagcggcgcaatagcatttgtacagtttatatcgaagtgcttcctccaaacaaccagagcccccctcgattcccacaactgatgtacagcctcgaaattagcgaagctatgcgggtaggggctgtgcttctaaatctccaggcaaccgacagggagggcgatagcatcacctacgccattgaaaatggcgatccccagagggtgttcaacttgtccgagacgactggaatcctgacacttgggaaagctcttgatcgcgagtcaacagatcggtacatcctcattataacagcctcagatgggcgcccagatggcacttcgactgccaccgtcaacatcgtcgttacggatgtgaacgataatgcacctgtattcgacccgtatttgcccaggaatctgagcgtcgtggaggaagaggcgaatgcgttcgtgggccaagtgaaggcaacagatcccgacgcaggcattaatgggcaagtgcattactccctgggaaatttcaacaatttgttccgcataacttccaacggctctatttacaccgccgtcaaacttaaccgggaagtgagagactactacgagctggtggttgtggcgactgatggtgccgtgcatcctcggcactctaccctgaccctggctatcaaggtcctggatatagacgacaatagtccggtgttcactaactctacatacaccgtgctcgtcgaggaaaacctgccagccggtactacaattctccagatcgaggctaaggacgtcgacctaggggcgaatgtatcctataggatccggagccctgaggtgaaacatttcttcgctctgcacccattcacaggtgaactctcactgctacgctctctggactacgaggcgtttcccgaccaggaagcctcaattacttttctcgttgaggcttttgacatttatggcactatgcctcctggcatcgctacagttaccgtgattgtcaaggatatgaacgactatcctcctgtgttctcaaaaagaatttataaaggaatggtggcgccagatgctgtcaagggaactcctattactacggtctacgcggaagacgcagacccacccggtttgcctgcctccagggttcggtaccgcgtggatgacgttcagtttccttatcccgcctcgatcttcgaagtcgaggaagacagcggcagggtcatcacaagggtgaacttgaatgaagagccaaccaccatttttaaattagttgtggtcgccttcgacgatggagaaccagtcatgtcgagcagcgcgactgttaagattctggtgctgcatcctggagagatcccccggtttacccaggaggaataccgacccccccccgtgtcggagctggctactaaagggacaatggtgggcgtcatcagtgcggccgccatcaaccagtcaatcgtgtactctattgtatcggggaatgaggaggatacctttggaattaacaacattaccggcgtcatctacgtgaatggacctttggactacgagaccaggacctcatatgtattaagggtgcaggccgactcactggaagtcgtgctggctaacctcagggtgccatcaaaaagcaacacggcgaaagtttatattgagattcaagatgagaataatcaccctcccgtgttccagaaaaaattttatattggcggcgtctctgaggatgcccgtatgttcacttccgttctcagggtgaaggcaacagacaaggataccgggaactatagtgtgatggcatacagactgattatccctcctataaaagaagggaaggagggtttcgtggtggaaacatacaccggcctgatcaaaacagctatgctgtttcacaatatgcggcggtcctattttaagttccaagtcattgcaaccgacgattacggaaagggcctcagcggcaaggctgatgtgctggtgtctgtggttaaccagctggatatgcaggtgatcgtgtctaatgttcctccgaccctggtggaaaagaaaatagaggacctgacagagattctggataggtatgttcaggagcagattcccggcgccaaagtagtcgtcgagtccatcggagccagacgacatggagacgcattcagcttagaggactatactaaatgcgaccttaccgtatacgccatagatccacagaccaatagagccattgaccggaatgaactcttcaagtttttagacggtaagttactagatataaacaaggatttccagccatactatggggagggcggacgcatcctggaaattcgcacaccagaggctgtgacaagcattaaaaagcgaggtgaatctctgggatacaccgagggcgcgcttctcgctctagcgttcatcattatcctgtgttgcatccccgccatcctggtagtcctggtcagctataggcagttcaaagttcgccaggctgaatgtacaaaaaccgcccgtattcaggctgcgcttcctgccgcgaagccggctgttccagcccccgcacctgtggccgctccaccacctccgccacctcctccacccggcgcccatctgtacgaagaactgggagattccagcatgcataagtatgagatgccacaatacggatctcggaggcggcttctccccccagcgggtcaggaagagtacggggaagtggtgggtgaagctgaagaggagtacgaagaggaggaagaagagcctaagaaaattaagaaacccaaagttgaaattagagagccctcagaggaggaagaagtagtggtaaccattgaaaagcccccagcggctgaacccacatatacaacatggaagcgcgctcgcatctttccaatgatcttcaaaaaagtgagaggcctagctgataagagggggatcgtagaccttgaaggggaagagtggcagcggcgattggaagaagaggacaaagactacctgaagttaactttagaccaggaggaagccactgaaagcaccgtggagagcgaggaggagtcctcctccgattacacggagtattcagaggaagaatcagagttctctgaaagcgagacgacagaagaggaaagtgaatctgagaccccaagcgaggaggaagagtcatccaccccagaaagtgaggagagcgaaagtacagaatctgagggtgagaaagcccggaagaatatcgtgttagccaggaggcggcctatggtggaggaggtcaaagaggtgaagggtagaaaggaggagccccaagaggaacaaaaggaaccaaagatggaggaggaggaacactcggaggaggaagagagcggacccgcccctgtcgaggagtctacagatcccgaagctcaagatatccctgaagagggctcggcggagtctgccagtgtggagggcggtgtggagtctgaagaagagagcgagtcgggttcttcctcatctagctccgagtctcagagtggcggaccatggggctatcaggtaccagcctacgacaggtctaagaacgcgaatcaaaagaaaagtccaggggccaacagtgagggatacaacacagctctttag

SEQ ID NO: 201971 - DNA, 2946 bp, synthetic construct
  misc_feature 1..2946: note = Description of Artificial Sequence: Synthetic coding sequence
  source 1..2946: mol_type = other DNA
atgttccggcagttctacctgtggacctgcctggccagcggcatcatcctcgggagcctatttgaaatttgcctcggccaatacgacgatgattgcaaattagcgaggggagggcccccagccacgatagtggcaattgacgaagagagccgtaacggtactatcttggtcgataacatgctgataaaaggcaccgctggaggccccgaccccactatagagttgagccttaaggataacgtcgactactgggtgctcatggatcccgtcaagcagatgctctttttgaatagtaccggccgggtgctggaccgggacccccctatgaacatacacagcattgttgtccaggtacagtgtatcaacaaaaaagtaggcaccatcatatatcatgaggtccgcatagtcgtccgggacaggaatgacaactcccctaccttcaagcacgagtcttattacgctacggttaacgagctaactccggtgggcaccaccatctttactgggttctctggtgataatggagccaccgacatagacgatgggccaaacggacagatagagtatgttatccagtacaaccccgatgatcctactagtaacgatacattcgagatacccctgatgctcaccggcaacatcgtgctcagaaaacggctcaactacgaagacaagaccaggtacttcgttataatccaggcaaatgatcgagctcagaaccttaatgagagaaggactacgaccacaaccttgaccgtggatgtgctagacggagatgacttaggtccgatgttccttccctgcgtcttggtccctaacacaagggactgtaggcctctgacctaccaggccgctatcccagagcttaggacacctgaggaactgaatcctatcatagtgactcccccaatacaggctatcgatcaggaccggaatatccagcctcccagcgaccggcccgggatcctatactccatcctggtcggtacccctgaagattacccgagattttttcacatgcacccaaggacagccgagctgtctttactcgagcctgttaatagagatttccatcagaagttcgatctcgtcataaaagctgagcaggataacggccacccacttcccgcctttgccggcctccacattgagattttagacgagaacaaccagtctccatatttcaccatgccctcctaccagggctacatcctcgagtctgccccggtcggcgcaacgattagcgattctctgaatcttacctccccgctccggatagtggccctggataaggacatcgaggataccaaagaccccgagcttcatctgttcctcaacgattacaccagtgtcttcacagtgactcagacaggcatcacacggtatctgacactgctgcagcctgtagacagagaagagcagcagacctatacattttcaatcaccgcgttcgatggagtccaggagagcgagcccgtgatcgtaaacattcaggtcatggacgctaatgataatactccaacctttcctgagattagctacgacgtttacgtgtacactgacatgagaccgggagatagtgtgatacagctgactgccgtagacgctgacgaagggtccaatggggagattacatacgaaattctggtgggagcgcagggtgactttattatcaataaaacgaccggattgatcacaatcgcgccaggagttgagatgatcgtgggtcgaacctacgctctgacagtgcaggcggctgacaacgctcctccagcagaacgcaggaacagtatttgtaccgtttacatagaggtgctcccccccaataaccagagtcccccaaggtttccccagttgatgtacagtttggagatttctgaggctatgcgtgtaggagctgtccttctgaatctgcaggcaacggatcgcgagggcgactcaatcacatacgccatcgagaacggcgacccccaacgagtgtttaacttgtccgagaccactggtattttgactcttgggaaagcattagatagagaatctaccgatcgctatattcttatcattactgccagcgacggaaggcccgacggcgaggaacccaaaaagatcaagaagcctaaagtggagatccgggagccctcagaggaggaggaggtagtggtaacaattgagaagccacccgccgcagagcccacttataccacatggaagcgcgccaggatctttcccatgatttttaaaaaggtgagagggctggcagataaaagggggatagtagatctcgaaggtgaggagtggcagcgacgtctggaggaggaggataaggattacctaaaattaacactagaccaggaggaagccacggaaagcaccgtcgagtctgaagaagaaagctccagcgactacacagaatacagtgaagaggaatctgaattctcagagagcgagacaaccgaagaagagtccgaatcagagacaccctcggaagaagaggaaagctcgacaccagagtcagaagagtcagaaagtactgaaagcgagggcgaaaaggctagaaagaacattgtccttgccagacggcgtcctatggtggaggaggtcaaggaggtgaagggccggaaagaggagcctcaggaagagcagaaagagccaaagatggaggaggaggagcattcagaggaggaggaaagcgggccggcacccgtggaggaaagtaccgatcccgaagcgcaggacattccagaagagggcagtgccgagtctgcctctgttgaaggtggcgtagaatccgaagaggagagcgagagtggatcatcttccagttccagcgagtcccagagcgggggtccatggggctatcaggttccagcttacgaccgctcaaagaacgcaaaccaaaagaaaagccccggtgccaacagcgagggatataacacggctctgtag

SEQ ID NO: 201972 - DNA, 3453 bp, synthetic construct
  misc_feature 1..3453: note = Description of Artificial Sequence: Synthetic coding sequence
  source 1..3453: mol_type = other DNA
atgcccagctaccagggctacatcctggagagcgcccccgtgggcgccacgatcagcgacagcctgaatctcacaagccccttacgcattgtggcactcgataaagacattgaggacgttcccccctcgggcgtaccgacaaaagatcccgagcttcatttgtttctgaatgactatacttccgtgtttactgtgacacaaaccggaataactaggtaccttacactccttcaacctgtggatagagaggaacagcagacatatacattcagcatcaccgcctttgatggcgtacaagaatccgagcccgttatcgtgaacatccaagttatggacgcaaatgacaataccccaacattcccggaaatctcctacgatgtgtacgtgtataccgacatgcgacctggcgactccgtgatacagctcactgccgttgacgccgacgagggtagcaacggcgagattacctacgagattctcgttggcgctcagggcgactttattatcaacaagacaacaggcctcatcacaattgccccaggtgtagagatgatagttggccgcacatacgcactgactgttcaagctgcggataacgcgccccccgcggaaaggcgtaacagtatctgcaccgtatacattgaggttttaccccccaataaccagagtccaccacggttcccccagctgatgtacagtctggagatttctgaagccatgagggtgggggcagtccttttaaatcttcaggccactgacagagaaggtgactcaattacatacgctatcgagaacggcgacccgcagcgagtgttcaatttgtcggaaactaccggaattttaacccttgggaaggctctggaccgggaaagcacagatagatatattctgatcatcacggcttctgatggacgtcccgatggtacaagcacagcaaccgttaacatcgtggtgaccgacgttaacgacaatgcacctgtgttcgatccttatcttccgaggaatctctcagtggtggaagaagaagccaatgcctttgtgggccaagtgaaggccaccgacccagatgcaggtattaatgggcaggtccattattcccttgggaactttaacaacctgttccgcatcactagcaacggatcaatatataccgctgttaaacttaatcgtgaggtccgcgattattacgaactggtcgtggtcgccacagatggggcagtccacccccgtcactcaaccctgacgctggctataaaagtactggatatcgatgataattcgccagtcttcacaaactccacatacactgtgcttgtagaggaaaatctgcctgccggaaccacaatcctgcaaatcgaggccaaagatgtcgatttaggggccaatgtgtcttaccgcatacgatctccagaagtgaaacattttttcgcactccatccattcacaggcgagctctctctactcagatcccttgactacgaggctttccccgaccaagaggcctccatcacttttcttgttgaggcttttgacatttacggaacgatgccacccgggatcgctaccgtgacagtgatagtgaaggatatgaatgattatccccccgtgtttagtaagcgaatatataaaggcatggtcgcgcctgacgcggttaaaggcactcccatcaccacagtgtacgcagaggacgctgacccccccggcctccccgcaagcagggtgagatatagggtcgacgacgtacagttcccctatcctgcctcaatttttgaggtggaggaggactcagggagagtgataacaagggttaacttgaacgaagagccaaccacgattttcaaactcgtcgtggtggccttcgacgacggcgaacccgtgatgagctcaagcgctactgtgaaaatactggttctccacccgggggaaatacctaggttcacccaagaagagtatcggccaccccccgtgtccgagctggccaccaaagggacaatggtcggggtaatcagtgcggcggccataaaccagagcatcgtctattcgatagtcagcgggaatgaggaggacacttttggtatcaataacataactggcgtaatttacgtgaatggccccctcgactacgagacgcgcacatcctatgtcctccgtgtacaggccgactcattggaagtcgtactggccaatctaagagtcccatcaaaatctaacaccgccaaagtgtacatcgaaatccaagatgaaaataatcatcctcccgtatttcagaaaaagttctacatcggaggcgtcagtgaggacgcccggatgtttacctcagttctgagggtcaaagccacagacaaggacaccggcaattatagcgtgatggcttaccggctgataataccccccattaaggaaggcaaggagggctttgtggtcgaaacatatacaggactaatcaagacggccatgctctttcacaacatgcgtaggagctactttaaatttcaggtcattgccaccgacgactacggcaaaggcctgtccggcaaggccgacgttctggtcagcgttgttaatcagctcgatatgcaggtaatcgtatctaatgtgcccccaactttggtggaaaaaaagatcgaggaccttaccgagattctcgacagatatgtgcaggagcagattcccggggccaaggtggtcgtggagagcatcggggccagacgccatggagatgcattttcacttgaagattatactaaatgcgacctgacggtgtatgctatcgatccgcaaacaaatagggctatcgatcgaaatgagctttttaagttcctggacgggaaactgctggatatcaataaggactttcagccatactatggcgagggaggaaggattttggagatcagaacacctgaagctgtcacctcgatcaagaagagaggtgaatcattgggctacacagagggcgcactgttagcgttagccttcatcatcatattgtgctgtatccctgccatactcgtggttttggtgagttacaggcaattcaaagtgaggcaggcggaatgcaccaaaaccgccaggattcaggcagccttacccgctgccaaacccgcggtacccgccccagctcccgtggcggcccctccacctccgccaccccctcctcccggagcccatctgtacgaggagttgggggacagctccatgcacaagaactacccatggtctctcgagctcatcctcgcccggaacatggacaaaattattactgtgatgtcaatgggcatgaaatgtctcaatatgggcgtggctgtcgactgctaccatcagctggacagaagaaatatggtccgctggctggtcaagttaaggaagaatatgagaaggaagcgcaagagccagaggaagctaaaaaaccagagattaaagctcgaatccctggtgcgccggaagaagtag

SEQ ID NO: 201973 - DNA, 990 bp, synthetic construct
  misc_feature 1..990: note = Description of Artificial Sequence: Synthetic coding sequence
  source 1..990: mol_type = other DNA
atgttccggcagttctacctgtggacctgcctggccagcggcatcattctggggtcgctctttgaaatctgtctggggcaatatgacgatgactgcaagctcgcgcggggagggcccccggccacaattgtggctatagatgaagagtctcggaatggaaccattttggtggacaacatgctcataaaagggactgctggtggccctgaccctacaatcgagctgtctttaaaggataatgtggattactgggtcctgatggacccggttaagcagatgctttttctgaactctacaggaagggtgctcgacagggatcccccgatgaatatccattctattgtggttcaagtacaatgcatcaataaaaaagtcggcaccatcatttatcatgaagtgagaattgttgtgcgagaccgcaacgacaactcccccaccttcaaacacgaatcatactatgctactgtcaatgagctgactccagtgggaactaccatcttcaccggatttagtggggataacggagccaccgacattgatgatggacccaacggccagattgagtatgtaattcaatacaacccagacgaccctacctctaatgatactttcgaaatcccactcatgttaaccggcaatatagtcctaaggaagagactgaattatgaggataagacgagatattttgtgatcatccaggctaacgaccgggctcagaaccttaacgagcgacgtaccacaacaactacactgaccgtcgacgtgcttgatggggacgacctgggccctatgtttctgccatgtgtgttggtcccaaatactagagattgccgacccttgacatatcaggccgctatccccgagctgcggaccccggatctgggaagtctctgctcaggcaccaattcatggtgtcaggggcgttctggcgtgcactggagctcccctgcttggcggtgtctatttccgcgccggctgcatcagatgtag

SEQ ID NO: 201974 - DNA, 5046 bp, synthetic construct
  misc_feature 1..5046: note = Description of Artificial Sequence: Synthetic coding sequence
  source 1..5046: mol_type = other DNA
atgttccggcagttctacctgtggacctgcctggccagcggcatcatcctggggtcgctcttcgagatctgtctcggccagtacgacgacggctggcggtatatgtattgtaaactagccagagggggtccaccagcgacaatcgtagctattgatgaagaaagccggaatgggaccatccttgtggataacatgttaattaaggggactgctgggggaccagatcccacaatcgagttatccctgaaggataatgtcgactactgggtgctcatggaccccgttaagcagatgttgtttttaaattcgaccggacgtgttctggaccgggatccgccgatgaatattcacagtatagtggtgcaagtgcaatgcattaacaaaaaagtggggaccatcatctaccacgaagtacgcatcgtggtgcgtgatagaaatgataattctccgactttcaaacacgagtcgtactatgccaccgttaacgagctgacaccagttggtactacgatcttcacaggcttttctggagataacggggccactgacatcgacgacgggcctaacggacagatagaatatgtgatacaatataaccccgacgatcccacttcgaatgatacttttgagatcccactcatgctgactggtaatatcgttctccgcaaaaggctaaactacgaagacaaaacacgctacttcgtaataatccaggctaacgatcgcgctcagaaccttaatgaacgaaggacaacgaccactacactcaccgtggacgtgctggatggtgatgatctggggcccatgtttcttccttgcgttctggtccccaataccagagattgcagaccattgacttaccaggccgctattcccgagctcaggacccctgaagagttaaaccccatcatcgtcaccccgccgatccaggcgattgatcaggatcgcaacatccagcccccttcggacaggcctggcatactatattctatcctggtggggacaccggaggattacccccggttcttccacatgcaccccaggaccgcggagctcagcctcctcgagcccgtcaatcgagacttccaccagaagttcgatttggtaatcaaagccgagcaggacaacggccaccccctgcccgcttttgccggactgcacattgagattctggatgagaacaaccagtccccctatttcacgatgcccagttatcaggggtacatcctggaatccgcccccgtcggcgctaccatctcagattcgctgaacctcaccagccccctgaggatcgtagcgttggacaaagatatagaggatactaaggatcccgaactacacctctttctcaatgactacactagtgtctttaccgtgacccagactgggatcacacggtacctgactttactgcagcccgtcgatcgggaagagcagcaaacatataccttctctatcaccgcttttgatggtgtgcaagagtcagagccagtcatcgttaacatccaggtgatggatgccaacgataatactcccaccttcccagagatcagttacgatgtgtatgtttatactgatatgcggccaggcgactccgttatccagttgacagctgtggatgctgatgagggctctaatggcgaaattacctacgaaatccttgttggcgctcagggcgattttatcatcaacaaaaccacgggcctcattaccatcgcgcctggtgtcgaaatgatcgttggcaggacctatgccttgaccgtccaggcggctgacaatgccccgccagcagagaggcgcaattccatctgcacagtatacatcgaagtgctcccacccaacaaccaatctccgcctcgattccctcaacttatgtatagcctggagatctccgaggctatgagggtcggagctgttcttctcaacctgcaggctacggatcgggagggtgatagcatcacttatgctattgaaaatggagatcctcagcgagtgttcaaccttagcgaaaccacaggaatcttgacattagggaaagcactcgatcgagagtccacagatagatatattcttatcatcaccgcgagcgacgggaggccagacggaaccagcacagccaccgtgaatatcgttgtgacggacgtgaatgacaatgcccccgtatttgacccatatctgccacgcaacctgagcgttgtggaagaggaagccaatgcctttgtgggacaggttaaggccaccgatcctgatgccggtattaatggtcaagtgcattatagtctgggcaatttcaacaatctttttaggattactagcaacggctcgatctacacagcagtcaagcttaaccgggaggttagggactattatgagttggtggttgtggccactgatggagccgtgcatcctcggcattccacattaacccttgcaattaaggtcctagacatagacgacaatagccccgtattcacgaatagtacatacacagttctcgtggaagaaaatctgcctgccggcactaccatactgcagatagaagccaaggatgtggacctcggagcaaatgtgagctatcgcatcagaagcccagaagtcaagcacttctttgcacttcacccatttaccggggagctgagcctcttaagatccttggattacgaggccttcccagaccaggaagcaagcattacattcctcgttgaggcttttgatatctacggcaccatgccccccggcattgcaaccgtcacagttatcgtcaaggacatgaatgattacccccctgttttcagtaaacggatatataagggcatggtcgctcccgatgctgtcaagggcactccaatcactactgtgtacgccgaagacgccgaccctcctggcctccccgcctctagagtccggtatcgagttgatgacgtccagttcccgtaccctgccagtatctttgaagttgaggaggattcaggtagagtgattacacgtgtgaacctcaatgaagaaccaaccacaatcttcaagcttgtggtcgtggcctttgacgacggggagcccgtcatgagcagtagcgctactgtcaaaattttggtactgcaccccggggagatcccccgttttacccaggaggagtacaggccaccccccgtatctgagcttgctacaaagggtaccatggtgggcgtaatctccgccgctgctattaatcaatctatagtgtactctattgtatctggtaacgaggaagacactttcggaattaacaacattactggcgtcatctacgtgaatgggcccttggattatgagacgaggacatcatacgtgctccgtgtgcaagccgactctctggaggtggtactggccaacctgagggtgccgagtaaatctaacaccgctaaagtgtacatcgaaattcaggatgagaataaccaccctccagtcttccagaagaaattctacatcggcggcgtctccgaggacgccaggatgtttacctcagtcctgcgagtgaaggcgactgataaggacaccggtaattatagcgtaatggcttatcgcctaattataccaccaattaaggagggaaaggaaggatttgtggtggagacttacacaggcctgatcaagactgcgatgctctttcacaacatgcggagaagctacttcaaatttcaggttattgccaccgacgattatggtaaggggttgtctgggaaggcggacgtcctagtgtctgtcgttaaccaattggacatgcaggttatcgtgagtaatgtgcctcctacgctcgtcgagaagaaaattgaagacctgacagaaatccttgacagatatgtccaggagcagatcccaggcgccaaagttgtggttgagtccataggcgctagacggcatggggatgcttttagcctggaggattatacaaaatgcgacctgacggtttacgctatcgatccgcagacaaaccgggcgattgatcgtaacgagctgttcaagtttctcgatggaaagttgctggacataaacaaggattttcagccttattatggagaggggggaagaatcctcgaaatccgcaccccagaagctgtgacttctattaaaaaacggggagagagcctcggttatacggagggggcgctgctggcactggcctttatcattatactctgctgcatcccggccatcctggtggtgctggtgtcttataggcagcgacaagcagagtgcacaaagactgcgagaattcaggctgcccttcccgcagcaaaaccagctgtccctgctcccgcgcccgtggccgcaccccccccccccccacctccacctcccggtgctcatctatacgaggaactcggcgattcatcaatcctgtactaccgatatgagatgcctcagtacggaagccgtaggcggctgcttccacctgcaggccaggaagagtacggggaagttgttggcgaggctgaggaggaatacgaggaagaagagtgggccaggaagcggatgatcaagctggttgtggatagagaatatgagacgagctcaacgggagaagactccgcacccgaatgccagagaaatagactccaccatccttcgatacattcaaacatcaacgggaatatatatattgctcagaatggttctgtggtacggacccgaagggcatgcctgacagataatttgaaggtcgcttctccagtccgcttggggggcccctttaaaaagctggacaagctggcagtaacacacgaggagaatgtgcccttaaacactctctctaaaggcccattttccaccgagaagatgaacgcgcggccaacattagtaactttcgctccttgccctgtgggcaccgacaacaccgcagtgaagcccctgaggaacagactgaaatcaacagtggagcaggaaagtatgatagactcaaaaaacataaaagaagctctggagtttcattccgatcacacccaaagcgacgatgaagagttatggatgggaccgtggaataaccttcacattcccatgactaagctgtag

SEQ ID NO: 201975 - DNA, 5889 bp, synthetic construct
  misc_feature 1..5889: note = Description of Artificial Sequence: Synthetic coding sequence
  source 1..5889: mol_type = other DNA
atgttccggcagttctacctgtggacctgcctggccagcggcatcatcttaggcagtctgtttgagatttgcttaggccagtacgatgacgcatatagctacgaggattgcaagttggctcggggtggccccccagccacgatcgtagctatagacgaggagtcaagaaacggcacgatcctggtcgataatatgcttataaaggggacagctgggggaccagatcctacgatagagctgagccttaaagacaacgtagactattgggtccttatggacccagtgaagcagatgctatttttgaattccacaggccgggtgctggatcgcgacccaccaatgaacatacacagtatagtagtccaggtgcagtgcatcaacaaaaaggtcggtaccatcatctatcacgaggtgagaatcgtcgtgcgagatcggaatgataattcacccacgttcaaacacgaaagttattatgctaccgtgaacgaactgacccctgtggggaccacaatcttcacagggttctccggagataacggcgcaaccgacatcgacgatgggcccaacggacagatagagtacgttattcaatacaatcctgatgaccccactagcaacgatacatttgagatcccactaatgttaacaggaaatatcgtcttacgtaagcgcttaaactatgaagataagacaagatatttcgtgatcatccaggcgaacgatcgcgcccagaaccttaacgagcgacgaacaaccacaacaactctgactgtggatgtgttggatggagatgatctcggccctatgtttctaccttgcgtcctcgtgcccaatactcgggactgcagaccgttaacctatcaggctgctatccctgagctgcggacccctgaggagttaaatcccatcattgtcaccccccctatacaagcaatagatcaggatcgaaatattcagcctccatccgacaggcccggcattctgtacagtattctcgttggaaccccagaagactatccccgattctttcatatgcacccaagaacggcagagttatccttactggagcccgtgaatcgggatttccaccagaagttcgaccttgtgattaaggctgagcaggataatggtcaccccttgcccgcctttgcgggactacacatagaaattcttgacgaaaacaaccaatccccatacttcacaatgcccagttatcagggctatattctggaatctgctcccgtcggtgccacgatttctgactccctgaaccttactagccctctccggattgttgcgttggacaaggacattgaggataccaaggatccagagcttcatttgttcctgaacgattacactagtgtgtttacggtgactcaaacaggcatcacccggtacctgaccctgctgcagccagtcgaccgcgaagagcagcagacctacaccttcagcatcacggcttttgatggcgtgcaggagtctgagcctgtgatcgtgaacatacaggttatggatgccaacgataacacacctactttcccggaaatttcctacgatgtgtacgtctacaccgacatgcggcctggcgactccgttatacagctcactgctgtagacgcagacgaaggctccaatggtgagataacttacgagattctggttggggcacagggcgacttcataatcaataaaacaacgggcttgattactattgccccaggggtcgagatgattgttggaaggacctacgcgcttacggttcaggcggccgacaatgcccccccagccgagaggagaaactcaatctgtaccgtctatatcgaggttctgccccccaacaatcagtccccccctcggtttcctcaactgatgtactccctagagatcagtgaagctatgcgcgtgggggccgtgctgctaaacttacaagcaacagacagagaaggggattccatcacctatgctatcgagaacggcgacccccaacgcgtgttcaatctcagcgagaccacaggaatcctgacccttggcaaagccttagacagggagtctacggacaggtacatcctgattatcactgccagcgacgggcggcctgatggtacaagtacagcaaccgtcaacatcgtagttacagacgtgaatgataacgcacctgtattcgacccttacttacccagaaatctctcagtggtggaagaagaggcgaacgctttcgtcggacaggttaaggccaccgaccccgatgcgggcataaatggtcaggtccattattccctggggaatttcaacaatctctttcgcattacctcaaatgggagcatctacaccgcggtgaagttgaaccgcgaagtccgtgactattacgagcttgtggtagtggccacagatggagcggtccaccctcggcattccacacttacacttgccatcaaagtcttggacatcgacgataactcccccgtattcactaattccacatacacagtactggtagaggaaaacctaccagcgggtaccacaatcctgcagatcgaggcgaaggacgtcgatctgggcgccaacgtaagctaccgcatcaggagtcccgaggtgaagcacttcttcgctctgcacccctttaccggcgagctttccttgttaagaagccttgattacgaggcttttcctgatcaggaagcctccatcacctttctggtggaggcattcgatatttatggcacaatgcctcccggaatcgctaccgtaactgttatcgtgaaagatatgaacgactaccccccagttttctccaagcggatctacaagggcatggttgcccccgatgccgttaagggaacacccatcactaccgtgtacgcagaggacgccgatccgcctggcttacccgcatcacgagtgaggtacagagtcgacgacgtacagttcccctacccagcctcaatttttgaagtggaggaagatagcggaagagtcatcacccgcgtgaacctgaatgaggagcccactactatctttaagctggtagtcgtagccttcgatgatggagaacctgtgatgtccagctctgcaactgtaaaaattctggtgctacacccaggcgagattccaagatttactcaggaggaataccgaccgccacctgtctccgaactcgccaccaagggcactatggtgggtgttatctcggctgctgctataaatcaatccattgtttattccatcgtgagtggcaacgaggaagacacatttgggataaacaatatcacaggcgtcatttacgtaaacggtccactagactacgagacacgaacaagctacgtcctgagggtacaggccgattccctcgaggtggtgctagctaatctgcgcgtgcccagcaaaagtaacactgctaaggtgtatatagagattcaagacgaaaataaccatccacccgtgtttcaaaagaaattctatattggtggcgtgtctgaggacgcaaggatgttcacaagtgttctgcgagttaaagcgactgacaaggatacaggtaactactcagtaatggcataccggctcatcatcccacccatcaaagagggcaaagaaggattcgtggtggaaacctatactggtctgataaagaccgcaatgttgttccacaacatgcggcgttcatactttaaatttcaggtgattgccactgacgactacggcaaggggttatccggtaaagccgatgttctcgtctccgtggtgaatcagctcgacatgcaggtcatcgtgtccaacgtgcctccgacgctagtcgagaagaagattgaggatctgacggagatcttggatcgctatgtgcaggaacaaatcccaggtgccaaggtggtcgtcgaaagcatcggagcccggaggcacggtgacgcattttccctggaagactacaccaagtgcgacctgaccgtgtacgcaattgacccgcagacaaaccgagctatcgaccgaaacgagttgttcaagtttctggatggaaagcttctggacatcaacaaagacttccagccctactacggcgaaggtggaagaatcctggagatcagaacgcccgaggccgtcacatccatcaagaaacggggcgagtctctggggtatacagagggagccttgcttgcccttgcgtttatcatcatcctttgttgcatccctgccatcctggtcgtgttggtcagctaccggcacttcaagcgccgccaggcggaatgcactaagaccgctagaatccaggcagctctgcccgcagctaagcctgccgtgcctgctccagcaccagtggctgcgccacccccccccccacctcctccacctggggctcatttgtacgaggaactgggggacagctctatgaaggggctcttcctcctgtatcacttccagcaatcaagaggtaataactccgtatctgaagaccgtaagcatcagcaggttgtgatgccattttccagcaatactatcgaggcacataagtcagcccatgtcgatggttcactgaaaagtaacaagctcaaatctgccaggaagttcaccttcctctccgatgaggacgatctttctgcgcataatccattatacaaggagaacatctcccaggtatccaccaactctgacatctcccagcgaactgactttgttgaccccttctccccaaaaatccaagcgaagtccaaatcactgcgcggccctagagaaaagatccagcgactgtggtctcagagtgtttctcttccccgacgcttaatgaggaaagtacctaatcgccctgagataattgacctccaacagtggcagggcacccggcagaaggcagaaaacgagaacacagggatttgtaccaacaaacgtggaagcagtaaccctctccttaccactgaagaggccaacctgacggaaaaggaagagattcggcagggagaaacactgatgattgaaggtaccgaacagcttaagtctttgagctcagatagttcgttctgttttccacgcccgcactttagcttctctacacttcctactgtgagcagaacggttgaacttaaatctgagcctaacgtgatctcttctccagcagagtgtagcctggaactcagcccctccaggccttgcgtccttcacagtagcctatctaggagggagactcctatctgcatgttgccaattgagaccgagcggaatatcttcgagaatttcgctcatcccccgaatatctccccttccgcctgcccgcttcctcctcccccccctatctcacccccttcaccgccgcccgcccctgcacccctggctcccccaccggacatttccccattcagtttattctgtcctcccccatccccgccctcgattcccttgccattgccaccccctaccttttttcctctcagcgtgagcacgtccggacccccgacccccccgctgctgcctccttttcccacccctctgcctccaccgcctcccagtattccatgcccccccccgccctccgcgtcattcctgagcaccgaatgtgtctgtattaccggtgtaaagtgtactaccaatctcatgcccgctgagaagattaagtcctctatgactcaactcagcaccacaactgtgtgtaagactgatcctcagagagagccaaaaggcattttaaggcatgtgaagaatttagcagagctcgagaaatctgtggccaacatgtattcccagatcgaaaagaattacttgcggaccaacgtgtccgaactgcagacaatgtgtccttctgaggtgacaaatatggaaatcacttcggaacagaacaagggatccctcaataacatcgtcgaaggaaccgagaagcagtcccacagccaaagtacttccctgtag

SEQ ID NO: 201976 - DNA, 5661 bp, synthetic construct
  misc_feature 1..5661: note = Description of Artificial Sequence: Synthetic coding sequence
  source 1..5661: mol_type = other DNA
atgttccggcagttctacctgtggacctgcctggccagcggcatcatactggggtccctgtttgaaatttgtctggggcagtatgacgacgactgtaagctcgcgcgcggaggccctcctgccacaattgtggcaatcgacgaagagagcagaaacggaactatactcgtagataatatgcttattaaaggaacagccgggggcccagatcccaccattgagttgtcactgaaagataacgtagactactgggtcctgatggatcctgtaaaacagatgctcttccttaatagcaccggtagagtgctggatagggaccctcctatgaacattcactccattgtcgtgcaagtacagtgtattaacaagaaggtgggcactataatttaccacgaagtgaggatcgtcgtcagggatagaaatgataattctcctacgtttaaacatgaatcctactatgccactgtcaatgagctaacccctgtgggaactacaatcttcactgggttctctggcgacaatggagccaccgatattgatgacgggcccaatggccagatcgaatacgtgatccagtacaaccctgatgatccgacatccaatgacacattcgaaatcccgctgatgctaactggtaatattgttctccggaaacgcctgaattacgaggataagacgcgctatttcgttataattcaggccaatgaccgcgcacagaatttaaatgaaaggagaactaccacaacaacgctgactgtggatgtgttagatggggatgacctgggcccaatgtttctgccttgtgttttagtgcctaacactagagattgccgacctctcacatatcaggcggctatcccagaacttcgcaccccagaggagttgaatcccatcatagtcactccccccatacaggctatagaccaggataggaatatccagcctccgagcgaccggcctggcattctgtattcaatcctggtgggtaccccagaggattacccccgattttttcacatgcacccaaggacggctgaactaagcctgctggagccagtcaatcgcgatttccatcagaagtttgatctcgtgattaaggccgaacaggacaacggtcaccccctgcccgcattcgccgggctgcacattgagattttggatgagaacaaccaatccccctatttcacaatgcctagctaccagggatatatactggaatccgcacctgtgggtgcgacaatttcagacagcctgaatctgactagccctctgcgtattgtggctctggacaaagacattgaagacaccaaggatcccgaactacatttattcttaaatgattatacctctgtgtttaccgtgacccaaaccggcattactagatatcttactctcctgcaaccagttgatcgtgaagaacagcagacgtacacctttagtatcacagcctttgatggtgtccaggaatcggaacccgtgattgttaatattcaagtcatggacgccaacgacaacactcccacctttccagagataagttacgacgtgtatgtgtataccgatatgcgccctggcgacagtgtaatccagctcacggccgtagatgctgacgagggaagcaatggtgagataacctatgaaattctggtgggtgcacagggggattttattatcaacaaaacaacgggtctgataaccattgccccaggggtggaaatgattgtgggcagaacctatgctctgactgtccaggctgcagacaatgcaccccccgctgaaagaagcacaggaattttaacattagggaaggccctcgacagagaatctactgatcggtacatactaatcatcacagctagtgatggacgcccagatggtacctccaccgctacagttaatatagttgtgaccgacgtcaacgataacgcaccggtgttcgacccctatctgccccggaacctgagcgtggtggaagaggaggccaatgcattcgtggggcaggtgaaggccactgatcccgatgctggaattaatgggcaggtgcattactccctgggaaactttaataacctatttcgaatcacctcaaacggctccatttacaccgctgtcaaattgaaccgggaagtgagagactactatgaattggtagtggtggccacagacggcgccgtccatcctcggcactctacgctgacgctggctataaaggtgctggacattgacgacaatagtcctgtgttcactaacagcacgtatacagtcctggttgaagagaacctgcccgccggaacaaccattttacaaatcgaagccaaagacgtggacctgggcgcaaatgtgtcctataggatcagaagccccgaggttaagcatttctttgcgctgcaccctttcactggggagctgtctctgctcaggtccttagactatgaagcatttcctgaccaagaagcatcgataaccttccttgtcgaagcatttgatatctatggcactatgccacctggcatcgccacagtcaccgtgattgtcaaagatatgaacgactatccacctgtcttttcgaagcgcatctacaagggtatggtcgctccggacgcagtgaaaggaactccaataacaacggtgtacgctgaagatgcagacccccccgggctccctgcctcaagggtaaggtaccgggtcgatgacgtccagtttccataccccgcttccatttttgaagtggaggaagattccggtcgggtgatcacccgggtgaatttgaacgaggagcccacaaccatctttaaattagtggtggtcgcttttgacgacggcgagcctgtgatgagctcatcagctaccgttaagatcctggtattgcaccctggtgagatccctcgctttacccaggaggaatacagaccgccaccagtgtctgaattagcaaccaagggcaccatggtaggcgttatatctgcagccgccatcaaccagtcaatcgtctactctatcgtctctggcaacgaggaggatacatttgggatcaataatatcacaggagtaatctacgtgaatggccccctagattacgagaccaggacttcttatgtgctccgagtacaggctgattctcttgaagtggtgctagccaatctgcgcgtgccttcgaaatccaatacagcgaaagtttacatagagatccaggatgaaaacaaccacccgcctgtgttccaaaagaagttctacattggaggggtatcagaagatgctcgtatgttcacttctgtgttgagagtaaaggctacagataaagacactggcaactacagtgttatggcatacaggcttatcatcccccctatcaaggaggggaaagaaggcttcgttgtggagacttataccggacttattaagactgccatgctgtttcacaacatgagacggagctacttcaagttccaggtgatcgcaaccgatgattacgggaaaggcctcagtggtaaagcagatgtgctggtaagtgttgtgaaccaattagacatgcaagtaatcgtgtcaaacgtgcccccaaccctggtggagaagaagattgaggatctgacggagatcctggatagatatgtacaggaacagatcccaggagcaaaggtagttgttgagtcaatcggagcccgtcgccacggcgatgccttttctctggaggactacacaaaatgtgacttaacggtctacgcaatcgatccacagacaaatagggcaatcgacaggaatgagctatttaaattcctggacggaaagcttctggacatcaacaaagatttccaaccctactatggggagggagggagaattctggagatccgcacgccagaagccgtgacgtcaataaaaaagcgaggagaatcccttgggtacaccgagggagccctgttagcactagccttcatcattatactatgctgcattccagctattttggtggttctcgtgtcttataggcactttaaaagacgacaggccgagtgtacaaagactgctagaatccaggcggcactgccggccgctaagccggctgtccccgccccggctcccgtggccgccccccccccaccgcctcctccaccacccggggcacatctgtatgaggaactgggggactcatcgatgaaggggctgtttctattatatcacttccaacagagcagggggaacaatagcgtgagcgaggatagaaagcaccagcaagtggtaatgccatttagctctaatacgatcgaggcacataaatccgcgcacgtggatgggtctctgaagtctaataaattgaagtcggcccgcaagtttactttcctgtctgacgaggacgatctttcagcacacaatccactttataaggagaacatatctcaggtctcaaccaattctgatatcagccagaggacagacttcgtagaccccttctctccaaagatacaagcaaagagtaaatctctgcgcggtcctcgagagaaaattcaacggctgtggtcacaatcagtctcattaccccgtcgactgatgaggaaggttccaaaccggcctgagataatcgatctccagcagtggcaggggaccagacaaaaggcagaaaacgagaacactgggatttgcacaaacaagagagggagcagcaaccctctactgaccactgaagaggccaatctgacggagaaagaggagatcagacagggggaaaccctgatgatcgagggcacagaacagttgaagtctctctccagcgatagctcgttctgttttcccagacctcatttttcatttagcacactgcccaccgtaagtagaaccgtcgaactcaaaagcgaaccgaatgtaatcagttccccagccgaatgcagtctagagctttcgcccagcaggccttgtgtgctgcactcttctctgagtcgtcgcgagaccccgatctgcatgttacccatcgaaactgagagaaatatatttgagaattttgcccacccaccaaatatcagcccatcggcttgcccccttccacccccgccacccatttcccctccttcacccccccctgctcccgccccactcgctccacctcccgacatctcccccttttccttattttgccctcctccttcaccaccgtctattccgctaccgctccccccccctactttttttcctctgtccgtctcaacaagcggtcctccaaccccacccctgcttcctcccttccccacacctcttcctccaccaccacctagtatcccctgtccacctccccctagcgcctctttcctctcgacagagtgtgtgtgcatcacgggagtgaagtgtacgaccaacctgatgcccgcagaaaaaatcaagtccagcatgacccagctgagtaccacaacagtatgtaagacagaccctcagagggagcccaagggtatcctgagacacgtgaagaatctggccgagctggaaaaaagtgtggcaaatatgtattcacagattgagaaaaactacttgaggacaaacgtgtctgaactgcagaccatgtgtccgtcagaggtgactaacatggagattaccagtgaacagaacaagggcagcctcaataatatcgtcgaaggaacagagaagcagagtcactcccagagtacatccttgtag

SEQ ID NO: 201977 - DNA, 1965 bp, synthetic construct
  misc_feature 1..1965: note = Description of Artificial Sequence: Synthetic coding sequence
  source 1..1965: mol_type = other DNA
atgttccggcagttctacctgtggacctgcctggccagcggcatcattctcgggtctctttttgagatttgccttggccagtacgacgatgactgtaagctggcccgcggcgggccccccgcgacaatcgttgccattgacgaggaaagtcgtaacggcacaattctggtggacaatatgctaattaaaggtacagctggaggacccgatcctaccatagagctgagcctgaaagacaatgtggactactgggtgcttatggaccctgtgaagcagatgctttttctgaatagcaccggaagggtgctcgaccgggatcctcccatgaacatccactctatcgtagtgcaagttcagtgcattaataaaaaggtaggtacaatcatctatcacgaggtccggatcgtcgttcgtgataggaacgataactccccgacttttaaacatgaaagttattatgcgactgtgaacgaactcactcccgtgggcaccactatctttacaggattcagcggggacaacggggcaactgacatcgacgacgggcctaacgggcaaatcgagtatgtgatccagtataatcccgatgatcctacctccaatgacaccttcgaaatccccctcatgctaactggtaacattgtacttcgcaagcggttgaactatgaggataagacacggtacttcgtgatcatacaggcaaatgatcgcgctcagaatctgaatgagcggcgcactactacaactacactaacagtcgacgtgttggacggcgatgatttgggccctatgtttcttccatgtgtgttggtgcccaacacaagggactgtcgcccattaacatatcaagctgccatcccagagctgaggacacctgaggagctcaatcccattatcgtgacgcccccaatacaggcaattgaccaagatcgaaacattcagcccccatctgatagacctggaatattgtactccatactggtcggcacaccagaagattatcccagattcttccatatgcatccccgaacggcggagcttagcctgcttgagccagtgaacagagacttccaccagaaatttgaccttgtaataaaagcagagcaagacaacggccacccactccctgcctttgctggattgcacattgagattctcgacgaaaacaaccagtctccatactttacaatgccttcgtaccagggctatattctggagtccgcccccgttggcgccacgatctctgattcgttaaaccttacatctccactgagaattgtcgccttggataaggacattgaagacacaaaggaccccgagttgcatctcttcctgaatgactataccagtgtcttcacggtgacgcagactggaatcaccagatacttgacactactgcagccagtggaccgagaagaacagcaaacttacacattctcaatcactgcctttgacggcgtgcaggagagcgaaccagtgattgtgaacattcaggtaatggatgcgaacgataacacgccgacttttccagaaattagctatgacgtgtatgtgtatactgacatgcggcccggagactccgtaattcagctcaccgctgtggatgcagacgaaggttcaaacggggagataacttatgaaatcttggtaggtgcccaaggcgattttatcatcaataagacgactggcctaatcaccatcgctcctggcgtggagatgattgtgggtcgcacctacgcgcttacagtccaggcagcggataatgccccacctgccgagcgacggaacagcatttgcactgtgtatatcgaagtgctgcccccgaacaaccagagtccccctagatttccgcaattgatgtactccctggaaatctctgaggccatgagggttggcgccgtgctactgaatctgcaacacggcgattcaaatctgcgcgagagtaccggacagggtaagcactag

SEQ ID NO: 201978 - DNA, 5034 bp, synthetic construct
  misc_feature 1..5034: note = Description of Artificial Sequence: Synthetic coding sequence
  source 1..5034: mol_type = other DNA
atgttccggcagttctacctgtggacctgcctggccagcggcatcattctgggttcattgttcgagatttgtctgggccagtacgatgatgattgtaagctggccaggggagggcctcccgctacgatcgtagcaatcgatgaagaatctaggaatggcacgattctcgtagacaatatgttgatcaaggggactgcaggtggtccagaccctacaatcgagctatcactgaaagacaacgtcgattactgggtcctgatggatccagtcaagcaaatgctctttcttaatagtaccggtcgggttctggaccgagaccctcccatgaacatacattccatcgtggtgcaggtgcagtgcatcaacaaaaaggtgggcaccattatctaccacgaagtacgcatcgttgtgagggacagaaatgacaactctcccacttttaagcacgagtcatactatgccaccgtgaatgagctgacccctgtgggtacaacaatctttacaggcttctcaggcgataacggggcaactgacattgatgacggccctaatggccaaatcgagtacgtaatacagtacaatcccgacgatcccacttccaatgacacattcgaaatcccacttatgctgactggcaacatcgtactacgaaagcgcctgaactatgaggataaaaccagatactttgtgatcatccaggccaacgatcgtgcacagaatctgaatgaaagacgtacaacaacaacgaccctaactgtagacgtcctagacggtgatgacctcgggcccatgttcctgccatgtgtattggtgcctaacacgcgtgactgcaggcctcttacataccaagccgccattcccgagctaaggacccccgaagagttgaaccccattattgtgacaccgcctattcaggcaatcgaccaggacagaaacatacagccccctagtgatcgccccggaatcctctactcaattctggtgggaactccggaggactacccacgtttttttcacatgcacccacgaacagcggagctgagcctcttggagcccgtcaaccgcgacttccatcagaagttcgacctggtgatcaaagccgaacaagacaacggccatcccctcccagcgttcgccggactccatatcgagattctcgacgagaacaaccaatccccttactttacgatgccgagttatcaaggctacatcctggaaagcgctcccgtgggagccaccattagcgatagcctgaacctgacttctccccttcgtatcgtagctttggataaggatatcgaggacaccaaggatccagaactgcacctgtttctaaatgactatacctccgtgttcacagtcactcagaccggcattactagatatttaacccttttacagcccgtcgacagggaggaacagcaaacatacacattttcgattaccgctttcgatggagttcaggagagtgagccagtgatagtaaatatccaagttatggatgccaatgacaatacacccacattcccggagattagctacgacgtgtatgtgtacaccgatatgaggcccggagattctgtgatccagctgaccgccgttgatgccgacgaaggaagtaacggcgagattacgtacgaaatcctcgtgggcgcacaaggtgacttcattatcaataagacgaccggtttaattactattgcacccggcgtggaaatgatcgttggccgcacctacgcgcttaccgtgcaagccgctgacaatgctccgcccgcggaacgccggaattccatttgcaccgtctacatcgaagtgctccccccgaataaccagtctccccctcggttcccccagctgatgtacagtcttgaaataagcgaagcaatgagagtgggtgctgtgctgctgaaccttcaggcaactgaccgggaaggagatagcatcacatatgctattgagaatggggacccgcagcgtgtgtttaatctgagtgagactaccgggattttgacactcggcaaagcccttgatcgtgagtccaccgataggtatatacttatcatcactgcttccgacggtcgtcctgacggcacgtccaccgccacggttaacattgtagtgaccgatgtcaacgataacgccccagtttttgatccatacctgccacggaacctgagtgtggtggaagaagaagccaatgccttcgttggtcaagtcaaagctactgacccggatgctggtattaacggtcaagtgcattatagtcttggaaatttcaacaatctttttagaatcacgtccaacgggtccatctacacagccgtgaaacttaatagggaagttcgggattactatgaattggtcgttgtcgctacggatggcgctgtccaccctagacatagcaccctcaccctcgcgatcaaagttctcgatatcgacgataactcaccagtgtttaccaattcaacatataccgttctcgtggaagagaacctccctgccggtacaactatcctgcaaatcgaggctaaggacgtggatttgggagccaatgtctcttatcgcatccggtcgcccgaggtgaagcacttctttgcactccatccgttcacaggcgagctgtctctcctaaggagtttggactacgaggcttttccagatcaggaggcatcaattaccttcctggttgaagcctttgacatctacggaacaatgccacccggtattgccacagtaacagttatagtgaaagacatgaatgactacccccccgtgttctcaaaacgcatttacaagggcatggtcgccccagatgccgtgaaggggacaccaattactacagtttatgctgaagacgccgatccacccgggctccctgcaagcagggttcgataccgcgtggacgacgtccaattcccataccctgcttctattttcgaagtcgaggaagatagcggtcgggtcataactcgggtcaatcttaacgaggagccaactaccatcttcaagctggtcgtggtggctttcgacgatggagaaccagtaatgtcatcatctgctactgtcaagatcttagtgctgcacccgggggaaattcctcgcttcacccaagaggaataccgacctccaccagtcagtgaactcgctaccaagggcaccatggtgggagtgatttccgctgctgccataaaccagtccatagtgtatagcattgtctccggcaatgaggaggatacctttggcattaataatataacaggagtgatttacgtaaacggcccgctggattacgagacacgcacgtcgtacgtcctgagagtccaagctgactccctcgaggtggtgctggctaacctgagagtcccatccaagtctaacaccgccaaggtgtatattgagatacaagacgagaataatcaccctccagtgtttcaaaagaagttctatatcggcggcgtgagcgaagatgccaggatgtttacctccgtgctccgggtcaaggctacggataaggataccggtaactactcagtgatggcttaccgactgatcattccaccaattaaggaaggaaaggagggtttcgtggtggaaacttacactggtctgattaagaccgcaatgttgttccataacatgagaagaagctactttaagtttcaggtcattgcaaccgacgactacgggaagggtctcagcggtaaggctgacgtcctggtctctgtagtgaatcaactcgacatgcaggtcatcgtgtccaatgtgcccccaactctggtagagaagaagatcgaggatctcactgaaattttggaccgttatgttcaggaacagattcccggagcgaaggttgtggttgagtccattggtgctcgaaggcatggcgacgccttctcccttgaagattacaccaagtgcgacttaactgtgtatgcaatagatcctcagactaatagggcaatagatcgtaatgaactttttaagttcctggacggaaagctactggacatcaacaaggactttcaaccctactacggtgagggaggaagaatacttgagatcaggactcccgaagccgttacaagcatcaagaaaagaggggagtcactggggtacactgagggggcgctgcttgccctggcatttatcattattctctgttgcattccagccatcctggtggtgcttgtctcatacaggcacttcaagaggcggcaggccgagtgcaccaaaacggccagaattcaggcagcactgccagcagccaaacctgctgtaccggctcccgctcctgtggccgctccaccccccccaccacctcccccccctggcgctcacttgtatgaggagttgggggatagttcgatctatcgatatgaaatgccccaatacggcagcagacgccgcctgctgccccccgcgggtcaggaggaatatggagaagtggtcggtgaggccgaggaggagtacgaggaagaagaatgggcacggaaacgcatgatcaaactggtagtcgaccgagaatacgagaccagctcaaccggggaagattccgcccccgagtgccaacgaaatagactgcaccatccttcaatccactcaaacattaatgggaatatttacatcgcgcagaacgggtcggtcgtgcggacccggcgagcctgtttgacggataaccttaaggttgctagccctgtaaggctgggtggcccattcaagaagcttgacaagctcgctgttacacatgaagagaacgtgcctttgaacacactgtcaaagggacccttcagtaccgagaagatgaatgccaggcccactctggtcacgtttgccccctgtcccgtgggcacagacaatactgctgtcaagcctctgcggaatagactcaagagcactgtggagcaggaatccatgattgactctaaaaacattaaggaggctctggaattccatagcgatcatacccaaagcgacgatgaggaactctggatggggccatggaataatctgcacatccctatgactaaattatag

SEQ ID NO: 201979 - DNA, 279 bp, synthetic construct
  misc_feature 1..279: note = Description of Artificial Sequence: Synthetic coding sequence
  source 1..279: mol_type = other DNA
atgttccggcagttctacctgtggacctgcctggccagcggcatcattttggggagcttgttcgaaatatgcctggggcagtatgacgatgattgtaaactggcccgcggcggcccacctgccacgattgtggcgattgatgaggagagccggaatgggacaatactcgtggataacatgctcatcaaaggaacagctggcggccccgaccccaccattgagctcagcctgaaagataatgtggactactgggtgctgatggatcctgtgaaacaatag

SEQ ID NO: 201980 - DNA, 3453 bp, synthetic construct
  misc_feature 1..3453: note = Description of Artificial Sequence: Synthetic coding sequence
  source 1..3453: mol_type = other DNA
atggccccccccctgcggcccctggcccggctgcggccccccggcatgcttctccgagccctcctcttactgctgctgctatcccctctcccaggcgtgtggtgtttctctgagttatcatttgtgaaagaaccccaagatgtcacagtgacgcggaaggaccctgtggtcctggactgccaggcacacggcgaagtcccaattaaagttacctggttgaaaaatggcgctaagatgtctgaaaacaaaagaattgaggtactgtctaatggctcactatatatttcagaggtcgaaggacggaggggagaacagagcgatgaagggttctaccagtgtctggctatgaacaagtatggcgctattctctcacagaaggcccatttggccctgtctaccatttcagcgtttgaggtgcagcctatatcgacggaagtgcatgagggcggagtggcaaggtttgcatgcaagatctctagccacccgccagcagttattacttgggaattcaatagaacaactcttccaatgactatggacagaatcaccgcgctgccaaccggagttctccagatttatgacgtgagtcagagagatagtggcaactaccgatgcatagctgcaacggtcgcccaccggagaaaaagtatggaagcgagcctgactgtcatccccgcaaaggaatccaagagctttcacacccctactatcatagccggcccccagaacataacgacctccctgcaccagactgtggtcttagagtgcatggcaaccgggaatccgaaaccaatcatatcgtggtcacggctggatcacaagtcaatcgatgtttttaatacccgggtcttgggaaatggaaatctgatgatttccgatgtgaggctgcagcatgctggcgtgtacgtgtgcagagctacaacacctggaacccgtaattttacagttgccatggccacactgacagtgctagcccctcctagttttgtcgaatggcctgagtcactgacgcggccacgggcgggaaccgcccggttcgtttgtcaggccgaaggaatcccttctcctaaaatgagttggctcaagaacggccgcaagatccactccaacgggcgtatcaagatgtacaattcaaagctagttatcaaccagatcattcctgaagacgacgccatttaccagtgtatggctgagaattcccagggaagtatcctgagtagagctagactgactgtggttatgagcgaagatcggcccagcgctccttataatgtgcacgccgagaccatgtcatcgagtgccatcctcctggcctgggagcgccctctgtacaactccgataaggtgatcgcctatagcgtgcactacatgaaggcggagggtctgaataatgaagaataccaggtggtgatcggcaatgacacaacccactacatcatagacgatttggagcccgcaagcaactataccttctacatcgtcgcctacatgcctatgggagcttcccaaatgtcagaccatgtcacacagaacaccctggaggacgtgcctttaagaccgcctgaaatcagtctcaccagcaggagtcccacagatatcttaatcagctggctgcctattcctgccaaatatcgccgtggacaggtggttctgtaccgactgtctttcaggcttagtacagaaaattctattcaggtgctggagctcccaggaacaacccacgagtacctactggagggactcaagcccgatagcgtctacctggtaaggatcaccgcagctacaagagtgggcctcggagaatcttcagtctggactagccatcggacaccaaaggccacgtcagtgaaggctcccaagtccccagagcttcacctggagcccctgaactgtacaaccatctccgttagatggcaacaggacgtggaggatacagcagctatccaagggtacaagctgtattataaggaagaagggcagcaggaaaacggaccaatttttctcgacacaaaagatctcctgtacacactctcaggcttggacccgcggcgaaaataccatgtgagactgctggcctacaacaatatagacgacggatatcaggctgaccagactgtctcaacaccaggctgcgtgagcgtccgggatcggatggttccccccccccctcccccccaccatctttatgccaaggccaacaccagctctagcatttttctgcattggaggagacctgcatttaccgctgcccaaataattaactacaccatacgctgcaatccagttgggctgcaaaacgcaagccttgtcctgtacctgcagacatccgagacccatatgcttgttcagggactcgagcctaatacaaagtatgagtttgccgttagattgcacgtggatcagctgtccagcccctggagccccgtggtctatcactctaccctgcctgaagcaccagccggccctccagtcggagtcaaggttacactgatcgaggacgacaccgccttggtgtcctggaaaccgccagacggtcctgagactgtggtcacgaggtacaccattctgtacgcctcaaggaaggcatggatcgccggggagtggcaagttctgcacagagaaggggctattacaatggccctcctggaaaacctcgtagctggcaatgtttatatagtgaagattagcgcgtcaaacgaggtgggagaaggtccattctccaatagtgtggaactggccgttctgccaaaggaaaccagcgagtctaatcagagacccaaacgcctagacagcgccgacgccaaagtatactccggttactaccatctcgaccaaaaatccatgaccggcatcgcagtgggagttggaatcgcccttacgtgtattctgatctgtgtcttgatcctgatctatcgaagtaaagctcgcaaatcctcagcctcaaagactgctcaaaatgggacacagcagctccctaggacatctgcaagcttggctagcggcaacgaggtaggcaaaaatctggagggggctgtggggaatgaggagagcctaatgccaatgatcatgcctaactctttcatcgatgccaagggtggaactgatctgattattaattcatacggtccaatcattaagaacaattcaaagaaaaagtggttcttctttcaggactcaaaaaagatccaggtggaacagccgcagagaaggtttacgcctgcagtttgcttttaccagcctggcaccacggtacttataagcgatgaggattcacccagttcgccagggcagactacctcattctccaggccattcggagtggccgccgacaccgaacactctgccaatagcgaagggtctcatgagaccggggattcgggccgcttctcacacgagtcgaacgacgagattcacctatcaagcgtgatttcgacgaccccccccaatctgtag

SEQ ID NO: 201981 - DNA, 1434 bp, synthetic construct
  misc_feature 1..1434: note = Description of Artificial Sequence: Synthetic coding sequence
  source 1..1434: mol_type = other DNA
atgggccggaccgtggtggtgctgggcggcggcatcagcggcctggctgctagctatcacctgagccgcgctccctgtccccctaaagtcgttctcgtggaatcttccgagcgcctcggcggttggatcagatccgtgcggggacctaacggcgccatatttgagttgggcccccgcggaatccgaccggctggggctctcggagcccgaaccctgctgctagtgtctgaactcgggctggactccgaagtgttaccggtacgaggagaccacccagccgctcaaaatcgattcctgtacgtcggcggggccctgcacgccctgcccacagggcttcggggcctactccgccctagcccgccattctcgaaaccactgttctgggccggtttgcgggaactgaccaaaccacgcgggaaggaacccgatgagacagtgcactcctttgcccagcgccggctcggccccgaggtggcctcactggctatggatagtctctgtcgcggggtgtttgctggaaatagcagagagctgagcatcaggagctgctttccatcactctttcaggctgagcagacacaccgctcaatccttttggggctactgctgggcgccggccggactcctcagcctgacagcgctctcatcaggcaggctctggctgagcgttggtcgcaatggtctttgcgtggcggcctggaaatgctgccacaggctcttgaaacccacctgacttcgaggggcgtctctgttctgaggggccagcctgtctgtggattatctcttcaagcagagggccgttggaaggtttccttgcgagattcatcccttgaagccgaccacgtgatctcggcgataccagcgagcgtgctcagcgaactgctccctgccgaggctgctccgctggctcgagccctgagcgcgattaccgctgtgagtgtggcagtagtgaatctacagtatcagggagctcacctgcctgtccagggttttggacacctcgtgccatcgtccgaggacccaggcgtgctcgggatcgtttatgacagcgtggccttccccgagcaggatggcagcccacccggccttcgagtgaccgtcatgctcgggggcagttggttgcaaaccctggaagcctcaggatgtgttctatcacaggaactgttccaacagagggcccaagaggcagcagcaacccagctgggactcaaggaaatgccctcgcactgcctggtgcacctgcataagaactgcatccctcagtacactttaggccattggcagaagctggagtccgcccgacaattcttgaccgcgcatcgtttgcctttgactttggctggtgcaagctatgaaggggtagcggtgaatgactgcatagagagcgggcgtcaagcagcggtgagcgtgctagggaccgagccgaacagttag

SEQ ID NO: 201982 - DNA, 1434 bp, synthetic construct
  misc_feature 1..1434: note = Description of Artificial Sequence: Synthetic coding sequence
  source 1..1434: mol_type = other DNA
atgggccggaccgtggtggtgctgggcggcggcatcagcggcctggcagcaagttaccacttaagccgcgcaccttgtcctccgaaggtcgtgctggtcgagtcatctgaaaggctaggaggctggattagaagcgtgcgggggccaaatggcgctattttcgaactgggcccacggggaattaggcctgccggcgcattaggcgcccgaacgcttctgctggtctccgagctgggcctggatagcgaagtcctcccggtgcggggcgatcaccctgccgcccagaatcgattcctgtatgtggggggagctctgcatgccctgccgactggtttgcgtgggctcctgcggcctagtccacctttcagcaagccgctgttctgggctggcctgcgagaactgacaaaaccgcgcggcaaagagcccgatgagacagtgcactctttcgctcagagacgtttgggacccgaagtcgcctctctggcgatggactccctatgccgtggtgttttcgccgggaatagcagagaattatcaatccggagctgcttccctagccttttccaagctgagcagactcatcgtagtattctgcttggcctcctgcttggcgcgggccggacaccccaacccgacagtgcgctgattcgccaggctctagccgagagatggagccagtggtctctgcggggaggattagaaatgcttccacaggcacttgaaacacatctaacaagccggggtgtctcggttttgcgcggccagcctgtgtgcggattgtctctgcaagccgagggacgctggaaggtttcactgcgggatagcagtctggaagctgaccatgttattagtgcaattcccgcatcagttctgtcagaattactccccgccgaggccgcaccgctggccagggccctgtctgccattaccgctgtcagcgtagcagttgttaacttgcagtatcagggtgcccatctgccagtccagggattcggtcacttggttccttcaagcgaagaccctggagtgctaggtatcgtgtatgatagtgtcgcctttcccgagcaagacggctcacctcccggcctcagagtgacggtgatgctaggaggatcatggcttcagactcttgaggcaagtggatgcgtactgagtcaggaattatttcagcaaagagcacaagaggccgccgctacgcagcttggacttaaggagatgccaagccactgtctggtgcacttacacaaaaactgcatcccccaatatactttagggcattggcagaagctcgaatctgcgaggcagttcctcaccgctcatagactgcccctgaccttggctggggcatcatacgagggagtcgcagtgaatgattgtatagaatcgggcagacaggcagcggtaagcgtgctgggaaccgaaccgaattcttag

SEQ ID NO: 201983 - DNA, 717 bp, synthetic construct
  misc_feature 1..717: note = Description of Artificial Sequence: Synthetic coding sequence
  source 1..717: mol_type = other DNA
atgggccggaccgtggtggtgctgggcggcggcatcagcggcctggccgcttcttatcatttgagtagagctccgtgtcctcccaaggtagtcctcgtggagtctagtgagcgtctgggaggctggattaggtctgtgcggggaccgaacggcgcaatatttgagctgggacctagggggatcaggccggcaggggctctcggtgctagaacgctactgcttggatttgggcatctggtcccaagttctgaagatcccggagttttaggaatcgtgtatgatagtgtggcgtttcccgagcaagacgggagccctccagggctacgggtgacagtcatgctgggagggagctggctgcagactctggaggcctctgggtgtgtattatcacaggagttgttccagcagcgggcacaggaagctgccgcgactcaactgggtcttaaagagatgcctagccattgtctcgtgcacctgcataaaacaaaaaatcagcttaaatggaggcagtcccacgataggacagtggaatggccaaaagaataccctgggaggtctcggaaacaggccccatccatcttgcatgtgccagggtgtcagttgcttagatgtagggaccgagatcaccttggggccgtttccgaacaaccaaggtcctccgccgagagccgcgtgggtgtggcgagtagcacttttagcacctttcctctgttttag

SEQ ID NO: 201984 - DNA, 1335 bp, synthetic construct
  misc_feature 1..1335: note = Description of Artificial Sequence: Synthetic coding sequence
  source 1..1335: mol_type = other DNA
atgggccggaccgtggtggtgctgggcggcggcatcagcggcctggccgcgtcttaccacctctctcgggcaccttgcccccctaaggtggttctcgtggaatctagcgagaggttgggtggttggatcagaagcgtgcgggggccaaatggggcgatttttgaactgggcccacgcgggattcgccctgcgggcgctctaggcgcaagaaccttgctgctcgcttgcggtgaacaggtgtctgagctcggattagatagcgaggtcttgccggtgcggggagatcaccctgcggcgcagaaccgcttcctgtatgtgggcggcgctctgcatgcacttccgacggggctttccccttcgctgacacttaaagtggcctcccttgcaatggatagtctctgcagaggggtgtttgccggtaatagtagagaattatccatcaggtcctgctttccttctctgttccaagctgaacaaactcacaggagcatcctgctggggctgttactgggggcgggtaggactccacagccggatagtgcgctgattagacaggccctcgccgagaggtggtctcagtggtctttgagagggggattggaaatgttgcctcaggctctcgaaacccacctgacctctcggggagtgagtgtgttgagagggcagcctgtgtgtgggttgtcgctgcaggcagagggtaggtggaaggtctcgctccgtgatagctcactggaggcagatcatgtgatctcggccattccagcctcagtgctgtcggagttgcttcctgctgaagccgcccctctcgctcgtgctctgagtgcaataacggccgtatcagttgcagtggtcaatcttcagtaccagggcgcccatctgcctgtgcagggattcgggcacctggtacccagcagcgaggatcctggcgtgctggggattgtgtatgattcagtggccttcccagaacaggatgggagccctccaggtctccgggtcaccgttatgctcgggggcagctggctacaaacactagaagcctcaggctgcgtactgagccaagagctctttcagcaacgcgcccaagaagccgccgctactcaactgggtcttaaagagatgccctctcattgcctggtccaccttcacaaaaactgtattcctcagtatacactcgggcactggcagaaactggagtcagcccgccaatttctgacggcccacaggctgccactgactctcgccggtgctagctacgaaggagtggccgtgaatgattgcatcgaatcgggacgtcaggcagccgtgtccgttctggggacagagcctaatagctag

SEQ ID NO: 201985 - DNA, 144 bp, synthetic construct
  misc_feature 1..144: note = Description of Artificial Sequence: Synthetic coding sequence
  source 1..144: mol_type = other DNA
atggacatcctgaagagcgagatcctgcggaagcggcagctggtggaagaccgcaaccttttgagtgaaagcatgtgcgccaatgatgcctatcttcaaatggccataggtaacgccccctggcctattggggtcacgatgtag

SEQ ID NO: 201986 - DNA, 504 bp, synthetic construct
  misc_feature 1..504: note = Description of Artificial Sequence: Synthetic coding sequence
  source 1..504: mol_type = other DNA
atgatccggaccttccccggcgagaacaagaagtacttcaagcggtccgagctggccaagaaagaagaagaggcgtactttgaaagatgcgggtacaagatccagcctaaggaggaagatcagaaacccttgactagctcaaatcctgtgctggagttggaactcgcagaagaaaaattacctatgacgctctccaggcaggaagttatccgccgtcttcgagagcggggagagcctattcggctcttcggggaaaccgattatgacgcctttcagcgccttcgcaaaatagaaatcctgacacccgaggttaacaaaggactgcgaaacgatttgaaggcagcccttgataaaattgaccagcagtatctgaatgaaattgtcggaggacaggagcccggtgaggaggacacgcagaacgatctgaaggtacacgaagaaaacacgacgatagaggaactcgaggccctgggagagtcacttggcaaaggggatgaccactag

SEQ ID NO: 201987 - DNA, 750 bp, synthetic construct
  misc_feature 1..750: note = Description of Artificial Sequence: Synthetic coding sequence
  source 1..750: mol_type = other DNA
atgatccggaccttccccggcgagaacaagaagtacttcaagcggagtgagcttgcaaaaaaggaagaggaggcatacttcgaaagatgtggatataaacctattaatgaaaagccaagtggcgaaatccagcctaaggaggaagatcagaaacctcttacctcaagcaacccagtgctcgaattagagttagccgaagaaaaactaccaatgacgctgagcagacaggaggttatcaggcgactcagagagcggggcgaaccaatcagattatttggggaaaccgattacgacgcttttcaacgcctgagaaaaatagagattctgaccccagaggtaaacaaagggttgagaaacgatctcaaagctgcgcttgataagattgatcaacagtacctgaatgaaattgtggggggtcaagaaccgggcgaggaagacacacaaaatgatctgaaggttcacgaagagaataccactatcgaagaacttgaagccctcggagaatccctagggaagggagatgaccacaaggacatggacattatcaccaagttccttaagtttctgctaggcgtgtgggccaaagaactgaacgcaagggaagactacgtgaaacgctctgtgcaggggaaacttaactcggcgacccaaaagcagacggagagttacttgagacctctgtttagaaagctgaggaagcgcaatctgccggctgacatcaaagaaagcatcactgatatcatcaagtag

SEQ ID NO: 201988 - DNA, 1029 bp, synthetic construct
  misc_feature 1..1029: note = Description of Artificial Sequence: Synthetic coding sequence
  source 1..1029: mol_type = other DNA
atggacatcctgaagagcgagatcctgcggaagcggcagctggtggaggatcgtaacctgctggtcgagaacaagaagtactttaagcgctcagaactggccaaaaaagaagaagaggcctatttcgagcgttgtgggtataaaatccagcctaaggaggaggaccaaaagccactaactagttcgaatcccgttttagagctggagcttgccgaggagaagctccctatgacactctcccgccaggaggtgatacgacggctacgcgaaaggggagaacctatccggctctttggggagacggactacgatgcttttcagcggctgaggaagattgagattttgacacctgaggtaaataagggtctgcgaaacgaccttaaagctgccctcgataaaatagaccagcaatacctcaacgagatcgtcggcggacaagaacccggcgaggaagacacacagaatgacctgaaagtgcacgaagaaaacactactatcgaagagctcgaagctctgggcgagagtttaggtaaaggcgacgatcataaagacatggatatcataacaaaattccttaagtttctgctgggggtatgggctaaagaactcaacgctagggaggattacgtaaagagaagcgttcaggggaagctgaactccgctacacagaagcagacggagagctacctgaggcctctatttaggaaattaagaaagcgtaaccttcccgccgatataaaagagtctattacagatattattaaattcatgctgcaacgagagtacgtaaaggctaacgacgcctatttgcaaatggctataggtaacgccccctggcctatcggggtaacaatggttggaattcatgcgagaaccggcagagagaaaatattttccaagcatgtggcgcacgtcctgaacgatgaaactcagaggaaatatatacagggcttgaaaaggctgatgacaatctgtcagaagcatttccccactgatcctagcaaatgcgtggagtataatgcgctttag

SEQ ID NO: 201989 - DNA, 750 bp, synthetic construct
  misc_feature 1..750: note = Description of Artificial Sequence: Synthetic coding sequence
  source 1..750: mol_type = other DNA
atgatccggaccttccccggcgagaacaagaagtacttcaagcggtccgagttggccaagaaagaggaagaagcatactttgagcgctgtggctataagccaataaatgagaagccaagtggtgaaatacaaccaaaagaggaggaccaaaaacccttgacttcttctaatccagtacttgagctggagctggccgaagagaagctgcccatgactctgagtaggcaggaggtgattcgccgcttgagagaacgaggggagcctattcggctcttcggtgagacagattatgacgctttccaaagactgcgcaaaattgagatactgacccctgaagttaataagggtttgcggaacgacttgaaagccgccctggacaagattgatcaacaatacttaaacgaaatcgtcggagggcaggaacctggcgaagaagacacccagaatgacctgaaagtccacgaagagaacacgaccatcgaagaacttgaggccctgggagagagcctcgggaaaggagatgaccacaaggacatggacattataactaagtttcttaagtttttgttgggagtctgggcaaaagaattgaatgcacgggaggactatgtgaagaggagtgtgcagggtaagttgaatagtgcgacccaaaagcagaccgaaagctatcttaggcccttgtttcggaagctgcggaaacgaaacttgccggccgacatcaaggagagcattactgacataatcaagtag

SEQ ID NO: 201990 - DNA, 1083 bp, synthetic construct
  misc_feature 1..1083: note = Description of Artificial Sequence: Synthetic coding sequence
  source 1..1083: mol_type = other DNA
atggacacccccctgcggcggagccggcggctgggcggcctgcggcccgaaagccccgaaagcctgacaagcgtctcaaggacccggcgggccctggtggagtttgagtctaaccctgaggagactagggaaccagggtcgccccctagcgtgcagcgcgcaggtctcgggagccccgagaggccaccaaaaacctcccctggcagtccacgtctgcagcaaggcgccgggctggaatctccacagggacagcctgagcctggcgcggctagtccccagaggcagcaagacctccatctggaaagtcctcagcgacagcctgagtactcccctgaatctccgcggtgtcaacctaaaccatctgaagaagcccccaagtgctctcaagatcagggcgtgctagccagcgagcttgcccaaaataaagaggaactgacgccaggcgctccgcagcatcagcttccacctgtgcccgggagccctgagccttatccagggcagcaggccccaggtccagaaccttcccagccgctcctggagctcacgcctcgggcccctggatcccctaggggacagcacgaaccttccaagcccccacccgccggagaaacagtcactgggggattcggggctaagaagaggaagggcagctccagccaggcccccgccagtaaaaagctgaacaaagaagaactgcccgtgataccgaagggtaagcctaagagtggccgagtatggaaagaccggagcaagaagaggttctcccagatgcttcaggacaagcccttaagaacatcctggcagaggaaaatgaaggaacggcaggaaaggaaactcgctaaggatttcgcacggcacctcgaggaagagaaggagaggcgccggcaggagaagaagcagaggagggctgaaaaccttaaaagaaggttggaaaatgaacggaaggcggaggtggtccaagtgatccgcaatccagcgaagcttaaacgagccaaaaaaaagcagctgagaagcattgagaagagggacaccctggctctactccagaagcagccaccccaacagcctgctgccaaaatctag

SEQ ID NO: 201991 - DNA, 1095 bp, synthetic construct
  misc_feature 1..1095: note = Description of Artificial Sequence: Synthetic coding sequence
  source 1..1095: mol_type = other DNA
atgagcctggccgacgagctgctggccgacctggaggaggccgccgaggaggaagagggcggctcatacggcgaagaagaagaagagcctgccattgaagatgtccaagaagaaacacagctcgatttgagcggcgactccgtgaagaccatcgctaaattatgggattctaaaatgttcgcagaaatcatgatgaagatcgaagagtatattagtaagcaggccaaagccagcgaggtgatggggccagttgaagccgcccccgagtaccgcgtgattgtggacgccaataatctcactgttgagattgagaacgagctcaatatcattcacaagttcattcgcgataaatactcgaagaggttcccggaattggaatcacttgtacccaatgctctggattatattaggaccgttaaagagttaggaaacagcctagacaaatgtaagaacaacgagaatcttcagcaaatccttaccaatgcgacaatcatggtggtttctgtcacagcctcaactacgcagggccaacaactgagcgaagaggagctggagcgcctggaagaagcttgtgatatggccctggaactgaatgcaagtaagcaccgtatttatgagtacgtggaatctaggatgtcattcatcgcacctaatctgagcattattatcggcgctagcaccgcagcaaaaattatgggcgttgcaggcggtctgactaatctcagcaaaatgcccgcgtgcaatataatgttgctgggtgcccagcgcaaaaccttatctggattctcttctacctcggttctgccccatactggctacatttaccattccgatatcgttcagagtcttccaccagatctcaggaggaaggcagcccgacttgtggcggccaagtgcaccctcgccgccagggtcgatagtttccacgaaagtactgaaggtaaagtgggctacgaactgaaggatgagatagagcgtaagttcgacaagtggcaacggagaaggtggttgcgccccaccaggtcaattagtccggcctggttaagctcatccagaagccgggccagaagggtcgcactatgtcctcctgaatag

SEQ ID NO: 201992 - DNA, 1500 bp, synthetic construct
  misc_feature 1..1500: note = Description of Artificial Sequence: Synthetic coding sequence
  source 1..1500: mol_type = other DNA
atgagcctggccgacgagctgctggccgacctggaggaggccgccgaggaagaggagggggggtcatacggagaagaagaggaggagccagcaattgaggatgtgcaagaggagactcagctagatttgtccggggattcggtgaagacgattgcgaagctgtgggatagcaagatgttcgctgagatcatgatgaagattgaggagtacattagtaagcaggccaaagcttcagaggttatgggcccagtcgaagcagcgcccgaataccgagtcatcgtagatgccaataatttgacagtggaaatagagaatgaactgaatattattcacaagttcattagggacaagtattccaagcgcttccccgaactggagtctctcgtgccaaacgccttggattacatccgcaccgtgaaagagttagggaattcattggacaaatgcaaaaataacgagaatctccagcagatacttaccaacgcgactataatggtggtgtccgtcactgctagtaccacgcaggggcagcagttatccgaagaagagctggagcgactcgaggaggcatgcgatatggctctcgaacttaacgcaagcaagcaccggatttatgaatatgtagagagcagaatgtccttcattgcccctaatctgagtatcatcatcggggctagtaccgccgccaagatcatgggcgtggccgggggactgacaaacctttctaagatgccagcgtgcaacattatgttactcggggcacagaggaagaccttgtctggattctcatccacgtccgtactccctcatacaggctatatctaccatagcgacatagttcaaagtctgcccccagacctccgacgtaaggctgctcgccttgtcgccgcaaagtgtacactagcggcacgcgtcgattcattccatgagtcgacagaaggcaaagtaggctatgaactgaaggatgagatagaacggaagtttgataagtggcaggaacccccccccgtgaagcaggtgaagcctttgcccgctcccctcgatggacagagaaaaaagcgcggaggacgtaggtatcgcaaaatgaaagagcgccttggtctgactgaaatccgcaaacaggccaatagaatgtcgttcggggaaatcgaggaggatgcataccaagaagatttaggattttcgctaggccatctgggcaaatccggaagtgggagagtgcggcagacccaagtcaacgaggccaccaaagctcggatctcgaaaactctccaacggacactccagaagcaatctgttgtttacggaggaaagtcgacgattcgggaccggagtagtggcaccgctagtagcgtggcttttactcctctgcaaggtctggagatcgtcaacccccaggctgctgagaaaaaggtggcagaagccaaccaaaaatatttctctagcatggcggagttcttgaaggttaagggcgagaagtccggtctgatgtctacatag

SEQ ID NO: 201993 - DNA, 1353 bp, synthetic construct
  misc_feature 1..1353: note = Description of Artificial Sequence: Synthetic coding sequence
  source 1..1353: mol_type = other DNA
atgagcctggccgacgagctgctggccgacctggaggaggccgccgaggaagaggagggtggaagttatggggaggaagaggaggagcctgccatcgaagatgttcaggaagaaacacaacttgatctgtccggggacagtgtcaagactatagccaagctctgggattctaagatgtttgcagagatcatgatgaaaatagaggagtatatcagtaagcaagctaaggcctccgaggtgatgggaccagtggaggcagcccccgaataccgtgttattgttgacgccaataatttgacagtggagattgagaacgaactgaatattattcataagttcatccgagacaaatatagcaaacgcttccctgagctggagtcactcgtgcccaacgcgctggactacattcggaccgtaaaagagctgggtaattccctcgacaaatgtaaaaataacgagaatctgcagcagattctgacaaatgccaccataatggtagtgtcagtgacggcctctaccactcaaggacagcaactgtcagaggaggagctggaacggttagaggaagcatgcgacatggctctcgagttgaatgcttctaagcatcgcatatacgaatacgtggagtccaggatgtcctttatagcgcccaacctgtctattattataggagcatccactgccgccaaaatcatgggagttgcgggcggcctcactaatttaagcaagatgccagcgtgcaacatcatgttgctcggagcccaacgtaagacactttccggtttctcttcaacctccgtcctccctcacactggctatatataccatagcgatatagtgcagagcctgccaccggatctccggcgaaaggctgcccgcctggtggctgccaaatgcactctggccgcacgcgtggattcattccatgagagcacagaggggaaagtgggctacgaacttaaagatgaaatcgagcgcaaattcgacaagtggcaggaaccgccgccagtcaaacaagtcaagcccctcccagccccccttgatggacaaagaaaaaaaagaggcggccgacgctacaggaagatgaaagagagactgggtctgacggaaattagaaagcaggcgaatagaatgagtttcggggagattgaggaggatgcttaccaggaggatcttggattttcacttggccacctcgacgctgccgcggatcccgccgaagcagagcgcaggatatggagagaagtacaccatcccaggcctctgcttggtcatggactccagcgaggactacatcctacacccggaccaggcgattgcgaaccaacgggtggccgagaggagggcgggtag

SEQ ID NO: 201994 - DNA, 831 bp, synthetic construct
  misc_feature 1..831: note = Description of Artificial Sequence: Synthetic coding sequence
  source 1..831: mol_type = other DNA
atgagcctggccgacgagctgctggccgacctggaggaggccgccgaggaggaggagggaggcagttatggggaggaggaggaggagccagcaatcgaggacgtgcaggaagagactcagcttgatctgtcaggagacagcgtgaaaacaatcgccaaattatgggattcaaagatgtttgcagagattatgatgaagatcgaagaatatatctccaagcaggcgaaggcctctgaagtaatgggtcccgtggaggccgctccagagtaccgcgtcattgtcgatgccaataacctgaccgtggagatagagaacgagcttaatatcattcataaatttatccgcgataagtactctaaaagatttcccgaactggagagtctcgtcccgaacgctctggactacattcgcactgtgaaggaactcggtaattcattggataagtgcaagaacaacgaaaatctgcaacagattctgaccaacgcaactatcatggtcgtcagcgttacagcttctactacccagggccaacagctgagtgaggaggagctagagaggcttgaggaagcttgcgatatggccttagagctaaatgcttcaaagcatagaatttatgaatacgtggaatctcggatgtctttcatcgcacctaacctgtcgatcatcattggtgcatcaacagctgcaaagatcatgggggtggcaggtggattaacaaatctcagtaaaatgcctgcatgtaacataatgctgttaggcgctcaacggaagaccctctctggctttagctcaacatccgtacttcctcataccggatatatttaccactag

SEQ ID NO: 201995 - DNA, 855 bp, synthetic construct
  misc_feature 1..855: note = Description of Artificial Sequence: Synthetic coding sequence
  source 1..855: mol_type = other DNA
atgagcctggccgacgagctgctggccgacctggaggaggccgccgaagaggaggagggggggtcatacggcgaggaggaagaggagccagccatcgaagatgtgcaagaagaaacacagttggacctatctggggattcagtgaaaacaatcgccaagctgtgggacagcaaaatgttcgccgagatcatgatgaagatcgaggagtacatatcaaagcaggcaaaggctagcgaagtaatggggcccgtagaggctgctccagagtatcgcgtgattgtggatgctaataacctgaccgttgagatcgaaaatgagctaaatattatccataagtttattcgggacaaatactccaagcggttccctgagttggaatccctcgtccccaatgctctcgactatatccgaactgtcaaagagttggggaactctctcgacaagtgtaaaaataatgagaacctccaacagattcttactaacgcaaccataatggtggtgagtgtgaccgcaagcaccacccaaggccagcagctgtccgaggaggagctggagagactggaagaagcctgcgacatggctctggagttaaacgcctccaaacaccggatctatgagtacgtggagtcccgtatgtcttttattgcccctaacctatccatcattatcggggcctccactgcagcaaaaattatgggggtcgctggaggcctcaccaatctgagcaaaatgccagcatgtaacatcatgctgcttggagcccagaggaagactctgtcaggatttagtagtacctcagtgcttccacatacaggatatatttaccattctgatatcgtgcagagccttccctag

SEQ ID NO: 201996 - DNA, 786 bp, synthetic construct
  misc_feature 1..786: note = Description of Artificial Sequence: Synthetic coding sequence
  source 1..786: mol_type = other DNA
atgagcctggccgacgagctgctggccgacctggaggaggccgccgaagaggaggaaggcgggtcttatggggaagaggaggaggagccagccattgaagatgtgcaggaggagacccaactggatttatctggggattccgtcaagaccatcgcaaagctgtgggacagcaaaatgtttgccgagattatgatgaaaatcgaagagtatatctctaagcaggccaaagcctcagaggtgatgggccccgtggaggctgcaccagaataccgcgttatcgttgacgctaacaatctcaccgtagagattgagaacgaattgaacattatccataagttcattcgggataagtatagcaagcgcttccctgaactggagagcctggtccctaacgcgctggattacatccggaccgtgaaggaactggggaattcgctggacaagtgtaaaaataacgagaatctgcagcagatcttaacaaatgctacaatcatggtagtctctgtcaccgcctctactacacagggccagcaactaagtgaagaggaactagaaaggctcgaggaagcctgcgatatggcgctcgaattgaatgcgtccaagcacaggatctacgagtacgtggagagcagaatgtccttcatcgccccgaatctgtccattatcattggtgccagcacggctgcgaagatcatgggagtcgctggtggcctaactaatctgagtaaaatgcccgcatgcaatattatgctcttgggagcgcagcggaaaaccctcagcggatag

SEQ ID NO: 201997 - DNA, 1569 bp, synthetic construct
  misc_feature 1..1569: note = Description of Artificial Sequence: Synthetic coding sequence
  source 1..1569: mol_type = other DNA
atggccagcagccgggccagcagcacccaggccaccaagaccaaggcgccagacgacctcgttgcccccgtggtaaaaaagccacacatctattacggatccctcgaggagaaggagcgagaacgactagccaagggggaaagtgggatactgggtaaggatggattgaaagcgggcattgaagcaggaaacatcaacatcaccagcggggaggtttttgaaattgaagaacacattagcgagcggcaggccgaggtgctcgcagaattcgagaggcgcaaaagggcgcggcagataaacgtaagcactgacgatagcgaggtgaaggcatgtctcagagctcttggggaacctataaccctgtttggcgagggcccagcggagaggagagagcggttgcggaacattctgagtgtggtcggcactgatgccctgaagaaaaccaagaaagacgacgaaaagtccaaaaaaagcaaagaggagtaccaacagacctggtatcatgagggacccaactcattgaaggtggctcgcctttggatcgcaaattactcactgccgcgagccatgaaaaggctggaggaggctagattacacaaggaaatacctgagactacaaggacatctcagatgcaggagctccataagtccctcaggtctttaaacaacttttgcagccagatcggagatgaccgtcctatcagctactgccacttctcacctaatagcaaaatgctggccactgcttgctggtctggactttgcaagctctggtctgtacctgactgcaatctgctgcacactctcaggggccacaacactaatgttggggctatagttttccaccctaagagtactgtaagtcttgacccaaaggacgtgaacctggcatcgtgcgctgccgacggctctgtcaaactgtggtcccttgactcggatgagccggttgccgatatagaaggccacaccgtgcgcgtcgctcgggtgatgtggcaccctagtggcagattcctgggaaccacttgctacgatcggtcctggaggctttgggacctcgaggcccaagaggaaatcctccatcaggaggggcattctatgggcgtctatgacatcgcttttcaccaggacggatccctggctggaactggcggcctggatgccttcggtcgcgtctgggacctgaggactggccggtgtatcatgttcctagaagggcacctgaaggagatatacggaatcaactttagtcccaatggctatcatatcgccaccggcagcggtgacaacacttgcaaggtatgggatctgcgccagaggagatgcgtgtacacgatcccagcccatcaaaacctcgtcaccggagttaagttcgaaccaatccacggtaactttctactcaccggagcgtatgataacacagcgaaaatctggacgcatcctgggtggagccccctcaaaacactggcgggtcacgaggggaaggtgatggggctggacatatcatcggatggacaattaatagccacatgcagctacgacaggaccttcaaactgtggatggccgagtag

SEQ ID NO: 201998 - DNA, 1566 bp, synthetic construct
  misc_feature 1..1566: note = Description of Artificial Sequence: Synthetic coding sequence
  source 1..1566: mol_type = other DNA
atggccagcagccgggccagcagcaccgccaccaagaccaaggcccccgacgatcttgtagcacccgtcgtgaaaaagcctcacatatactacgggtccctggaagagaaagagcgtgagaggctcgctaagggggagagtgggattctcgggaaggatggcctgaaggccggcatagaggccgggaacatcaatatcaccagtggtgaagtctttgagatcgaggagcacatctccgagagacaggcagaggtgcttgcggagttcgaacggagaaagagggctaggcagatcaacgtgagtacagatgacagcgaagtgaaagcctgtctccgagccctcggggagcccatcactctgttcggagaggggcctgccgaacgcagagaacgcctccgaaatatcctgtccgtggtcggaaccgatgccctgaagaagacgaagaaagacgacgagaagtcaaaaaaatccaaagaagagtaccaacagacctggtatcacgaagggcccaattcactgaaagtggctagattatggattgccaactattctctccctcgagccatgaagcgactcgaagaggcacgcctgcataaagagattcccgaaactactcgcacttctcagatgcaggagctccataaatcgttgcgcagtttgaacaacttttgtagccagattggcgatgatagacccatttcatactgccactttagccctaattctaaaatgctcgccaccgcttgttggtcagggttatgcaagctgtggagtgttccagactgcaacctattacacaccctgcgcgggcacaatacaaacgttggtgccatagtgtttcatcccaagagcacagtcagtttagatccgaaggacgtgaacttagcttcatgcgctgcagacggctccgtgaaactgtggtccctagattccgatgagccggtcgcagatattgaagggcatactgtcagagtggccagagtgatgtggcacccaagcggaaggttcttgggtaccacttgctatgatcggtcttggaggctttgggatctcgaggctcaggaggaaatcctgcaccaagaggggcatagcatgggagtgtacgatatcgctttccaccaagacgggagtcttgccggcacaggaggcttagacgccttcggccgcgtctgggatctgcgcaccggaagatgtattatgttcctggaggggcatctcaaggagatatacggaattaatttctctcctaacggatatcatattgcaacgggctctggtgataacacctgcaaggtgtgggatctgcgccagcggcggtgcgtctataccatacctgcccaccagaacctcgtaacaggcgtgaagttcgaaccgatccatggcaactttctgctgactggcgcttacgacaatacagctaagatatggacacaccctggctggagcccccttaagacactggcaggccacgagggcaaggtgatggggctggatattagctcagatgggcagctgatagctacttgttcttatgatagaacgtttaaactttggatggcagaatag

SEQ ID NO: 201999 - DNA, 3024 bp, synthetic construct
  misc_feature 1..3024: note = Description of Artificial Sequence: Synthetic coding sequence
  source 1..3024: mol_type = other DNA
atggccgccgccgagacccagagcctgcgggagcagcccgagatggaggatgctaactctgagaaaagcatcaacgaagagaatggagaagttagcgaggaccaatcccagaataaacattctaggcacaagaaaaaaaagcacaagcatagaagtaagcataaaaaacacaaacactccagtgaagaggacaaggataagaagcacaagcacaaacataagcataagaaacacaaaaggaaagaaatcatcgatgcctccgataaggagggaatgtcaccggctaagagaacgaaactggatgatcttgcgctcctggaagacctggaaaagcagcgtgcccttatcaaggctgaactggataatgagctgatggagggaaaggttcaaagcggaatgggtctaatcctgcaaggatatgaatctggttctgaggaagagggggaaattcacgaaaaggccaggaacgggaatcgttcctccacgcgcagcagttccaccaagggcaagctggagctggttgacaacaagattaccacaaagaaacgatcaaaaagcaggagcaaagaaagaacacggcatcggtcagataagaaaaagtcgaaaggcggcattgagatcgttaaggagaaaacaacaagaagtaaatccaaggaacgcaaaaagtccaagtccccaagtaagcgctccaaatcacaggaccaggcacgcaaatcaaagagccctactttgagacggcgcagccaagagaagatcgggaaagcacgtagcccgacagatgacaaggtgaaaatcgaagacaaatccaagtctaaggatcggaaaaaatctccgattatcaacgaatcgcggtcgcgcgaccgcgggaagaagagtagatcgcccgtggacctgaggggcaagagcaaagacaggaggagccggagcaaggagaggaagagtaagcgctcagaaactgacaaggaaaaaaaaccaataaaaagtccatccaaagacgcctcatccgggaaagaaaatcgatctccatctcggcgccccgggcgtagtcctaagcggagatccctgagtccgaagcctagggacaaatctagaagatctcggtctccactgttaaatgatcgaagatcaaagcaatccaagagtccctctcggaccctctctcccggccgaagagctaaatcacgctctctggaaaggaagaggagagagcccgagagacggagacttagttcacccaggacacgaccccgcgacgatattctatctaggcgggagagatctaaggacgcaagcccgatcaataggtggtctccgacacgccggcgaagcagatcacctattaggagacgatctaggagccccttgcgccgttctcgtagcccccggcggcgtagcagatcaccacgaagaagggaccgcggtaggcggagccgcagccgtttgcgtaggcggtcgcgttcccggggaggccgccggaggcggtccagatctaaggtaaaggaggacaaattcaagggatccctttctgagggcatgaaggtggaacaagagtccagttccgacgataaccttgaggacttcgatgtcgaggaggaggatgaagaggcccttattgagcagcgcagaattcagcggcaggccattgtgcagaagtacaagtatctggctgaagattcaaatatgtctgtaccatctgaacccagttcccctcagtccagcacccgcaccagatctccctctccggatgacatccttgaacgtgtagccgctgatgtcaaagagtacgaaagagagaacgtagatacatttgaggctagcgtaaaagctaaacacaacctcatgaccgttgaacaaaataacgggagtagtcagaagaagctgctggcacctgacatgttcactgaaagcgatgacatgttcgcagcctactttgactctgctagattacgtgcagccggcattggcaaggacttcaaagaaaatcctaacctcagagataactggactgacgccgagggttactatcgggtcaatattggcgaggtccttgacaaacgatacaatgtctatgggtacacggggcaaggagttttctccaatgtcgtgcgcgcgcgggacaacgcacgcgcgaaccaggaggtcgctgttaaaatcatccgtaataacgagctgatgcagaagactggtcttaaagagttagagtttcttaaaaagcttaacgatgccgaccccgatgataagttccactgtttacggctgttcaggcatttctatcacaaacagcacctgtgcttggtgtttgagccattgtcaatgaacctgcgggaggtgctgaagaaatatggtaaagacgtcggacttcacataaaagcggttaggagttactcacagcagctcttcctggctttgaaacttctcaaacggtgcaacatactgcacgcagacataaaacccgataatatcctggtgaacgagtcgaaaactattctgaagttgtgcgactttgggagcgctagtcacgtcgcagacaatgatattacgccttacctggtaagccggttttacagggcacctgagataatcatcggtaagtcctatgactatggaattgatatgtggtcagttggctgtactctctacgagctctacaccggtaaaatcctctttcccggtaagactaataatcacatgcttaaattagccatggatctcaagggaaaaatgccaaataaaatgatcaggaaaggcgtgttcaaagaccagcacttcgaccagaatctgaactttatgtacattgaggtcgacaaggtaaccgaaagagagaaagtgacagtgatgagcactattaatccaactaaagatcttctggcagacttaattgggtgccaaaggttacccgaggatcagcgaaagaaagtccaccagctcaaggacttgctggatcagattttaatgctggacccagccaagcgcatctccatcaaccaggcactgcagcacgcttttatacaggagaagatttag

SEQ ID NO: 202000 - DNA, 3024 bp, synthetic construct
  misc_feature 1..3024: note = Description of Artificial Sequence: Synthetic coding sequence
  source 1..3024: mol_type = other DNA
atggccgccgccgagacccagagcctgcgggagcagcccgagatggaggacgctaatagtgaaaagtcaatcaacgaggaaaacggagaggtgagtgaggaccagagccaaaacaagcacagtaggcataaaaaaaagaagcataaacataggagtaaacacaagaaacacaagcattcaagtgaagaggacaaggataagaaacataagcacaagcacaaacacaaaaagcacaagagaaaggaaataatcgacgcctccgacaaggaggggatgtcgcctgccaagaggactaaactggacgatctggcgctcctcgaggacctggaaaaacaacgagccttaatcaaggccgaactcgataacgaactgatggagggaaaggttcagtctgggatggggcttatcctgcaggggtacgagtccgggtcagaagaggagggcgagattcacgaaaaggctcggaacggcaatcggtccagcacaagaagttcatccactaaggggaaacttgagcttgtggataacaaaattaccactaagaaaaggtccaaatcacggtctaaggaaaggacccgacataggtccgacaagaagaaatcaaagggcggaatcgaaattgtgaaggaaaagaccactcggagcaagtccaaagagagaaagaaatcaaagtctccttctaaacgctcaaagtcccaggaccaagcaaggaagtcaaaatccccaactctccggaggcgctctcaagagaagattggcaaggctcggtcccctacagacgacaaagtgaagatagaggacaaatcgaaatctaaagatcgcaagaaaagtcctatcattaatgaatcccggagccgggacaggggaaaaaagagccgaagcccggtggatctccgaggtaagtccaaagaccggagaagcagatcaaaagaacgcaaaagcaaaagatccgagaccgataaggagaaaaaacccattaaaagccccagcaaagacgcctcatctggtaaagagaatcgctctccctcgcgccggccaggacggagccccaagagacggagcctgagccccaaaccccgtgacaaaagccggaggtcacgaagccctctgctcaatgatcggcgtagcaagcaatctaagtctccaagccggacactctcgcctggaaggagggctaagagtagatccttggagcggaagcgccgcgagcctgagcgaaggaggttgtcaagccctcggaccagaccacgggacgatattttaagccggcgggaaaggagcaaggacgcttctcctatcaacagatggtcaccgacaaggaggcggtcacgctccccaattaggagaaggtcccggtcaccattacggcgaagccgtagtccgcgtcgcaggtcacgctcccctcgtcgccgtgataggggccggaggtcccgcagcaggctgagacgcagatccaggtcccggggaggtagaaggcgtcggagccggtccaaggtgaaggaagacaagttcaagggatcgctctctgagggcatgaaagtcgaacaggaatctagctccgacgacaacctcgaggactttgacgtggaggaggaagacgaagaggctcttatagagcagcgtcgaatccagagacaggctatcgtgcagaaatacaagtacctcgcggaggattcaaacatgtctgttccttcagaaccctcctccccacagtcctcaactcgtactaggtctccgtctcccgatgacattcttgaacgcgttgcggcagatgtcaaggaatatgagcgagagaacgttgatacattcgaggcaagtgttaaggcaaaacacaatctgatgactgttgagcagaacaatgggagcagccagaaaaaactactcgctcccgacatgttcactgaatctgatgatatgttcgcagcgtacttcgatagcgcaaggctcagggctgctggaatcggtaaggattttaaagagaaccctaatctcagggacaactggaccgatgctgagggttactatagggtgaacatcggggaggtgctggacaaaaggtacaacgtatacggctacacaggtcagggcgtctttagtaacgtagtacgagcaagagataacgctagggccaaccaggaggtcgcggtgaaaatcatcagaaataatgagctaatgcagaagaccggtctgaaagaacttgagtttctcaagaaattgaacgatgccgaccccgacgacaaattccattgtctgcggctgtttaggcacttttaccacaagcaacatctctgtctggtcttcgagcccctgtcaatgaacttacgggaggtgctgaaaaaatacggcaaggatgttggcttgcatatcaaagccgtgcggtcgtatagccaacagttgttcttggctctgaagctgctgaagagatgtaatattctacatgctgatatcaagccagacaacatacttgtgaacgagtccaaaacaatcctgaaactgtgcgatttcgggtctgcttcacatgtggccgataacgatattactccctatctcgtttctaggttctaccgagccccagagatcatcattggaaagtcatatgattatggcattgacatgtggagcgtcggctgcactctctatgaattgtatacaggtaaaattttgttccctgggaagactaacaatcacatgttgaaactcgccatggacctcaaagggaagatgccaaataagatgatcaggaagggggtttttaaggatcagcacttcgaccaaaatctgaacttcatgtacatagaggtagacaaggtgactgaacgcgaaaaggtgaccgtaatgtccactatcaaccctacaaaagacctgctcgccgatctgatcggctgtcaacggctcccagaggaccaacgcaagaaggtccatcagctcaaggatctgttggatcagatcctcatgctggacccagccaaacgcattagcatcaatcaagcactgcagcacgcttttatccaagagaaaatttag

SEQ ID NO: 202001 - DNA, 2982 bp, synthetic construct
  misc_feature 1..2982: note = Description of Artificial Sequence: Synthetic coding sequence
  source 1..2982: mol_type = other DNA
atggaggacgccaacagcgagaagagcatcaacgaggagaacggcgaagtgtcagaggatcagtcccagaataagcacagtcgccacaaaaagaagaaacataagcaccgcagcaagcataagaagcacaaacacagttccgaagaagataaggacaagaagcataaacacaagcacaagcacaaaaaacacaaaaggaaggagattattgatgcatccgacaaagaaggcatgtcaccggctaaacgaactaagttggacgacctcgcattacttgaggacctggaaaagcagagggcactgattaaagctgagctcgataatgaattgatggaaggtaaagtgcagtctggcatggggctgatccttcaaggctacgagtcaggctccgaagaggaaggggaaatacatgagaaggcccggaacggcaataggagcagcacccgcagctcttcaacaaagggtaagctggagcttgtggataacaagatcacaacaaagaagaggtccaagtcccgttctaaagagagaacccgacacaggagcgacaaaaagaagagtaagggcggtattgaaattgtaaaggaaaagactactagatctaaaagtaaagagaggaagaaatcgaagtccccaagtaagcggagtaaaagccaagaccaggcacggaaatctaagtcccccactttgcgtaggcgatcacaggaaaagatcggaaaggcccggagtccaacagacgataaagtcaagatcgaggacaaatcgaaatcaaaggacagaaagaaaagccccataattaatgaatcaagatccagagacagaggcaagaaaagcagatctcccgtagacttaagaggaaagagcaaagatagacgatcccggtccaaagagcgaaagtccaagagatctgagactgataaggagaagaagcctatcaagtcaccctctaaggacgcctcttccggtaaagaaaacaggtccccttccagaaggcccggccggtcaccaaaaaggcggagcctctcgccaaaaccgcgagacaagtctcgacgcagccgatcacccctgctcaatgataggcgctccaagcagagcaaatctccttcaaggaccctgagccccggccgtcgcgcaaagtctcgctctcttgagcggaaacgccgtgagcctgagaggcgccgcctatcctcaccgcgtactcgccctcgtgatgatattttgtctagaagggaaagaagtaaggatgcgagcccaattaaccgctggtccccaacccggaggcggtctagaagtcctatccggagacgttctcggtcacccctacgccggtccaggtcacccagaaggcgtagtaggtctcctcgcagacgcgacagaggccgtagaagtcggagccgtctccggcggcggtctcgatcgagaggaggaagacgcaggcggtcacgatccaaggtcaaggaagacaagtttaagggaagcctaagtgaggggatgaaggtggagcaggagtcatctagtgacgataatctggaggatttcgacgtggaggaagaagacgaggaagcccttatcgagcaaaggagaattcaacgccaggccatagtacagaagtacaaatatctggccgaggactctaatatgtcagtgccaagcgagccttcatcaccgcagtcatccacccgaacccgatctcctagtccagacgacatcctggagcgtgtggccgccgacgtgaaagagtacgaacgggaaaatgtcgacacatttgaagcttctgtaaaggctaagcataacctcatgaccgtggaacaaaacaatggctccagccagaaaaagttgttggcacctgatatgtttacagagagcgacgacatgttcgctgcctatttcgatagcgcccgcttgagggccgcaggcatcggtaaggactttaaggagaatccaaacctccgggacaactggaccgacgccgaaggctactaccgcgtaaacattggcgaagttctggacaaacgttacaatgtctatggctacacagggcaaggggtttttagcaacgtggtccgagcgagggataatgctcgagctaatcaagaggtggccgtcaaaataattaggaacaatgagcttatgcagaaaaccggcctgaaggagttggaattcctaaaaaaacttaacgatgccgatcccgatgataaatttcactgtctaagattgttcagacacttctaccacaaacagcacctgtgtctggtgtttgaaccactctctatgaacctgcgggaggtcctgaagaaatacggaaaggacgttggcctgcatattaaagccgtcagaagctatagccagcaattattcctcgccctgaagctccttaagcgttgtaacattttacatgccgacatcaagccagataacatcctggtgaacgagagtaaaactatcctgaaactatgtgattttgggagcgctagccacgtggccgacaatgatatcactccatatttagttagcaggttctacagagccccggaaatcataattggaaaaagctatgactacggcatcgacatgtggtcagtcggctgtaccctgtacgaactgtatactggaaaaattctgtttcccggaaaaactaataatcatatgctgaagttggctatggacctgaaaggcaagatgcctaataagatgataaggaagggggttttcaaggaccaacattttgatcaaaacctgaatttcatgtatattgaagtggataaggtgaccgagagggagaaagtgaccgtcatgtcaaccataaatccgacaaaggacctgctcgccgatttgatagggtgtcaacgtctccctgaagaccagaggaagaaggtgcatcaacttaaggatctgctcgaccagattctgatgcttgatcccgctaagagaatttccatcaatcaagcgctccagcacgcattcatccaggagaagatctag

SEQ ID NO: 202002 - DNA, 2820 bp, synthetic construct
  misc_feature 1..2820: note = Description of Artificial Sequence: Synthetic coding sequence
  source 1..2820: mol_type = other DNA
atgcggcccggcaccggcgccgagcggggcggcctgatggtgagcgagatggagtcccatcctcctagccagggaccgggggacggggaaagacggctctcaggcagcagtctgtgttccggatcctgggtttccgcagacggcttcctcaggagaagaccctccatgggtcaccccgggatgcattacgcccccatgggcatgcacccaatgggacagcgtgctaacatgccgcccgttccacacggaatgatgccgcagatgatgccaccaatgggcggcccacccatggggcagatgcccggcatgatgagctcagttatgcctggaatgatgatgagccatatgagccaggcttccatgcagccagcactgcccccaggcgtgaacagcatggacgtggctgccggtacttataccctgtataagtctatgtggactgagcataagtcccctgacgggaggacgtactattacaacacagagactaaacagtctacctgggagaagcccgacgatttgaagacccccgcagagcagctgttgtctaagtgtccttggaaggagtacaagtcggattccggcaaaccatactattataatagccagacgaaggaaagtcggtgggccaaacctaaggaactagaggacctggagggaaagatgggaaagattaaatactccaaacaggaggagtgtacaacaaccagcaccgctcccgttccaaccactgagatcccaactaccatgagtacaatggctgcggccgaagcagccgccgcggtggttgctgccgctgccgccgccgccgcagccgcggcagccgcaaacgctaacgcgagtacctcagcctcaaacacggtgagcggcaccgtgcctgtggtacccgaacccgaagttaccagcatagtcgcgacagtggtagacaatgaaaacaccgtgaccataagcacagaagaacaggctcagttaactagtacacctgcaatccaggatcagtccgtcgaggtctcctccaataccggcgaagagacttctaaacaggagaccgtggcagattttacccctaagaaggaggaagaggagtcccagcccgcaaagaaaacttacacctggaacacgaaggaagaggcaaaacaggcttttaaggagttgttaaaggagaagcgagtacctagcaacgcatcttgggagcaggcaatgaagatgatcatcaacgatcctcgctacagcgctctggcgaagctctccgagaagaaacaggcatttaacgcgtataaggtgcaaaccgaaaaggaggagaaggaggaagctagatctaaatataaagaggcaaaggaatctttccagaggttcttggagaatcacgagaaaatgacttcgactacacgctacaaaaaagctgaacagatgtttggggagatggaagtgtggaatgccatctccgaaagagaccgcctcgagatttacgaagatgttctgttctttcttagtaaaaaagagaaagagcaggcgaagcaactgaggaagcggaattgggaagcgttgaaaaacattctcgataatatggccaatgttacctacagtacgacatggtctgaagcgcagcagtacctgatggataatccaacttttgccgaagatgaagaactgcagaacatggacaaggaggacgcacttatttgttttgaggagcatattcgagcactcgagaaagaagaggaagaggaaaaacagaagtccttgttacgtgaaagaaggagacagaggaagaacagggaatcatttcagatcttcttggacgagttacatgaacatggccagctccatagcatgtcttcctggatggagctgtatcccacaattagcagcgacattagattcactaacatgctcgggcagcctgggtccacagccctcgacctgtttaaattttacgtggaggacctgaaggcccgataccacgatgaaaagaaaattatcaaagacatcttaaaggataaagggtttgtggtcgaagttaacacaactttcgaagacttcgtcgctattatcagttcaaccaaaagatctactaccctggacgccggcaacattaaactagctttcaacagccttctggagaaagcagaggcccgggagcgggagcgcgagaaagaggaggcacgaaaaatgaaaaggaaggaaagcgctttcaagtccatgctgaaacaagcagcacctccaattgagcttgatgcggtctgggaagatatccgggagcgctttgtcaaggagccagccttcgaggatattacgttggagtctgaacgaaagcggatctttaaagatttcatgcacgtcctcgaacatgaatgccagcaccatcacagtaagaataaaaaacactcaaaaaagtcaaaaaagcaccataggaaaagatctcgatcccgttctggatccgactccgacgatgatgacagtcactctaagaaaaaaagacagcggtccgagtctcgatcagcctcagaacactcaagtagcgcagagagcgaaaggagttacaaaaagagcaagaaacataagaagaaatccaagaagcggcgacacaaatcagactcacccgaaagcgacgccgaaagagaaaaggataagaaagagaaagaccgagagtctgaaaaagaccgcacacggcagcgatctgagtcgaaacataagagtcccaagaaaaaaactggaaaagatagtggcaattgggacacctctgggagcgagctaagtgaaggggagttggaaaagagacgcaggactcttctggaacagctcgacgatgaccagtag

SEQ ID NO: 202003 - DNA, 2451 bp, synthetic construct
  misc_feature 1..2451: note = Description of Artificial Sequence: Synthetic coding sequence
  source 1..2451: mol_type = other DNA
atgtgcagcggcagcggccggcggcggagcagcctgagccccaccatgagacccggaaccggggccgaaagaggcgggttgatgatgggacatcccgggatgcattacgcccccatgggtatgcatcccatgggccagcgggccaatatgccccctgttcctcacgggatgatgccacagatgatgcctcctatgggcggaccccccatgggacagatgcccgggatgatgagcagcgtgatgcctggcatgatgatgtcccatatgtcccaggcctctatgcagcctgccctcccacagctccttagcaaatgcccctggaaagaatataagtctgactccggtaagccttattactacaacagccagacaaaagagtccaggtgggctaagccaaaagagcttgaagatctggagggctaccagaataccattgtggcagggtctctgatcacaaagtctaaccttcacggcatgctcacggaactgaaatactctaagcaagaggagtgcaccactacctcgactgctcccgtgcccactaccgaaattcccacaacgatgagtacgatggctgccgcagaggctgccgcagcggtggtcgcagccgcagccgctgctgctgctgctgccgccgctgctaacgccaatgctagtacttcggcctccaatactgtttccgggaccgtgcccgttgtccctgagcctgaggtgacctcaatcgtcgctacagtggttgataacgagaacaccgtaacaatatcaacagaggagcaggcacagcttacctccacccctgccatccaggaccagtctgtggaagtaagctcgaataccggcgaggagacctccaagcaagaaacagttgcagactttactcctaagaaggaggaggaagaaagtcagcccgccaagaagacttacacatggaatactaaggaagaagcaaagcaggcttttaaagaactactaaaggagaagagggtgccaagcaatgcttcatgggaacaggcaatgaagatgatcataaatgatccccgctattctgcactggccaaactgagcgagaagaagcaggccttcaacgcatataaagttcagaccgagaaagaggaaaaggaagaagcaagaagtaagtataaagaagccaaagaatcctttcaaaggttcctcgagaatcacgagaaaatgaccagcaccacaaggtataagaaggccgaacaaatgtttggagaaatggaagtctggaacgccatttctgagcgagataggctggagatctatgaggatgtgctctttttcctgtccaagaaagaaaaagagcaagctaagcagttacgcaaacgcaactgggaggctctaaagaatatactagacaacatggccaatgttacatacagtaccacttggtcagaggcacaacagtacctcatggataaccccacctttgcagaagatgaggagttgcagaacatggacaaggaagacgccctcatttgttttgaggagcatatccgagccctagaaaaggaagaggaggaggagaagcagaaaagcctactgcgcgaaagacgaagacaacggaagaacagagaatccttccagatctttttagatgagctgcacgaacatgggcaattacatagtatgtcttcgtggatggaactgtaccctaccatttcctcagacatccggtttactaatatgctgggacagccagtatttagtctaggctctaccgcgttagacctattcaagttttatgtcgaagacttaaaagctcgctatcacgatgagaaaaagattatcaaggacattcttaaagacaaggggttcgtggtggaagtaaatacaaccttcgaggactttgttgccattatcagcagtacaaagcggtctacaacactcgacgctgggaacataaagctcgcctttaattccctgctggaaaaggccgaggctcgggaacgggaacgcgagaaggaagaggcccgcaaaatgaagaggaaggagagcgccttcaagagcatgctgaaacaggcggctcctcctatcgagctcgatgcagtgtgggaggacatcagggagcgatttgtgaaggagcccgcatttgaggatatcaccttggagagcgagaggaagaggatattcaaggatttcatgcacgtactcgaacatgaatgccagcatcaccattcgaagaacaaaaagcactccaaaaaatccaaaaaacatcaccggaaacgttctaggtccagaagtggtagtgacagcgacgacgacgactctcatagcaagaaaaaacgccagagatccgagagcaggtccgcctctgagcactccagtagtgccgagagcgagcggtcttacaagaaaagtaagaagcataagaagaaaagtaagaaacggcgacacaagtctgactccccagagtcggatgccgagaggtag

SEQ ID NO: 202004 - DNA, 2793 bp, synthetic construct
  misc_feature 1..2793: note = Description of Artificial Sequence: Synthetic coding sequence
  source 1..2793: mol_type = other DNA
atgtgcagcggcagcggccggcggcggagcagcctgagccccaccatgaggcccggcaccggagctgaacggggcggcctcatgatgggccatccagggatgcattacgcccctatggggatgcatccaatgggccaacgcgctaatatgccccctgtaccccacggtatgatgcctcagatgatgcccccgatgggggggcccccaatgggccagatgcctggtatgatgagttctgttatgccgggcatgatgatgtcccatatgagccaggcgagcatgcaacccgcattgccccctggagtgaacagtatggatgttgccgcggggacagcctctggagccaaatcgatgtggacagaacacaagagtcctgatgggcggacctactactataataccgagacaaagcagtcaacgtgggagaagccggatgacttgaaaacaccagcagaacagcttctgtctaagtgtccatggaaagaatataaatcggactcagggaagccctactactacaactcacagacgaaagagtctaggtgggctaaaccgaaggaattggaggatctggagggctaccagaacactatcgtggccgggtccctcattactaagtccaatttgcacgcaatgattaaagcggaggagagttctaagcaggaagagtgcacaacgaccagtactgcccctgtgccgactaccgagattccaacgaccatgtccactatggccgctgccgaagcagcagccgcggtggtcgcagccgcagccgctgcagctgccgccgccgcagcggctaatgccaatgcctctacatctgccagtaacacggtctccgggacagtgccggtggttcccgagcctgaggttacctccatagtagctacagtcgtcgataacgaaaatacagttactattagtaccgaagaacaggcacagctgacaagcactccggcgattcaggaccagagtgtagaggttagctccaataccggggaagaaactagtaaacaggaaacagttgccgattttacgcctaagaaagaagaagaagagtctcaacccgctaaaaagacctacacttggaacaccaaggaagaggctaaacaggcttttaaggagctcctcaaggagaagagagtgccgtccaacgcctcctgggagcaggccatgaagatgatcatcaatgaccctaggtatagcgccctcgccaagctatccgagaaaaagcaggcattcaatgcatacaaagtgcagactgagaaggaggagaaggaagaagccagaagtaagtacaaggaagccaaggagtccttccagagatttcttgaaaatcacgaaaaaatgacttctacaacgcgctacaagaaagcggagcagatgttcggcgaaatggaagtgtggaacgcaattagtgagagagatcgtctggaaatatacgaagacgtgctgttcttcctttcaaagaaagaaaaagagcaggctaaacagctgagaaaaagaaactgggaggcgcttaagaacattcttgacaatatggctaacgtaacttactctacaacatggtcagaggcacagcaatacctgatggataatcctacattcgccgaggatgaggagctgcagaacatggataaggaggacgctctgatatgttttgaagagcacattagagccctggaaaaagaggaagaggaggagaagcaaaagtctctgctccgcgagcgcaggcggcaaaggaagaaccgagagtcatttcaaatcttccttgacgaattgcacgagcatggtcaactccactccatgtcttcctggatggaactctaccctacaatctccagtgatattcggttcactaacatgctgggacaacctggatccactgctctcgatctgtttaagttctatgtggaagacctaaaggctagataccatgacgagaaaaagataatcaaggacatattgaaggataagggattcgtggtagaggtgaatactacctttgaagactttgtcgcgatcatcagctccacgaagcggtcaaccaccctggacgccgggaacattaagctagccttcaattctctcctagaaaaggccgaggcccgagagcgcgagcgggagaaggaggaagctcggaaaatgaaaagaaaggaaagtgcattcaaatctatgcttaagcaggctgccccacccatagagttagacgcagtttgggaggatatcagagagcgctttgtgaaggagcctgcgttcgaggacatcaccctcgagtctgagagaaaacgtatctttaaagatttcatgcatgtcctcgaacacgaatgccagcatcatcattcaaagaataaaaaacattctaagaaatcgaagaaacaccatagaaagagaagccgctctcgttcaggtagcgacagtgatgacgatgattctcactctaagaagaagaggcagagaagcgaatctaggtccgcttccgagcattcgagcagcgccgagagcgaacggtcatataaaaagtctaagaaacataagaagaaatcaaagaaacggcggcacaagtcagatagcccagaatctgatgcagaacgggagaaggacaagaaagagaaagaccgggaatcagaaaaggaccgcacccgccagcgttcggaaagtaagcataagtcccccaagaagaagacgggcaaggattccggcaattgggacacctctggttccgaactctccgagggagagctggagaaaagacgccgtacgttgctggagcagttggatgatgaccagtag

SEQ ID NO: 202005 - DNA, 2481 bp, synthetic construct
  misc_feature 1..2481: note = Description of Artificial Sequence: Synthetic coding sequence
  source 1..2481: mol_type = other DNA
atggacgtggccgccggcaccgccagcggcgccaagagcatgtggactgaacacaagtccccagacggtagaacctactattataatacagagacgaaacagagtacttgggaaaaaccagatgatctcaagactccagcggagcaactcttgagtaaatgcccgtggaaggaatataaatcagacagtggcaaaccctattactacaattcccagaccaaagagtccaggtgggcaaaacccaaagaactcgaagacctggagggctatcagaacactatcgtcgcagggtctcttattactaagagcaacttgcacgggatgctgacagaactgaagtactcaaagcaggaagaatgtaccactacctctaccgccccagtccccactaccgagattccaacgacaatgagtactatggcagctgctgaggcagccgcggctgtagttgccgctgccgccgctgccgccgcagctgcagccgctgcaaatgccaatgcgtcgacttccgcatcaaataccgtatctgggacggttcccgtagtgcctgagcccgaagtaacgagcatcgtggcaaccgtcgtggacaatgagaacaccgtaacaatctccacagaagagcaagcacagctgaccagtaccccagctattcaggaccagagtgtagaggtgtcctcaaacacaggggaagagacctccaagcaggagacggtggcagattttacgcccaagaaagaggaggaggaatctcagcccgccaaaaagacatacacctggaacaccaaagaggaggctaaacaggccttcaaggaattactgaaagaaaaaagggtgccctccaatgcctcttgggaacaggcaatgaaaatgattatcaatgatcccaggtacagcgcgctcgccaaattaagcgaaaaaaagcaggcttttaatgcctataaagtgcagaccgagaaggaggagaaagaggaggctcgcagcaagtacaaggaagcaaaggagtcctttcagcggtttcttgagaatcacgaaaagatgacttccactactcgatacaagaaagccgaacagatgtttggcgaaatggaagtgtggaatgccattagtgagcgggaccggttggaaatctatgaagacgtgctgttttttttgagtaagaaagagaaagaacaagctaagcagttaagaaaaaggaactgggaggccttaaagaatattctcgacaacatggcgaatgtgacatattcaacgacttggagcgaggcgcaacagtacctcatggacaatccaacatttgccgaggatgaagagctccagaatatggacaaggaagacgcattaatctgtttcgaagaacacataagggcgctggagaaggaggaggaagaagagaagcagaaatctcttctgagagaacgtcgtcggcagagaaaaaatcgggaatcctttcagatttttcttgatgagctccatgaacatggacaattgcatagcatgtcctcctggatggaattataccccacaatttctagtgatatacggttcacaaacatgctgggacaaccaggaagcaccgctctggatctgtttaagttctacgtcgaagatttgaaggcacgctaccatgatgagaaaaagatcatcaaagatattctgaaggacaagggcttcgtagtggaggtaaacactaccttcgaagactttgtggccattatttcctcaacaaagcgctcaacaaccctcgacgccggcaatataaagctggctttcaacagtttactggaaaaagctgaggcaagagagcgagaacgcgaaaaggaggaggccagaaaaatgaagcgcaaagagtctgcgttcaagagcatgctcaagcaggcagcccctcctatcgagctggacgcagtgtgggaggatattcgcgagcgcttcgtgaaggaacctgccttcgaggatataaccctggagagcgaaaggaagaggattttcaaagatttcatgcatgtccttgagcatgaatgtcagcaccaccattcaaagaataaaaagcactccaagaaatctaaaaagcaccatcgcaagaggtctagatcgcgtagcggctccgactccgatgacgacgactcccattcaaagaaaaagcgacaaagaagcgagtctcgttccgcatctgaacacagcagttccgccgagtctgaacgatcctataaaaaatctaaaaaacataagaagaaatctaaaaaaagacgccacaagagcgatagcccagaaagtgatgctgagcgtgagaaggataaaaaggaaaaagatcgggaatcagaaaaggaccgtacaagacagagatcagagagtaaacacaagtcacctaaaaaaaagaccgggaaggattcggggaactgggacacatcaggaagcgagcttagcgaaggggaactggagaaaagaaggcgaactttattggaacagcttgatgatgatcagtag

SEQ ID NO: 202006 - DNA, 1347 bp, synthetic construct
  misc_feature 1..1347: note = Description of Artificial Sequence: Synthetic coding sequence
  source 1..1347: mol_type = other DNA
atgcggcccggcaccggcgccgagcggggcggcctgatggtgagcgaaatggagagccacccccccagccagggccccggggacggcgagcgaaggctatctggcagctccctctgtagcggcagttgggtaagcgctgacggctttctaagaaggaggccgagtatgggccatccaggaatgcactacgcccccatggggatgcatcctatgggccagagggcaaacatgcctcccgtaccacacgggatgatgccacagatgatgccaccaatgggcggacccccaatgggtcaaatgcccggcatgatgtccagcgtgatgcctgggatgatgatgtcacacatgtcacaggcgagcatgcaaccagctttacctcctggagtgaattctatggatgtggccgcgggcactgcttctggggccaagagcatgtggacggagcacaaaagtcccgacgggagaacatattactataacaccgagacaaaacagtccacctgggagaaacctgatgatttgaagactccggctgagcagctgttaagcaagtgcccgtggaaggaatataagtctgattctggcaaaccctattattacaatagtcaaaccaaagagtccagatgggccaagcccaaagagctggaggacttagaaggatatcagaatacaatcgttgccggtagcctgatcacaaaaagtaatctccacgctatgatcaaagcagaggagtctagcaaacaagaggagtgtaccaccaccagtactgcccctgtgcccaccacagaaatacctaccaccatgagtaccatggcggctgccgaggcagccgccgctgtggtagctgcagccgcagccgctgccgctgcagccgccgcagctaatgccaatgcaagcactagtgcatccaatacagtgagcggaacggtgccagttgtgcctgaacccgaggttacatcaatagtggctacagttgtcgacaatgaaaacaccgtcaccatttctactgaggagcaagcacagctgacatctactcccgctatccaggaccagtctgtggaggtctcatccaatactggcgaggagacctccaaacaagaaaccgttgcagatttcacccctaaaaaagaggaggaggagtctcagccagcgaaaaagacttatacttggaacactaaggaggaggccaaacaggccttcaaagagctcctgaaggaaaagcgagtccctagtaacgcatcatgggaacaggccatgaaaatgatcatcaatgatccgagatactccgcccttgccaagctcagcgagaagaagcaggcctttaacgcctacaaagttcagacctag

SEQ ID NO: 202007 - DNA, 2826 bp, synthetic construct
  misc_feature 1..2826: note = Description of Artificial Sequence: Synthetic coding sequence
  source 1..2826: mol_type = other DNA
atgaacaagaagaagaagcccttcctgggcatgcccgcccccctggggtacgttcccggtctcggtagaggggcaacaggattcacgactcggtcagatatcggtccagcccgagatgcaaatgatcccgtggatgaccgccatgctcctccggggaagagaactgttggagaccagatgaaaaagaatcaagctgcagatgacgacgatgaggatctcaatgatacgaattatgacgagttcaacggctacgccggctcgctgttctcgtccggaccctatgagaaagacgatgaggaggctgacgctatatacgccgcactggacaagagaatggacgaaaggagaaaagagcgacgcgagcagcgcgaaaaagaagagatcgaaaaataccggatggagaggcccaagatccagcagcagttctcagatctgaaacgcaaactggccgaggtgacggaggaggaatggctgtccattcccgaagtgggggacgcgaggaacaagaggcagagaaaccctagatacgaaaagttgacacccgtgcctgatagcttttttgctaaacacctgcagacaggcgaaaaccacacctctgtagatccgcgtcagactcaatttggtggactcaacactccttaccctggaggactgaacaccccatatcccggaggcatgacaccaggtttgatgactcctggaacaggcgagctggacatgcggaagatcgggcaggctagaaatactctcatggacatgaggctctcacaggtatccgacagcgtatccggccagaccgtggtggaccccaagggctacctcaccgatctcaactcaatgatccccacccacgggggcgacatcaatgacattaagaaggcacgtttactgctgaagagtgtgcgagagaccaatccacaccaccccccggcctggattgcgtcagctcgtcttgaggaggtgacagggaaactgcaagtggcccgcaacttaataatgaaggggacagagatgtgccctaagtccgaagatgtctggttggaagccgctcgcctgcagcctggcgacactgcaaaggccgttgttgctcaggccgtccgacatttgccccagtccgtgcgtatctatatccgggctgccgaactagaaaccgacatccgcgcaaagaagagagtgctgcggaaagcccttgaacacgttcccaattctgtccgtctctggaaggcagccgtcgagctcgaggagcccgaggatgcaagaataatgctcagccgcgctgtcgaatgctgtccgacttccgttgagttatggctggcactggctcgtttggaaacctacgagaatgcacgaaaagtactcaacaaggctagggaaaacattccgactgacagacatatttggatcacagccgcaaaactggaggaagctaatgggaatacacagatggtcgagaagattatagaccgcgccataacctcactccgcgcaaacggtgttgagattaatagagaacagtggatccaggacgccgaagagtgtgatcgcgccgggtctgttgcaacctgccaagcggttatgcgcgccgtgatcggcataggcatcgaagaagaggatagaaaacacacatggatggaggacgctgattcatgtgttgcccataacgccctcgaatgtgcccgcgctatatatgcatatgccctgcaagtttttccctccaagaaatctgtgtggcttcgggcagcatactttgagaaaaaccacgggactcgcgaatcactggaggcactgcttcagcgcgccgtggcccactgtccaaaggcagaagtgttgtggcttatgggcgcgaagtcgaagtggctcgcaggagacgtacctgccgctcgctccattctggccctggccttccaggccaacccaaactccgaagagatctggctggcagcagtcaaactggaatctgaaaacgatgaatatgagcgcgctaggcggctactagccaaagccagatccagcgcacccacagccagagtgtttatgaaatccgtcaagctagagtgggtgcaggataacatcagagcagctcaggacctttgcgaggaagcattgagacattatgaagacttccctaagctgtggatgatgaagggtcagatcgaagaacagaaggaaatgatggaaaaggcccgcgaggcctacaaccagggcctgaagaaatgcccccattctacacccctatggctcctgttgagcaggctggaagaaaaaattggacaactgactcgggcccgcgcaatactcgaaaaatcgagactcaaaaatcctaagaaccctggcctgtggctcgagagtgtgcggctggagtaccgcgccgggctcaagaacattgcaaacacattgatggctaaagcactgcaggagtgccccaactccgggatactgtggtcggaagcaatctttctggaggcaaggcctcagcggaggaccaagagtgtggacgccctaaaaaagtgcgagcatgatccccatgtgttgctggccgttgctaagcttttttggagccagagaaaaatcacaaaagcaagagaatggtttcaccgcactgtcaagatcgatagtgacctcggagatgcatgggccttcttttataagtttgaacttcagcacggaactgaggaacagcaagaggaagtgagaaagcgctgcgaatcagccgaaccgcggcacggggagctgtggtgtgccgttagcaaagatattgcaaattggcagaaaaaaattggggacatacttcggctggtagcaggcagaatcaagaacacgttctag

SEQ ID NO: 202008 - DNA, 2706 bp, synthetic construct
  misc_feature 1..2706: note = Description of Artificial Sequence: Synthetic coding sequence
  source 1..2706: mol_type = other DNA
atgaacaagaagaagaagcccttcctgggcatgcccgcccccctgggttacgtcccaggacttggtagaggtgctaccgggtttaccacgcggagcgatataggtcctgcacgtgacgccaacgaccctgtagacgatcgccacgctcctcccggaaagcggactgtcggagatcagatgaaaaagaaccaggccgccgacgacgatgatgaagacctcaacgatactaattacgatgagttcaacggatacgccgggtctctgttttcatccggaccttacgagaaggacgacgaggaagcagacgcgatctatgctgccctggataagcgcatggatgagcggcgcaaagaaaggcgcgagcaaagggagaaagaagaaatcgagaaatatagaatggagaggcctaagattcaacaacagttttcagacctgaaaagaaagctggcggaagtgaccgaagaggaatggctgtccatcccagaagtgggtgatgcacggaacaagagacaacgtaatcctaggtatgaaaaactgacgccagtgcccgacagctttttcgcaaaacatctgcagactggggagaatcatacctctgtagatcctcggcagacacaattcggcggcttgaacaccccctatccagggggtctgaataccccttatcccggaggtatgacgccgggcctgatgactcccggtaccggcgaactggatatgcgtaagatcggacaggcccgcaatactctgatggacatgcggcttagtcaagtgagcgattccgtgtcagggcaaacagtggtggaccccaagggctacctaaccgatttaaatagtatgatccccactcatggtggcgacattaacgatattaagaaagcacggttgctgctcaagtccgtgcgagaaacaaatcctcatcacccgcctgcatggattgcttccgcgcggctggaagaggtgactggaaagctgcaggtggctaggaatctgataatgaagggtaccgaaatgtgcccaaaatccgaagacgtgtggctggaagcagcacggctccaaccaggcgacaccgccaaggccgtggttgctcaagccgttcggcacctgccacaatccgtgagaatttacatccgggctgcagagctcgaaacagacataagagcaaagaagcgggtgctgaggaaagcactagagcacgtccccaattctgtacgcctctggaaagctgcggtggagcttgaggagcctgaagatgcacggattatgttgtctcgggccgtggagtgctgtccaactagcgttgagctttggctggctttggctcgactcgagacatacgaaaacgcccgtaaggtgctcaataaggccagagagaacatccccacagacaggcatatttggataaccgctgccaaattagaagaagcaaacgggaatactcagatggtggagaagataattgatcgtgcaattacctctctccgcgcgaacggtgtggagattaacagggagcagtggatacaggatgctgaggaatgcgaccgtgcaggttcagttgccacttgccaagcggtgatgagagccgtaataggaataggcattgaggaagaagataggaagcacacctggatggaggatgcggacagctgcgttgcccataatgcattggaatgtgcccgagccatctatgcctatgctctccaggtcttcccctctaaaaagtccgtatggctgcgcgccgcctacttcgaaaaaaatcacggcacccgcgaatccttggaagccttgctacaacgcgcagtcgctcattgtccaaaagccgaggtgctctggctcatgggcgccaagagcaaatggctagccggagacgtcccagctgccaggagtatcctagctttggcatttcaagtttttatgaagtctgtgaagctcgagtgggtgcaagataacataagagctgctcaggacctgtgcgaggaagcactcaggcactatgaggatttccctaagctgtggatgatgaagggtcagattgaggagcagaaggaaatgatggaaaaggctcgagaggcctacaatcagggactcaaaaagtgcccccactctacaccattatggctgttgttgtccaggctcgaagagaaaattggccagctgacgcgagcacgggcaattttggagaagtcacgattgaaaaaccccaaaaacccgggcctctggttagagtctgtgagactcgagtatagggccggtctgaaaaatatcgccaacacattgatggccaaggccctgcaggaatgtcccaattctgggatcctctggagtgaggccatctttctcgaggctcgacctcagagaagaaccaaaagcgtcgacgcactcaagaagtgcgagcacgacccacacgttcttctggccgtggctaagctgttctggagccagagaaaaatcacaaaagcaagagagtggtttcatcgcactgtcaaaatcgactcggacctgggcgatgcgtgggccttcttctataagttcgaattacagcacggcaccgaggaacagcaggaggaagttaggaaaaggtgtgagagtgctgagccccggcacggggagctctggtgtgctgtgtcaaaagacatcgccaactggcagaagaagattggagatatcctgagactggtagctgggagaatcaaaaacaccttctag

SEQ ID NO: 202009 - DNA, 7008 bp, synthetic construct
  misc_feature 1..7008: note = Description of Artificial Sequence: Synthetic coding sequence
  source 1..7008: mol_type = other DNA
atggccggcgtgttcccctaccggggccccggcaaccccgtgcccggtccccttgctccattaccagattacatgtccgaagaaaagctgcaagagaaagccaggaagtggcagcaactccaagctaagaggtacgccgagaaaagaaaatttggcttcgtggatgcacagaaggaagacatgcctccggagcacgtgagaaagattatccgggaccacggcgatatgactaatcggaagttcaggcatgataagcgggtgtatttgggtgccctcaaatatatgcctcatgcggtgctcaaactgctcgagaatatgcctatgccctgggaacaaatcagagatgtccccgttctttaccacattaccggggccatcagttttgtgaatgaaatcccatgggtcatcgaacccgtatacatctcgcagtggggctcaatgtggatcatgatgaggcgtgagaagcgcgataggagacattttaaacggatgcgttttccccctttcgatgacgaagaacctccgctggattatgctgacaacatcttagacgtcgagccccttgaggcaatacagctggaattggatcctgaggaggacgctcctgtgctggactggttttacgatcatcagcccttgagggactctcggaaatacgtgaacggatccacttaccagcgctggcagttcacgttaccgatgatgagcacgctttataggctggccaatcagttgttaaccgacctagtggacgacaattacttctatctgttcgacctcaaagccttttttacctcgaaggcccttaatatggctattccaggcggaccgaagttcgaacccctggttcgggacatcaacttgcaggatgaagattggaacgaatttaatgatataaacaagattattataaggcaacccattagaaccgaatataagatcgcgttcccatacttgtataataacttacctcaccacgtgcatctaacttggtatcatactcctaacgtagtgttcatcaagaccgaggatccagacttgcccgccttttacttcgaccctctgataaatcctattagccaccgccatagtgtgaagagtcaggagcccctaccagacgacgacgaggagtttgaactgcctgagtttgttgagccgtttctcaaggacactccgctgtacaccgacaacactgcgaacggcatagcactcttatgggctccccgacctttcaacttgagatcaggaagaacccgccgcgctctggatatccctctggtcaaaaattggtatcgggagcactgccctgcaggtcagcccgtgaaggttcgggtgtcgtaccaaaaactgctcaagtattatgtccttaacgcattgaagcaccgacctcctaaagctcaaaaaaagcggtacctgtttagatcattcaaagcaacgaaattctttcagagcacgaaactggattgggtcgaggtcggactgcaggtgtgtagacaagggtacaacatgctaaacctgctgatccaccggaaaaacttgaactatcttcacctggactacaatttcaacctgaaacccgtgaagaccctgactacaaaagagcggaaaaagagtcgatttggaaatgcctttcatctatgtcgcgaagtgctcagacttacgaagctcgtggtggacagccacgttcagtatcgacttggaaacgtggatgcctttcagctggcggacggattgcagtatatcttcgcccatgtaggacaactgaccggcatgtaccgttataaatacaaactgatgcgtcagatcagaatgtgtaaagacttgaagcatctcatctactaccggttcaacaccggccctgtgggaaaaggacccgggtgtggtttctgggccgcggggtggcgagtctggttattctttatgcggggcatcactcctttgctggaacgttggttgggaaacctgctggcaaggcagttcgagggcaggcactccaaaggcgtcgccaagacagttactaagcagcgggtcgaatcacattttgatcttgagctcagagccgccgttatgcatgatatcttggacatgatgcctgaagggataaagcagaataaggcacgcaccatcctccaacacctgtccgaagcctggagatgctggaaggccaacattccttggaaggtacctgggctcccgacacctatagaaaacatgatccttaggtatgtgaaagctaaggctgactggtggacaaacacggcacattacaatcgggagagaatccgccggggtgccaccgtggacaaaactgtgtgtaaaaagaatctcggcagactcactaggctgtacttaaaggcggagcaggagaggcagcacaattacctcaaggatgggccgtatatcacggctgaggaagccgttgccgtgtacacgaccactgtccattggctagagtccagacgtttctctcccattccatttcctccgctcagttataagcacgatactaaactgctgatcttggccttagaaaggctaaaggaggcttactccgtaaaatccagactaaatcaatcccagcgtgaagaactgggtctgattgaacaggcctacgacaaccctcacgaggccctcagcaggataaagagacatctgttgacccagagggcattcaaggaggtggggattgaatttatggatctatattcacacctagtgcccgtgtatgatgtggagcctttagagaaaatcaccgatgcttacctagatcaatacttgtggtacgaagcagacaagcgcagattgttcccaccatggattaagcctgctgatacagagcctcctcccctcctggtatacaagtggtgtcaagggataaataatctgcaggacgtgtgggagacgtctgagggcgagtgcaatgtgatgcttgagtcccggtttgagaaaatgtacgaaaagattgacctaacgctgctgaatcggctgctgcgcttaatcgtcgatcacaatattgcagactacatgaccgcaaaaaacaacgtggtgattaactacaaggacatgaaccatactaactcttacgggattattcggggtttgcaatttgctagtttcattgtgcaatattatggcctcgttatggatctgctggtgctgggactgcatcgtgcctcagagatggccggtccccctcagatgcccaacgacttcctatcattccaggacatcgcgacggaagccgcgcacccaattaggctcttttgccggtacattgatcgcattcacatattctttcgctttacagcagatgaagcgagggatctgatccagcgatatctgacagagcacccagacccaaataatgaaaacatcgtcggatataacaacaaaaaatgctggccccgggacgcccggatgagactgatgaaacatgacgtgaatcttggccgggctgtgttttgggacatcaaaaatcggctgccacgttcggttactactgttcagtgggaaaacagcttcgtctctgtctacagcaaagacaacccaaacctgctttttaatatgtgcggatttgaatgccgcattttaccaaagtgtcggaccagctatgaggagtttacccacaaggatggcgtgtggaatttgcagaatgaagtgactaaggaacgcaccgctcagtgtttcctgcgggtggacgacgagtccatgcagcgtttccacaatagggtgcgtcagattctgatggcgtcagggtccaccaccttcaccaaaattgtgaacaaatggaataccgcactaatcggtttgatgacgtattttcgggaagcagtcgttaacactcaagagctcctggatctcttagtgaagtgcgaaaataagatacagactaggataaagatcggtctcaattcgaaaatgccatcacgttttccccctgttgtcttttacacgcccaaggagctagggggcttggggatgttgtcaatgggtcacgtgctgatcccacagtcagatcttagatggtctaagcagaccgatgtcggaattacccatttcagatcagggatgagccacgaagaggatcagcttattcctaatctttacaggtatattcagccgtgggagtccgagtttattgactctcagcgcgtgtgggcagagtacgctcttaagaggcaggaagccattgcccaaaacagaaggctgaccctggaggacctggaggactcttgggaccgaggaattccgagaataaacacgcttttccagaaagacaggcacaccctggcctatgacaaagggtggagggtgcggactgactttaagcagtatcaagtactgaaacaaaatcctttttggtggactcaccagaggcacgacggcaagctatggaacctcaacaactataggaccgacatgatccaggcattggggggcgtagaaggtatcctcgaacacacgctgtttaaaggaacctattttcctacctgggagggactgttctgggaaaaggcttctggtttcgaggagtctatgaagtggaagaaactgactaatgcccaaaggagtggattgaatcaaattcccaataggcgcttcactctctggtggtcaccaaccattaacagagccaacgtgtacgtcggttttcaggtgcagctggatctgactggcatctttatgcacggtaagattcctaccttgaaaattagtctcatccagatctttcgtgcccacctttggcagaagatccatgaaagcattgtgatggacttgtgccaggtgtttgaccaggaactcgatgcccttgaaatagagacagtccaaaaggagacaattcacccccgcaagagttacaagatgaattctagctgcgccgacatccttctctttgcatcctacaagtggaacgtctctagacccagcctgctggcggactccaaggacgtcatggattcgacaactacacagaagtattggatagatatccaactgaggtggggtgattatgattcacacgatatagagcgttacgcacgtgctaagtttcttgactatactaccgataatatgtcaatttacccttcgccaactggcgtcctcatcgctatcgatctggcctacaatttacacagtgcttacggcaactggtttcctggttccaagcctcttatccagcaggctatggcgaaaattatgaaggctaatcccgccttgtacgttttgagagagcgaattcggaaaggactccagctgtatagcagcgagcctacggagccttacttgagctcacaaaactacggcgaactcttcagcaaccaaattatctggttcgtcgatgacaccaatgtgtacagggtgacaatacataaaacctttgaaggcaaccttaccacaaaacctatcaacggagctatctttattttcaatcccagaacagggcagttgttcctcaagattatacatacctcagtatgggccggtcagaaacgtctcggacaattggcaaagtggaaaacagcagaagaggtggccgccctaatcagatcactgccagtagaggaacaaccaaagcaaattatcgtaacacggaaaggaatgctcgatcctcttgaggtgcatctcctcgacttcccaaacattgttattaagggatcagaattgcagctgcctttccaggcctgcctcaaagtcgaaaagtttggcgatctgatcttaaaggctaccgaaccccagatggtgctctttaacctctacgatgactggctcaagactatttcaagctataccgccttttccaggctgattctgatcttacgtgctttgcacgttaataatgacagggcaaaggtcatcctgaagcccgataaaactaccattacggagcctcatcacatttggcctacgctgacggatgaggaatggattaaggtggaggtgcagcttaaggatctcattctggccgactatgggaaaaagaacaacgtgaacgttgcatctctcacccagtcagagattagagacatcatcctggggatggagatatctgccccgtcacaacaacgccaacagattgcagagattgagaagcaaactaaggaacagagccagctgaccgcaacacagacacgaacggttaacaaacatggtgatgaaatcattacctccactacctcaaattatgaaacccaaaccttcagctctaagacagaatggcgggtccgagccatctcggctgctaacttacacctgcgaacgaatcacatctacgtttccagtgatgatatcaaggagaccggctacacctatatcctgccaaagaatgtcctaaagaagttcatctgtatctcagacctgcgcgcacagatcgcagggtacctgtatggcgtatcccccccagataatcctcaggttaaggagattaggtgcattgtgatggtgccacagtggggcacacaccagacagtgcacctgcctggacagttgccccagcacgaatatctgaaagaaatggagcctcttggctggatacatacgcaaccaaatgagtccccacagctatctccgcaggatgtcaccacccacgccaagataatggccgacaatccgagttgggatggagagaaaactatcatcattacttgcagttttaccccaggaagttgcaccttgactgcatacaagctaactcccagcgggtatgaatggggacggcagaacaccgacaagggtaataatcctaagggatacctgccctcccactatgagcgagtgcagatgcttctgtccgaccgatttctgggtttcttcatggtgcccgcgcaatcctcgtggaattacaattttatgggtgtgagacacgaccccaacatgaaatatgagctccagctcgcaaaccctaaagaattttatcacgaggtccaccggccatcgcactttttgaacttcgctctgctgcaggagggcgaagtctactccgctgatcgcgaagacttatatgcttag

SEQ ID NO: 202010 - DNA, 1392 bp, synthetic construct
  misc_feature 1..1392: note = Description of Artificial Sequence: Synthetic coding sequence
  source 1..1392: mol_type = other DNA
atgatccaggccctgggcggcgtggagggcatcctggagcacaccttgttcaagggcacgtattttcccacctgggaggggctgttttgggagaaagcgtcaggcttcgaggagagcatgaaatggaaaaagttgaccaacgcccagcgcagcgggcttaaccagatccctaatcggcgattcactctatggtggtccccgaccatcaacagggctaatgtctatgtaggattccaagtgcaactggacctgaccggcattttcatgcacggcaagattccaactcttaaaattagtcttattcagattttccgggcccacttatggcagaagatccacgaaagtatcgtcatggacctgtgtcaggtcttcgatcaggaattagatgcactcgaaatagagactgtacaaaaagagacaattcacccccggaagtcttataagatgaatagctcctgtgcagacatcctcctttttgcgtcttacaagtggaatgtgagtcggccgagcctcctggccgactcaaaggacgtaatggattctactaccacccagaaatactggatcgacattcagctgaggtggggagattacgactcccacgacatcgagagatatgctcgggcaaagttcttagactacactactgacaacatgtccatctatccctccccaactggggtgctaatcgctatcgacctcgcctacaatctgcacagctactccgaggtcggtagtctgcaacaagcctcccatacaactggcgctaagataatgaaggccaaccctgccctatatgtgctgagagaacggattaggaaaggcctccagctgtactcctccgagcccaccgagccgtacctgagttcacagaattatggggaactcttcagtaaccaaattatctggtttgtggacgacaccaacgtgtaccgggtaaccattcacaagacgtttgaaggaaatctgactacaaagcccattaacggggctattttcattttcaacccacggacggggcaattgttcctgaaaataatccatacatcagtctgggccggacagaaaagactggggcagctggctaaatggaagaccgccgaagaggtagctgcactgatcaggtcactgccggtggaggagcagcccaaacaaatcatcgttacaagaaagggaatgttggacccccttgaggtgcacttgctggactttcccaacatagtcataaaggggtctgaactccaactccctttccaggcgtgcctgaaagtagaaaaatttggggacctgatcttaaaagctaccgagccgcaaatggtcctcttcaatctgtatgatgattggttaaagaccatatcctcatacaccgccttctcgagacttattttgtag

SEQ ID NO: 202011 - DNA, 2727 bp, synthetic construct
  misc_feature 1..2727: note = Description of Artificial Sequence: Synthetic coding sequence
  source 1..2727: mol_type = other DNA
atggccgacggcggcggccccaaggacgcccccagcctgcggagctccccaggcccagccccccgggtaccccgtgctgtgggcccatccggcgggggtggcgaaacgcctcggacagctgccttggcgctccggtttgacaaacctatcaagcaggccttttataataccggtgctgtattatttgtgtgtctttgttgcggcgcagccgtgctcgtttacttcattctcgaggccttcctgaggcctcttctttgggccgttttgtgcggaacgtttctgcaccccttcaaatcatccttaacccggctcggcaggcattggctccagaggctgcacagagctcatactcccatcgtgctggctgctctgctcctgccactgtgttttgtggattacggggttgaggcactcggtgaacaagcactgcgccgtcgaaggttgcttctcctcttaggtgccggaggaccactcctatacggcctgtattgcctcggaagctatctgggtgtgcaggtcttgctcgtccatgcagctaccctcatttgccgcggccttgattattttagttccttgtggatatggaccctggtggtgggctacgtgctcacagtctcctttaagtggaacgccagtactgaaaggtatctcagggcagtgtcgatccctgtttggattatacttctctttcatttagccagcttagccgggagctggcggattccagtcttcctcgttatagtgttcctgatgtccgtgggaaccttgtacgaaaagcagaacggaaaagagtcgtccggtgccgagttacctgggcaagtgatttccatggctgcgtccactctggccaatcttgctatttccataactggatatgagagctcgtctgaagaccaaccaagtacccagcctgcagaggccgtggatcgcggcgagagcgcccctacactcagtacgagcccgtctccttcttcaccatcccccacgtccccctcaccgaccttagggcgtcggcgccccgagatcgggaccttcctgcggaagaaaaaaacttccgacatctattttgttagtcttgtgtgggccatagtggtgatgcagatatggctcaatctgtggatcgtgcaacttctgcctgtccctatcgctgtgtggattcttaaaaagcttgtcatccattttggagtcgtcgacttcctggagaaacggtatcatgtgtggtgggggattatcgagtcatttctaaaagagcgacagggcgctctggcaccatggccgatcgtcggtcttggaaagtttctgctgaaggttgatagtaagctttggcactggttgaataagaagatgattatctggctggagaaaatgctagacaaaattatctcaatcttcattatattcctgttggtgatcggcacattgctgctggccctgctgctaacggccaaggttcatcaagaaagcgtgcatatgatcgaagtgacctctaatctcattaatgagacccttgctaatcatcccgagtgggctaactggctcccagaagcccaagtggtccagagggcactcaattctgcagcaaacaacgtctatcagtacggccgcgagtggataacgcacaagctccataaaattttgggtgacaaagtcaataataccgccgtgattgagaagcaggtccttgaactctgggacagactctatcacagttggtttgtcaagaacgtgacccactctggacgtcataagggccagaaattgcatgtgtctaggcagaattcttggttgggggatatactcgactggcaggatatcgtgagtttcgtgcacgagaacatcgagacattcctctcaatcctggaaagcctgtggatcgtcatgtccaggaacgtttcactgctatttaccactgtcactacactgcttacgatcctcttttattccggtactgccctgctaaatttcgttctgtcgttgatcatcttcctgacgacactgttctacctgttgagtagcagcgacgaatattataaacctgtaaagtgggtcattagcctcactccactgtcgcagccgggaccaagcagcaatatcattggacagagtgttgaggaagcgatacgtggagtttttgacgcgagtctcaaaatggcaggcttttacggcctgtacacttggttaacacatacaatgttcggtatcaacattgtgttcattcctagcgctctcgcagctattttgggagccgttcctttcctgggaacttactgggctgccgttcctgccgtactggatctttggcttacgcagggcctcgggtgtaaagcaatcctgctattgattttccatctactacccacctactttgtggataccgccatttactccgatatatccgggggtggtcacccttaccttaccggcctggctgtggctgggggtgcctactacctgggcttggagggagcgatcatcggtcccatacttctctgtatcctagttgtcgccagcaatatctacagcgctatgctggtatctccaactaattcagtacccactcccaatcagacaccctggcccgcccagccacagcggaccttcagagacatcagccgcagtgaaatcttctctgtggatgtagtcagcagtgccgtgatttttaggaagtttaaattcgattcagagttctcctccgccgtggccctctgtccatcctcctgtgcttag

SEQ ID NO: 202012 - DNA, 1062 bp, synthetic construct
  misc_feature 1..1062: note = Description of Artificial Sequence: Synthetic coding sequence
  source 1..1062: mol_type = other DNA
atgctgaagagctgcagccgggccagcttcagccccagcgtgcggaagccgcctctgatactgcggagacttctgtctgaggacgtcgggatggatattcctttcgaggagggagtgcttagcccatccgcagccgacatgcgaccggaacccccgaactctctcgacctgaatgacacgcaccccaggaggattaaattgactgctcctaatataaacctctctctagatcagtctgagggaagcattcttagtgacgacaatctcgattctcctgacgagatagatattaacgtcgatgagctggatacccccgatgaagcagatagtttcgaatacacaggccacgaagacccgaccgcgaataaggatagcggccaggaatccgaatccatcccagaatataccgccgaagaggagcgcgaagacaatcgcctctggcgcaccgtcgtcatcggggagcaggaacagcgaatagacatgaaggtgatcgaaccttacaggcgggttattagccacgggggctactatggagatggcctgaatgccattatagtgtttgctgcttgctttcttccagactcctcacgagcggactatcattatgttatggagaatctgtttctgtatgtgatttcaacactggaacttatggttgccgaggactacatgatcgtgtatctgaacggggccactccacgccgcagaatgccaggcctcggatggatgaaaaagtgctaccagatgatagatcgccgcctcagaaagaacctgaaatcattcattatcgtacatccaagttggttcatcaggactatactagccgtaacacggccattcatctcctccaaattctccagtaagatcaaatatgtgaacagtctgtcagagctttcagggctcatacccatggactgtatccatatacccgagtccattatcaagctagatgaggaactgcgggaagccagtgaggctgcaaaaacatcttgcctgtataatgacccagagatgtcctcaatggagaaggacatagacctgaaattgaaggagaaaccctag

SEQ ID NO: 202013 - DNA, 9267 bp, synthetic construct
  misc_feature 1..9267: note = Description of Artificial Sequence: Synthetic coding sequence
  source 1..9267: mol_type = other DNA
atggaggagttcctgcagcgggccaagagcaagctgaaccggagcaaacggctcgaaaaagtacacgtggtcataggccctaaatcttgtgatctggacagcctgatcagtacctttacctacgcatactttctggataaggtgtcaccacccggggtgttatgcctcccggtgttaaatataccaagaacggagttcaactatttcacagaaactcgattcatcctggaggaactgaacattagtgagtcatttcatattttcagggacgagatcaacttgcatcagttgaacgatgaaggaaaactgtctatcacactcgtgggcagctcagttctggcttcagaggacaagactttggagagcgctgtcgttaaagtcattaaccccgtcgaacagagcgatgccaatgtagagttccgcgaaagctcgagttccttagtgttaaaagaaattctgcaggaggcaccggagctaataactgagcaactggctcatcggctgaggggcagcattctatttaagtggatgacgatggaaagcgaaaagattagcgagaaacaggaagagatcttgagcatactcgaagagaaatttccgaacttacctccgcgcgaggacatcataaacgtgctgcaggagactcagttcagtgctcagggcctgagcatagaacaaaccatgcttaaagaccttaaagaactaagcgacggggaaatcaaggttgctatcagcaccgtgtccatgaatctagagaattgtctctttcactccaatattacgtccgatctgaaggcattcacagacaaatttggctttgatgtcctgatcctgttttctagttacctctctgaagagcagcaacctcgcaggcaaatcgccgtgtactctgagaatatggaactatgtagccaaatctgttgcgagcttgaagagtgtcagaacccctgtctggaattggagccattcgattgcggttgcgacgagatcctggtataccagcaggaagacccgtccgttacatgcgaccaggtggttttggtggtgaaggaggtaatcaacagacgatgccccgagatggtttccaattctcgcacatctagcacagaagccgtagctggctcggctcctctatcccaggggagttccggaatcatggaactctacggctcagacatcgaacctcagccctcgtctgtcaatttcatagagaacccacctgatctcaacgacagtaatcaggcccaggttgacgcgaatgtggaccttgtatccccagactcaggacttgccaccatcaggagcagcaggagctccaaagaatcatcagtgtttctgtccgacgatagtcccgtgggcgaaggcgcagggccccaccataccttactacctggcctcgactcttacagccctatccccgaaggggccgtagctgaagaacatgcgtggagcggcgaacacggcgaacacttcgacctgtttaattttgaccctgcacccatggcaagtggccagagccagcagagttcccattccgcagattatagccctgctgatgacttctttccaaattccgaccttagcgaaggtcagctgcctgcaggacccgaaggtctggacgggatgggaaccaatatgtctaactatagctcatcctctctactcagcggtgccgggaaggacagcctggtggagcatgatgaagaattcgtccagcgacaggacagtccccgggataacagtgaacggaacttgagcctcacagactttgtgggcgatgagtcaccatcgcctgaacgactcaagaacaccgggaagaggatcccgccaactcccatgaactctctagtggaatcttccccatccaccgaggaaccagcgagcctgtacactgaggacatgacccagaaagctactgacacagggcatatgggccctcctcagacccacgcacgatgctcttcatggtgggggggtctcgaaatcgattcaaagaacatcgcagatgcctggtcatcgtccgaacaggagtcagtgtttcagtcccccgaaagctggaaagagcataagccctcttcaatcgatcgacgcgcttctgatagtgtcttccagccaaagtctctcgagttcaccaagtccgggccttgggaaagcgagttcggacagccagagctcggctctaatgacatccaggacaaaaatgaggaatccctgcctttccagaacctaccgatggagaaaagccctctgcccaacacttcccctcaaggcactaaccatctgatcgaggatttcgcatccctatggcactctgggaggtctccgacagcaatgccagaaccctggggcaaccctaccgatgatggagaaccagccgctgtggctccattcccagcctggagtgcctttgggaaggaggaccatgatgaggctctgaagaacacctggaacttgcatcctactagttctaaaaccccttcagtacgggacccaaatgaatgggccatggcgaagtctggattcgcctttagtagctctgagctccttgataactccccgtcagagattaataacgaggccgccccagaaatatggggtaaaaaaaataacgactctcgagaccatatttttgcccccggtaatcctagttccgacctcgaccatacttggacgaactcaaaaccgccaaaggaggatcaaaacggtctagttgatcccaaaacccgcgggaaggtttatgaaaaagtggatagttggaatttgtttgaggaaaacatgaaaaaagggggctcagatgtcctggtcccatgggaggattccttcctgtcgtataaatgctccgattacagcgcttccaatcttggagaagacagtgtgccctctcccctggataccaactacagtacatccgatagctacacttctcccacgttcgccggcgacgagaaagagactgagcacaaaccctttgctaaggaagagggctttgagtccaaggacggaaactccaccgcggaggagacagatatcccccctcagagtttacagcagtcatcacgtaatagaatcagcagcgggcccggaaacctggacatgtgggcttccccccatacagacaattctagtgagatcaacactacacacaatcttgatgagaatgagttgaaaactgagcatacggatggcaagaacatctctatggaagatgacgtcggagaatcatcacagtcctcctatgacgacccaagcatgatgcagctgtacaatgaaacaaacagacagctgactctactgcattcttcaaccaattcacgacagactgctcctgactccctcgatctatggaacagggttattcttgaggacacacagtccaccgctacaatttccgacatggacaacgaccttgattgggatgattgtagtggtggcgccgctattcccagcgacggtcagactgagggttacatggccgaggggtccgagccggaaaccagattcacggttcggcaactggaaccctgggggctcgagtatcaagaagcaaaccaggttgactgggagctgccagccagcgatgaacacacaaaagattccgccccatctgagcaccacactctgaatgagaagagcggtcagttaattgccaactcgatatgggattcagtgatgagagataaggatatgtcgagttttatgctgcccggctccagccacattacagatagtgagcagcgcgaactcccaccggagatcccatcccacagcgccaacgtgaaggatactcactcccccgatgcaccagccgcaagcggcacctccgagtcagaagccttgatctcacatctggacaagcaggacacggaacgcgagactctgcaatcggacgctgcctccctagctacacgcctggagaatccaggctatttcccacatcctgacccttggaaaggacatggagacggccagtccgaaagcgaaaaagaggcgcagggggccaccgacagggggcatctggacgaggaagaggtaattgcttcgggggtcgagaacgcatcagggatctccgagaagggccagtccgatcaggaactcagttctctagtagcatccgagcaccaagagatctgtattaagtcaggtaagatatcttcgcttgctgtgacattcagccctcaaactgaggagcctgaagaagtcctagaatacgaggagggcagctataacctggactccagggatgttcagactggaatgagcgcagataatttacagcctaaagacacacatgagaagcaccttatgtctcagaggaacagcggtgagacaactgaaacatccgacgggatgaattttacaaagtatgtctcagtccctgagaaggacctggaaaagactgaggaatgcaactttctggagccggagaacgtaggcggcggcccaccccatcgtgtgccacggagcctggattttggggacgtgccaattgatagtgatgtgcatgtgtcatcaacctgttcagaaatcaccaaaaatctcgatgtgaaggggagcgagaacagcctacccggtgctggcagcagcggtaatttcgaccgggacacaataagctcagagtatacgcattcctcggccagttcgcctgaactgaacgacagcagcgtggcgctgagcagttggggccaacagccatcttcggggtaccaggaagagaaccagggcaactggtccgaacagaaccatcaagagtcagagctgatcacgacagatggccaggtggaaattgttaccaaggtgaaggatttagaaaaaaaccggatcaacgaattcgagaagagctttgatcgcaagacaccaaccttcctggagatttggaatgactctgtggatggagacagtttttcctcgctctctagtcctgagaccggaaaatacagcgagcactcaggcacacaccaggagagcaatctgattgcctcctaccaggagaagaacgagcacgatatctctgctacagtgcagcccgaggacgcacgtgttatttctaccagtagtggatctgacgatgattccgtaggcggagaggagagcatcgaggaggagattcaggtcgctaattgtcacgtcgccgaagacgagtcacgggcctgggattcactgaatgagagtaataagttcttggtaactgctgaccctaagagcgagaatatttacgattacttagactcctctgagcctgccgagaatgagaacaaatcaaaccccttttgcgataaccagcagtcttccccagacccatggacattctctcccctaactgagactgagatgcagatcacagctgtggaaaaagaaaagcgctcaagcccagaaacaggcaccacgggagatgtagcgtggcagatctcgccgaaggccagtttcccaaaaaatgaggataacagccaactggagatgctggggttcagtgcggatagtacagaatggtggaaggccagtccccaggaaggtagactgatcgaaagtccattcgagagggagctgtctgacagtagtggcgtgctggaaatcaactcttcggtgcaccagaatgctagtccttggggcgtgccagtccagggagatatcgagcctgtagaaacccactacactaatccgttttccgataatcaccagagcccgtttctggaagggaacggcaagaacagtcacgaacaactgtggaatatccagcctcgacagcctgatccagacgccgacaagttcagtcagctggtgaagcttgaccagatcaaggagaaagactccagagaacagacgttcgtgtcagctgccggggacgaactgacacccgagactcctactcaggaacagtgccaggatactatgctccctgtctgcgatcatcccgataccgcttttacgcatgcggaagagaactcctgcgtgacaagtaacgttagtaccaacgaagggcaggagactaaccaatgggagcaggagaaaagctacttgggcgaaatgactaactcaagcatcgcaaccgaaaattttcccgctgtaagcagtccgacccaactgatcatgaagcctggcagcgagtgggatggaagcacaccgtccgaagacagccgcggtacattcgtgcccgatatcctgcatggtaacttccaggagggcggacaactggccagcgctgctcctgatctgtggatagatgccaaaaagccttttagtctgaaggccgacggggaaaatccagacattctaacccattgtgaacacgattcaaactcccaggccagcgattcccccgacatatgtcacgattccgaagccaagcaggaaacagagaaacatctcagcgcctgcatggggcccgaggtggaaagctctgagctttgtctcacggagcctgaaattgatgaggaacccatctacgagcccggccgcgagttcgttcccagcaacgccgaactagattccgagaatgcaaccgtgctgccgcctattggataccaggcagatatcaaagggtcaagtcagccagcttctcataagggaagccccgaaccttctgagatcaatggtgacaactccactggtctacaagtgagtgagaaaggtgcctccccagacatggctcctatactggaacctgtggacagacggattcctaggattgaaaatgtggccacgtctatatttgtgacgcaccaggagcccacccccgagggcgatggcagttggatatccgattcctttagtccagaaagccagcccggggccagagccttgttcgacggagacccgcacttatcgaccgaaaatcctgcactggtgccagacgccctcttggcatctgacacctgtcttgatattagtgaggccgccttcgatcatagcttctccgatgcgagcgggcttaataccagcacaggaacaatcgacgatatgagtaagctgactttgtcagaaggccacccagaaacaccagtggacggagacctgggtaaacaggatatatgctcttcagaggcttcttggggtgactttgaatacgacgttatggggcagaacatcgacgaggatctgctccgtgagcccgaacactttctttacggcggcgacccacccttggaagaggattctctcaagcagagcctggcgccatacactcccccgttcgatctgtcatatttaactgaaccagctcagtccgccgagactatcgaggaagccggaagccctgaagacgaaagtttaggctgtcgtgctgccgagattgtccttagcgcactcccagaccgcaggagtgagggtaaccaagccgaaacgaaaaatcgcctgcctgggagtcagcttgccgtcctccacatcagggaggatcctgagagtgtgtacttacctgttggcgcaggctctaatatcctctccccttcgaatgttgactgggaggtggagacagacaactctgacctgcccgccgggggcgacatcggaccgcctaacggcgcttcaaaggaaatttctgagctggaggaggagaagactatacccactaaggagcccgaacagatcaaatccgaatataaagaggagcgttgtaccgaaaaaaatgaggatagacacgctctccacatggattatatcctggttaaccgcgaagaaaatagtcacagcaaaccggagacgtgcgaggagcgcgagtccatcgcagagttggaactgtatgtggggtccaaggaaaccggcctgcagggtacccaactggcttcgtttccggacacatgtcaaccagcatcactgaatgaacgtaagggtctgtccgctgaaaagatgtcaagcaaaagcgatactcggtcatctttcgagagccctgcccaggatcagtcttggatgtttctggggcactcggaggtaggtgacccaagtctggacgctcgggacagcggtccaggttggtccggaaagaccgtggagcctttctccgaactggggctcggagagggaccacaactccagatacttgaggaaatgaaaccgttagagagcctcgccctggaggaggcatctggaccggtttcccagtcccagaagagcaaaagccgagggcgggcagggcccgatgccgtcactctccaggccgtcacacacgataacgagtgggagatgttatccccacagccagtccagaaaaacatgatcccagatacagagatggaagaagagaccgaattccttgagctgggaacccggatatcaagacccaacggcttactcagtgaggacgtggggatggacattcccttcgaggaaggggttttatccccctcagcagcagatatgcgaccggaaccccctaattctctggacctgaacgacacacacccgagaagaataaagttaaccgcccccaacatcaacctgagtctggaccagagtgaaggctccatcctcagtgacgacaatttggattcacccgatgagatagatattaacgtagacgaactggacacccctgatgaggccgatagcttcgagtacactggtcacgatcccactgccaacaaagatagcgggcaagagagcgagagtatcccagagtacactgctgaagaggagcgagaggacaatcggttatggaggacagtcgttatcggcgagcaggagcaacgaattgacatgaaggtcattgagccctataggcgggtaatcagccatggtggatactatggggacggccttaacgccatcatcgtctttgcggcctgttttttacctgactcttccagagccgactaccactacgtgatggagaacctcttcctttacgtgatttcaactttggagctgatggttgccgaggattacatgatcgtgtacctaaacggcgccacccctcgaaggagaatgcccggactggggtggatgaagaaatgttatcagatgattgataggagattgaggaagaatcttaagtcatttattattgtacaccctagctggtttatcagaaccatacttgccgtcactaggcctttcattagctctaagtttagctctaagattaagtacgtgaacagcctctctgagttgagtgggcttattcccatggactgtatccatattccagaatccattatcaagctggacgaggagctacgggaggcgagcgaagcggcaaagacatcttgcctatataacgaccccgaaatgagttccatggaaaaagacattgatctcaaactgaaggaaaagccatag

SEQ ID NO: 202014 - DNA, 9165 bp, synthetic construct
  misc_feature 1..9165: note = Description of Artificial Sequence: Synthetic coding sequence
  source 1..9165: mol_type = other DNA
cggaacctgatgcaccggatgaaggagagcgagaaccggagcaagcgattggaaaaggtccacgtggtgatcggtcccaagtcttgcgatctggactccctgatcagcaccttcacatacgcgtattttttggacaaagtgtcgccgcctggggtactgtgtctaccagtactgaacattcccaggacagagtttaactattttaccgagactaggttcatactcgaagagcttaacatttccgaaagtttccacatcttcagggatgagataaacctccatcagcttaacgatgagggtaaattatccattaccctcgtagggtcgtctgtattggccagcgaagacaaaactctagagagcgctgtggtgaaggtcatcaaccctgtcgagcaatccgacgcgaacgtcgaattcagggaatcctcgagcagtcttgtgctcaaagaaatcttacaggaagctccagagttaataacagagcagctggctcaccggctgcggggctccatcttgtttaagtggatgaccatggagagcgagaaaattagcgaaaagcaagaggagatcctgtcaatcctagaggagaaatttccaaatctgccccctagggaggacattatcaatgtacttcaagagacccagttctccgctcagggcctgagtatcgagcagacaatgttgaaggatttgaaggagcttagcgacggtgagattaaggtggcaatttcaaccgtgagcatgaacttagagaactgtctctttcatagcaacattacatccgatttaaaggcttttacagacaaatttggtttcgatgttctcatcctgttcagctcctacctgagtgaagagcaacagccaaggaggcagatcgcagtttattcagagaacatggagttgtgttcacaaatctgctgcgagcttgaggaatgccagaatccttgtctcgaactggaaccgttcgattgcggatgtgatgagattttagtttaccagcaggaggaccctagtgtgacatgcgaccaagttgttctcgtggtgaaggaagtgatcaatcgccgctgccccgagatggtctctaactcccgcactagctctacggaagcagttgccggatcagcgcccctgtctcagggttcgtccggcattatggagttatatgggagtgatatcgagccgcagccttcgtccgtgaacttcatcgagaaccctcccgatctcaatgactcaaatcaggctcaggtagacgctaacgtggaccttgtcagccctgacagcggcctggccacaattcgtagttccaggagtagtaaagaaagcagtgtcttccttagtgacgactccccggtgggggaaggagccggacctcaccacacgttacttcccggcctggacagctacagcccaattcccgaaggcgccgttgccgaagaacacgcatggagtggagagcacggtgagcatttcgacctgttcaacttcgatccggctcccatggcatcaggtcagagccagcagtcctctcattctgccgactactctcctgcggacgactttttcccaaatagcgacctatctgagggacagctgcccgccggcccggagggactcgatggcatgggcaccaatatgtctaattattctagttctagcctcctaagtggcgctggaaaagattccctggttgagcatgacgaggagtttgtgcagagacaggattcaccaagagacaactccgaacgcaacctgtccctgaccgactttgttggtgatgagtcaccttcgccagagagattgaagaacactgggaagcgcattccccccactccaatgaacagcctggtcgagtccagcccatctacagaagagccagcttctctttataccgaagatatgacccagaaagccactgacaccggccacatgggcccccctcaaacccatgctaggtgctcctcatggtggggcggcctggaaatcgattccaaaaacatcgcagacgcttggagctcatccgagcaagagagtgtgttccagtcacccgaatcttggaaagaacataagccgtcgagtatcgaccgcagggcctctgattcggtattccagcctaagagtctggaatttacaaaatcaggcccttgggaaagtgaatttggccagccagaattgggatcaaatgacatccaagataaaaacgaagaaagtctgccattccaaaatttgcctatggagaagtcccctctccctaacacatccccccagggaaccaatcatctgatagaagacttcgctagcctctggcactcgggcagatcaccaaccgcgatgcctgagccatgggggaatccgactgacgatggagagcctgcggccgtggcgccctttcctgcgtggtctgctttcggcaaggaagaccacgatgaggcactcaaaaacacatggaatctccatcccaccagttcgaaaaccccatcagtaagagaccccaacgagtgggctatggctaagagcggttttgccttctcaagctctgaactgctagacaacagcccctccgaaatcaataatgaggcagccccagaaatctggggcaaaaagaacaatgactcacgagatcacatatttgctcctggaaatccatcctctgatttggatcatacctggactaacagcaaaccaccaaaggaggaccagaacggactcgtggatcccaagacccgagggaaagtgtatgagaaggtcgactcttggaatctttttgaagagaacatgaaaaaaggaggctccgatgttctggtgccctgggaggatagcttcctgagctataagtgtagtgactactctgcgtctaacctcggagaagacagtgtgcccagccccctcgatactaactatagcacaagcgactcttatacttcaccaacctttgcaggtgacgaaaaggagacggaacacaagccttttgctaaagaggaggggttcgagagcaaggacgggaattccactgctgaggagacagacattccaccccaatccctgcagcagagttctcggaaccgcattagctccggtccaggcaacttagacatgtgggcctccccccacacagacaacagttcagagattaataccacccacaacctggacgaaaatgaactgaaaacagaacataccgacggcaaaaacatcagcatggaggatgatgtaggcgagtcttcgcagtcaagctatgacgacccatccatgatgcagttgtacaatgaaacaaatcggcagctgacactgctgcactcctctaccaacagccgccagactgccccagactctttagatctgtggaatagggtgatcctggaggacacgcaaagcactgcaacaatcagcgacatggataatgacctcgactgggatgactgcagtggaggggccgcaatcccctcggatggacagactgaaggctacatggctgagggctccgaacccgaaacacggtttactgtgcgtcagctcgaaccgtggggtttagagtaccaggaagcaaaccaggtagattgggaactgccagcaagcgatgagcacaccaaagacagtgctccttcggaacatcacactctaaatgagaaatccggccagctgattgccaatagcatttgggattccgtaatgcgagataaggatatgtcgagctttatgctccctggctcaagtcatatcacggattctgagcagcgggagttacccccagagataccatcccacagcgctaacgtgaaggacacccactcaccagacgcaccggctgcctctggaacctctgagagcgaagcacttattagccatttagacaagcaggatactgagcgggagactctccagtccgatgccgcgtcgctggctactagattggagaatcctggttatttccctcaccccgacccatggaaaggccacggagacgggcagagcgaatcagaaaaagaagctcaaggagctacagacaggggacatttggatgaagaagaagtgatcgctagtggcgtggagaacgcctcgggcataagtgagaaggggcagtctgaccaggagctctcatccctcgtcgcatcagagcaccaggaaatttgcataaaaagcggtaagatttcttccttggcggttaccttctctccacaaactgaagagccggaggaggttctggagtatgaagagggttcctacaacctagactcacgtgatgtgcaaactgggatgtccgccgataacctgcagcccaaagatacacatgagaagcatctcatgtcccaaaggaacagcggcgaaaccaccgagacttctgacggcatgaattttacaaagtacgtttcggtccctgagaaggatctggagaaaactgaggagtgcaactttctggagcctgagaacgtgggtggagggcccccccaccgggtcccacgttctttggactttggggatgtgcctatcgatagtgacgtgcacgtgtcctctacctgttctgaaattacgaaaaatctagatgtcaagggcagcgagaacagccttcccggcgccgggtcctccggaaacttcgatcgtgatactatttccagtgagtacacccatagcagcgcttcttctcctgagcttaatgacagtagtgtagctttaagttcctggggccagcagccctcgagtggctaccaggaggagaaccagggaaattggagtgaacagaatcaccaggaaagcgagttgattacaactgacggtcaggttgagattgtcaccaaggtaaaagacctcgagaagaacaggatcaacgaattcgagaagagtttcgacagaaagacacctacatttctggaaatctggaatgactctgtggatggggactccttctcttcactctccagccctgagaccgggaaatacagtgagcactcgggaactcatcaggaatccaatttaattgccagttatcaggaaaagaacgagcatgatattagtgcaacggttcagccagaggacgctcgcgtgatctctaccagcagtgggagtgatgacgactctgtggggggggaagaatctatagaagaggagattcaggttgcgaactgtcacgttgcggaagatgagtctcgagcctgggattctcttaatgagagtaacaagttcctggttactgctgatcccaagtctgaaaatatttacgattatttagatagttcggagccagcagagaacgaaaataagagcaacccattttgtgataaccagcagtcctctcctgacccttggacttttagccctctgacagagacggagatgcagatcaccgcagtggagaaagagaaacggtcatccccggagactgggacaacaggagatgtagcgtggcagatttctcccaaggcatcctttccaaaaaacgaggataactctcaactggaaatgctaggctttagcgcagatagtactgagtggtggaaagcttccccacaggaggggaggctgattgagtctcctttcgaacgcgaactgtctgactcctcaggtgtactagagattaattcgtctgtgcatcagaacgcttctccttggggcgtacctgtgcaaggcgacatcgagccggtcgagacgcattatactaatcccttcagcgacaatcatcagagtccttttctcgaaggcaacgggaaaaattcccacgaacagctgtggaacattcaacctaggcagcccgatccggacgccgacaagttttctcaactcgtgaagttggatcagatcaaggagaaggacagccgggaacagactttcgtgtctgcggccggagatgagctcactcccgagacaccaacccaggagcaatgtcaagatactatgctgcctgtctgcgaccaccccgatactgcttttacccacgccgaggagaatagttgtgtgaccagcaatgtcagcacaaatgaggggcaggagacgaaccagtgggagcaagagaagtcatacctgggtgagatgacaaattcttctatcgctaccgagaacttccccgccgtgagctccccaacccagttaattatgaagccgggttccgaatgggatggctccaccccatccgaagattcccgaggcacatttgttcctgatattctgcacggtaactttcaagagggcggacagctggcctccgcagcccccgatctctggattgacgcaaagaagcccttttctttgaaagccgatggcgaaaatcctgacattctaacccactgtgagcacgatagcaacagtcaagcttccgacagtcctgatatctgtcacgattctgaagccaaacaagagacagagaaacatttatccgcctgtatgggaccagaagtagagtcctccgaactgtgtcttacggagcctgagatcgatgaggagcccatctatgaacccggccgagagttcgtcccgtccaatgccgaactggacagcgagaacgctaccgtcctgccccccatcgggtaccaggctgatattaaaggcagctcacagcccgccagtcacaagggcagcccagagccttccgagataaatggcgataactctactggactacaagtgagcgagaagggcgccagcccagatatggcccccatcctcgagcctgtagacaggcgtattcccaggatagaaaacgtcgccacctctatatttgtcacgcaccaggaaccaacccctgaaggcgatggatcatggatatccgactcgttctcaccggagtcccagccgggcgctagagccctctttgatggcgatccacacctatctacggagaaccctgctttggtgcccgatgcgctgctggcttccgacacatgtctggacatctcagaagccgcattcgaccacagcttttctgacgcttctggcctgaatactagtaccgggaccatcgacgacatgtcaaagctgaccctgtcagaagggcatccagagacacccgtagacggcgacctgggaaaacaggatatctgttcgagcgaggcatcctggggtgacttcgaatatgacgtgatgggccagaacatcgacgaggatctgctgagagagcctgagcatttcttatatgggggggatcctcctctggaggaagattcccttaaacaaagtctggcgccgtacacccctccattcgatctctcttacctgactgaaccggcccaaagtgccgagacaattgaagaagccggctcacccgaagacgaatccctgggatgccgggccgctgagatcgtattgtccgccctcccagacagacgcagcgagggtaatcaggccgagactaaaaaccgactgcccggatctcagctggcagtcctacacatccgagaggatcctgagtcagtctacttgcctgtcggcgctgggtccaacattttaagtccgtcaaacgtcgactgggaggtagaaactgataattccgatctgccagctgggggcgatataggcccaccgaacggagccagtaaggagatctcggagttagaggaggagaagaccatcccaacaaaggagccagagcagatcaaatccgaatacaaagaggaacgttgtacagaaaaaaacgaagatcgccatgcgctgcacatggactacatccttgtcaatcgcgaagagaatagccacagcaagcccgaaacttgcgaagagagagaaagtatagctgagctcgagctgtacgtgggctcaaaggagacaggtttacaggggacccagctggcttcttttcctgatacctgccagcccgcctcactgaacgaaaggaaaggcctgagcgccgagaaaatgtcaagtaaatcagacacccggtcgtcattcgagtctccggcacaggatcagtcttggatgtttctaggacactcagaggtaggtgaccccagtctggacgccagggactcaggccccggctggagcgggaagacggtagagcccttctctgaactcgggctgggtgaggggccccaactacagatcctggaggagatgaagccactggagagcttggctcttgaggaggcctctggcccagtatctcagtcccagaagagcaaatctcgtggccgggctggacccgacgccgtcaccctccaggcagtcacccatgacaacgagtgggagatgctgtccccacaacccgtgcagaaaaatatgattcccgataccgagatggaagaggagactgagtttctagagcttgggacccgaataagtcggccgaatggcctgctttccgaggatgtggggatggacattccttttgaagaaggcgtgctctcacccagcgcggctgatatgagacccgaaccacctaactcattggacctcaatgacacccaccccagaagaattaaacttacggcacctaacataaatttgtccctggatcaatccgaggggtctatcctctctgatgacaatttagactcgccagatgagatcgacattaacgtcgacgaactggatacacctgatgaggcggactcctttgagtatactgggcatgaagatccaacggccaataaggactctggccaggagtcagagtctattccggaatacacagctgaggaagaacgcgaggataaccgcctgtggcgcactgtcgttattggggaacaggaacagcgcattgacatgaaggtgattgagccataccgtagagtgatttcacatggaggaagccgagggtattatggcgacggcctgaatgctataattgtctttgctgcgtgttttcttcctgactctagtagggccgactatcactatgttatggaaaatctgtttctgtatgttatctcaacactggagctcatggttgctgaagactacatgatcgtgtatctgaatggcgccactcctcggagaaggatgcccggactcggctggatgaagaagtgctaccagatgattgacaggaggcttcggaaaaaccttaaaagtttcatcatcgtccacccttcctggtttattcggacaatcctggccgtaacaaggccctttatcagtagtaagttctcctctaaaatcaagtacgtgaattctctgtccgagctcagtggccttattcccatggactgtattcatattcctgaatctatcatcaactactag

SEQ ID NO: 202015 - DNA, 783 bp, synthetic construct
  misc_feature 1..783: note = Description of Artificial Sequence: Synthetic coding sequence
  source 1..783: mol_type = other DNA
atcgacatcaacgtggacgagctggacacccccgacgaggccgactcctttgagtacaccgggcatgatcctactgcaaacaaggatagtggacaggaatcagagtctatccccgaatataccgccgaagaggagcgtgaggacaatagactgtggagaaccgtggtaataggagaacaggaacagaggatcgacatgaaggtaatcgaaccctaccggcgcgtaattagtcacggtggggactccggctactacggagatggactgaacgcaataattgtctttgctgcctgtttcctgccagatagttctcgggcggactatcactacgtgatggagaacctgtttctgtatgtcattagcacgcttgagttgatggtggccgaagactacatgattgtttacttaaacggggccactcccaggcggagaatgcctgggttggggtggatgaagaagtgctatcaaatgatagaccgccggctacgcaaaaatttaaaatcctttattatcgtacatccttcgtggttcatccgtacgatcctggcggtgacccggccttttatttccagcaagttctcctccaaaataaaatacgtcaacagtctgagcgagctcagtgggcttatccctatggattgcattcatatccccgaatcaatcattaaatatgacgaggagcgcagttacaaacggagtgtgaggactagttgtctatacaacgatcccgagatgtcctcaatggagaaggacatagacctcaagctcaaggaaaagccgtag

SEQ ID NO: 202016 - DNA, 7155 bp, synthetic construct
  misc_feature 1..7155: note = Description of Artificial Sequence: Synthetic coding sequence
  source 1..7155: mol_type = other DNA
tgattccagagccccgagagctggaaggagcacaagcccagcagcattgatcgccgcgccagcgactctgtcttccaacctaagtcactggaattcaccaaatctggtccgtgggaaagtgaattcggtcaaccagagcttggctccaacgatattcaggataaaaacgaggagagtctcccatttcagaacttgcccatggagaagagtccactgccaaacacctctccccaaggcaccaaccacctgattgaagactttgcatccctgtggcatagcggaaggagtcctacggcaatgcctgaaccctggggcaacccgaccgatgatggagagcctgccgcggtcgcacccttcccagcctggtctgcattcgggaaggaagatcacgatgaggcccttaagaacacttggaatttgcatccaaccagtagcaaaactccatcggttcgagatccaaatgagtgggctatggccaagtcaggatttgcattttcatcttctgaactcctggataatagcccctccgaaataaacaacgaagccgccccagaaatttggggaaaaaaaaacaacgatagcagggaccatatctttgcccccggtaatcctagctcagatctggatcacacttggacgaactcaaagccccccaaggaagatcagaacggattagtcgatccaaagacccgaggcaaggtgtacgagaaggtggactcctggaacctgtttgaagaaaatatgaagaaaggcggctctgacgttcttgtgccatgggaggatagcttcctcagttataaatgtagcgactatagcgctagtaatctgggagaagacagcgtgccctctccacttgacaccaactattccactagcgactcctatacgtccccaacatttgccggggacgaaaaggaaaccgaacataaacccttcgctaaagaagaaggatttgagtcaaaagatggtaacagcacagctgaggagacggatatcccaccccagtccctacagcaaagcagcagaaaccgtatctcctcgggtcccgggaatctcgatatgtgggctagtccccacaccgacaatagctccgagattaacacaacacacaacctggatgagaacgaactgaagacagagcacaccgatggaaaaaacatctcaatggaggacgacgtaggagaaagtagccagagcagctacgacgacccctccatgatgcagctctacaatgagactaaccggcagcttaccctcctccattcttctaccaatagcagacagaccgctcccgatagtttagatctgtggaacagagtgattcttgaggatacacaaagcacggctacaatcagcgatatggacaatgatctcgactgggatgattgcagcggcggcgcagccatcccctctgatggacaaactgagggatatatggccgagggaagtgagccagagactcgcttcactgtgcggcagctggaaccatgggggctagagtaccaggaagccaaccaggtggattgggagctgccagcaagtgacgagcacactaaggactccgctccctctgagcatcatacgctgaatgagaaatccgggcagctgattgctaacagtatctgggactcggttatgagggacaaagacatgagtagtttcatgcttccaggcagtagtcacattaccgatagcgagcagagagaacttccgcccgaaataccatcgcattcagcaaacgtgaaggacacccactcccctgatgctcccgcagctagtggaacatcagaatccgaagccctaatcagtcacttagacaagcaggacacggagcgcgagacacttcagtctgacgccgcaagccttgctacccgtctggaaaaccctggatacttcccacaccccgatccatggaagggacacggcgacgggcagtccgagtctgaaaaggaggcccagggagctaccgatcggggacatctggatgaagaagaggtaatcgcctcaggcgtcgaaaacgcgagcggcattagcgagaaggggcagtccgatcaggagctctcctccctggtggcttccgaacaccaagagatctgtattaagagcggcaagatcagttccctcgccgtgacattctcaccacaaaccgaagaacctgaagaagtgctagagtacgaagaaggatcatataatctagacagtcgggacgtccagactgggatgagcgcagataacctgcagcccaaggacacgcacgagaagcatttaatgtcccagagaaactccggagagactaccgaaaccagtgacggtatgaatttcactaagtacgtctctgtgcccgaaaaagacctggagaagacagaagagtgcaacttcctggaaccagagaacgtaggaggcggtcctcctcaccgtgtgccacgatctcttgacttcggagatgtgccaattgacagtgatgttcacgtgtcatcaacttgttcggaaattactaaaaacctcgacgtcaaaggaagcgaaaacagtcttccgggagctggaagcagcggaaactttgacagggacaccatctcttcagagtatactcactcaagcgcgtcctcaccagaactgaacgacagtagtgtcgcgctgagttcctggggccagcagccctccagtgggtatcaggaggaaaatcagggcaactggtcagaacagaatcaccaagagtcagagctgatcacaactgatggccaggtcgagatcgtcaccaaggtgaaagacttggaaaaaaatcgcatcaacgagtttgagaaaagtttcgatcgcaagactcctacttttttggagatctggaacgatagcgttgatggtgactcattcagcagcttatcaagcccagagaccggaaagtacagtgaacactctggcacacatcaggagagtaacctgatagcatcctatcaggaaaagaacgagcatgacatcagcgctacagtccagcctgaggacgcacgagttatttccacgtcctccggttcggatgacgacagtgtcgggggggaagagtctatcgaggaggaaatccaggtcgccaactgtcacgttgcagaggacgaatcacgcgcttgggattctctgaacgagtccaataaatttctggtaaccgcagaccctaaatctgaaaacatctacgactatttagatagcagtgagcccgccgagaatgaaaacaaaagcaatcctttctgtgacaatcagcagtcgagccccgatccctggactttctccccacttactgagaccgagatgcagatcacggcggtcgagaaggagaaacggtctagtcccgagactggaaccaccggtgacgtcgcctggcagatcagtcctaaagcctctttccctaaaaatgaggataattcgcagctggaaatgctgggctttagtgctgactcaactgaatggtggaaggcgagtccccaagagggcaggttaattgaatctccgtttgaaagggagctgtccgatagctctggtgttctcgaaattaactcgagcgttcaccagaatgcaagcccttggggcgtccctgtgcagggggacattgagcccgtcgaaacccactacactaatccgttttccgacaaccaccagtcaccttttctggaggggaatggaaaaaattcacatgagcaactctggaatatccagcccagacagcccgatcctgacgcagataaattttcacagctggtaaaacttgaccagattaaggagaaggacagtagagaacaaactttcgtgagtgcagccggcgatgagctgactcccgaaaccccgactcaggagcagtgccaggacactatgctacccgtgtgcgatcaccctgacactgcttttacacacgccgaggagaattcctgtgtgacttcaaatgtcagcaccaatgagggacaggaaacaaatcagtgggaacaggagaagagttacctgggggaaatgacgaactcctcaattgccaccgagaacttccctgctgtgtcctcacctacacagctgattatgaaacctggatccgaatgggacggctcgaccccgagcgaagacagtaggggtactttcgttcctgacatactccacggtaatttccaggaaggaggccagctcgcatctgcagcccccgatctttggatcgatgcgaagaaacctttctcacttaaggccgacggggagaaccctgacattctgacacattgtgagcacgattcgaactcccaggcctccgactcgccagacatctgtcacgactcagaggccaagcaggagaccgagaagcacctgtccgcttgtatgggccctgaggttgagtcgagtgaactgtgcctcactgaacccgaaattgatgaggagcctatatacgagcccggaagggaattcgtgccctctaacgcagagctggacagcgagaacgccactgtcctaccacccatcgggtaccaggccgacattaagggcagttcccagcctgcttcccacaaaggatctcccgaacccagtgaaataaacggggacaactccaccggtctgcaggtgagtgaaaagggggctagcccagatatggccccgatcttggagcctgttgacagacggatcccacgcatagagaacgttgcaaccagtatatttgtcacgcaccaagagcctacccctgagggcgacggctcttggatatccgactctttctcgcccgagtcccagcccggcgctcgtgccctcttcgacggagacccgcacctttccacagagaatccagccctggtgcctgatgctctgttggccagcgatacttgtctggacataagcgaggctgcattcgaccattcattctctgacgccagtggcctcaataccagcactggaactatagacgacatgtcaaaactgactctctctgagggccatccagagacacccgttgacggagacctcgggaagcaggacatttgttcttcagaagcaagctggggtgacttcgaatatgacgttatgggccagaacatcgatgaggaccttctgcgagagccagagcactttctgtatggtggtgatcctccactggaggaagactccctgaagcaatctctagccccgtacacacctccatttgatctttcttacctaacagagccagcgcagagcgctgagacgattgaagaggccgggtcgccggaagacgaatcgttgggctgtagagcggcagagattgtgcttagcgccctgcctgaccgtcgctccgaaggtaaccaggccgagactaagaaccgcctgcccggtagccaattagcagtcctgcatatcagggaagatcctgagagcgtttatctgccggtcggtgctggctccaatatactctcgcctagcaacgtggattgggaggttgagacagataactccgacctcccggccggcggggacattgggcctccaaacggagccagcaaggagatcagtgagttggaggaggagaagacgatccccacaaaagagccagaacagattaaatccgagtacaaggaggagcgatgcactgaaaagaatgaggatcggcacgctctgcatatggattacatcctcgtgaaccgggaggaaaatagccattcgaagccagaaacttgtgaggagagagagtccatcgccgagcttgagctgtatgtcggttctaaggagacaggacttcaggggacacagctagccagctttcccgacacttgtcagcccgcaagtctgaacgaacgcaaggggctgtcagcagagaagatgtcctccaagtccgatacccgaagttctttcgagagtcctgcccaggatcagtcttggatgtttttaggccactccgaagtgggggatccatccctggatgctagagattccgggcccggctggtccggcaagaccgtcgaacccttctccgaactggggctgggtgaagggccccagctccagattttggaagagatgaagcctctagagtccttggcactggaggaggcaagcggacccgtgagtcagtctcagaaatctaagtccagggggcgagccggtcccgatgctgtgactctccaggctgtaacacatgataacgaatgggaaatgctctctcctcaaccagtgcagaagaacatgatcccagacaccgagatggaggaagagaccgagtttttggaactggggaccaggatttcgcgtccgaacggcctcctgtccgaggacgtgggtatggacattcccttcgaagagggagtcctgtctcctagcgctgccgatatgcgaccggagccacccaattctctggacctcaatgatactcacccaagacggattaaactgaccgcgcccaacattaatctgtccctggatcagtccgagggctctattctatctgatgacaacctggactctccagatgagattgacatcaacgtggacgaactggatactcccgatgaagcagatagctttgagtatacaggccatgatccaacggccaacaaagattcagggcaggagtctgaatcaatccctgagtatactgctgaagaggaaagggaggacaatagactctggagaacagtcgtcatcggagaacaggaacagcgtatagacatgaaggtcattgaaccttaccgcagagttattagtcatggaggagattcaggatactacggcgatggcctgaatgccatcatcgtgtttgctgcttgttttctccccgattccagccgcgccgattatcactacgttatggaaaatttgttcctatacgtcatttcaactctggaactcatggtggctgaggactatatgattgtgtacttgaatggcgctacgcctcgcaggagaatgcccggtctaggatggatgaagaaatgctatcagatgatcgatcggcggctgcggaaaaacctcaagagtttcataatcgtgcacccgtcttggttcattcgaacaatcctggcagtaactaggccgttcatttctagtaaattttcatcgaagattaaatacgtgaatagcctctccgaactatctggattaattcctatggactgtattcacataccagaatcaattatcaatatagacttaaagctaaaagagaaaccgtag

SEQ ID NO: 202017 - DNA, 8193 bp, synthetic construct
  misc_feature 1..8193: note = Description of Artificial Sequence: Synthetic coding sequence
  source 1..8193: mol_type = other DNA
atggtgagcaacagccggaccagcagcaccgaggccgtggccggctcggctccactttcccagggcagtagcggaatcatggagctgtatggatccgatattgaacctcaaccatcctccgtcaacttcattgagaacccgcccgacttgaatgacagcaatcaggctcaagtggacgccaacgtagatcttgtgtctcctgactccggactcgccactatccgttcaagcagaagctctaaggaatcttctgtgttcctttctgacgactctcccgtcggcgaaggcgccggaccccaccacaccctcctgcccggactcgactcctactcccctatccctgaaggtgcagtggccgaggagcacgcatggtcaggtgaacatggtgaacacttcgatttattcaattttgatccggccccgatggcaagtggacaatctcagcagagctcccactccgctgactattccccagctgatgatttcttcccaaattctgatctgtctgagggccagctccctgccggcccagaaggactcgacggtatgggaaccaatatgtcaaactattcttcaagcagtctgctgagcggggctggcaaagactcactcgtggagcatgatgaggaattcgtgcagaggcaggacagtcctcgtgacaattcagaacggaatttatcactgaccgacttcgtgggcgacgagagcccctctcctgaacgcctaaaaaacactggcaagagaattcccccaactcccatgaactcacttgtggaatcttccccgagcacggaggaaccagcatctttgtataccgaggacatgacacagaaggccacggacaccggccacatggggcccccacagactcatgcccggtgctcctcctggtggggggggttagagattgattcaaagaacatcgccgacgcctggtctagcagtgagcaagagagtgtgtttcagtcacccgaaagttggaaagagcacaagccctcgtcgattgacagaagggcttctgatagcgtgtttcagcccaagtctctggaattcaccaagtccggcccgtgggaaagcgaattcgggcaaccagaactaggcagcaacgatattcaggataaaaatgaggagtcgctgccgttccaaaatctgccgatggagaaaagtccattgccgaacactagtccccaggggaccaaccacctgattgaagactttgcctctctgtggcactctggtcgctcccctacagctatgcccgaaccctggggcaatcccacagacgacggagagccagctgctgtggcgccgtttcctgcatggtcagcttttgggaaggaagaccacgatgaggccctgaaaaacacgtggaatttgcaccccacatcttctaaaaccccttcagtccgcgaccctaatgaatgggcaatggccaagtcgggctttgccttctccagcagtgaacttttagataattcaccaagcgagataaacaatgaagccgcccccgagatctggggcaaaaagaataatgattcccgcgaccatatctttgcacccggtaacccttccagtgacctggaccatacctggacaaattctaagccccctaaagaggatcagaatggcttggtggaccctaaaactcgaggaaaggtctacgaaaaggtcgattcttggaacctgttcgaagaaaatatgaaaaaagggggttccgatgtgctggtcccgtgggaggactcctttctgtcttataagtgttcagactactccgcctccaatttaggagaggattccgtgcccagtcccctggataccaattactccactagcgactcttacacctcaccaacctttgcgggcgatgaaaaggagacggaacataaaccattcgccaaggaagagggatttgagtccaaagatggaaattcaactgctgaggagacagacattcccccgcaatctttgcagcagtcctcacggaaccgtatttcaagcgggccaggaaacttggatatgtgggcatccccacatactgataactcctcagagatcaacactactcacaacctggacgagaacgagctcaagactgagcacaccgacggtaaaaacatttctatggaggacgatgtgggcgagagcagtcagagctcctatgacgacccctccatgatgcagctgtacaacgagaccaacagacagctgactctgctgcacagcagtaccaactcgcgccagactgcacccgatagcctggacctctggaatcgcgtaatcctcgaggatacccaaagcacagccaccatctctgatatggacaacgacctggactgggatgactgctcaggtggcgccgccattccatccgacggtcagaccgagggttacatggcagaaggatccgagcctgagacaaggtttacagtgaggcaattagaaccctggggtctggagtatcaggaggctaatcaggtggactgggagctgccggcttccgatgagcacaccaaggattcagcgccatcagaacaccacacccttaacgagaagagcggccagctcatagcaaatagtatctgggactctgtgatgagagacaaggatatgtctagctttatgctcccaggctctagtcacattaccgacagcgagcagcgggagctgccccccgagatcccctctcactccgccaacgtgaaagacacgcactcgccagacgcacctgccgccagtgggacttctgagtccgaggctctgatctctcatctggacaagcaggacacagagagagaaacactgcagtcagatgccgccagcctggccacccgccttgaaaacccagggtatttcccacatccggacccatggaagggtcacggggatggccagagcgaaagcgagaaagaggcccagggcgctacagaccgaggacacctggatgaagaagaggtgattgcaagtggcgtcgagaacgcttccggaatttccgagaagggccagtctgatcaagagttgtcttctttggtagcctccgaacatcaggagatctgcatcaaatcaggaaagatcagtagcctggctgttacattttccccccagaccgaagagcccgaggaggttctggagtacgaggagggttcatacaacttagattcccgtgatgttcagactggtatgagcgccgataatctgcagcccaaagatactcacgagaagcacttgatgagtcagaggaactcaggagagactacagaaacgagcgatggcatgaacttcactaagtacgtcagcgtccctgagaaagatctcgagaagaccgaggaatgcaactttttggagcctgaaaacgtgggcggcggcccaccccatagagtgcccagaagcctggatttcggagacgtgcctatagactccgatgtgcatgtctcatcaacatgttctgaaattacaaaaaatctggatgttaaaggttccgaaaatagcctgcctggagccgggagcagtgggaatttcgaccgcgacaccatctcatctgagtatactcattcaagcgcttctagccccgaattaaacgattctagcgttgcccttagttcctgggggcagcagccttcttctggctaccaagaagaaaaccagggcaactggagcgagcaaaatcaccaagagtccgagctcattacgacagatggccaagttgagattgttaccaaggtaaaggatctggagaaaaataggattaatgaattcgagaaaagcttcgacaggaaaaccccgaccttcctcgaaatctggaacgattcggtggacggcgactctttcagctcgctctcttctccggagacagggaaatactccgagcactcagggactcaccaggagagcaatctcatcgcttcctaccaggaaaaaaacgagcacgatatctccgccaccgtccagcctgaggatgcaagagtcatcagcacctctagcgggagtgacgatgatagcgttgggggcgaggagtccattgaagaagaaatacaagtagctaactgtcatgtggcggaagatgagtcaagagcctgggatagtctaaatgaatctaataagttcctcgtgacggccgatccaaagtcagagaacatctacgattacctggacagttccgagcctgccgagaacgagaacaagtccaatcctttttgcgataatcagcaatctagcccagatccatggaccttttcacccctcaccgagacagaaatgcagattactgccgtggaaaaagaaaaaaggtctagccccgaaactgggacgacaggggacgtggcttggcagatctctccgaaagcctcctttccaaagaatgaggataatagccaacttgagatgctcgggttctctgccgattctacagaatggtggaaggcttcacctcaggaagggaggctgattgaatcccctttcgagagggagctgagtgatagcagtggggtgctggagattaacagcagcgtgcatcagaacgcttccccttggggggtccccgtgcagggagatatcgagccggtggaaacacactacactaacccttttagcgacaaccatcaaagtcccttcctggaggggaacggaaaaaatagtcacgagcagctgtggaacatacagccaaggcagccagatcctgacgctgacaagtttagccagttggtgaagctggatcagataaaagagaaggactcccgcgagcagacattcgtcagtgccgcaggcgacgagctgactcctgaaacaccaacccaggagcagtgtcaggatactatgctacctgtctgcgaccatcctgacacagccttcacccatgcagaggagaatagctgcgtgaccagtaacgtaagcacaaacgagggacaggagacaaaccagtgggagcaggaaaagtcttacctgggtgaaatgaccaattcctctatcgccacggagaacttcccagcagtctcctctcctacacaattaataatgaaaccagggtcagaatgggacggttccactcccagtgaggactcacggggcacctttgtccccgacattctgcatggtaattttcaggagggcggtcagctggcctctgctgcccctgatctgtggatagatgccaagaaaccatttagcctgaaagctgatggggaaaatcccgatattttgacacattgcgaacacgattctaatagccaagcctccgactcaccagacatttgccatgactccgaggcgaaacaggagacggagaagcatttgagtgcctgcatgggtcccgaggtagagtccagcgagctgtgtctgaccgaaccagaaatagacgaagagccgatttacgagccaggaagagaattcgttccatcaaatgcggagttagattctgagaatgccacagtgttgcctcccattggttatcaggcagacatcaagggaagttcccagcccgcaagccataaaggtagcccagaaccttcagaaatcaacggcgataattcgactggactgcaggtgtccgagaaaggggcctctcccgatatggctcctatcctcgagccggttgacagacgcatccctcggatcgagaacgtggccacctctatttttgtcacacaccaggaaccaacccctgaaggagacgggagttggatctctgactccttctccccggagagccagcccggagccagagcgctgttcgatggcgatccgcatctatcgacagagaacccagctcttgtgccagacgcccttttggcatcggatacatgtttggacattagtgaggcagcgttcgaccacagtttttcggacgcttccggactgaatacaagcacgggaacgatagacgacatgtccaagctcacactctctgaagggcacccggagactcccgtggacggcgatctgggtaagcaggatatctgttcttcagaagcctcctggggcgattttgaatacgatgttatggggcagaacattgacgaggatttgctccgtgagcctgaacactttttgtacgggggggacccccccttggaggaggacagtctgaaacaaagtctagccccgtacacgccccccttcgacctatcctatctcactgaaccggcccagtcagccgaaacaattgaggaggcgggaagtccggaggatgaatccctcggctgccgagcggccgagatcgttctttctgccctaccagatagaaggtctgagggcaaccaggcagagacaaagaaccggctccccggctctcagcttgcagtgttacacatccgcgaggaccctgagagcgtgtatctgcctgtcggggcaggaagcaacatcttgagtcctagcaacgtggattgggaggtggagaccgacaattctgatctcccagcaggcggcgacatcggcccacctaacggggcttctaaggagatttcggaactcgaggaggagaagactatcccaacaaaggagcccgaacaaatcaagtccgagtataaggaagagcggtgtacagaaaagaacgaggataggcacgcattacacatggactatatcctcgtgaaccgggaggagaacagtcacagcaagccagaaacgtgcgaggagagggaaagcattgcggaattggaactgtatgtagggagtaaagaaaccgggctgcagggaacacagctggcaagctttcctgacacctgccagcccgccagtcttaacgagagaaaaggcctgtccgctgagaagatgagcagcaagtctgatacacgctccagtttcgagagtcccgcacaggatcaatcttggatgtttctgggacacagcgaagtaggtgatccaagcctcgacgcgcgcgacagcggtccggggtggtccgggaagacagtcgaacctttctccgagcttggtctgggagaaggtccccagctgcagatcctggaggagatgaaacctttggaatcgctcgccttggaggaggcatctggcccagtcagccagtcacagaagagcaagtcacgaggcagggctggcccagacgccgttaccctccaggccgtcacccacgataacgagtgggagatgctgagccctcaaccagtgcaaaagaacatgatccccgataccgagatggaggaagagacagaatttctcgagttgggcacccgaatctccaggccaaacggcctgctgagcgaggacgtgggcatggatattccctttgaggagggagttctgtcaccctctgcagccgacatgaggcccgaacctcctaattcgctggacctgaacgatactcatcctcggcgcataaagttaacagcccccaatattaaccttagcttggatcagagtgagggctcaatcttgtcagacgataatctggatagccccgacgagatcgatattaacgtcgatgagttagacactcctgacgaggcagacagttttgaatacactggccatgaggaccctaccgcaaataaggattcaggtcaagagagcgagagcatccccgagtacacggccgaggaagagagagaagacaatcggctatggaggaccgttgtgattggtgagcaggagcaacgcattgatatgaaagtaattgagccttataggagggtgatcagccatggtggttactacggagatggtctcaatgcgatcatcgtctttgcagcctgttttttgccagatagttccagggctgactaccattatgtcatggaaaacctattcctttacgtgattagcacccttgagctaatggtagccgaggattacatgattgtgtacctgaacggggctacaccccgccgaagaatgcccggcctcggttggatgaaaaaatgctaccagatgatcgatcggcggctccggaagaatctgaaatcttttataatcgtacatccatcctggtttatcaggacaattctggcggttacaagaccatttatctcgtccaaatttagtagtaagattaaatatgtgaatagcctcagcgagctctccgggttgattccgatggattgcatacatattccagaatccattattaagcttgatgaggaactgagggaagcatcagaagctgcaaaaacaagctgcctgtacaacgaccccgagatgagttctatggaaaaagatatcgacctgaagctgaaagaaaaaccgtag

SEQ ID NO: 202018 - DNA, 927 bp, synthetic construct
  misc_feature 1..927: note = Description of Artificial Sequence: Synthetic coding sequence
  source 1..927: mol_type = other DNA
atgcggcccgagccccccaacagcctggacctgaacgacacccaccctagaagaattaagctcacagccccaaatatcaatctctctctggaccagtcagaagggagcatactgagcgatgataacctagacagcccagacgaaatcgacatcaatgttgacgagctcgacaccccggatgaagctgactcgttcgagtacacaggacacgacccgacggcgaataaggacagtggacaggaatcagagtctattccagaatacacagccgaggaggaaagagaggacaacaggctgtggaggaccgtggtcatcggcgagcaggaacaaagaatcgacatgaaggtgatcgagccgtaccggagagtaatctctcacgggggtaagctccgatactatggcgatgggctcaacgccatcatcgtgtttgctgcctgcttcctgcctgattcctctcgggcagactatcattatgtgatggaaaatctcttcctgtatgtaattagtaccttggagctgatggtagcagaggactacatgattgtatatctgaatggagctactcccagacgccgcatgcccggcttagggtggatgaaaaaatgctaccagatgatcgaccggaggctcaggaaaaatttaaaatccttcattatcgtccatccttcttggtttattagaacaatcttagcggtcactaggccatttatttcatccaagttttctagtaagatcaagtatgtgaattccctctcagaattgagtggactcattcccatggactgcatccatattccggaatccatcatcaagtatgacgaagagaggtcctacaagcggtccgtgcgaacatcgtgcctctataacgaccccgagatgtcttccatggagaaagatatcgatcttaaacttaaagaaaagccatag

SEQ ID NO: 202019 - DNA, 1014 bp, synthetic construct
  misc_feature 1..1014: note = Description of Artificial Sequence: Synthetic coding sequence
  source 1..1014: mol_type = other DNA
atgaacggcctgcggaacaagcagctgctgagcgaggacgtgggcatggatatacccttcgaggaaggagtgctttccccctcagccgccgacatgcgaccagagccccctaattctctggatctgaacgatacccacccgcgacgaataaagctcactgcccctaacattaatctgtctctggaccagtccgagggatccattctctcagatgacaatttagattccccggacgagatagacatcaacgtggatgagttggatacccccgatgaagcagacagcttcgaatacactggccatgaccccactgccaacaaggactcaggtcaagaatctgaatctatacctgagtatacagcggaagaggagagagaagacaaccgactctggagaaccgtcgtaattggtgaacaggaacagcggatcgacatgaaagtgatcgagccctatcggagagtaattagccatggcgggtactatggggacggcttaaacgctatcattgtgtttgccgcttgttttctcccagattcaagtagagctgactaccattatgtgatggaaaatctatttctgtacgtaatcagcacactagagctaatggtggctgaggattacatgattgtctacctcaacggggcaaccccccgcagacggatgcccggactggggtggatgaagaaatgctaccaaatgatcgaccggcgcttaaggaaaaacttgaagtctttcatcatcgtgcaccctagttggtttatcagaacgattcttgctgttactcgcccctttatctcaagcaaattttcctctaaaatcaaatacgtcaactcactcagcgagctgtcaggcctgatacccatggattgcattcacatcccggaatctatcatcaagctggacgaggaactgcgggaggctagtgaagccgcaaagacgtcttgcttgtataacgacccagagatgagctccatggagaaggatatagacctgaagcttaaggagaagccgtag

SEQ ID NO: 202020 - DNA, 1155 bp, synthetic construct
  misc_feature 1..1155: note = Description of Artificial Sequence: Synthetic coding sequence
  source 1..1155: mol_type = other DNA
atggccggcaacgccgagcccccccccgccggcgccgcctgcccccaagatcgtcgatcttgctcggggagagctgggggagacagggtgtgggaagacggggagcatcccgccaaaaagctgaagtccgggggcgacgaggaacggagagagaaaccaccaaaacgcaagatcgtgcttttgatggcttactccggcaaaggctaccacggaatgcagcgaaacgtgggctcttctcagttcaagaccatagaagacgacctcgtatccgccctggtcagaagcggctgtattccagagaaccatggcgaggacatgagaaagatgtcctttcagcggtgcgcccgtactgataagggtgtctcggcagccggccaggtggtgtccctgaaggtatggctgattgacgatattctagaaaagatcaattctcacctgccttctcatatacgcattctggggttaaagcgtgttacgggaggatttaattcaaaaaacaggtgcgacgctcgcacctattgttacttgctgccgacatttgccttcgctcacaaggaccgcgatgtgcaagacgagacatacaggctctccgccgaaaccttgcagcaggtgaaccgcctgttggcctgctataaagggacacacaacttccataacttcacatcacaaaaggggccacaggatccctccgcttgccggtatatcctggaaatgtactgtgaagaaccatttgtcagggagggcctggaatttgcagtgattcgggtcaagggccagagtttcatgatgcatcagatccgaaaaatggtgggactcgtagtggcaatcgtcaaggggtatgcacctgaatctgttctggaaagatcttggggcacggagaaggttgatgtgcccaaagcccctggcttagggcttgtgctcgaaagggtccatttcgaaaagtataaccagagatttggaaacgacggcctccatgagcccctcgactgggcccaggaagaagggaaagtggctgccttcaaagaagaacacatctacccaactataatcggtacagagcgcgacgagcgaagcatggctcagtggctgtccacactgcccattcataacttttccgctacggctcttaccgccgggggaaccggcgctaagtag

SEQ ID NO: 202021 - DNA, 1284 bp, synthetic construct
  misc_feature 1..1284: note = Description of Artificial Sequence: Synthetic coding sequence
  source 1..1284: mol_type = other DNA
atgggcctgcagctgcgggccctgctgggcgccttcggccggtggactttgcgtcttgggccaagaccctcttgctctcccaggatggccggaaatgccgagccccctccagctggcgctgcatgtccacaggatcgtcgctcatgttctggacgggctggtggcgaccgcgtctgggaggacggggagcatcccgcaaaaaagctgaagtctggaggggatgaggagcgccgcgagaaacccccaaagagaaagatcgtgttgctgatggcttatagcggtaagggatatcacggcatgcagagaaacgtcggatcttctcaattcaagaccattgaggatgatcttgtgtcagccctggtgcggtccggctgcatcccggagaatcacggagaagacatgagaaagatgtccttccaacgatgcgccaggactgataaaggagtcagtgctgccggccaggttgtgtccttgaaagtctggctgatcgacgacattctggaaaagataaactcccacctgccatctcacataaggatcttgggcctgaaacgagtaaccgggggctttaattcaaaaaacagatgcgacgcccgaacctattgctacctgttgccaactttcgccttcgcccacaaagaccgtgacgtgcaagatgagacttaccggctctctgcagagaccctgcagcaggtaaatcgactgctagcctgttataagggtacccacaactttcataacttcaccagtcaaaagggacctcaggacccctcagcctgtagatacatccttgaaatgtattgcgaagagccattcgtccgagaaggcctcgagtttgctgtgatccgtgtcaaaggtcaatccttcatgatgcaccagatccgcaaaatggtgggcctggtcgtcgctatcgttaaaggttatgcaccagagtccgtgttggagcgaagctggggtacagagaaagtggatgttccgaaggcccctggactaggactcgtgctagaaagagttcacttcgaaaaatacaatcagcgattcggcaatgacggactgcacgaacccctggactgggcgcaggaggaggggaaggtggccgcttttaaagaggaacacatttatccgaccataatcgggactgaacgggatgaacggagcatggcgcagtggctaagtacactgcctattcataatttttctgctaccgccttgacggccggaggtaccggcgccaaggtgccatcccctctggaggggagcgaaggcgacggagatactgactag

SEQ ID NO: 202022 - DNA, 1200 bp, synthetic construct
  misc_feature 1..1200: note = Description of Artificial Sequence: Synthetic coding sequence
  source 1..1200: mol_type = other DNA
atggccggcaacgccgagcccccccccgccggcgccgcctgcccccaggatcggcggtcttgttccggccgggccggaggggacagggtctgggaggacggcgagcaccctgccaaaaaactgaagtcgggaggagacgaggagcggagagaaaaaccccctaaaaggaaaatagtgttattaatggcctattcaggaaaaggctatcatggaatgcaaaggaatgtgggttcttcccaatttaaaacaattgaggacgaccttgtgtctgcattggtccgcagtgggtgtattccggagaaccacggggaggatatgagaaagatgtcatttcagaggtgcgcacgcactgacaagggtgtgtccgcagcaggccaagtggtgagcctaaaggtctggctaatcgacgatatcctggagaagataaattcccacctcccaagtcacatcagaattctgggactgaaaagggtgactggaggattcaactctaagaacagatgtgatgctagaacctattgttatctcctccctacgttcgctttcgcccataaggatagagatgtgcaggacgagacatatcggctgtccgcagagacacttcagcaggtgaatcggttgttagcctgttacaaagggacacacaactttcacaacttcacatcccagaaagggccccaagacccctccgcctgtaggtatatcctggagatgtactgcgaagagcccttcgtcagggaaggattagagttcgctgtgatccgggtgaaaggacagagctttatgatgcatcagatcagaaagatggttggcttggtggtcgctattgtgaaagggtacgcccccgaatccgtgctggagaggtcttggggcaccgagaaagtggatgtgccaaaagctcctggcttggggctcgttctggagagagtgcacttcgaaaaatacaatcaacgcttcggcaatgatggcctccatgagccactggattgggcccaagaggaaggtaaagttgcagccttcaaggaggaacacatctaccccactatcataggcaccgagagggatgaacggagcatggcacagtggttgtctacgctccctatacataactttagcgctaccgctctgaccgcaggcggcactggcgccaaagtgccgagcccgcttgaaggttctgaaggggacggagacacagattag

SEQ ID NO: 202023 - DNA, 1200 bp, synthetic construct
  misc_feature 1..1200: note = Description of Artificial Sequence: Synthetic coding sequence
  source 1..1200: mol_type = other DNA
atggccggcaacgccgagcccccccccgccggcgccgcctgcccccaggacaggagaagctgcagtggacgcgctggaggggatcgcgtctgggaggatggagagcaccccgccaaaaagctcaaatctgggggtgatgaggaaagaagagagaaaccgccgaaacgcaagatcgtgttactaatggcttattccggaaaagggtaccatgggatgcagagaaatgtgggctccagccagttcaagacaattgaggatgaccttgtctcggcactggtacgctcaggttgcattcccgaaaaccacggagaggacatgcgcaagatgtccttccagagatgcgcaaggaccgacaaaggggtctcggccgccggccaggtcgtgtcattaaaggtatggctgattgacgatatactggagaaaatcaactctcacctgccatcccatataaggatcctcgggttaaaacgagtgaccggcggatttaatagtaaaaatagatgcgatgctaggacttactgctatctgctaccgaccttcgctttcgctcacaaagaccgggatgtgcaggatgaaacatatcggctgtccgccgaaaccctccagcaagtaaaccgcctcttggcctgctataaaggcacacataacttccataactttacatcccagaagggcccacaggatccaagcgcctgccgctacattctggaaatgtattgcgaagagccttttgtgagagaaggtctggagttcgccgtaataagggtgaagggtcagtcatttatgatgcatcagattaggaagatggttgggctggtggtggcaatagtcaagggttacgcccctgagagcgtgctggagcgtagctggggaaccgagaaagtggacgtgccaaaagctcctggactcggactggtgttggaaagagtccacttcgagaagtataaccaacggtttggcaatgatgggcttcacgaacctcttgactgggcccaggaagagggcaaagtggctgcattcaaggaggagcacatatatccgacaattattggcacagaaagggatgaaaggagcatggcacagtggttgagcactctgccaatacacaatttcagcgcgacagctcttacagcaggcggcacgggcgctaaggtcccctcgcccctcgagggcagcgagggggacggtgataccgactag

SEQ ID NO: 202024 - DNA, 465 bp, synthetic construct
  misc_feature 1..465: note = Description of Artificial Sequence: Synthetic coding sequence
  source 1..465: mol_type = other DNA
atggccggcaacgccgagcccccccccgccggcgccgcctgcccccaagataggcgatcatgttcaggcagggccggcggggacagagtgtgggaagacggggagcatccagccaaaaagttaaagtccggtggggacgaggagagacgggaaaagcccccaaagcgaaagatagtgctccttatggcctatagtggaaaaggctaccacggaatgcaaaggaacgtgggcagctcacagtttaagaccattgaggacgatctggttagtgccctcgtgaggtctggatgcataccagagaaccatggggaggatatgcgaaaaatgtctttccagagatgcgcccgaactgacaaaggcgtctctgctgctgggcaggtggtgtccctaaaagtctggctgatcgacgacattctcgaaaagattaacagccacttgcccagtcatatccgaatcctggggtag

SEQ ID NO: 202025 - DNA, 618 bp, synthetic construct
  misc_feature 1..618: note = Description of Artificial Sequence: Synthetic coding sequence
  source 1..618: mol_type = other DNA
atgagcaagggccgggccgaggccgccgccggcgccgccggcatcctcctacgctatcttcaggaacagaaccgaccatactcaagtcaggacgtcttcggcaacttgcagcgggaacacggattgggcaaagccgtcgttgtcaaaaccctcgaacagttagctcagcaaggtaagataaaggaaaagatgtacggtaaacaaaaaatctattttgccgatcaagatcagttcgacatggtctccgatgctgatctccaagtccttgacggaaaaattgtcgctctcactgccaaagtgcaatccctgcagcagagctgcagatacatggaagcagagatgcagaaggaaattcaggaactgaagaaagagtgcgccggctatagagagcgtcttaagaacattaaggccgcgaccaaccacgtgactcctgaggagaaggaacaagtgtaccgcgagcgccagaagtattgtaaggagtggcgcaagcgaaagaggatggccacagagctaagcgacgccatactcgagggctacccaaaatcaaagaaacagtttttcgaggaggtgggaattgagacggacgaagattacaacgtaactctgcctgacccatag

SEQ ID NO: 202026 - DNA, 654 bp, synthetic construct
  misc_feature 1..654: note = Description of Artificial Sequence: Synthetic coding sequence
  source 1..654: mol_type = other DNA
atgagcaagggccgggccgaggccgccgccggcgccgccggcatcctccttagatatctgcaggaacagaaccgaccctattcctcacaggatgtgttcgggaaccttcagcgggagcacggcctgggtaaggccgtggtcgtcaagaccttggagcaacttgcccagcagggtaaaataaaggagaaaatgtatggcaagcaaaagatttacttcgccgaccaggatcagttcgacatggtgagtgatgcagacctgcaagtgttggacggtaagatcgtggctctcaccgcaaaggttcagtcgctccaacaaagctgtcggtacatggaggctgaacttaaagagctttccagtgcacttaccacgccagaaatgcaaaaggagatccaggaactcaagaaagaatgtgcggggtacagggaaaggctcaagaatatcaaggctgctacgaaccatgtcaccccagaagaaaaggagcaagtttacagggagaggcagaaatactgcaaggagtggcggaagagaaaacgcatggctacggagctgagtgacgctatcctcgaaggttacccaaagtcaaagaaacagtttttcgaggaggtcggaatagagaccgatgaggattataacgttactctcccggatccatag

SEQ ID NO: 202027 - DNA, 465 bp, synthetic construct
  misc_feature 1..465: note = Description of Artificial Sequence: Synthetic coding sequence
  source 1..465: mol_type = other DNA
atgtacggcaagcagaagatctacttcgccgaccaggaccagttcgatatggtgtcagacgccgaccttcaagtccttgacggcaaaatcgtggctctgaccgccaaggtgcaaagtcttcagcaatcctgtcggtacatggaggcagagttgaaggaattgtcgagcgcgctcacaacacctgaaatgcaaaaagaaatccaagagctgaaaaaggagtgcgctggctacagggagcgccttaagaatattaaagccgccacaaaccatgtcactcctgaggagaaagaacaggtttaccgcgagaggcaaaagtactgtaaagaatggagaaagcggaaaaggatggccaccgaactgagtgacgcaattctggaggggtaccctaaatcaaaaaagcagttcttcgaggaagtaggaattgaaacggacgaagactacaacgtaacactgcctgacccatag

SEQ ID NO: 202028 - DNA, 915 bp, synthetic construct
  misc_feature 1..915: note = Description of Artificial Sequence: Synthetic coding sequence
  source 1..915: mol_type = other DNA
atgttcagcgtgctgagctacggccggctggtggcccgggccgtgctgggcggcttatcccagaccgacccacgagccggtggggggggcggaggcgattatggtcttgtgactgcagggtgtggctttggaaaggatttcaggaagggcctgctcaagaagggagcttgttatggcgatgacgcctgcttcgtggcccgccaccggtccgccgatgtgctgggcgtggctgacggggtcggagggtggagagactacggcgttgatccaagccaattctcaggaaccctaatgagaacctgtgagaggttggtaaaggagggcaggttcgtgccttctaaccccattggaatattaaccacttcttattgtgagttgctccagaacaaggtcccattgctgggcagctcaaccgcgtgcatcgttgtcctggaccgaacatcccacagactgcacaccgccaaccttggggacagcggttttctcgtggtgaggggaggagaagtggtgcaccgttctgatgagcagcagcattatttcaatacaccattccagctgagtatcgcccccccggaagcggaaggtgtggtgctgtccgacagccctgatgctgctgacagtacctcctttgacgtccagttgggcgacataatcctcactgccactgacggcctgttcgacaacatgccagattatatgattctgcaagaacttaaaaagctcaaaaattctaattacgagtctatccaacaaaccgccagatccattgccgaacaggcccatgaactggcatacgatcccaactatatgtctccctttgcccaattcgcctgtgataacgggctcaatgtgcggggtggcaaacctgatgacattaccgtacttctgagcatcgttgcagaatatacagactag

SEQ ID NO: 202029 - DNA, 1746 bp, synthetic construct
  misc_feature 1..1746: note = Description of Artificial Sequence: Synthetic coding sequence
  source 1..1746: mol_type = other DNA
atggccgtgcggcaggccctgggccggggcctgcagctgggccgggctctcctactcaggtttactgggaaaccgggccgtgcctatgggctcggcaggccaggcccggccgctgggtgcgtgcgcggagaacgcccagggtgggccgcaggtccaggagctgagcctaggagggtgggcttgggcctcccaaatcggctccgctttttccgacagtctgtcgccgggctggccgctcggctgcagagacaattcgtcgttcgcgcttggggttgtgctggcccatgtggccgggcagttttcctagccttcggcctgggactgggtctaatcgaggagaaacaagcagagtcccgaagggccgtgtcagcgtgccaggaaattcaggccatttttacacagaaatctaaacccggtccggaccctcttgatacccgccgcctgcaagggttcagactggaagagtacttaattggacagagtatcggtaaagggtgttccgcagctgtttacgaggctacaatgcctactctgcctcaaaatctggaagtgactaagtcgactggtctgcttccaggtcgtggcccaggaaccagtgcccctggcgaagggcaagaacgcgctccaggcgctcctgccttccccttggcgatcaagatgatgtggaatatttctgcgggttcttcatcagaggccattctcaataccatgtctcaggaactcgtgcctgcgtcaagggtggccttggccggcgagtacggtgcggttacttacaggaagtcaaagagaggacctaaacagcttgccccacacccgaatataatacgggtgttaagggcatttactagttctgtgccactccttccaggggccctggtggactacccagatgtgctgccatcgcgcctccaccccgaaggattagggcacgggaggacactcttcctggtgatgaagaactacccatgcacactccggcagtatctgtgcgtgaacacgcccagtccacggttggcggctatgatgctcttacaactcctggaaggcgtagaccatttggtacagcagggcatagcacacagagatctgaagtccgacaacattctggttgaactggacccagatgggtgcccatggctagtcattgccgatttcgggtgctgcctagccgatgagtctataggcctccagctacctttcagtagttggtatgtcgacaggggagggaacggttgcctaatggctccagaagtcagcacagctcgtccaggcccccgggccgtcattgactatagcaaagctgatgcatgggcagtgggcgctatcgcctacgagatcttcggtctggtgaatcccttctacggccaaggcaaagctcacctagagagcaggtcctatcaggaagctcagctgccagccctgcctgagtcagttcctccagacgtgaggcagctggttcgggcccttcttcaacgggaggcctctaagaggcccagtgctagagtggctgcaaacgttttgcatctgtccctatggggtgagcacatccttgcccttaaaaacctgaaattggataagatggtgggttggctacttcagcagtccgcggctacactccttgccaaccgattgactgagaaatgctgtgtagaaacaaaaatgaaaatgctgttcctggccaatctcgaatgtgagacattgtgccaggcagctctactactgtgcagctggcgcgcagcactgtag

SEQ ID NO: 202030 - DNA, 393 bp, synthetic construct
  misc_feature 1..393: note = Description of Artificial Sequence: Synthetic coding sequence
  source 1..393: mol_type = other DNA
atggccgccgtgctgggcgccctgggcgccacccggcggctgctggctgcccttagaggacaaagtctggggttggccgcaatgagcagcggcacccatcgcctgacggccgaggaaaggaatcaagcaattctggatctcaaggctgcaggatggtctgagctcagtgaaagggatgctatttataaggaattcagttttcataacttcaatcaggcctttggatttatgagtcgggtggcccttcaggcggagaagatgaaccaccacccagaatggtttaatgtgtacaataaggtccagattaccctaacgtcccacgattgtggagagctaacaaaaaaggatgtgaaactggccaagttcatagaaaaagcagccgcctccgtctag

SEQ ID NO: 202031 - DNA, 393 bp, synthetic construct
  misc_feature 1..393: note = Description of Artificial Sequence: Synthetic coding sequence
  source 1..393: mol_type = other DNA
atggccgccgtgctgggcgccctgggcgccacccggcggctgctggcggccctgaggggtcagtctttaggcctggccgctatgagcagtggcacgcacagactgacagctgaagagcggaatcaagcgatcctcgatctaaaggccgcgggctggagcgagctctctgaaagagatgctatttataaagaatttagcttccacaattttaaccaggcttttggttttatgtcacgggtggcactccaggccgagaagatgaaccatcaccccgagtggttcaatgtctataacaaagtacaaattacgctgacatcccatgactgcggagagctgactaagaaagatgtgaaactcgctaagtttatcgagaaggcagccgcaagcgtctag

SEQ ID NO: 202032 - DNA, 1041 bp, synthetic construct
  misc_feature 1..1041: note = Description of Artificial Sequence: Synthetic coding sequence
  source 1..1041: mol_type = other DNA
atggccctgctgaaggtgaagttcgaccagaagaagcgggtgaagctggcccagggcctgtggcttatgaactggttctcggtccttgccgggattatcattttttcgctcggtctgttcctgaagatcgagttgcgcaaaagatcagacgtcatgaataacagtgagtcacacttcgtcccaaactccctgattggcatgggtgtcctgagttgcgtatttaattcgctggctgggaaaatctgctacgatgctctcgatccagctaagtacgcaagatggaaaccctggctcaagccttacttggcaatctgtgtgctgttcaatattatcctcttcctggtggccctgtgttgctttttgctgagaggaagccttgagaacaccttgggccagggcctgaagaacggcatgaaatattacagagataccgacacaccagggcgctgttttatgaagaaaaccatagatatgctgcagatcgaattcaagtgctgtggtaataacggttttcgggactggttcgagatacaatggatctcgaaccggtacttagacttttcctctaaagaggtaaaagatcggattaaaagtaatgttgacggacggtacctcgttgacggagtaccattttcttgctgcaatccaagcagcccgagaccgtgtattcaatatcagataactaacaatagtgctcattatagttacgaccaccagactgaagagcttaatctgtgggtgcgcggttgtagagcagcgcttttatcctattactcctctctgatgaacagtatgggcgtcgtaaccttattgatttggctttttgaggtgactataactatcggtctacgctatttgcaaacgtctctggacggcgtgtccaatcccgaggagagtgagtctgaaagtcagggttggctcttggagcggtcagtgccagagacatggaaagcattcctggagtccgtaaagaagttaggaaagggcaatcaagtggaggcggaaggcgcagacgctggtcaagcccctgaggcaggatag

SEQ ID NO: 202033 - DNA, 1191 bp, synthetic construct
  misc_feature 1..1191: note = Description of Artificial Sequence: Synthetic coding sequence
  source 1..1191: mol_type = other DNA
atgcccctgttcgagccccgggtgttcaccgccggcagcgaggagcgagtgacctgcctccccccaaaaggacttcccgaaccctccgtatggtgggagcatgcaggggtacgccttcctacacatggacgcgtctaccaaaaaggtcacgaattagtactcgcgaatatcgccgaatcagatgcaggagtctatacttgccacgcagccaatctggccggacagcggaggcaggacgtcaacatcacagttgctacggtaccttcttggctcaagaaaccccaagattcacagcttgaggaaggcaagcctggatatctggattgtctgactcaggccacccctaagcctacagtggtgtggtaccgtaaccagatgctgatctcagaggactcaagatttgaagtgtttttggctaaagcccaaggactggaagaaggtgtggctgagaccctcgtactggtcaagtccctgcagagcaaggacgagcagcagcagttggacttcaggagagagctggaaatgttcggaaaattgaatcacgctaacgttgtccgcctcctcggactatgtagagaagctgagccacactacatggtgcttgaatatgttgatctcggagatcttaagcagtttctgagaatctcaaagtccaaagatgagaagctaaagtcacagcctttaagcaccaagcagaaggttgctctgtgtacgcaggtcgctctgggaatggagcacctctcaaataatcgctttgttcataaggacctagctgcaaggaattgcctggtttctgctcaaagacaggtgaaagtgagtgctctggggttgtccaaggacgtctataactctgagtactaccacttccgccaagcctgggttccccttcgatggatgtcccccgaagcaatcttggagggggacttttcgacaaagtccgacgtgtgggctttcggggtgttaatgtgggaggtattcactcacggagaaatgcctcacggtggccaggcggacgacgaggtgttggccgatctgcaggcagggaaggccaggctgccccaaccagagggctgcccatccaaattgtaccgcctcatgcagcgatgctgggccctcagccctaaggatcgcccaagctttagcgagattgcctcagcactgggggacagtacagtggactctaagccatag

SEQ ID NO: 202034 - DNA, 3093 bp, synthetic construct
  misc_feature 1..3093: note = Description of Artificial Sequence: Synthetic coding sequence
  source 1..3093: mol_type = other DNA
atgggcgccgcccggggcagccccgcccggccccggcggctgcccctcctgagtgttctgctgctacccctgctggggggtactcagaccgcgatcgtgttcattaagcaaccatcgagccaggatgcgctgcagggtcggagagcccttctgaggtgcgaggtggaagcccctgggcctgtccatgtctactggttactggatggcgcacctgttcaggataccgagagacggtttgcccaagggtcatctctcagctttgccgcagtggataggctccaggatagcggcaccttccagtgtgtagcaagagacgatgtcaccggcgaggaggcacggagtgccaatgccagtttcaacattaaatggattgaggctggccccgtggtgcttaagcatcctgcttcggaggctgagatccagcctcagacccaggtcaccttgagatgccacattgatggccacccaaggcccacgtatcagtggtttcgagacggcactccactgtctgacggacagagtaaccacactgtgagcagcaaggaaagaaacttgactcttaggcctgctggacctgagcatagtggcctttactcctgctgcgcacatagcgcctttggccaagcctgctcatcccaaaattttacgctctctattgccgatgagtcttttgcccgggtggtcctggcaccgcaggacgtggtcgttgcacgatacgaagaggcaatgtttcattgccagtttagcgcgcagccaccaccctctttgcagtggctattcgaagacgagacaccgatcacaaaccgctcccgcccccctcacctccgccgtgccaccgtctttgctaatggcagcctgctattgactcaggtgcgcccccgaaatgccggtatatatagatgtattggacagggacagagaggaccccccattatcctagaagctacgctgcacttggctgagattgaggatatgcccttgttcgaaccaagggtttttacagccggctcggaagaaagggttacctgtcttccgccaaagggactcccagaaccatcagtgtggtgggaacacgccggcgtgagactgccaacgcatggtagggtataccagaaggggcacgagctggtgttggctaatatcgcggagagcgatgctggggtgtacacgtgtcacgctgcaaatctagctggccaacgcaggcaagacgtgaatataactgtcgctacagtgcccagctggctcaagaagccgcaggacagccagttggaagaaggcaagcctggctaccttgattgtctcacgcaggccactcccaagcccactgtcgtctggtatagaaatcagatgttaatttctgaggattctcgctttgaagtgttcaaaaacggcactctgcggatcaattccgtcgaagtctacgatggcacttggtacagatgcatgtcaagcacccctgcaggcagcatcgaggcccaggcaagggtgcaggtgcttgacggcagtagcctgcccgagtgggtgaccgacaatgctgggacattgcacttcgcgcgcgtaaccagagacgacgcaggaaactacacttgcatcgcaagcaatggacctcaggggcagatccgcgcgcacgtacaactcacagtcgccgtcttcattactttcaaggtggagccggagaggaccactgtgtatcagggtcataccgccctgctgcagtgcgaagcgcagggcgacccaaaacctctgatccagtggaaaggaaaagaccggatactggatcccacgaagttaggccctcgcatgcatattttccagaatgggtcgctggtcatccatgacgtggcaccggaggactctggacgctatacttgtattgctggaaattcatgcaacatcaaacatacagaagcacccctctacgtcgtagacaagccggtccctgaagaaagtgagggcccgggctctccccccccttacaaaatgatacagaccatcggcttgagcgtgggagctgcagtcgcttacattatcgcagtgctcggcctgatgttttactgcaagaagcgttgcaaagccaagaggctgcaaaagcaacctgagggagaggagcccgaaatggagtgcctgaacggaggcccccttcagaacggtcaaccttcggctgaaatccaggaagaggtagctctgacatctctcggatcaggaccggctgctacaaacaagagacattccaccagcgataagatgcactttcccaggtcctctcttcagcccattaccaccctcggaaagtcagaatttggagaggtcttcctcgctaaagcccagggcctggaggagggtgtggccgagacacttgtcctagtgaagtcgttgcagtccaaggatgaacaacagcaacttgacttccgcagggaactagagatgtttggcaagcttaatcacgccaacgtggtcagacttttaggactctgcagagaggccgagcctcactatatggtgcttgagtacgtggacttgggagatctgaagcagttcctgaggatcagtaaatctaaggacgagaagttgaagagtcaacctctcagcactaaacagaaagtagcgctgtgtactcaggttgctcttggaatggaacatctttcaaacaacaggttcgtgcacaaggatctggcggccaggaattgtttagtgtccgcgcaacgccaggttaaagtctctgcgttaggattgagtaaggacgtctacaacagcgaatattaccattttcggcaggcttgggttcctctgcgttggatgtccccggaggccatcctggagggcgactttagcacaaagtcagacgtctgggcttttggagtcctaatgtgggaggtgttcactcacggggagatgccccacgggggtcaagctgacgatgaggttctcgctgacctgcaggccgggaaagctagactgccccaaccagaaggatgcccgtcgaagctctatagactgatgcagcgctgctgggcgctttctccaaaagaccggccttctttcagcgagattgcctcagctctgggtgatagtactgtggactcaaaaccatag

SEQ ID NO: 202035 - DNA, 2823 bp, synthetic construct
  misc_feature 1..2823: note = Description of Artificial Sequence: Synthetic coding sequence
  source 1..2823: mol_type = other DNA
atgggcgccgcccggggcagccccgcccggccccggcggctgcccctgctgagcgttttactcttaccattactgggcggaactcaaaccgccatcgtctttatcaagcagccaagttcccaagatgcactacagggacgacgggcattgctccgctgcgaagtggaggcccccgggcctgttcatgtctattggttactggatggggcacctgtgcaagataccgagcggcgatttgcccagggctcaagcctcagctttgctgccgtcgatcggcttcaggattcagggacctttcagtgcgtcgcaagagacgacgtgacaggcgaagaagccagatccgctaacgccagttttaatattaaatggatagaagccggtcccgtcgttctcaagcaccccgcttctgaagccgagattcaacctcagacccaggtaacgcttcgatgccacatcgatggacaccctaggcctacataccagtggttccgagacggtacacctcttagcgatgggcagagcaatcacacagtgtccagcaaagaaagaaacctgacactgcgcccagcaggtccagaacactcagggctttacagttgctgcgcgcactccgctttcggacaggcttgttcaagccagaatttcaccctttctattgcagacgagtctttcgcccgtgtcgtgctggctccacaagacgtggtggtggcacgctacgaagaggcaatgttccattgtcagttctcggctcagcccccacctagcctgcagtggctctttgaggatgagacccctattaccaataggtcacgtccccctcatttaaggagggccactgtgttcgctaatggatcgctcttattaacacaggtgcggccccggaatgctggcatttaccggtgcattgggcaggggcaacgagggccccctatcattcttgaagccaccctgcacctggccgagatagaggatatgccgctctttgagccacgtgtatttacagccggcagcgaagaacgggttacgtgtcttcctcctaaaggccttcccgagccctccgtttggtgggagcacgctggcgtgcgactgcctacacacggcagagtctaccagaaagggcacgagcttgtccttgccaacattgcggaatctgacgccggggtatatacatgccatgcggcaaaccttgcaggtcagcgcagacaggacgtcaatatcacggtcgccaatgggagcagtctacccgagtgggtgaccgacaatgcgggcacacttcattttgctagagtcacgcgggacgatgccggaaactatacgtgcatcgcttctaacggcccccaagggcagatccgcgcacatgtgcaactgacagtagccgtatttataacgttcaaggtcgaaccagagaggactacagtataccaaggacatacagctttacttcaatgcgaggcgcagggtgatcctaagccgttaattcagtggaagggaaaagaccggatccttgatccaacgaaactggggccacgcatgcacatctttcaaaacggctcccttgtgatccatgatgtggcccccgaggacagcggacgctacacatgtattgcagggaatagttgcaacatcaaacatactgaggcacccctctatgtggtcgacaagccagtgcccgaagagagcgagggccctggctctccgcccccctacaaaatgatacaaaccatcggcttatcagtcggagcggctgttgcatacatcattgcagtgttaggcttgatgttctattgtaaaaagcgctgtaaggctaaaaggctccaaaagcaacccgagggcgaggagcccgagatggagtgtctcaacggggggcccttgcagaatggccagccgtcagcagagattcaggaggaggtggccctgacaagcctggggtcggggccagccgctactaacaaaagacattcaacttcagataagatgcacttccccagatcttcgcttcagcctattaccacactgggtaaaagtgagtttggggaagtatttcttgctaaggcgcagggactggaagagggcgtagccgagaccctcgtgctagtgaaatcgctgcagtctaaggacgaacaacagcagctcgacttccgacgcgaacttgaaatgttcgggaaactcaatcacgccaatgtcgtccggctgttgggcctgtgccgagaggcagagccacactatatggtgctggaatatgtcgatctgggcgacctgaagcagtttctgcgcattagtaagtccaaagacgagaagctgaagtctcagccactttccaccaaacagaaggtagctctttgtacccaggtggccttaggcatggagcacctgagcaataatcgattcgttcataaagacctggctgcaagaaactgcctcgtcagcgcgcagcgccaggtgaaggttagcgcacttggcctcagcaaggacgtgtacaatagcgagtattaccacttccggcaggcctgggtgcccctcagatggatgagtcccgaagcgatattggagggggatttttctaccaagagcgatgtgtgggcattcggtgtgttgatgtgggaggtgttcacccacggtgaaatgccgcacggcgggcaggccgacgacgaggtcctcgctgatctgcaagccggtaaggcaaggctgccacaacctgagggatgcccgtctaagctgtacagacttatgcaacgctgttgggctctgtcacctaaggatcggccctccttttctgaaatcgcatctgccctgggagacagtaccgttgatagtaaaccctag

SEQ ID NO: 202036 - DNA, 3045 bp, synthetic construct
  misc_feature 1..3045: note = Description of Artificial Sequence: Synthetic coding sequence
  source 1..3045: mol_type = other DNA
atgggcgccgcccggggcagccccgcccggccccggcggctgcccctgctctctgttttgctgctgccactgctaggcggcactcaaacagccattgtgttcattaagcagccctcttctcaggacgctctgcagggaaggagagccctgctgagatgtgaggtggaggcaccaggtccagttcatgtatattggctcctcgatggcgcccctgttcaggataccgagcgaagattcgctcaggggtcatcccttagctttgccgctgtggatcgcctccaggatagtggtaccttccagtgcgtcgcccgagacgatgtgactggcgaggaagccaggtcagcgaacgcgtcatttaatatcaagtggatagaggctggccccgtcgtactaaagcatcccgccagtgaagcggagattcaaccccaaacgcaggtgacactaaggtgtcatatcgacggccaccctcgcccaacctaccagtggttcagagacggcacccctctttctgacgggcaatcgaatcacacggtctcttccaaagagagaaacctgactctgcggcccgccgggccggagcactccggcctatacagctgctgcgctcacagtgcgtttgggcaggcctgttcgagccaaaatttcactttaagtattgccgatgagagcttcgctagagtggtgttagccccacaggacgtcgttgtcgcccgatatgaggaagcaatgttccactgtcaattctcagcacaaccccccccctccctgcagtggcttttcgaagacgaaacccccatcacaaaccgtagtagaccccctcacctgaggcgagccaccgtgtttgccaacggcagcctgctcttgacccaagtgagacccaggaatgcagggatatacagatgcattggccagggccaaagaggtcctcctataattttagaagccacactgcacttggccgagattgaagacatgccgctgtttgaacccagagtatttacggccggtagtgaagaacgtgttacgtgcttgcctcccaaaggcttgcctgagccctccgtgtggtgggaacatgcaggcgtaaggcttcccacccacggcagagtgtatcaaaaggggcatgagctggtgctcgccaacatcgccgagtcagacgccggcgtctatacctgtcacgctgccaatttggccggtcagaggcgtcaggatgtgaatattactgtagctacggttccgtcatggctgaagaagccccaagattcacagctcgaggaaggtaagcccggatatttggattgtttgacacaggccacccctaagcccactgtggtctggtataggaatcagatgttgatttccgaagacagtcggtttgaagtgtttaagaatggaactctccgaatcaactctgtggaagtctatgatggcacctggtatagatgcatgagcagtacccccgctggctcgatcgaagctcaggcaagagtacaagtccttgaaaaattgaagttcaccccaccccctcagcctcagcaatgtatggaatttgacaaagaggccaccgtgccctgttcagcgacaggacgggagaagcctaccatcaaatgggaacgggctgacggtagttccctccctgagtgggtgactgacaacgctggcactcttcatttcgcgcgggtcacaagggatgacgccgggaattacacctgtatcgccagcaatgggcctcaggggcagatccgagcccatgtgcagctgacagttgcagtttttattacgtttaaagtggagccagaacggacaacagtctatcagggacacacggctctgcttcaatgtgaggcgcagggagatcctaagccactgatccagtggaaggacaagccggtccccgaggaatccgagggcccgggctctcctcccccctataaaatgatccagactatcgggctgagcgtgggtgcggccgtagcttacatcattgccgtgctcggtttaatgttctactgcaaaaagaggtgtaaagccaagcggctccagaaacagcctgagggcgaagagcctgagatggagtgtctgaacggcgggcctctgcagaacggacagccttctgcagaaatacaagaagaggtagctctcacaagcctgggatccgggcctgccgcgacaaataagcgacattcgacaagcgacaagatgcactttccgcgttccagcttgcaaccgattaccaccctgggaaaatctgaatttggcgaggtttttctggccaaggcccaagggctggaagaaggggtcgctgaaacgctggttttggtgaagtctctgcagagcaaggatgaacaacaacagttggatttcaggagggagctggaaatgttcggtaagctgaaccacgctaatgtggttaggttactcgggttatgtcgagaagcagaacctcactatatggttttggagtacgttgatcttggggatctcaagcaattcttgcgaatctctaagtctaaagacgaaaagctaaagagccagccattgtctaccaagcagaaagtcgctttgtgcactcaggttgccttggggatggagcatctgtccaacaatcggtttgtccataaagacctggccgccaggaactgtctggtgtcagctcagagacaggtgaaagtttctgctttaggtctgtctaaggatgtatacaactctgagtattaccacttcagacaggcctgggtgccacttaggtggatgtctcccgaagccattctggaaggagacttcagtactaagtccgatgtgtgggcattcggagtactgatgtgggaggttttcacccacggcgagatgcctcatggcggccaggccgacgacgaggtactggccgacttgcaggccggaaaagcaaggctcccgcaacctgagggctgtccttcgaaactgtaccgtctgatgcagcgctgttgggctctctcacccaaagatcgtccctctttctcggagatagcctctgcactgggagactctacagtggatagtaagccatag

SEQ ID NO: 202037 - DNA, 1212 bp, synthetic construct
  misc_feature 1..1212: note = Description of Artificial Sequence: Synthetic coding sequence
  source 1..1212: mol_type = other DNA
atgggcagcttcctgagcggcgagaagcggcccagcgcccccaccgtgggctctgccatggagaaaaaagaattccccacccctccagggcgggttggccccggaacgcaaactgcaatcgtatttattaagcagcccagttcacaggatgcactgcagggcagacgcgccctgcttagatgcgaagtggaggcccctggcccagtccacgtgtactggctccttgacggggcccctgttcaggataccgaacgtagatttgcccagggctctagcctttcctttgccgcagtggaccgcctgcaggactccggcaccttccaatgcgtcgcccgggacgatgtgaccggcgaggaggctcggtccgcgaacgccagcttcaacattaagtggattgaggcaggccccgtggtgcttaagcacccagccagcgaagcggaaatccagcctcagacgcaggtgaccttgaggtgccacatagacggccatccccggccaacctatcagtggtttcgggacggcaccccgctgtccgacggccagtccaatcacaccgttagcagtaaagaaaggaacttgacgctccgaccagccggacctgaacattccggactttattcgtgttgcgcacactcggcctttggccaggcttgctcttctcagaactttaccttgtctatcgctgatgagtccttcgcgcgtgtggtactggcccctcaggacgtggttgttgcacggtatgaggaagccatgtttcattgccaattctcagcccagcctcctccatctctgcaatggttgtttgaggacgagacccccattaccaaccgctctcgcccacctcacctccggagagccactgtgttcgcgaacgggagcctgcttctgacccaggtccggcctcgcaatgctggaatttacagatgtataggccaggggcagcgcggccctcctatcatcctggaggctactctccacctggctgaaattgaagacatgcccctcttcgagccccgggtgttcacagctggatcggaggaaagggttacctgtctcccccccatggccggcagcacacgaagagccaccagctggtgctggcccatcctgctgaaagttatgcttgtatctacccctgcaactaggccaacatggcttgtttcaggagaccggatgtccactagcctatggccactgtgcccacccggatag

SEQ ID NO: 202038 - DNA, 810 bp, synthetic construct
  misc_feature 1..810: note = Description of Artificial Sequence: Synthetic coding sequence
  source 1..810: mol_type = other DNA
ttcagcgcccagcccccccccagcctgcagtggctgttcgaggacgaaacgcctatcacaaatcggagcaggcccccacacctcagacgtgccaccgtctttgcaaacggatcactgctactgacacaggtcaggccaaggaatgcagggatttatcgctgtatcggccagggtcaacgaggacctccgattattctagaggcaactctgcacctggcagagatcgaagatatgcctctgttcgaaccaagagtgttcacagctggctctgaagaacgcgtaacctgcctgcctcccaaaggtctccctgagcctagtgtttggtgggaacacgctggtgtgcggctccccacccatggacgagtgtaccagaaaggccatgaattagttctggctaatatagccgagagcgacgcgggggtatatacatgccatgccgctaatcttgcgggacagcgccgccaagatgtgaacattacagtggccagcgaacacctgtgccctgagggccagggggaagtcgagggaaacaccggccttggcgtaatggatcgcggcttccctgccgtccccagctggcttaagaagccacaggattcacagctagaagagggcaagccaggctacctggactgtctcacccaggccaccccaaaacccaccgtggtctggtatagaaatcagatgttgatatcagaagattctagatttgaagtgttcaaaaatggaaccctcagaattaattccgtggaggtttacgatggcacatggtaccgctgcatgtcgtctacacccgcgggcagcatttag

SEQ ID NO: 202039 - DNA, 444 bp, synthetic construct
  misc_feature 1..444: note = Description of Artificial Sequence: Synthetic coding sequence
  source 1..444: mol_type = other DNA
atgggcgccaccggcctgggcttcctgctgagctggcggcaggacaatttgaacggcaccgattgtcaggggtgcaatatcttgtacttctccgaaaccaccggcagtatgtgctctgagctctctctgaaccggggactggaagctcgcagaaagaaggatctgaaagatagctttttatggcgttacgggaaagtgggctgtatctcgctgccacttagggaaatgacagcatggatcaatcctcctcaaatttccgaaatcttccaggggtaccatcaacgagtacacggcgcggacgctctctctttgcagaccaactccctacgctcgagattgtccagccagtgcttaggccagtcgttcttacttagaactcttgaacggggcaggggcttccgtgcactcggcgatatttgtggtcacgtgcacgaggaagattag

SEQ ID NO: 202040 - DNA, 216 bp, synthetic construct
  misc_feature 1..216: note = Description of Artificial Sequence: Synthetic coding sequence
  source 1..216: mol_type = other DNA
atgggcgccaccggcctgggcttcctgctgagctggcggcaggacaatttaaatgggactgattgccagggctgcaacatcctgtatttctctgaaacaaccgggtcaatgtgctcagagttgagtttaaatcgtggacttgaggcaagaagaaagaaggacttgaaggactcctttctctggagggacggagtgtccccttgtctgccgtgctag

SEQ ID NO: 202041 - DNA, 444 bp, synthetic construct
  misc_feature 1..444: note = Description of Artificial Sequence: Synthetic coding sequence
  source 1..444: mol_type = other DNA
atgggcgccaccggcctgggcttcctgctgagctggcggcaggacaaccttaacggcacagactgtcagggttgcaatatcctgtacttttcagagacgactggcagcatgtgttccgagctgtctctcaatcgaggtttagaagctagaagaaagaaggacctcaaggattcatttttgtggagatatgggaaagtcggctgtatctcccttcctctgcgcgagatgaccgcatggattaatccgcctcaaatatctgagatttttcaggggtatcaccagcgggtccacggcgcagacgcactgtcccttcaaacaaatagtttgagatctaggcttagctcccagtgcttgggccagtcattcctgttaagaactcttgaaagaggacgcggattccgtgccctcggcgatatttgcggtcacgttcacgaggaggattag

SEQ ID NO: 202042 - DNA, 216 bp, synthetic construct
  misc_feature 1..216: note = Description of Artificial Sequence: Synthetic coding sequence
  source 1..216: mol_type = other DNA
atgggcgccaccggcctgggcttcctgctgagctggcggcaggacaacctaaacggaacagattgtcagggttgcaatatcctttacttctccgaaactacgggctctatgtgcagcgagctatcgctgaaccgtggactagaagcgaggcgcaaaaaagatttaaaagatagcttcctgtggagagacggggtgtcgccatgcttgccgtgttag

SEQ ID NO: 202043 - DNA, 3561 bp, synthetic construct
  misc_feature 1..3561: note = Description of Artificial Sequence: Synthetic coding sequence
  source 1..3561: mol_type = other DNA
atgagcgtggcctgcgtgctgaagcggaaggccgtgctgtggcaggactcgtttagccctcacctgaagcaccaccctcaggaaccggctaaccctaacatgcctgtcgtgctgactagtggtactggctcccaggcccagcctcaacccgcagctaaccaggcgctggcagccggaacccatagcagccccgtgcctggttctatcggagtggccggaaggtcccaggacgatgcaatggtggactactttttccagcgacaacacggcgaacaactcggcggcggcggcagcggcggaggcggatacaataattccaagcaccgatggccaaccggggacaacatacatgccgagcaccaagttcggtctatggacgagctgaaccacgactttcaagctctcgccctggagggaagggctatgggcgagcaactgttgccggggaagaagttttgggaaacagacgagtcaagtaaagatggcccaaaaggtattttcctcggagatcagtggcgggactctgcatggggcacatcagatcattcagtcagccaacccataatggtacaaaggcgtccagggcagtcatttcacgtgaacagtgaggtcaattctgtcttatccccacggagcgagagtggtggtctaggagtgagtatggtggagtatgtactttcaagcagtcctggagactcctgcttgcgaaaggggggattcggcccgagagatgccgactccgacgagaacgataaaggtgagaaaaagaataaggggacatttgatggtgacaagttaggagacctcaaagaggagggtgatgtgatggataagacaaatgggctgcctgtacagaacggaattgacgcagacgtcaaggatttttccagaacccctggaaattgccagaacagtgctaacgaggtcgatctcctcggccccaaccaaaatgggtctgaaggcttggctcagttgacaagcactaatggcgcaaaaccagtagaggacttctcaaatatggagtctcagtccgtgccgctggatcctatggaacatgttgggatggagccactccagtttgattatagtgggactcaggtcccggttgatagcgccgccgccactgtgggccttttcgactacaattcgcagcagcaactcttccagcgtccaaacgcactggcagtgcagcaattaacggcagcacagcagcagcagtatgcgctggctgcagcgcaccaaccccacattggtctggctcctgccgcattcgtaccaaacccctatatcatcagtgccgctcccccaggcaccgatccctataccgctgggctggctgccgccgccaccctgggtccagccgtagtgccacaccagtactacggcgttacaccttggggcgtgtaccccgctagcctgttccaacagcaggccgcggcagccgccgcagcaaccaacagcgcaaatcagcagactacccctcaggcacaacaaggtcagcaacaagtcctgcgtgggggtgccagtcagagacccctgactccgaatcagaaccagcagggtcagcagactgaccccctggtagctgcggccgctgtcaattcggccctggcattcgggcaggggttggctgcaggaatgccaggatatcccgttttggctcccgctgcctactacgaccagaccggcgcactggtcgtgaacgccggagctcgcaacggactcggcgcacctgtgagactcgtcgcgcccgctccggttatcatctctagttctgctgctcaggccgccgtggcagcagctgcggcctccgccaatggcgccgcaggtgggctggccgggactaccaacgggcccttcagaccccttggaacccaacaaccccagccacaaccacagcaacagccgaacaataaccttgcgtcgagttctttttatgggaataacagtctgaacagcaattcacagagctcttccctgttcagccagggatctgcccagcctgccaacacttccctcggcttcggatcctcgtccagcctaggtgctaccctaggctctgctctcgggggctttggtacagctgtggctaattccaataccggatccggaagtcgtcgcgacagcctgacgggatccagcgacctgtacaagcgcacaagttcctccctgacaccaattggccactctttctataatggcctgagcttttcctcgagccccgggcccgttggaatgcccttgccatcccagggccctggacattctcagacacctccgcctagcctgtcctcgcatgggtctagctctagcctgaacttaggagggctgacaaatgggagtggacgctacatctccgccgccccgggagccgaggctaagtacaggtctgcctctagtgcaagctctttgtttagcccctccagcaccctgttcagctcgagcagactgcggtatggaatgagcgatgtaatgcccagtggtcgatccaggctcttagaggattttaggaataatcgttatcctaacctacaattgcgtgaaatcgcaggccacatcatggagttctcacaggaccagcacggcagcaggttcatacagctcaagctggagcgcgccacgcccgccgaacgccagctggtgtttaacgaaattctgcaggcagcctaccagctgatggtagacgtatttggaaattatgttatccagaaattctttgaattcggaagtctggaacagaagttagctctggcggaaaggatccgtggccacgttctatcgcttgctttgcagatgtatggctgcagggtcatccaaaaagcgctggagttcatccccagtgaccaacagaacgaaatggtcagggagctggacggtcatgtgctgaaatgtgttaaagaccagaatggcaaccatgttgttcagaagtgcatagaatgtgtgcagcctcagtctctgcagtttatcatagatgcattcaaaggacaggtgtttgcactgtcaactcacccctacggttgcagggtaatacagcgaatcctggaacactgccttcctgaccaaaccctgcccatcctcgaagaactgcaccaacacacagagcagctcgtccaagaccaatatggcaattacgtgattcagcacgtcttggagcacggccgcccagaggacaaatcgaagattgtggcagaaatacgcgggaatgtgctggtattatcccagcacaagttcgctagtaatgtggtggagaagtgcgtgacacatgcttcacgtacagagagagctgtcctgatcgatgaggtctgtacaatgaatgatgggccccattccgccctttacactatgatgaaggatcaatatgcgaactacgttgtacagaagatgatcgacgttgccgagcccggacagaggaagatcgtcatgcataagatccgcccacatattgccaccctgagaaaatatacctacgggaagcatatcctggcaaagctggaaaagtattatatgaaaaacggagtggacttgggaccaatctgcgggccacccaatgggattatctag

SEQ ID NO: 202044 - DNA, 2781 bp, synthetic construct
  misc_feature 1..2781: note = Description of Artificial Sequence: Synthetic coding sequence
  source 1..2781: mol_type = other DNA
atgagcgtggcctgcgtgctgaagcggaaggccgtgctgtggcaggatagtttcagtcctcatttgaaacaccatccccaggaaccagcaaacccaaacatgccagtggtcctgaccagcggcacggggtcacaagcccagccacaacctgctgctaatcaggcccttgctgcaggtacccacagcagccctgtcccgggaagcattggtgtggccggtaggtcacaagatgatgctatggtggactatttcttccagaggcaacatggagaacagctcggcggtggaggaagtggagggggaggctacaataattctaagcacagatggcctactacggtgggtctgttcgattacaactcacagcagcagctctttcagaggccaaacgctttggcagtgcagcaattgactgcagctcagcagcaacaatatgctcttgccgccgcccaccagccacatatcggcttggctcccgctgcgtttgtacccaacccttacatcatctccgccgcaccccccggcaccgacccttataccgctggactggccgccgctgctaccctcgggcctgccgtagttcctcaccagtattacggtgtcaccccatggggagtctatcccgcctcactgtttcagcagcaagccgccgccgctgcagctgccaccaatagtgccaaccagcagaccacaccacaggctcaacaaggccagcagcaggtgctgagaggaggcgccagccagcggccattgacgcccaatcagaaccaacaaggacagcagactgatccgctggtggctgccgcggccgtaaacagcgcactggcgttcgggcagggtttggcagcgggcatgcccggctaccctgtcctggcacccgctgcctactacgaccaaactggggcacttgtggtgaacgccggagctaggaacggcctcggtgctccagtacgcctcgtggctcccgcccccgtgatcatctcatccagtgccgcacaggccgctgttgcggcggctgccgcttctgcgaacggcgcagctggaggcctcgccggaactaccaacggtcccttcaggccactggggactcagcagccacagccccagccccaacagcaaccgaacaataacctggcctctagttctttttatggtaataacagcctgaactctaactcacagtcctccagtctgttttctcaaggctcagcccagccagccaacacctccctcggttttggctccagctcttcgctcggagccacactgggtagcgcactcgggggcttcggcaccgcagtcgctaattcgaatacaggtagcggatcccgacgtgactcgttgaccggaagttccgatctctataagcggacttcatcgagtcttacacccatcggacactccttctacaatgggctctcttttagttctagcccaggtccggtgggcatgccactgccgagccagggtcccggtcactctcagactcctccgccctctctgtcctcacatgggtcgagtagtagtctcaatcttggtggcttgaccaatggaagcggtcgatatatatctgccgcgccaggagccgaagcgaaatatcggagcgcaagcagcgcgagctccctgttctcccctagctcaactttgttcagctcatcgcgactgcggtacggcatgagtgatgttatgccttcaggtcgaagccgcctgctggaggatttcagaaacaaccggtatcccaacctgcaacttagagaaatagcgggacacataatggaatttagccaggaccagcatggctccaggttcatacagttgaaattggagagagctactccagcggaacgtcagctcgtctttaacgaaatcttgcaggccgcgtatcagttgatggtggacgtctttggtaactacgtgatacaaaaattcttcgaatttggaagtttggagcagaaacttgccttggccgaacgaattagaggacacgttttatcgcttgcgctgcagatgtatggatgtagggtgatacagaaggcactggaattcatcccttccgaccagcaagttattaatgaaatggtgcgcgagctggacgggcacgtgctgaaatgcgtgaaggatcaaaatggcaaccatgtggtccaaaagtgcattgaatgcgtacagcctcagtccctgcaattcatcattgacgcattcaaaggtcaagtttttgccttgtctacccacccttatgggtgccgggtcattcagaggatcttggagcactgcctgcccgatcagacgctccccatactagaggaactccatcagcacaccgagcaattagtgcaggaccagtacgggaactacgtgatccaacatgtgttagagcatggccgccccgaagataaatccaagatcgtggccgaaattcgagggaacgtgctggtgctatcacagcataagttcgccagcaatgtcgtggaaaaatgtgtaacacatgccagtaggacagagcgggctgttcttattgacgaggtctgcacgatgaacgacggtcctcacagtgccctatatacaatgatgaaagatcagtacgctaattatgtggtccagaaaatgatagacgtagcggagccaggccaaagaaaaatcgtgatgcataagatcagaccccacattgctactctgagaaagtatacatacggcaaacatatccttgccaagctggagaagtattacatgaagaacggagtagatctaggcccaatctgtgggcctccgaatggcattatatag

SEQ ID NO: 202045 - DNA, 3135 bp, synthetic construct
  misc_feature 1..3135: note = Description of Artificial Sequence: Synthetic coding sequence
  source 1..3135: mol_type = other DNA
atgagcgtggcctgcgtgctgaagcggaaggccgtgctgtggcaggatagctttagcccacacttgaagcatcaccctcaggaacccgctaatcctaacatgcccgtggtgcttaccagcggtaccggatcccaagcccagcctcagccggccgccaatcaggctctggccgctgggactcatagctcacctgtgccaggatcgattggtgttgcaggtcgctctcaggatgatgccatggtggactatttcttccagcggcagcatggcgaacaactggggggtggcggaagtggcggcggagggtataacaactcgaaacaccgctggcccactggggacaacatccacgccgaacatcaggtacgcagtatggacgagttgaaccatgactttcaggccttggctctagaaggccgcgccatgggggagggcccacgcgacgccgactctgacgaaaatgataagggggagaagaaaaacaaagggaccttcgacggcgataaacttggggatcttaaggaggagggcgacgttatggacaagactaatggattacctgtccaaaatggcatcgacgctgacgttaaagattttagcaggaccccaggcaactgccaaaacagcgcgaatgaggtggaccttttgggccctaaccagaacggcagtgaggggttagctcagctcacgtctacgaacggagccaagcccgtggaggacttttcgaatatggaaagtcagagcgtcccattggaccccatggaacatgtgggcatggagcccctgcagttcgactatagcggcacccaggtgcccgtcgactccgccgcagcaactgtaggcctgttcgactacaactcacaacagcagctgttccaacggcctaatgcgctcgccgttcaacaactgaccgccgcccagcagcagcaatatgccctggcagctgcccatcagcctcacattgggctcgcacccgccgcctttgttccaaacccatatatcatttccgcagcccctccagggacggacccctatacagcgggcctggctgcagccgctacgctgggcccagccgttgtgccccaccagtattatggcgtcaccccatggggggtgtatccagcatcgctgttccagcagcaggctgccgctgcagccgctgctaccaattccgccaatcagcagactactccccaggctcagcagggacaacagcaggtgctgcgcggtggtgccagccagagaccccttactcccaaccagaaccagcaaggacagcagactgatccactcgtcgcagccgccgctgtcaactctgctctggcctttggacagggcctggcggctggcatgccagctgtagccgccgcagcggcatcggcaaacggagcagctggtgggctcgctggcactaccaatggcccttttcggcctctgggaacacagcagccacaaccacagcctcagcagcagccaaacaataaccttgctagcagttcattctacggaaacaacagtctcaacagtaatagtcagagctcaagtctgttctcccagggtagcgctcaacctgcaaacacaagcctgggcttcggatcttcttccagcctgggcgccactctgggaagcgctctgggggggttcggaacagcagttgcaaattcaaatactggctccgggtcacgccgggactcccttaccggttcctccgacctctataaacgaacttctagctccctgacacccattggacactcattttacaacgggttaagtttctcgtcatctccaggacctgtgggcatgcctctacccagccagggccctggccactctcagaccccgcccccaagtctttccagccacggctccagcagtagcctgaacttgggaggactgacgaatggcagcggacggtacatctccgccgcccccggcgctgaggccaagtacaggagtgcgtctagcgccagctcgctgttctcgccatcctctactctgtttagctcatcacgactccgctacgggatgtctgacgttatgccatcgggtagaagcaggctgttagaggactttcgtaataataggtatcccaacctccagttgcgcgaaattgccggtcatatcatggaattctcacaggaccagcacgggagccgatttatccagctaaaactggaaagagccactcccgctgaacgccagctcgtttttaacgaaatactacaggccgcttaccaactaatggtggacgtgttcggcaactatgttattcaaaagttcttcgagtttggctcattagagcaaaagctggctctggctgaacggataaggggacacgtgttgtccctggctttgcagatgtacgggtgccgcgtgatacagaaggctctggaatttatcccgtcagaccaacaggtaattaatgagatggtcagagaattagatgggcacgtcctaaaatgcgtcaaggaccaaaatggcaatcacgtcgtccagaagtgtatcgaatgtgttcagcctcagtcattgcagtttattatcgatgccttcaaaggtcaggtgttcgcactctcgacacacccttacggttgcagggttatacaaaggatactagagcactgtctgccagaccagacactgcctatcctagaagagttacatcagcacacagaacagctggtgcaggaccaatacgggaattatgtcattcagcacgtacttgagcatggccgtccagaagacaagtccaaaatcgttgctgagatacgcggtaacgtgctggtactgtctcaacacaagtttgcgagcaacgtggtcgaaaaatgtgtcacccatgccagtaggactgaacgggccgtgctgatagacgaagtctgcacaatgaacgacggaccccacagtgcgctgtacactatgatgaaagaccagtacgccaactacgtggtgcagaaaatgattgatgtggccgaacctggacagcgaaaaatagtaatgcacaagatacgaccccacattgccacgctgaggaagtacacctacggaaagcacatcctggctaaactggaaaagtactatatgaagaatggcgtcgacctggggcctatctgtggacctcccaacggcatcatctag

SEQ ID NO: 202046 - DNA, 3567 bp, synthetic construct
  misc_feature 1..3567: note = Description of Artificial Sequence: Synthetic coding sequence
  source 1..3567: mol_type = other DNA
atgagcgtggcctgcgtgctgaagcggaaggccgtgctgtggcaggatagcttttcccctcacctgaagcaccatcctcaggaacccgctaatccgaacatgcctgtcgtactgacttctggcactgggtcccaggcacagccacagcccgctgccaaccaggcattggccgccggcacacactcctcacctgtcccaggtagcattggagtggctgggcggagccaggatgatgcaatggtggattatttctttcagaggcagcatggagaacaactgggaggggggggatccgggggcggcgggtataacaactcaaagcacagatggccaaccggcgataacatacacgccgagcaccaggtaagaagcatggatgagcttaaccacgactttcaggcattagcactggagggacgagctatgggggagcaattgctgccaggaaagaaattttgggagactgatgagtctagcaaagacggccctaagggcatctttcttggggaccagtggagagactcggcctggggcacatctgaccacagtgtgtctcagccgattatggtgcagcgacgccctggccaaagttttcacgtaaattccgaagtgaacagcgtgctgagtccgaggtcagaatccggaggtctcggcgtgagcatggtggaatatgtactaagttcttccccaggcgacagctgcttacgaaaaggtgggttcgggccccgggatgccgattctgatgagaatgacaagggcgagaagaaaaataaggggacttttgacggcgataaacttggagatctgaaagaggagggggacgtaatggataaaacaaacggcctgccggtgcagaacggaattgatgccgatgtgaaagatttttcacgcaccccaggtaattgccagaattcagcaaatgaggtggatctcctgggaccaaatcagaatgggtctgagggactggcccagctgacttcaaccaatggtgccaagcctgtagaagatttttcaaatatggagtctcagagtgtcccgttggaccccatggagcatgtggggatggaaccactacaattcgactacagtggaactcaggtgccagtggacagcgcggccgccaccgtagggctgttcgattataacagtcaacagcaactgttccagaggcccaacgcgctagctgttcagcagctcactgcagcacagcagcagcagtacgcactggccgccgctcaccagcctcatattggcctcgctcccgcggcctttgttcctaatccctacatcattagcgctgcacctcccgggactgatccatataccgctggcttggcagccgcggctaccctgggccccgctgtggtgcctcaccagtactatggcgttacaccttggggcgtgtatccagcctccttgtttcagcaacaagctgcagctgccgcagcagccaccaacagcgccaatcagcagaccacccctcaggctcagcagggtcagcagcaagttttacgtggtggagcgtctcaaaggccgttgacccctaatcagaatcagcaaggacagcagactgatccccttgtggccgctgccgccgttaacagcgctttggcctttggacagggactggcagcagggatgccagggtaccctgtcctggccccggccgcctactacgaccaaacaggagcgttagttgtcaatgccggcgcgagaaatgggctcggcgctcctgtacgcctcgtggcacctgcccctgtgattatttcctcaagtgccgctcaggccgctgtggccgctgcggctgcctctgctaacggcgccgccggcggactcgcagggacaacaaacggcccatttcgtccattgggcacgcagcagccacagccacaaccacagcagcagccaaacaataatctcgcatccagctccttttatggcaacaactcacttaatagcaactcccagagcagtagcttattctcacaaggctcggctcagccagcaaacacgagtctcggttttggttctagctcttctctcggcgccactcttggcagtgccctgggaggctttggcactgccgtagctaattcaaataccggttccgggagccggcgcgattctctgactggtagttctgatctgtacaaacggacaagctcctctctgaccccaattggacactccttctataacggactttctttcagctccagtccaggcccggtggggatgccactgccgagtcagggaccaggccacagccagactcctccgccttccctttcatctcacgggtcaagcagctctctgaatctagggggactgactaacggctctggcagatacatttcagccgcacccggcgccgaggcgaagtataggtccgcgtcgagcgcttcttctttgttttcaccaagctcgaccctgttctcaagcagcaggctcaggtacgggatgagcgatgtcatgcccagcgggcgttcccggttgctggaagatttccgtaacaatagatatcccaatcttcagctgcgtgagattgctggacacattatggagtttagccaagatcagcatggtagcaggtttattcagctcaaattagagcgtgcgacaccagccgaacggcaactggtgttcaacgaaatactgcaggctgcttaccagttgatggtggatgtgtttgggaactatgtcatccagaaatttttcgaattcgggagtctcgagcagaaattggcccttgctgagagaatcaggggtcatgtattgtcgctcgccctccagatgtatggatgtcgtgtcattcagaaagcactcgagttcatacccagtgatcagcaggttattaatgaaatggtgagagaattggatggacacgtcctgaagtgtgtcaaggatcaaaacgggaatcacgtggtacaaaagtgtattgagtgcgtgcagcctcaaagcctgcaatttatcatcgacgcctttaagggccaggtgttcgccctgtcgacccatccctatggatgcagggtgatccagagaattttggaacattgtttaccagatcagacgctgcccatcctagaggagttacaccagcatacagaacagcttgtgcaggatcagtatggaaactatgtcatccagcatgtactagaacacggccgacccgaggacaaatccaagattgtcgcggaaatacgcggaaatgtgttggtgctgagccagcacaagttcgcttccaatgtggtggagaaatgcgtgacccacgcttcaaggacagaaagagccgtactgattgacgaagtgtgcaccatgaatgatggtccgcattcagccttgtataccatgatgaaggaccagtacgctaattatgtggtccagaagatgattgatgtggcagaaccaggacaacgcaagattgtgatgcataaaattcggcctcatatagccaccctgaggaagtacacttacggtaaacatatacttgcaaagttagaaaagtactatatgaagaacggcgtcgacctggggcccatatgtgggcctccgaatggaattatctag

SEQ ID NO: 202047 - DNA, 3489 bp, synthetic construct
  misc_feature 1..3489: note = Description of Artificial Sequence: Synthetic coding sequence
  source 1..3489: mol_type = other DNA
atgagcgtggcctgcgtgctgaagcggaaggccgtgctgtggcaggactcatttagcccacacctgaagcaccacccacaagaacctgcgaatcccaacatgccagtggtgctcactagcggcactggaagccaggcccagccccagccggcagctaaccaggccctagcggccggcacccattcttctccagtgcccggttcaattggggttgccggtaggagtcaggatgacgccatggttgactatttcttccaaagacagcatggagagcagctgggcggggggggctctggtggcggtggctacaacaactcaaaacatcggtggccaaccggtgacaacattcacgcagagcaccaggttcgcagcatggatgagcttaaccatgactttcaagcgctggcattggaggggagagcgatgggggaacaactgctaccggggaagaaattttgggagaccgacgaatcttccaaggatggcccgaaaggcatctttctcggcgatcagtggagagactccgcttggggcacctccgatcacagcgtgagtcaacctatcatggtgcaacgtaggcctgggcagtcattccatgtcaactcagaggtcaatagtgtgctttctcctcgcagcgaaagcgggggactcggggtctctatggtggagtatgtactgtcaagctcccctggcgacagttgtctgcgtaagggcggctttggtccacgggatgccgattccgatgaaaacgataagggggaaaagaaaaataaaggaactttcgatggtgataagttaggagacttgaaagaggaaggggatgtgatggataagactaacggactcccagtccagaacgggatcgacgccgatgtaaaagacttttcacggactcccggcaattgtcagaattccgctaacgaagtcgatctgttaggcccaaaccagaacggatcggaaggtctggcccagcttactagcactaacggggccaaaccagttgaggacttctccaatatggaatctcagtccgtgcccctggatccaatggaacacgtagggatggaaccgttgcaattcgattactccggaactcaggtcccggtggacagtgcagctgcaacagtggggcttttcgactataactcacagcaacaactttttcaaagaccgaacgcactcgctgtacagcagctgaccgccgcgcaacagcaacagtatgccctagcggctgcccatcagcctcacattgccggtctcgctcctgctgcattcgtgccgaacccctacatcatttcggccgcccctccaggcaccgacccttacacagctggccttgcagctgccgcgaccctgggacccgctgttgttccccatcaatattatggcgtgacaccatggggggtctatcccgccagcctctttcagcaacaggcggcagcggctgccgcagctaccaactctgccaaccagcaaacaactcctcaggcccagcaaggtcagcagcaagtcttgaggggcggcgcttcccagagaccattgactccaaaccagaaccagcagggtcaacagactgatcctctggttgccgccgcagcagtgaatagcgcgttggcattcggccaaggacttgccgctggaatgcctgggtatcccgtgctggcacccgccgcctactatgaccagaccggtgctcttgtggtgaacgccggcgccaggaatggcctcggtgcacctgttcgcctcgttgcgcctgctccggtcatcatttcctctagcgctgcccaagctggaactcagcagccgcaacctcagcctcagcagcagcccaacaacaacctcgcaagctcttcgttctacggcaataattcactcaattctaattcccagtcatcttcgttgttctcccagggatcggcccagcctgccaacacatctttaggattcggcagctctagctccctgggggctacccttgggagtgcactagggggctttggtaccgccgtggctaactccaatactggtagcggctccaggcgtgacagtctgacaggtagttctgacttatacaaaaggaccagctcttcgctgacccctatcggacattcattctataatggactgtcattctcctcatccccagggccagtgggcatgccgcttccgtcccagggacctggacattcacagactcctcctccgtcactctcttctcatggttcatcctctagcctcaatctcggcggattaacgaatggaagcgggcgctacatctccgcggcgcctggcgccgaggctaagtacagaagcgccagctcggcgtcatctcttttctcccccagctccacactgttttcctcatcacggctgagatacggtatgtccgacgtcatgcctagcgggcggtcaagattgctcgaagacttccgcaataaccgttatcctaatctgcagctgcgggagatcgctgggcatattatggagttctcccaggaccaacacgggagcagattcattcagctgaaactcgagcgggctacccctgctgaacggcagcttgtgtttaacgagattctgcaggcagcctaccaactgatggtggacgtgttcggaaactatgtcatccagaagttctttgagttcggcagcctggagcagaaactggcgctagccgagcgaatccgagggcacgttctctctctcgcactgcagatgtacggctgccgagtgatccagaaagccctggaatttattccatccgatcaacaggtgataaacgagatggtgcgcgagttagacggacacgttttgaaatgtgtgaaagaccaaaacggtaaccatgtggtccagaagtgcattgagtgcgtgcagccacaatcgctccaattcatcattgatgcctttaaaggccaagtgttcgccctgtctacacatccctatggctgtcgggttatccagcggatcctggagcactgcctaccagaccagactcttcccatactcgaagaacttcaccagcacactgaacagctggtacaggaccaatacggcaactacgtgatccaacacgtcctggagcatgggaggcccgaagataagtctaagattgtcgctgagattcgcggcaacgtgttagtcctgtctcagcataagtttgcctccaatgtggtggaaaagtgcgttacacacgcatctaggacagagcgagccgtcctgattgatgaagtatgtacaatgaacgacggtccacatagcgctctgtacactatgatgaaagatcagtatgccaattacgtggtgcagaagatgattgacgttgccgaaccgggtcagcgaaagattgtcatgcataagatccggcctcacatcgccaccctccgaaaatacacctatggaaagcatattctggccaaactcgagaaatactacatgaaaaatggggtggatctgggccccatctgcggcccacccaacggaatcatctag

SEQ ID NO: 202048 - DNA, 291 bp, synthetic construct
  misc_feature 1..291: note = Description of Artificial Sequence: Synthetic coding sequence
  source 1..291: mol_type = other DNA
atgagcgtggcctgcgtgctgaagcggaaggccgtgctgtggcaggatagtttctcgcctcatctcaagcatcacccgcaggagccagctaatcctaacatgcccgtggtgctgacatctggaacgggctcccaggctcagccccagccagcagccaaccaggctttggcagccggaacccattcttctcctgtgcctggaagtattggagtggcaggtaggagccaggacgacgccatggtcgactatttttttcagagacagcacggggagcagctgggcgggggatag

SEQ ID NO: 202049 - DNA, 1551 bp, synthetic construct
  misc_feature 1..1551: note = Description of Artificial Sequence: Synthetic coding sequence
  source 1..1551: mol_type = other DNA
atgagcgtggcctgcgtgctgaagcggaaggccgtgctgtggcaggactcatttagtccccacctgaaacaccaccctcaggaaccagccaacccgaacatgccagtggtcctcacttcagggacagggagtcaggctcagccccagcctgccgctaaccaggctctggccgccggtacccatagttcccctgtccccggcagcatcggagtcgcaggcagaagccaggatgacgccatggtcgattattttttccaaaggcaacacggagagcagctcggcggtggcggatccggtggtggcggttacaacaactccaaacatagatggccaacaggggacaacatccatgcagagcaccaggtgcggtctatggacgaattaaaccacgatttccaggccctcgccctcgaaggcagggccatgggggagcaattacttcccggcaaaaagttctgggaaacagatgagtcaagtaaagacggaccgaaagggatcttcctgggtgatcagtggcgcgacagcgcgtggggcacatctgatcattcagtgtctcagccaattatggttcagagacgacccggccaatcatttcatgtgaattctgaagtcaacagcgtgctttcaccacgctccgaatctggaggcctcggagtaagcatggtcgagtacgtgcttagctcctccccgggcgacagctgcctgaggaagggaggcttcggccctcgcgatgctgactctgacgaaaacgacaaaggagaaaagaagaacaaaggtactttcgacggcgataagctgggggacttaaaagaggagggcgacgtcatggacaagaccaatggcttgccagttcagaatggcatcgacgccgacgtcaaggatttcagtcggaccccggggaactgtcagaactccgctaatgaggtggatctcttgggaccaaaccagaacgggagcgaggggctggctcagttgacgtcaactaatggcgccaaacctgtagaagacttttcgaacatggagtcacaaagcgtccctctggatcctatggagcacgtaggcatggaaccactgcagtttgactatagtggcacacaagtccccgtagactctgcagcagcgactgtgggtctgtttgactacaacagccagcagcagctgttccagagacctaacgctctcgcagtgcaacagctcaccgccgcacagcagcagcaatatgccttggctgccgcccatcaaccgcatataggtctcgcaccagctgccttcgtgcctaatccctatattatttcagctgctccccctggaaccgacccctatacggcgggcctggctgctgcagccaccttggggcctgccgttgtgccgcaccagtattatggtgttaccccatggggcgtctatccggccagcctctttcaacagcaggccgcggctgcagctgccgccacaaactccgcaaatcagcagacgacaccacaagcccagcagggacagcagcagactgaattctgtttctgttgccctggttggtccgctatggtgtag

SEQ ID NO: 202050 - DNA, 2964 bp, synthetic construct
  misc_feature 1..2964: note = Description of Artificial Sequence: Synthetic coding sequence
  source 1..2964: mol_type = other DNA
atgaaccacgacttccaggccctggccctggagagccggggcatgggagaactactgcccacaaagaagttctgggaaccagatgattccaccaaagatggccagaaaggaatcttcctcggcgatgatgagtggcgcgaaacggcatggggcgccagtcatcacagcatgtctcaacctattatggtccagcggcgaagtgggcaaggattccatggcaattccgaggtgaacgcgattctgtcacctaggagtgagagcgggggtctcggagttagcatggtcgagtatgtcctgtccagctcacctgccgacaaattagacagtagatttagaaagggcaacttcggcactagagacgctgaaacggacggtcccgaaaagggggaccagaagggcaaggcatctccctttgaggaggaccagaaccgggatctgaaacagggggatgatgacgattcaaagataaacggtcgcggactgcccaacggtatggatgcagactgcaaggattttaatcggacaccagggtccagacaggcaagccccacggaggtagtagaacgtctgggccccaatacaaatccgtccgaaggccttgggcccttaccaaacccaaccgccaataaacctcttgttgaggaattcagtaaccctgaaactcagaatttagacgcaatggaacaggtgggccttgagagcctgcaattcgattacccagggaatcaagttcccatggacagcagtggcgccactgtggggttatttgactataacagtcagcagcaactgtttcagcgaaccaatgcactcaccgtgcagcagctgactgcagcccagcagcaacagtatgcattagctgctgcccaacagccccatattgccggtgtgttctctgcgggcctggctcccgctgccttcgtgcctaatccctacattatcagcgctgcacccccaggaacggacccttacaccgccgcagggctggccgctgctgctacgttggcagggcctgctgttgtacccccccagtactatggagtgccttggggggtgtacccagctaatcttttccaacagcaggctgctgcagccgccaacaacaccgccagccaacaagctgcatcccaggcccagccaggccagcagcaggtgctgagagcaggtgctggacagagaccgttgacgcccaatcagggccaacagggccagcaagctgaaagtctagcagccgctgccgcagccaaccctacactggcatttgggcagggcctcgctaccgggatgccaggctatcaggtgctggcgccaacggcctattacgaccaaacgggggccctcgtggtggggcctggagccaggacggggctgggcgcccccgttcgactgatggctccaactcctgtactgatctcaagcgcggccgcacaggcagctgccgctgcagctgccgggggcactgccagttcattgacagggtcaaccaacggactgtttcgtcctattggaacgcaaccaccccagcagcagcagcagcaaccctcaaccaaccttcagtctaatagcttctatggatcaagcagtctgactaactcctctcagagctcaagtctgtttagtcatggccctggacaacctggctcaacaagcttgggatttggcagcggcaattcactgggggctgcaataggctcggctttatccgggttcggcagctctggcggactcaccaatgggagcggacggtacatcagtgccgcgccaggtgctgaggcaaagtatcggagcgcctcttcaacctcctccttgttctcgagtagtagtcaactctttcctccgtctagactgaggtataataggtctgacataatgccttctgggcgctcacgcctgttggaggatttccgtaacaatcggtttcctaacctccagttgcgcgacctgatcgggcatatagttgaattctcacaagaccaacatggttctagatttattcagcaaaagctggagagagccaccccagccgagagacagatggtcttcaacgagatactgcaggctgcataccagctgatgactgacgtattcggtaattatgtgatacagaaattctttgagttcgggtctctggatcagaaattggccctagcaacacgaattcgcggccatgtgttgccgttggcactgcaaatgtatgggtgcagagtgatccagaaagccttagagtcaatctcatctgaccagcaggtaatctctgagatggtgaaggagctggatgggcatgtgctgaagtgtgtaaaggatcagaacggaaatcacgtggtccaaaaatgtattgagtgtgttcagccacagagcctacagtttataattgacgctttcaaagggcaggtgttcgtgctgtctacccacccctacgggtgcagggtcattcaaagaattttggaacattgcaccgccgagcagactctccccatcttagaagagcttcatcagcacactgagcagctcgtgcaggatcagtacggtaattacgtgatccagcacgtgctggagcatggccgtcctgaagataagagtaagatcgtgtccgagatcagggggaaagtcttggcgctgtcccagcacaagttcgcaagcaacgtggtggagaagtgcgttacacacgcttcaagagccgagagggctctgctgattgatgaagtctgttgccagaatgacgggccgcactccgctctgtacaccatgatgaaagaccaatatgcaaattacgtggtacagaagatgattgacatggccgaaccagcccagagaaagattattatgcataagataagaccccacattaccaccttgaggaagtatacctatggaaagcatatcctcgcaaagttagaaaagtattacttgaagaactcccccgatctgggcccgattggggggccgcccaacggaatgttatag

SEQ ID NO: 202051 - DNA, 3195 bp, synthetic construct
  misc_feature 1..3195: note = Description of Artificial Sequence: Synthetic coding sequence
  source 1..3195: mol_type = other DNA
atgaaccacgacttccaggccctggccctggagagccggggcatgggcgaactgctgccaacgaagaaattttgggagccagacgactccacaaaagacggccagaaaggcattttcctgggtgacgatgagtggcgcgagaccgcatggggagcaagtcatcactctatgagccagccaataatggtccagaggagatccggacagggctttcacggcaactctgaagtgaatgccattctcagtccacgttctgagagcggcggtttgggagtgagcatggtggagtacgtcctgtcttcctccccggccgacaagctcgactctcgcttcaggaaaggcaatttcgggacacgagacgccgagactgatggacctgagaagggcgaccagaaaggcaaggccagtccattcgaagaagaccagaatagggacctgaagcagggggacgatgacgattccaaaattaacgggaggggtctgccaaacggcatggatgctgactgtaaagactttaatcgaacaccagggtctcggcaggcaagccctactgaggtggtggagcgcttaggacccaataccaatccatcagagggcctgggtcctctgcccaatcccaccgctaacaagccactggtcgaggagttctctaaccctgagactcagaaccttgacgcaatggagcaggtaggacttgagagtctgcagttcgactacccaggtaatcaagtgcccatggatagctctggagcaacagtcggcctgtttgactataatagtcagcagcagctctttcagagaactaatgcactgacagtccaacagctgacagcggcacagcagcagcagtatgcactggctgccgcacagcaaccccacattgcaggagtctttagcgccggactcgccccagcagcctttgtacctaacccgtatataatctctgctgcccctccaggtaccgatccgtatactgcagcaggacttgctgcagctgccaccctggccggtccagcggtggtcccaccccagtactatggagtcccctggggagtctatccggcaaacttgtttcagcagcaggctgccgccgccgccaataatacagcaagccagcaagcagctagccaggcacagcctggacagcaacaggttcttcgagctggtgccggacagcggcccctaaccccgaatcaaggccaacaggggcagcaggcagagtcactggccgccgcagccgccgctaatcccacgttggcgttcgggcagggcctcgctacgggaatgcctggctaccaggtgctcgctcccactgcctactatgaccagaccggagctctggtcgttggaccaggagcaagaaccggcctgggtgcacccgtgagactaatggcaccaacacccgtgctgatatcttcagctgccgctcaggccgcagcggcggctgcggctggggggaccgcctccagtctcaccggttctacgaacgggctgttccgtcccattggaacccagcctccccagcagcaacagcagcagccatccaccaatttgcagtccaactctttctacgggtcgagttcattaactaactctagtcagtcctcttctctgttttcccacgggcccggccagcctggctcaacctctcttggctttgggtctggcaatagtctcggcgccgcgatcggcagtgctcttagcggatttggttcaagcgtgggctcctctgccagcagctcagcaactcgccgcgaatctctttccacttctagtgacctatacaaaagatcctcctcgtcactggcgcctattggtcagccattttacaacagtctgggcttcagtagtagcccctccccaataggcatgcctctcccgtcgcagacacctgggcacagtctgacacctccgccctccctgtcgtcgcacggctctagctctagccttcatctcgggggactgactaacgggtccggtaggtatatttcagccgcccccggcgcagaggctaagtacaggagtgcatcctccacttcttccctgttctcctcatctagccagctgttcccccccagtcgtctgcgctataatagaagcgatatcatgccaagcggaagatcacggctgctggaggacttcagaaacaatagattcccaaaccttcagctgcgggacctcatagggcacatcgtagaattcagccaggatcagcacgggagccggttcatccagcagaagctagaaagggctactcccgcagaaagacaaatggtgtttaatgagatcctgcaagctgcgtatcagctgatgacagacgtgtttggcaactatgttatccagaaattcttcgagttcggctccctggatcaaaaactcgcactggcaacgcgaattcgtggccacgtccttccacttgcactgcagatgtatgggtgtagggtcatccagaaagcgctagagagcatctcttctgaccaacagtccgaaatggtcaaggaactagacggacacgtgctgaagtgtgtgaaggaccagaatggcaaccatgtcgttcaaaaatgcatcgagtgtgtgcagccacagagcctgcagttcattattgatgcatttaagggccaggtgttcgttctgtctacccatccctatggatgccgtgtgattcagaggatcctcgagcactgtaccgccgaacagaccctgccaatactggaggagctgcaccagcacaccgagcaactggtgcaggaccagtacgggaactatgtgatccagcatgttctggagcatggacgaccggaggacaaatctaagatcgtgtctgagatcagaggcaaggtcctggccctgagccaacacaaatttgcgtctaatgtcgtcgaaaaatgcgtcacccatgcgagcagggcggagagagccctcctaattgacgaagtgtgctgccagaacgacgggccacactctgccctttatactatgatgaaggatcaatacgccaactacgtcgttcagaagatgattgatatggccgagcccgctcagagaaaaataatcatgcataagattcgccctcacataaccactctgcgcaagtacacatacggaaagcacattctggccaaattggaaaagtactacttgaaaaacagcccggacttagggccaattggggggcccccaaacggcatgctgtag

SEQ ID NO: 202052 - DNA, 3201 bp, synthetic construct
  misc_feature 1..3201: note = Description of Artificial Sequence: Synthetic coding sequence
  source 1..3201: mol_type = other DNA
atgaaccacgacttccaggccctggccctggagagccggggcatgggagaactccttcctactaagaagttttgggaacccgacgacagcacaaaggatggacagaaggggatcttcctcggcgacgatgagtggagggagaccgcatggggggcatcgcatcacagcatgtcacagcccattatggttcaacggcgatctggccaaggattccacggaaactccgaggtgaatgctattctgtcccccagaagcgaatccgggggtctgggtgtgagtatggtagagtacgtcctttcctcctcaccggccgataagctcgactcaaggttcaggaagggcaatttcggcactagggacgctgagacagacgggccagagaagggggatcagaaaggcaaagcctctcccttcgaggaagatcagaatagggatttgaaacagggggatgatgacgattccaagatcaatggaaggggccttcccaacggcatggacgccgactgcaaagactttaataggactcccgggtctaggcaggcctcccccaccgaggtggtggagcgcctgggacccaatacaaatccaagtgagggacttggaccattgccaaaccctactgcaaataaacctctggttgaggagttctccaaccctgagactcaaaacctcgatgccatggagcaagttggtctggaatcactgcaattcgattacccgggcaaccaggtgccgatggacagctctggggccactgtgggactcttcgactacaactcacagcaacagctatttcagaggaccaacgccctgactgtgcaacagttgaccgccgcccagcagcaacagtacgctctcgccgccgcccagcagcctcacatagctggagtcttctctgcgggactggcacccgccgccttcgtgcccaatccatatataatttcagctgcacctccaggcacggatccatatacagctgccgggctcgctgcagccgccacgctggctggcccagctgttgtgccgccacaatactatggcgtgccttggggtgtttatccggccaacttgttccagcagcaggctgccgccgcagctaataataccgctagtcaacaggccgcatcccaggcccagcctggccaacaacaggtgctgcgagctggagctggacagcgcccacttaccccgaaccagggacaacaaggtcagcaagccgagtcattggctgccgcagctgccgcaaaccccaccctggcctttgggcaaggcctcgctacgggcatgcccggctaccaggtcctagcccctaccgcctattacgaccagacaggcgccctagtggtgggtccaggcgcccgcaccggactgggggcccctgttcggctcatggcgcctacccctgtcctgatatccagcgcggccgctcaggctgccgctgccgctgcagccggcggtactgcttccagtctcacaggatccacaaacggactgttcaggccgattggtacccagccaccacagcagcagcagcagcagccctccaccaacctccagtctaactccttctacggatctagctccctgacgaattctagtcagagctcttcactgttctcccacggcccaggccagccaggcagcacctcgctgggatttggcagtgggaattctttgggggcagcgattggcagcgcgctttccggatttgggagttcagtcggcagttccgccagcagtagcgcaacgcggcgggagagcctttcaacttccagcgatctatataagcggtcttcttcctcgctggcccccatcgggcagccattttataattcccttggcttctcctccagcccctctccaatcgggatgccgctcccctctcagacaccgggccactccttgactccccctcccagtctgtcatcacatggcagtagttcatctctccatcttgggggactcaccaatggcagtgggagatatatctcagccgcccctggcgcggaggctaagtaccggtcagccagttcaacctcaagcctgttcagcagctcaagtcagctcttcccaccctccaggctccgatataaccgaagtgacatcatgcctagcggccgttccagactgctggaggactttcgcaataatcggtttcccaatcttcagctacgcgatcttattggccacattgtcgagttcagccaggaccaacacggctcgcgttttattcagcagaaattagagcgtgccacccctgccgaacggcaaatggtgtttaatgaaatactacaagcagcgtaccaactgatgactgacgtgttcggcaattacgtgattcagaagttttttgagttcggctctctcgatcagaagttggcccttgctactaggataaggggacatgtcctccccctggcattgcagatgtacggctgccgggtaatccaaaaagcactggaaagtatctcctccgaccagcaggttatttccgaaatggtcaaggagttggatggccatgtgctgaaatgcgttaaggatcaaaatggaaatcatgttgtgcagaaatgcatcgaatgtgtacaacctcaatctttgcagttcattatcgatgctttcaagggccaagttttcgtgctaagtacccacccctacggatgtagggtaattcagagaatcctcgagcactgcaccgccgaacagacgttaccaatcctggaagagctacaccagcataccgagcaactcgtccaggatcagtatggaaactatgtcatacaacacgttctggagcatggtcgaccagaagataaaagcaaaattgtttccgagatccgggggaaggtactagcactgagtcagcataaatttgcctccaacgtcgtagagaaatgtgtgacgcatgcttccagggccgagcgagcactcttaatcgacgaggtgtgctgccagaatgatggtccacattcagcactgtacaccatgatgaaagatcagtatgcaaattatgttgtccagaaaatgattgacatggcagaacccgcccagcggaagatcataatgcataaaatacgtccacatattacgactctgaggaaatacacctatggcaaacatatccttgcaaaacttgagaagtactacctgaaaaatagtccagatctcggtccaatcggcggccctcccaatggaatgctgtag

SEQ ID NO: 202053 - DNA, 3195 bp, synthetic construct
  misc_feature 1..3195: note = Description of Artificial Sequence: Synthetic coding sequence
  source 1..3195: mol_type = other DNA
atgaaccacgacttccaggccctggccctggagagccggggcatgggcgaactgcttccaacaaaaaagttttgggagccagatgattcaactaaggacgggcagaaagggatctttcttggagacgacgaatggcgtgagacagcatggggcgctagccaccattctatgtctcaaccaattatggtgcagcgaaggtctggacagggatttcacggaaattcggaggtaaatgctattctgtcccccaggagcgaatccggcgggctgggcgtgagtatggttgaatatgttctgtcaagtagccccgccgacaaattagacagccggttccggaagggcaacttcggaacccgggatgctgagaccgacgggcccgagaagggtgatcagaagggcaaggcgtcacctttcgaggaggatcagaacagagacttaaagcagggcgacgatgatgactctaagattaatgggagggggctgcccaacgggatggacgcggactgcaaagatttcaatcgaacccccggcagccggcaagcgtcgcccactgaggtagtcgaacgcttgggaccaaatacaaacccttcagaggggctcggacctctgccaaaccccaccgctaataaaccgctcgtggaagaattctccaacccggagacacagaatcttgatgctatggagcaggtgggcctggagtctttacagtttgactacccgggaaaccaggtgcctatggattccagtggcgccaccgtcgggctcttcgattacaacagtcagcagcagctcttccaacgcacaaacgctcttactgttcagcagctaacggccgctcagcagcaacaatatgccttggccgcggcccagcagcctcatatcgcaggcgtgttcagcgccggtcttgcgcctgccgcatttgtgccgaacccatatatcatctcagcagccccccctggtacagacccctatactgctgcagggttggctgctgccgccaccctcgcggggccggcagtagtcccaccgcagtattacggcgtgccctggggagtataccctgcaaacttatttcaacagcaggcagccgcagccgctaacaacacagctagtcagcaagcggctagccaggcccagccgggtcagcagcaggtgttacgagcaggggctggccagcgcccactaaccccaaaccagggccagcaggggcaacaggccgagtcactggccgcagccgcagcggccaacccaacgctagcttttggccaggggctcgccaccggaatgccaggttatcaggtcctggctcctacagcgtactacgaccaaaccggcgcgctggtggtgggccctggggcccgcacaggcctgggcgctcccgtgaggctgatggcaccgacgcccgtactcatcagttcagccgctgcacaggccgccgccgccgcagccgctggtggaacagccagctcactgactggaagtactaacggactgttccgccccatagggactcaacctccccagcaacaacagcagcaacctagcactaacctccaatctaacagtttttatggctccagttctctgactaacagcagccagagttcttctttattcagtcacgggccaggacaacccggatctacctctttgggatttggttccggcaattctctaggagctgccatcggatctgccttatccggatttggatcttctgttgggtctagcgcttcctccagtgcaacgcggagagagtcactgtcaactagtagcgatttgtataaacgctcaagcagctctttagcaccaatcggccaaccattttataactccctgggcttctcttcctcaccatcgcctatcggaatgcctttaccctcccagactcctgggcattccctgaccccgcccccctcattaagtagtcacggcagctccagctccctgcacctgggtggcttgaccaacggctcagggcgatatatatcagctgcgcctggcgcagaagcaaagtatagatctgcatctagtacttcttcactgttctcaagtagttctcagctgtttccacctagccgtctcaggtacaatagaagtgacattatgccctctggtcggagcaggttgctggaggattttaggaataaccgcttccctaacctgcagctgcgggaccttattgggcacattgttgagttttcacaggatcagcatggaagtcggtttattcagcaaaagctggaaagagccactcctgccgaaaggcagatggtgtttaacgaaatcctgcaggcagcttaccaactgatgacagatgtcttcgggaattacgtgatccagaaattctttgaattcggctccctcgatcagaagctggccctggccacccgtatccgagggcatgtgctacctcttgccctgcaaatgtatggatgccgcgtaatccagaaggccctggaatccatttctagcgaccaacagtccgagatggtgaaagagttggacggtcatgtcctgaagtgcgttaaggatcagaacgggaaccatgtcgtgcagaaatgcatcgagtgcgttcaaccacaatccctccaatttatcatcgatgcctttaaggggcaggtatttgtgctgtccactcatccctacgggtgcagggtcattcagcggattctggaacactgcaccgctgaacagaccctgcccattctcgaggagcttcatcagcacaccgagcagctggtccaggaccaatatgggaattacgtgatccagcacgtactcgagcacggaagacctgaggacaagagcaaaatcgtgagcgagatacgggggaaagtactggctctttctcagcataagtttgcgagcaacgttgttgagaagtgcgttacccacgccagccgcgcagaacgggctcttctgatcgatgaggtgtgttgccagaacgatggtccacattctgcactctatactatgatgaaagaccagtacgctaactacgtcgtgcagaagatgattgacatggccgagcccgcacagcgcaaaatcataatgcacaagattaggccacacataaccactctgagaaagtatacttacggcaagcacattcttgcgaagctggagaagtactacctgaagaactcccccgacctgggtccaattggggggccccctaatggtatgctgtag

SEQ ID NO: 202054 - DNA, 105 bp, synthetic construct
  misc_feature 1..105: note = Description of Artificial Sequence: Synthetic coding sequence
  source 1..105: mol_type = other DNA
atgaaccacgacttccaggccctggccctggagagccggggcatgggagagctcctcccaactaaaaagttctgggaaccagacgactctactaaagacgggtag

SEQ ID NO: 202055 - DNA, 882 bp, synthetic construct
  misc_feature 1..882: note = Description of Artificial Sequence: Synthetic coding sequence
  source 1..882: mol_type = other DNA
atgaaccacgacttccaggccctggccctggagagccggggcatgggcgaactgctgccgacaaagaagttttgggagccagatgacagcaccaaggatggacaaaagggtatctttttaggagacgatgagtggagagagacggcttggggagcatcccaccactccatgagccagccgatcatggtgcagcgtcggagcggccagggcttccatggcaactcagaagtcaacgccattctctctccaaggtccgagagtggaggcctgggggtgtccatggtggagtacgtcttaagtagcagtcccgccgataagctggacagccgattccggaagggcaatttcggcacaagggacgcagaaacagatggccctgagaaaggagatcagaaagggaaagctagtccctttgaggaggatcagaatcgagatctgaagcagggggatgatgacgatagtaaaatcaatggcagaggcctacctaacggaatggacgcagattgcaaggatttcaaccgaaccccaggcagtaggcaggcaagtccaaccgaggtggtggaaagactggggccgaacactaacccaagcgaaggacttgggcccttaccaaaccctactgcaaataagccgcttgttgaggagttctccaaccccgaaacccaaaacctcgatgctatggaacaggtgggcctggaatctctccagtttgattatcccggaaaccaggttcctatggacagctctggcgcaactgtcggcttgttcgactataattcacaacagcagctgttccagcgtacaaacgctctcacggtgcagcagctcaccgccgcccagcagcagcagtatgcgctggccgccgcccagcagcctcactag

SEQ ID NO: 202056 - DNA, 3027 bp, synthetic construct
  misc_feature 1..3027: note = Description of Artificial Sequence: Synthetic coding sequence
  source 1..3027: mol_type = other DNA
atgagccagcccatcatggtgcagcggcggagcggccagggcttccatgggaacagcgaagtgaacgccattttgagtccccggagcgagtcgggaggactgggcgtgagcatggtagagtacgtgcttagtagctctcctgccgacaagcttgattctaggtttcggaaagggaacttcggtacaagggatgccgagactgatggtcctgagaagggtgatcagaaaggcaaggcctctccttttgaggaggatcagaatagggacctaaagcagggcgatgacgacgacagcaaaatcaacggaagggggctgccaaacggtatggatgcagattgcaaagatttcaaccggacccccggctctcgacaagcctcacctaccgaggtagtagaacggctgggtcctaacaccaatccgtcggaggggctgggaccattgccgaaccccaccgccaacaagccactagtggaagagttctctaatcccgagactcagaatctggacgcaatggagcaggttggcctcgagtcattgcaatttgattaccccggcaaccaggtcccaatggactcaagtggggccacagtgggtctgttcgactataactctcagcaacagctgtttcagcgcactaatgcgctgactgttcagcagttaactgctgcccagcagcagcagtacgctctggccgccgcacagcagccacatattgctggagtattcagtgccgggttggcccctgccgccttcgtaccaaacccatacatcataagcgcagctcctcctggtactgacccgtacaccgcagccggcctggcggcagccgccaccctcgcgggaccggctgtggtgccaccgcagtactatggagtcccatggggtgtgtaccctgcaaacctgtttcaacagcaagcagccgccgctgcaaataataccgcctcccaacaagcagcctctcaggcccagcctggccagcagcaggtgcttcgcgctggggctggacaaagacctctgacaccaaatcagggacagcagggtcagcaggccgaatctcttgcggcggctgctgcggcaaatccgacgctcgcatttgggcaaggactcgctaccggcatgcctggataccaggttttggccccgaccgcttactacgatcagaccggggcattggtggttggtcctggcgctcgtacggggctcggagccccagttcggcttatggcacctacaccagtgctcatctccagtgccgctgcgcaggcggcggcggcggctgcggctggaggaaccgccagctcactgactggctccactaatggactgttcaggccaatcggtacccagcccccccagcaacagcagcagcaacctagcacaaatctgcagagcaactctttctacggctccagctctcttacaaacagcagtcagtcctcctccctattctcacatggccccggacagccgggctccactagcctgggattcgggtcaggaaatagtctgggtgcagccatcggctccgcactctcgggattcggcagcagtgtgggcagttccgcttctagttccgcgacaaggcgtgaatctctgagtacgtcctccgacctctacaagcgctcgagtagttctcttgctcccatcggccagcccttctacaactcactgggattctccagcagcccttcaccaatcgggatgcccctcccttcccagaccccagggcacagcctgaccccccccccctcgctctctagccacggttccagtagttccctgcatctgggagggctgaccaacgggagcggtaggtatatctctgctgccccaggcgcagaggcaaaatacagaagcgcgtcgagcacttcttcattgtttagctcgtcatcccagctcttcccccctagccgactccgatacaacaggtccgatattatgcccagtggtcgctctcgacttcttgaagactttaggaacaaccgtttccccaaccttcagctcagggacctgattgggcatattgtggagttctcacaggaccagcacggatctagatttattcagcagaaattggaacgggcaacccccgctgaaagacagatggtcttcaatgagatcctacaggctgcttatcaactgatgactgatgtgttcggcaactacgtgatccagaaattctttgaattcggtagtctggatcagaaattggcactggctactcggattaggggtcatgtgctgccgctggccttacaaatgtatggatgtcgagtgatccaaaaggccctcgagtcaatttcatcagaccagcagtctgaaatggtgaaagagctagatggtcacgtgttaaagtgtgtgaaggaccagaatgggaatcacgtcgtgcagaagtgcatcgagtgcgtccaaccacagagcttgcaatttattattgatgctttcaagggccaggtgttcgtgctctcaacacacccttacggatgcagagtcattcagagaatccttgaacattgcactgccgagcaaactctccccatcctggaggaactgcatcagcatactgagcagctggtccaggatcagtacggaaactacgtgatccagcatgtgctggagcacggccggcctgaggacaagtcaaagatcgtgtccgagatccgaggcaaagtgctcgccctgtctcagcataaatttgcctcgaacgtggtggagaagtgtgttacacacgcgagccgggccgaaagagccctactgattgacgaggtgtgctgccaaaatgatggtccccactctgccctctacacaatgatgaaagaccaatatgcgaattacgtggtccaaaagatgattgacatggcagagccagctcagcgcaagatcatcatgcacaaaatccgcccgcacatcaccacactgagaaagtacacatacggtaaacacatcctcgccaaacttgagaaatactatctgaaaaactcaccagatctgggcccgatcggaggcccgcccaacgggatgctctag

SEQ ID NO: 202057 - DNA, 870 bp, synthetic construct
  misc_feature 1..870: note = Description of Artificial Sequence: Synthetic coding sequence
  source 1..870: mol_type = other DNA
atggagaacggctacacctacgaggactacaagaacaccgccgagtggctgctatctcacacgaagcacaggccacaggtggctattatatgtgggtctggactgggcgggcttacggataaactgacccaagcccagatattcgattatggcgaaatcccgaactttcccaggtccacagtcccaggccacgccggccgactcgtcttcggctttttgaatggaagagcatgtgtgatgatgcagggtcggttccatatgtacgaaggttacccgctgtggaaggtaacttttccggtgagagtgtttcatttgctaggagtggataccttagtagtgaccaacgcagcaggagggttgaatcctaagtttgaggttggcgatattatgttaatcagggaccacatcaatctgccagggttttcaggccagaacccactgaggggccccaacgacgagcgctttggtgataggttccccgccatgagcgatgcttacgatcggaccatgcgccagcgagcactgagcacctggaagcagatgggagaacagcgtgagcttcaggagggaacgtatgttatggtggctgggccttcatttgagaccgtcgccgagtgcagagtcttgcagaagttgggcgcagatgctgtcgggatgagtacagtcccagaagttatcgttgcccgccattgcggcctccgggtgttcggatttagcctcatcactaacaaagtgatcatggactatgaatccctggagaaagctaatcacgaagaagtactggccgctgggaaacaggcagctcagaaactcgagcaatttgtgtctattctgatggccagcattccattgcccgataaggcaagttag

SEQ ID NO: 202058 - DNA, 282 bp, synthetic construct
  misc_feature 1..282: note = Description of Artificial Sequence: Synthetic coding sequence
  source 1..282: mol_type = other DNA
atggagaacggctacacctacgaggactacaagaacaccgccgagtggctgcttagccatacgaagcataggcctcaggtggccattatatgcggaagtggtttaggcggcttaacagataagcttacacaggcacagatctttgactatggcgaaatacctaattttcctagatcgactgttcctggacatgcaggaaggctggtatttggcttcttgaatggccgcgcttgtgtgatgatgcagggtcgcttccacatgtatgagggataccctctctag

SEQ ID NO: 202059 - DNA, 375 bp, synthetic construct
  misc_feature 1..375: note = Description of Artificial Sequence: Synthetic coding sequence
  source 1..375: mol_type = other DNA
atgagctacatccccggccagcccgtgaccgccgtggtgcagcgggtggaaattcataaacttaggcagggagaaaacttaatcctcggattcagtatcggaggtggcatcgaccaggacccctcccagaacccattttccgaggataagaccgacaaaggcatctatgtaacgcgggtctctgaaggaggcccagccgagattgcagggctgcagattggcgacaaaataatgcaagtaaatggatgggatatgacaatggtgactcacgaccaggcacgcaagaggctcactaaacgaagcgaggaggtggtaaggttactggtcactagacagtcgttacaaaaagcggtgcagcaatccatgctgagctag

SEQ ID NO: 202060 - DNA, 1194 bp, synthetic construct
  misc_feature 1..1194: note = Description of Artificial Sequence: Synthetic coding sequence
  source 1..1194: mol_type = other DNA
atgaactgcatcagcgacttcttcacctacgagaccaccaagagcgttgttgtgaaaagttggactattggaatcattaatagagttgttcaactgctgattatctcttacttcgtcggatgggtgtttttgcacgaaaaggcctaccaggtgagagatactgctattgaatcaagtgtggtaacaaaggtgaagggcagtggactatacgctaatcgagtaatggatgtatctgactatgtcactcctccgcagggtacctcagtgtttgttattataaccaagatgatagtcacagaaaatcagatgcaggggttttgccccgagtcagaagagaagtatagatgcgtgtccgattctcaatgcggccctgaacgcctgccaggtgggggcattctgacgggaagatgcgttaattactcctccgtgttgagaacgtgtgagattcaaggctggtgtccgacagaggttgataccgtagagacccctatcatgatggaagcggaaaactttacgatcttcattaaaaacagtataagattccctttatttaacttcgaaaagggcaacctgctgccaaacctgacagccagagatatgaagacttgcagatttcacccagacaaggaccctttttgccccatcctgcgagtgggcgatgtagtcaaattcgccgggcaggatttcgcgaagttggctagaacgggcggagtgcttggaataaaaatcggttgggtgtgtgaccttgacaaagcctgggaccagtgtatcccaaaatactcatttacacgcctcgacagcgtgtccgagaaatcatccgtctcccctggatataacttcaggttcgccaagtactacaagatggaaaacggttcagaataccggacattactgaaggccttcggcattcgcttcgatgtgttagtgtatggaaacgcaggaaagtttaatatcataccaactataatctcttccgttgcagcttttaccagcgtcggagtgggcacagttctttgtgacatcattctcctgaacttcctcaagggcgcagaccagtacaaagctaagaagttcgaagaggttaatgagaccaccttaaaaatagcagctcttactaaccctgtatacccctccgaccagactacagctgaaaagcagagcactgacagcggcgcttttagcatcgggcattag

SEQ ID NO: 202061 - DNA, 1191 bp, synthetic construct
  misc_feature 1..1191: note = Description of Artificial Sequence: Synthetic coding sequence
  source 1..1191: mol_type = other DNA
atgaactgcatcagcgacttcttcacctacgagaccaccaagagcgtagtagtcaagtcgtggactatagggatcattaaccgagtcgtacagctgctgattatcagttattttgtgggctgggttttcttgcacgaaaaagcctaccaagtccgggataccgccattgagtcatccgtggtgaccaaggtcaaaggtagtggcctctatgccaaccgcgttatggacgtttcggactacgtgacccctcctcagggaaccagtgtgtttgtgatcattacaaagatgatcgttaccgagaaccagatgcaaggattttgtccggagtccgaggagaagtacagatgcgtaagtgacagccagtgtggcccagaacggttgcccgggggaggtatcctcacaggacggtgtgtcaactatagtagtgtcctgcgcacctgcgaaatccaagggtggtgccccacagaagtggatactgtggagactcctattatgatggaggcagaaaatttcaccatatttattaaaaactcaatcagattccccctgttcaacttcgaaaaaggaaatttgctgcccaatcttaccgcgagagacatgaaaacctgcaggttccatccagacaaggacccattctgtccaatccttcgagtcggggatgtggttaagttcgccgggcaggacttcgctaagctggctcgcacgggcggggtcctcggaataaagatcggctgggtgtgcgatcttgataaagcttgggatcagtgcataccaaagtacagtttcacgcgtttagactctgtgtcagagaagtcttctgtgagtcccggatataactttagattcgcaaaatactacaaaatggagaatggctccgagtatcggactctccttaaagcatttggcattaggtttgatgtgctgtatacaggggcggggaagtttaacatcattccaaccatcatcagtagcgtggctgctttcactagcgtaggagtgggcactgtcctctgtgatattattcttttgaatttcctaaagggggccgaccagtataaagccaagaagttcgaggaggttaacgagacgactctcaaaatcgcggccctcacaaacccagtgtacccctccgaccagactactgcagagaaacagtccaccgatagcggcgcttttagcatcggccactag

SEQ ID NO: 202062 - DNA, 1167 bp, synthetic construct
  misc_feature 1..1167: note = Description of Artificial Sequence: Synthetic coding sequence
  source 1..1167: mol_type = other DNA
atggccggctgctgcgccgccctggccgccttcctgttcgagtacgacactcccaggatcgttctgattagatcacgaaaagtgggcttgatgaatagagccgttcaactcctaattttagcttacgtcataggctgggtctttgtgtgggagaagggttaccaggaaaccgactctgtggtttccagcgtcactactaaggttaaaggcgtggcagtgacgaacacatctaagcttgggtttaggatctgggatgtggcagactatgtgattccggctcaggaggaaaacagcctcttcgttatgaccaacgtgatactgacaatgaaccaaacacagggcctctgcccagagatccctgacgccacaacagtgtgtaagtccgatgctagctgtacagccggctccgccggaacacactctaatggggtgtccaccgggagatgtgtggccttcaacggatccgttaaaacatgcgaggttgccgcctggtgccctgtggaagacgacacccacgtccctcaaccagcatttctgaaagctgctgagaattttaccctcctggtcaagaataatatttggtatcctaagttcaacttcagtaagagaaacattcttcctaatataaccaccacttacctgaagagctgcatctatgacgccaagacagatccgttctgtccgatcttccgtctgggcaaaatagtggagaacgccggccactcctttcaggacatggcagtggaaggaggaatcatgggcatacaagtgaactgggattgcaacctggaccgggccgcgtcactgtgcttaccacggtactcctttcggcgattagatacccgggatgtggaacacaacgtcagtcccggatataattttaggtttgccaaatattacagagacctggctgggaatgaacagagaacactgatcaaagcgtacggaatccgattcgacattatcgtgttcgggaaggccgggaaatttgacatcatcccgacaatgattaatatcggctcagggcttgccctcctcggcatggccaccgtgctttgcgacattatagtgctgtactgtatgaaaaagcggctgtactatcgtgaaaagaaatacaagtatgtcgaggactatgaacagggcctggcctcagagctggaccaatag

SEQ ID NO: 202063 - DNA, 1215 bp, synthetic construct
  misc_feature 1..1215: note = Description of Artificial Sequence: Synthetic coding sequence
  source 1..1215: mol_type = other DNA
atggccggctgctgcgccgccctggccgccttcctgttcgagtacgacactcccagaatcgtcctgattagaagtagaaaggtgggactaatgaatagagccgttcaactcctaatcctggcctacgttattggatgctaccacccccacctggctgaagtggaaatggagagtcctcggagatgggtttttgtctgggaaaagggttaccaggaaactgactctgtggtgagtagcgttaccaccaaggtcaagggcgtagccgtgacaaacacgagtaaattaggattcaggatctgggacgtggctgactacgtgatcccagcacaggaggagaactcgttgtttgtaatgacaaatgtaatattgacaatgaatcagacacagggactgtgtccagagatcccagatgccacaactgtctgcaagagcgatgcaagttgcacggccggaagtgctggtacacactccaatggggtgtcgaccgggcgttgtgtggcctttaacggctcagttaaaacatgtgaagtcgccgcatggtgtcccgtggaggacgatacccacgtcccgcagccagcctttctgaaggccgccgaaaattttaccttactcgtgaagaacaatatctggtaccccaaattcaacttcagtaaacgaaacatcctgcctaacatcaccactacatacttgaaatcctgcatttacgatgccaagacagaccctttttgcccaatatttaggctcggaaagatcgtggagaatgcagggcacagtttccaggacatggctgtcgaaggcggcattatgggaatccaggtgaactgggattgtaatctagatagggctgcttccctgtgcctgcctagatactcattcagacggctggatacacgggacgtggagcacaatgtctccccaggctacaactttcgatttgccaagtactatcgggatctggcggggaatgaacagagaactctcatcaaagcttatggtatcagattcgacattatagtgtttggcaaggcaggcaagtttgacatcatcccaaccatgattaatattggttccggactggctctgctgggaatggcaacagtcttgtgcgatataatcgtgttatattgcatgaagaaaaggttgtactaccgggagaagaaatataagtacgttgaggactatgaacagggactggccagcgaattagatcagtag

SEQ ID NO: 202064 - DNA, 441 bp, synthetic construct
  misc_feature 1..441: note = Description of Artificial Sequence: Synthetic coding sequence
  source 1..441: mol_type = other DNA
atggccggctgctgcgccgccctggccgccttcctgttcgagtacgacacgcccaggatagtgctcattcgatctaggaaggttggccttatgaatagggccgtgcagctccttatcctggcatacgtgatcggctgggtctttgtatgggaaaagggctaccaagagactgacagcgtcgtatcgtctgtcacaacaaaggtcaagggagtcgccgttactaatacgtcaaagctgggctttcgaatttgggatgtcgctgattatgtgatacctgcacaggaggaaaatagcctgtttgtgatgaccaatgtcatcttaacgatgaaccaaacacaggggctgtgcccggaaatccctgatgcaacaaccgtttgcaagtctgacgcctcctgcactgccggttcggctgggacgcattctaacgacttgctcttctag

SEQ ID NO: 202065 - DNA, 1086 bp, synthetic construct
  misc_feature 1..1086: note = Description of Artificial Sequence: Synthetic coding sequence
  source 1..1086: mol_type = other DNA
atggccggctgctgcgccgccctggccgccttcctgttcgagtacgacaccccccgcattgtattgatccgcagcagaaaagtgggtttgatgaatagggctgtgcaactgcttattttagcatacgttatcgggtgggtcttcgtctgggagaaagggtatcaggagaccgactcggttgtgtcatccgttaccactaaggtcaaaggagtggcagtgacaaatacctctaagctcgggtttcggatatgggacgttgcggactatgtgattcccgcccaagaagagaactcactatttgttatgacaaatgtgattctcactatgaaccagacacagggattgtgcccagaaattcccgacgctacaacggtctgtaaatccgatgcctcttgcactgctggttccgccggcacgcacagcaacggcgtctcgacaggacgccctgcattcctgaaagctgctgagaatttcactctgctggtgaaaaacaacatttggtacccgaaattcaatttctctaagcggaatatcctgcccaacatcacgactacttacttgaagtcgtgtatttacgatgctaagacagacccattctgtcccatctttaggctcgggaaaatcgtggaaaacgctgggcactccttccaggatatggcagtggaaggcggcatcatgggaatccaggttaactgggattgtaacctggatagagcggcaagcctctgcctgcctcggtactcatttaggcggctagatacccgagacgttgagcacaatgttagccccggctacaatttccggttcgccaaatactatcgtgaccttgccgggaatgagcaaagaaccctgattaaggcttacggaattaggtttgatatcatcgtattcggaaaggctggcaaattcgacattatcccaactatgataaatattggatccggactggccttactgggaatggctacagtgctgtgtgacatcattgtgctttattgtatgaaaaagcggctgtattatcgtgagaagaagtataaatacgtagaagactatgagcaaggacttgcctccgagttggatcagtag

SEQ ID NO: 202066 - DNA, 864 bp, synthetic construct
  misc_feature 1..864: note = Description of Artificial Sequence: Synthetic coding sequence
  source 1..864: mol_type = other DNA
atgaccaacgtgatcctgaccatgaaccagacccagggcctgtgccctgagatcccagacgccaccacagtgtgcaagtccgacgcatcctgtaccgccggctccgctgggacacacagtaatggcgtcagcacaggaagatgtgtggccttcaatggttccgtcaaaacttgtgaggtcgcagcctggtgccctgtggaggatgacactcacgtgccacagcctgccttcttgaaagctgctgagaatttcacccttttagtgaagaataatatctggtaccccaagttcaatttcagcaagagaaacatactgcccaatattacaacaacctaccttaaatcctgtatatatgacgctaaaactgacccattctgccctatttttcggctgggcaaaatcgtagagaacgcaggacactctttccaggacatggccgtggaaggcggcatcatgggcattcaggttaattgggactgtaacctggatagggccgcatccctgtgtttaccaagatactcatttcgaaggctggacacacgggatgtcgaacataacgtaagccctgggtacaattttaggttcgccaagtactaccgagatctggccgggaacgaacagcgcaccctgatcaaggcttacggtattcgcttcgatattatcgtgttcggaaaggccggtaagtttgacatcattccgaccatgatcaatatcgggagcggactggcattgctcggcatggccaccgttctgtgtgacatcatagtcttgtactgtatgaaaaagcgcctctattatagggaaaagaaatacaaatatgtcgaagactatgaacagggcctggcatccgagctagatcagtag

SEQ ID NO: 202067 - DNA, 1278 bp, synthetic construct
  misc_feature 1..1278: note = Description of Artificial Sequence: Synthetic coding sequence
  source 1..1278: mol_type = other DNA
atggacggccccgccgagcagcggcccgccctgctgaacagcgccgagaacttcacggtgctcataaaaaacaacattgacttccccggtcataattataccactaggaatattctccctggccttaacatcacatgcactttccacaagacacagaatccgcagtgccctatatttagactgggggatatcttcagagagacgggcgacaacttttccgacgtggcaattcagggcggaataatgggcatcgagatctattgggactgcaaccttgatcgatggtttcaccactgccgccccaaatatagtttcagaaggctggacgacaagaccaccaacgtcagtttgtatccggggtacaactttagatatgccaagtactacaaagagaacaatgtagagaaacgcacacttatcaaggtcttcggaattcggtttgatattctggtgtttggtacaggcggtaaatttgacattatccaactggtggtttatattggctcgacactctcatatttcggcctggctgcggtgtttatcgatttcctgattgacacctactccagcaactgttgccgctcgcacatatatccatggtgtaaatgctgtcagccatgtgtcgtcaacgaatactactatcggaagaagtgtgagagcattgtagaacccaaacccacactgaagtacgtgtctttcgtggacgagtctcacattcggatggtgaatcagcagttactgggacgctccctgcaggatgtgaaaggccaagaggtgccccgcccagcgatggatttcaccgatcttagtcgcctaccgcttgcactgcacgatactccacctatccctggccagcccgaagaaatccagctgttacgcaaggaggcgacaccgcggagccgggacagccctgtttggtgccagtgcggtagctgccttcccagccaattacccgaaagccatagatgcctcgaagagctgtgttgtcggaaaaaacctggagcatgtattacaacaagcgagctgttccgcaagcttgtgctgtcccggcacgttctgcagttccttctgttgtaccaagagccccttttggctcttgacgtagatagcactaattctaggttgcgtcactgtgcttataggtgttacgccacatggcggtttgggtctcaggacatggcagatttcgccaacctcccatcttgctgtcgatggcgcattcggaaagaatttccaaaaagcgagggacaatattccggcttcaagagcccttactag

SEQ ID NO: 202068 - DNA, 828 bp, synthetic construct
  misc_feature 1..828: note = Description of Artificial Sequence: Synthetic coding sequence
  source 1..828: mol_type = other DNA
atgcccgcctgctgcagctgcagcgacgtgttccagtacgagaccaataaggtcactcggattcagtcgatgaactacggtacaattaagtggttctttcatgtaattatattctcttacgtgtgctttgcgctcgtctccgataaactttatcagagaaaggaaccagtgatttcctctgtgcatacaaaagttaagggtattgcagaagtcaaagaggaaatagttgaaaacggggtgaagaaattggtccatagtgtcttcgatacagccgactatacctttccgcttcagggtaatagcttttttgttatgaccaacttccttaagactgagggccaagagcagagactctgtcccgagtacccaactcggcgtacactgtgtagcagtgacagaggatgcaagaaaggatggatggacccacagtcaaagggtatccaaacagggaggtgtgtcgtgtatgagggcaaccaaaaaacttgcgaagtttctgcgtggtgccctattgaggccgtggaggaagccccgcggccggccttgctgaacagtgctgagaacttcactgtactaatcaagaataacatcgacttccccggacacaattacactacgtacgcaaagtactacaaggagaataacgtcgagaagcggactctgataaaggtcttcggcattcggtttgatatacttgtgtttggcactggcggcaaatttgacatcattcaactggtggtttacatcggctctacactgagttatttcggtctggtgcgcgactctctcttccacgcattgggcaaatggtttggagagggctccgactag

SEQ ID NO: 202069 - DNA, 1518 bp, synthetic construct
  misc_feature 1..1518: note = Description of Artificial Sequence: Synthetic coding sequence
  source 1..1518: mol_type = other DNA
atgacccccggcgaccacagctggggcaacagcttcttcgtgatgacaaactttctgaaaaccgaaggccaggagcaacgcttgtgtcccgagtacccaacaagaaggaccttatgctcatcggatcggggctgtaagaaaggttggatggacccacagtccaaaggaattcagacaggacgctgcgtcgtttatgagggcaatcagaaaacctgcgaagtgtctgcttggtgccctatcgaagccgtagaggaggccccccgacctgccctcctcaattctgctgaaaatttcacggtgcttattaagaacaacattgacttccccggccataactatacaactcgtaacatactccctggacttaatatcacatgtactttccacaagacacagaatccccagtgtcccatctttcgcctcggcgacatcttccgcgaaaccggcgacaacttctcagacgtcgcaatccaagggggaataatgggaatcgagatctattgggactgtaacctggacaggtggtttcatcattgccgacctaaatattcattccgtcggctggatgataagacgacgaatgtgtctttataccctggctacaacttcaggtatgctaagtactataaggaaaacaacgttgagaaacgaacacttatcaaggtcttcggaattcggtttgatatcttggtgtttggtaccgggggaaagttcgatatcatccagctggttgtctacattggaagcaccctatcttactttggccttgctgctgttttcatcgattttctcattgatacctattcctctaactgctgccgttctcacatttacccttggtgtaagtgctgccagccgtgcgtggtgaatgaatattactatagaaaaaagtgtgagtcaatagttgagcccaaaccgaccctgaagtacgtatcatttgtcgatgagtctcatatcagaatggtaaatcagcagctgctgggtcgctctctgcaagacgtcaaagggcaggaagtaccccgtcctgccatggatttcaccgacctgagccggttgccattagctctccacgacacaccacccatacccggtcagcctgaagagatccagttattgaggaaggaagcaacccctaggtcccgtgatagtccagtctggtgtcaatgcgggtcttgcctaccatctcagctccctgaaagtcacaggtgtctggaggaactctgttgccggaagaagcccggagcgtgcatcacgacctcagagctttttcgaaaactagtgctgtcacgacatgtcctgcagtttcttctactctatcaggagccgctcttggcactcgatgtggattcaaccaattcaaggctgcgtcactgcgcttatcggtgttacgcaacctggagattcggtagccaagacatggccgattttgctaatctacctagctgttgtcgatggcgtattcggaaagagttccctaaatcagagggacagtacagtggctttaagtccccatattag

SEQ ID NO: 202070 - DNA, 387 bp, synthetic construct
  misc_feature 1..387: note = Description of Artificial Sequence: Synthetic coding sequence
  source 1..387: mol_type = other DNA
atgcccgcctgctgcagctgcagcgacgtgttccagtacgagaccaacaaagttacccgtatacagagtatgaactatgggaccattaagtggtttttccatgtgatcattttcagttacgtgtgcttcgccctcgtttcagacaagttgtaccagaggaaagaaccggtgatttcatcagtgcacaccaaagtaaagggaattgccgaggtcaaggaagagatagtagagaatggagtgaagaaactggtacattctgtatttgatactgcggactacacatttccactccagggcaacagcttttttgtcatgaccaacttccttaagacagagggccaggagcaaaggctgtgccctgaggagtttcggccagagggcgtttag

SEQ ID NO: 202071 - DNA, 921 bp, synthetic construct
  misc_feature 1..921: note = Description of Artificial Sequence: Synthetic coding sequence
  source 1..921: mol_type = other DNA
atgtggcagttccggtacgccaagtactacaaggagaacaacgtggagaaaagaacactgataaaagtcttcggcatcagatttgatatcttggtgtttgggactggtgggaaattcgatattatacagcttgtggtctacatcggctctacactgagctatttcggactggctgccgtgttcatcgatttcttaattgatacatactccagcaactgttgtagatcgcatatctatccatggtgcaaatgttgccagccatgcgtagtgaatgagtactattatagaaaaaaatgcgaatccatcgtggaacctaagcctacacttaagtacgtgtccttcgttgacgagagtcacatacggatggtgaaccagcagctgctggggcggagtctgcaggatgttaaaggccaagaggtcccaaggcctgccatggattttaccgacctttctcggctgccactagccctgcatgatacaccccctatccccgggcaacccgaagagatacagctgctgcgcaaggaggccacacctcgaagccgggactcacccgtgtggtgtcagtgtggctcttgtcttcccagtcagctacctgagtcccatcgctgcttggaagagctatgttgcaggaaaaaacccggcgcctgcataaccacttctgagctttttagaaagctggtgctgagccgccatgtgctgcagttcctcctgttgtaccaagagccccttttggcattagacgtcgattcaaccaacagccgcctccgtcactgcgcctaccgctgctacgccacctggcgattcgggtctcaagacatggccgatttcgccaatcttccgtcttgttgtcggtggaggattcggaaagagttccccaagagtgaaggccaatatagcggctttaagtcgccatattag

SEQ ID NO: 202072 - DNA, 387 bp, synthetic construct
  misc_feature 1..387: note = Description of Artificial Sequence: Synthetic coding sequence
  source 1..387: mol_type = other DNA
atgcccgcctgctgcagctgcagcgacgtgttccagtacgagaccaataaggtgacacggatacagtctatgaactacggcacaatcaaatggttcttccatgtaatcatcttttcatacgtgtgttttgccttggtgagcgataaactgtaccagagaaaagagccggttatctcctcggtgcacacaaaagtcaaaggtatcgccgaagtgaaagaggagatcgttgagaacggagtgaagaaactcgttcatagcgttttcgacacggctgattacacattcccgctgcaggggaatagtttctttgtcatgaccaactttttgaagacagaaggacaggagcagcgcctgtgccccgaggagtttcgccctgagggcgtgtag

SEQ ID NO: 202073 - DNA, 1788 bp, synthetic construct
  misc_feature 1..1788: note = Description of Artificial Sequence: Synthetic coding sequence
  source 1..1788: mol_type = other DNA
atgcccgcctgctgcagctgcagcgacgtgttccagtacgagaccaacaaggtaacaagaatccagagtatgaattatggaaccataaagtggttttttcacgttatcatcttctcctacgtttgttttgccctggtgtcggacaagctgtatcaaaggaaggagcccgttatcagctccgtacatacaaaggtgaagggcattgcagaagtgaaagaggaaattgtcgagaatggcgtgaagaagttggtccatagtgtttttgacacagcggactataccttccctcttcagggaaattcctttttcgttatgacaaacttcctgaagaccgaaggacaggagcagagattgtgcccagaataccctactcgtcgtacattgtgtagctctgaccgcggatgcaaaaaaggctggatggacccacagagtaagggaattcagacagggagatgcgtagtgtatgagggaaatcagaagacctgcgaggtaagcgcctggtgccccatagaagccgtagaagaagctccaagacctgctcttctcaacagcgctgaaaattttacggtgctgataaaaaacaatattgactttcctggtcacaactacactactagaaacattcttccagggctcaacattacctgcacctttcacaaaacacaaaacccacagtgtcctatttttcggcttggggacatcttccgggagacgggggacaacttcagcgacgtggccattcaagggggcatcatgggtattgagatttactgggattgtaatctagaccggtggttccatcactgcagacccaagtatagcttccgaaggctggacgacaagaccaccaacgtgtccctgtatccaggttacaatttccggtacgccaaatactacaaggaaaacaatgtggagaagcggaccttgatcaaggtattcggtatcagatttgatatcctagtgttcggcaccggcggcaaatttgatataattcagctggtggtctacataggctccacattatcatattttgggctggcagctgttttcatcgatttcctgattgatacatatagctccaattgctgcagaagccacatatatccttggtgcaaatgttgtcagccctgtgtagtgaatgaatattactatcggaaaaaatgcgaatctattgtcgaacctaagcctacactgaagtatgtgtcttttgtggatgaatcacacatccgcatggtaaaccagcagctgctaggcaggagtcttcaagatgtgaagggccaggaggttcccagacccgcaatggatttcacggacctgtctaggctaccactggctctgcatgacaccccgcctataccgggccaaccagaggagatccagctactgaggaaggaggccacaccgcgcagtcgggatagcccagtctggtgtcaatgtgggtcatgcctcccctctcagctgcccgaatctcatcgatgcctagaagaactgtgttgcaggaaaaagcccggagcctgcataacgacctctgagctgttccgaaaacttgtgctgtcccgccatgtccttcagtttctgctcctgtaccaggagcctctgctggctctggatgtggattccaccaactctaggcttagacactgcgcatatcgctgttatgctacttggcggtttgggagtcaggacatggccgacttcgccaatctcccgtcttgctgccggtggcggatcagaaaagagttcccaaagtctgagggccagtattccggattcaaaagtccatattag

SEQ ID NO: 202074 - DNA, 1122 bp, synthetic construct
  misc_feature 1..1122: note = Description of Artificial Sequence: Synthetic coding sequence
  source 1..1122: mol_type = other DNA
atgaccgaggtgctgtggcccgccgtgcccaacggcaccgacgccgcattcctggctggcccaggcagctcttggggaaactccacggttgcttccactgctgctgtgtcttcgtcctttaaatgtgcgctgacaaaaacggggtttcagttttactacctgcccgctgtatatattctcgtattcataatcggctttctggggaactccgtggctatctggatgttcgtgtttcacatgaaaccttggagtggcattagcgtgtacatgtttaacctggcacttgccgacttcctgtacgtactcactctccccgcgttaatcttctattacttcaataagaccgactggattttcggcgatgctatgtgcaagcttcagcgcttcattttccatgtgaatctgtacggcagcatcttgttccttacctgcatatcagctcaccgctacagcggcgttgtgtatccactcaagtcactgggaaggctcaagaaaaaaaacgcgatttgcatttccgtcctcgtgtggctgatagtggtggtggcaatctcacctattctcttttactctggtactggtgtccgcaaaaataaaacaatcacgtgttatgacacaacgtcagacgaatacttgcggtcttattttatttattccatgtgcaccactgttgctatgttttgcgtgcctcttgttttaatcctaggatgctatggcttaattgtgcgcgccttaatatataaagacctcgacaactcaccattgcgtcgcaaaagtatctacttagtcatcattgttttgacagtgtttgcggtgagctacattcctttccacgtcatgaaaacaatgaaccttagagctcgactcgactttcaaacacccgctatgtgcgcgtttaatgatagggtatacgctacctaccaggtcacacgcgggctggcatctcttaatagctgcgtggatccaatactttatttcctcgctggcgatacattccggcgacggctgtcccgcgccacaaggaaggcaagcaggagatccgaagcaaacttacagagtaaaagtgaagacatgacccttaatatcctgcctgagtttaaacaaaacggggatacctctttgtag

SEQ ID NO: 202075 - DNA, 1125 bp, synthetic construct
  misc_feature 1..1125: note = Description of Artificial Sequence: Synthetic coding sequence
  source 1..1125: mol_type = other DNA
atggccgccaacgtgagcggcgccaagagctgccccgccaacttcctggcggccgctgacgataagttgtccgggttccaaggagacttcctgtggccgattctcgtggtggagtttctagtagctgtggcaagtaacgggctggccctatatagattttcaatacgcaaacaacggccttggcatccagctgtcgtcttctctgtgcagttagccgtgagcgacctgctctgtgccttgacactcccgcccctcgccgcgtacctctatccccctaagcattggagatacggagaggctgcctgcaggctagagcgttttttgttcacctgcaaccttcttggaagcgtcatcttcataacctgtattagccttaacagatacctgggtatcgtgcacccattctttgctagatcacatctcaggccaaaacacgcctgggccgtgtcagctgccgggtgggtgctggccgctcttctggccatgcctaccctatctttctctcatctgaagcgaccccagcagggcgcaggcaactgctccgtggcacggccggaggcttgcattaaatgtctcggcaccgctgaccatggactagcagcctatcgggcatattctctggttctcgcggggttaggctgtgggctgccgttgctactcactttggccgcttacggcgccttgggccgggctgtgctcaggtctccaggcatgactgtggcggagaagctgcgcgtggcagcactcgtggcatccggcgtggcattatacgctagttcctacgtcccctatcacatcatgcgcgtgctgaatgtggatgcaagacgccgctggtccacacgatgcccatctttcgccgatatcgcccaggccacagccgccctggagttaggaccttatgttggctaccaagttatgcgtgggttaatgccgctagccttctgcgtgcaccccctcctctacatggccgccgttccgagcctcggatgctgctgccggcattgccctgggtacagggattcttggaatcccgaagatgccaaatcaaccgggcaggcccttcccctcaatgccaccgccgctccaaagccatcggagccacagtccagagaattgagccagtag

SEQ ID NO: 202076 - DNA, 1029 bp, synthetic construct
  misc_feature 1..1029: note = Description of Artificial Sequence: Synthetic coding sequence
  source 1..1029: mol_type = other DNA
atgcaggccgtggacaacctgaccagcgcccccggcaacaccagcctgtgtacccgggattataaaatcactcaggtactttttcctctactgtataccgtacttttttttgtgggcctgatcacgaatggcctcgcaatgcgaatattctttcagatcagatccaagagcaatttcataatcttcttgaagaacaccgtcatcagtgatctcctgatgatcctcacttttcctttcaagatcttgtccgatgcaaaactggggaccggaccactgcgtaccttcgtgtgccaggtaacctccgttatattttacttcactatgtatatctccatctcctttctcggcctcattacaatagacaggtaccagaagacaacccgcccattcaagacttctaaccctaaaaatcttctaggtgccaagatcctgtctgttgtgatttgggccttcatgtttctgctcagcctgcctaacatgattttgaccaaccgacagccccgcgataaaaacgtgaaaaaatgctcgttcctgaagagcgagttcggcctggtctggcacgagatcgtaaattatatctgccaggtcatcttttggatcaactttctgatcgtgattgtatgttatacactcatcactaaggagctgtacagaagttatgtccgcaccagaggggtgggtaaggtgcctcgtaaaaaggtgaacgtcaaggtttttataatcatcgcggtgttcttcatttgtttcgtgcctttccacttcgccagaataccatataccctctcccagactagagacgtcttcgactgcaccgccgaaaacacgctgttttatgtgaaagaaagtacactttggctgacgtcactcaacgcttgtttggaccccttcatctatttttttctgtgcaagtcattccggaatagcttgatatccatgctcaagtgcccgaacagcgccacatccttatcacaggataataggaaaaaggagcaagacggaggcgatccaaatgaggagacaccaatgtag

SEQ ID NO: 202077 - DNA, 738 bp, synthetic construct
  misc_feature 1..738: note = Description of Artificial Sequence: Synthetic coding sequence
  source 1..738: mol_type = other DNA
atgcaggccgtggacaacctgaccagcgcccccggcaacaccagcttgtgcaccagagactacaagattacacaagtgctattcccactcctgtatacagtactattttttgtcgggctgataacgaacggtctggccatgcgcatctttttccagattcgctcgaagtcgaactttatcatttttctcaagaacactgttatttctgacttgctgatgatattgacttttccattcaagattctatcagatgccaagctcgggaccggcccacttcgaacgttcgtctgtcaggttatattttggattaattttctgatcgttatcgtttgttatacgctgataacaaaagaactgtataggtcatatgtccgaacccggggcgtcggaaaagtcccacgcaagaaggtcaatgttaaggtgttcatcattatcgccgttttcttcatatgcttcgtcccattccacttcgcccgtatcccttatactctctcacagactcgagacgtctttgattgtacagcggaaaataccctcttctacgtgaaggagtctactttatggctgacatctctcaacgcttgcctggatccgttcatctactttttcctgtgtaaaagctttcggaactccctgatctccatgctgaagtgccctaactctgccacaagcctctcacaggacaacaggaaaaaggaacaggacgggggcgatcccaatgaggagacgcctatgtag

SEQ ID NO: 202078 - DNA, 1134 bp, synthetic construct
  misc_feature 1..1134: note = Description of Artificial Sequence: Synthetic coding sequence
  source 1..1134: mol_type = other DNA
atggccgccgacctgggcccctggaacgacaccatcaacggcacctgggatggagatgagctgggatacagatgccggttcaatgaggactttaagtacgtgctccttccggtgtcatacggcgtcgtttgcgtcccagggctgtgtctgaacgccgtcgcactgtacatcttcctctgtcggttgaagacctggaatgcttcgacaacttacatgtttcacctcgcggtgtcggatgccttatacgctgccagcctgcccctgctggtttattactacgccagaggagatcactggcctttttcaactgttctgtgcaaactcgtccggttcttattttacacaaatctgtactgtagtatcctcttcctaacttgtattagcgtccataggtgtctcggggttcttcggcccttgcggagcctcagatgggggagagctcggtatgcacgccgggtagctggtgccgtctgggttctcgtactggcttgtcaagcacccgttctatactttgttaccacctcagcccggggggggagggttacctgtcatgacacgtctgcccccgagctgttctcccgctttgtggcatactctagcgtcatgcttggcctcttgtttgccgttcccttcgcggtcattctagtgtgctacgttctcatggcccgtagactgctcaagcctgcctatggaactagcggtggcctgccacgggctaagcgaaagtctgttcgcactattgctgttgtactggcggtgtttgccctatgcttccttcctttccacgttacaaggacattgtactacagcttccggtccttggacttatcttgccataccttgaatgctataaatatggcctacaaggtgacccgcccgctcgcaagcgcgaactcctgcctagatccagtactctacttcctggccggacagcgcttagtgaggttcgcccgcgacgctaaaccacccaccgggccatccccagctacccctgccaggcgacgactgggactgaggcggtctgaccgcaccgacatgcagagaattgaggacgtcctggggtcgagtgaagattcccgaagaacagaaagtaccccggctggctcagagaataccaaggatatacgtctgtag

SEQ ID NO: 202079 - DNA, 1134 bp, synthetic construct
  misc_feature 1..1134: note = Description of Artificial Sequence: Synthetic coding sequence
  source 1..1134: mol_type = other DNA
atggccgccgacctgggcccctggaacgacaccatcaacggcacctgggatggagacgagctcgggtaccggtgcaggttcaacgaagatttcaaatacgttctcctgccagtgtcttacggagtagtgtgtgtacctgggctgtgtcttaacgcagtcgcgctgtatatctttctgtgccgccttaaaacctggaacgcctctacaacgtacatgttccacttggccgtttctgacgctctgtacgctgcgagtctgccacttctcgtctactactatgcaagaggcgaccactggccattctcgaccgtactctgcaagttggtgcggttcctgttctacactaatctgtactgctcgattctgtttttaacttgtatatcagtgcatcgctgcctcggcgtgctgcgacccctccgaagcctcaggtggggcagagcccgctacgcaagaagggtggccggcgctgtttgggtgttagtgctggcctgccaagctccagtactgtatttcgtgaccacctcagctaggggcgggcgtgtgacgtgtcacgacacatcagccccggagttgtttagtcggttcgtcgcctatagtagtgtgatgctggggctcctctttgccgtgcctttcgctgtcatcctggtttgttatgtgctcatggcgcggcgattactcaagcctgcttatggtacatccggcggccttccccgcgccaaacggaaaagcgtccgcaccattgccgtagttttagccgtcttcgccctctgcttcctgccatttcatgtcacgaggaccctctactatagttttcgaagcctcgacctctcctgtcatacgctgaatgccattaacatggcctacaaggtcacaaggccgctcgcctcggctaactcctgtctggatcctgtgctttactttctggcgggccagagactggtcaggtttgcacgggatgccaagccccccaccggtccttctcccgccaccccagctcgcaggaggctgggactcaggcgttccgatagaaccgacatgcagcgaatagaggacgtcctggggtcctccgaggatagtcgaagaaccgagagcaccccggcgggtagtgagaacaccaaggacatccgcttgtag

SEQ ID NO: 202080 - DNA, 1134 bp, synthetic construct
  misc_feature 1..1134: note = Description of Artificial Sequence: Synthetic coding sequence
  source 1..1134: mol_type = other DNA
atggccgccgacctgggcccctggaacgacaccatcaacggcacctgggacggcgatgaactggggtacagatgtcgttttaacgaagatttcaagtatgtgctgctgcccgtttcctacggcgtagtttgcgtgcctgggctgtgcctgaatgccgtagcgctttacattttcctatgcaggcttaagacctggaacgctagcactacttacatgttccacttggccgtctcagatgcattatatgcggcatccttgccgctgcttgtttattactacgcgaggggggatcactggcccttctccaccgttctgtgcaagctcgtgaggttcctcttctacacaaacctgtattgttccattctttttctcacctgtatttccgtgcaccgctgcctgggggtgctgcggccactgcgcagtctgagatggggacgggccaggtatgccagaagggtggccggagccgtgtgggtcctcgtcctggcctgccaggcccccgtgctctattttgtgaccacatcggcccgaggcggccgggttacatgccatgacacgtctgctcctgagctgtttagtcgctttgtagcatattcatctgtcatgcttgggctgctgttcgccgtgccatttgccgtgattttagtgtgctatgtgttgatggcgcgaaggctccttaaacctgcgtatgggacctccggagggcttcctagggccaaacggaaatcggtgcgcacaatagcagtagttctggctgtattcgctttgtgcttcctgcccttccatgttacccgtactctatattactcattccgctctcttgaccttagctgtcatactctgaacgcaattaacatggcttataaggtcacccgtccattggcaagcgccaattcctgcctggaccccgttctgtattttttggccgggcagaggctagtgagattcgcccgtgatgctaagccgcctactggcccctcacctgccactcccgccaggagacggctggggcttagacgatctgacagaactgatatgcagagaatcgaagatgtattgggctctagcgaagattcccgtcgaactgagtcgacgcccgccggcagtgagaataccaaggatattaggctgtag

SEQ ID NO: 202081 - DNA, 1080 bp, synthetic construct
  misc_feature 1..1080: note = Description of Artificial Sequence: Synthetic coding sequence
  source 1..1080: mol_type = other DNA
atgcaggtgcccaacagcaccggccccgacaacgccaccctgcagatgctgcggaatcctgccattgctgtcgctctgcccgtggtgtacagccttgtggccgctgtatctattccgggtaacctgttttctctctgggtgttgtgtcggcgtatgggcccccggtctccctcagttatttttatgattaacctgtcagtgactgacctgatgctcgcctctgttctccctttccagatctattaccattgtaatagacaccattgggtgttcggcgttttgctctgtaatgtggtcactgtggctttttatgcaaatatgtattctagtatacttacaatgacctgcatctctgtggaacggtttctaggtgtcctgtaccccctcagtagtaaacgctggcgaaggcgcagatatgccgtggccgcttgcgcgggaacatggcttcttctgctcaccgccctgtccccactggcgagaaccgacctgacatatcccgtgcacgcattaggaatcattacctgcttcgacgtcctcaagtggaccatgcttccttctgtggcgatgtgggcggtgtttctgttcacaattttcattctcctctttctcatcccatttgtcattaccgtggcttgttataccgctactatattgaaactgctcaggaccgaggaagcccatggtcgcgaacagcgcaggcgggcagtggggctggccgcagttgtcctactggcgtttgttacttgcttcgcacccaacaatttcgtgcttttagcccacatcgtgagccgattattttacggaaaatcatactaccatgtgtataagctaaccttgtgcctgtcgtgtcttaataattgcctggatccattcgtctactatttcgcctctagagagttccagctcagattgcgcgaatatttggggtgccgaagagtcccacgtgacactctcgacactcggagagaatcattgttttctgcaaggacgaccagtgtgagatctgaggccggagcccaccctgaggggatggaaggcgccacccgccccggactgcagcggcaggagtcggtattctag

SEQ ID NO: 202082 - DNA, 189 bp, synthetic construct
  misc_feature 1..189: note = Description of Artificial Sequence: Synthetic coding sequence
  source 1..189: mol_type = other DNA
atgagcgagcggcagggcgccggcgccaccaacggcaaggacaagacatccggggagaatgacggccagaaaaaggtgcaggaagaatttgacatcgacatggacgcacccgaaaccgagagggccgctgtagcgatccagagccagttcagaaagttccaaaaaaagaaggcgggaagtcagtcttag

SEQ ID NO: 202083 - DNA, 1914 bp, synthetic construct
  misc_feature 1..1914: note = Description of Artificial Sequence: Synthetic coding sequence
  source 1..1914: mol_type = other DNA
atggccagcaacgagcgggacgccatcagctggtaccagaagaagattggcgcttacgaccagcagatttgggagaagagcatcgagcagacacagattaagggtttaaagaataaaccaaaaaagatgggccacatcaagcccgacctgattgacgtcgacttaatccgaggcagtacattcgcaaaagctaagcctgaaattccctggacctccttgaccaggaagggacttgtgagagttgtttttttccctctcttctcgaattggtggattcaggtcacttccctgcgaatctttgtgtggcttttgttgctgtatttcatgcaggtgatcgctatcgtcctctacctcatgatgcccatagtcaacatcagtgaagtccttgggcctctgtgtctgatgctgcttatggggactgtgcactgccagatcgtctcaacccagattaccagaccatcaggaaataatgggaacagaaggcgcaggaagctccggaagaccgtgaacggggacgggagcagagaaaatggcaataatagctccgacaaagtgagaggtattgaaaccttggaatccgtgccaattattggtgggttctgggaaaccattttcgggaaccgaataaagagagtcaagctgatttccaataaaggcacggaaacggacaacgatccgagttgcgttcacccaatcatcaagcggagacagtgtagaccagaaattagaatgtggcaaacccgggagaaagccaagttttctgacggagagaagtgtcgacgggaagcgttccgacgtcttggcaacggcgtgtctgatgatctgagctccgaggaggacggggaagccagaacacaaatgatcctattacgacggtccgtcgaaggggcttcctcagataacgggtgtgaggtgaagaatcgcaaatccatactctctcgacacctgaacagccaggtgaagaagaccacaactagatggtgccatatcgttcgcgactcagactctctcgcagaatcagagtttgagtccgccgctttcagccaggggtcaaggtccggcgtcagcgggggcagtcgatcattaaatatgagcaggcgtgatagcgagagtaccaggcacgactccgagacggaagatatgttatgggatgacctgttacatggaccggaatgccgatcgtccgtcaccagtgactctgaaggcgctcatgtcaatacgctgcactccgggactaagagagatcccaaagaagacgtgttccaacaaaatcatcttttttggctacagaatagcagcccttctagcgatcgggtcagtgccatcatctgggaaggcaacgagtgcaaaaaaatggacatgagtgtcctggaaatttccgggatcatcatgagccgggtcaacgcctaccagcagggcgtcggctatcagatgctcggcaatgtggtcacgattggactcgcattctttccattcttgcaccggctgtttcgggagaagtctctcgaccagctgaagagcattagtgccgaagaaattctcaccctgttttgtggggcaccaccggtgacgcccatcatcgtgttgtcgattatcaatttcttcgaacgtctctgtctgacctggatgttcttctttatgatgtgcgtcgccgagcgtacctataagcagcggtttctgttcgccaagctgttcagtcacataacgtctgctcgcaaggctcgtaagtatgaaatcccacattttcgcctcaagaaggtcgaaaatattaagatttggttgtcccttcgtagctatcttaagagacgaggcccacagcgttccgtggacgtggtcgtgagcagcgtgttccttctgactctctctatcgcattcatttgttgcgctcaggttaaggtgtcacacctcctgtag

SEQ ID NO: 202084 - DNA, 2130 bp, synthetic construct
  misc_feature 1..2130: note = Description of Artificial Sequence: Synthetic coding sequence
  source 1..2130: mol_type = other DNA
atggccagcaacgagcgggacgccatcagctggtaccagaagaagatcggggcttacgatcagcaaatttgggagaagtctattgagcagacgcagataaaagggctcaagaacaagcccaaaaagatgggccacattaagccagatctgattgatgtagacctgatcagagtcattgcaatagttctctaccttatgatgccaatcgttaatatctcagaggtgctgggtcctctttgtcttatgctcctaatgggtaccgtccattgccagattgttagtacccagatcactagaccttcaggtaacaacggcaacagacgcaggcggaaacttagaaagacagttaatggagacgggtctagggaaaatggtaataattcgtccgacaaagtcagagggatcgagacactggagtccgtgcctattattggcgggttctgggaaaccatatttggcaatcgaattaaacgcgttaaactaatctctaataagggcacggagacagataacgacccatcctgtgtccacccaatcatcaagcggcggcaatgtagacccgagattagaatgtggcaaactagggagaaggcgaagttcagtgatggtgaaaaatgcagacgtgaagccttcaggcgactgggaaatggcgtgtcagacgatctgtctagcgaggaagacggagaggcccgcacacagatgattctgttaagacggagtgtggagggcgcctccagcgacaatggctgtgaggtcaaaaatcggaaatcgattcttagccgtcacctcaatagtcaggtgaagaaaaccacaactcggtggtgccacattgttagagacagcgacagtcttgctgagtctgagtttgaaagtgcggccttttcacagggatcacggtcaggtgtgagcgggggcagcaggtctttgaatatgagccgacgggattccgagtccacacgtcacgactcagaaacggaggacatgctgtgggacgatctgctgcacggccctgaatgccgatcaagcgtcaccagtgattcagagggcgctcatgtgaacactctccactccggtaccaagagagaccccaaggaggacgtttttcagcagaatcacctcttctggttgcagaattcctcgccgtcctcagatagagtcagtgccattatttgggaaggaaatgagtgcaagaagatggacatgtcagtacttgagatcagcgggatcatcatgtcccgtgtcaacgcctatcaacaaggggtggggtatcagatgctgggtaatgtggtgactattggtctggcatttttcccattcctgcatcggctgtttagagaaaagtccctagaccaattaaaaagtatctcagccgaggaaatactcaccctcttctgtggagccccacccgtgacccccataatcgtgttgtctatcatcaactttttcgagaggttgtgtctcacgtggatgttcttctttatgatgtgcgtggccgagcgaacttacaagcagcgattcctcttcgctaaacttttcagtcacatcacatcagcccgaaaagctcgcaagtacgaaatcccccactttagattgaaaaaggtggagaatatcaagatctggcttagtctgcgttcctatttgaagaggcggggaccccagaggagcgtggatgttgtggtcagttcagttttccttcttaccttaagcatcgcgtttatttgttgcgctcaggtgctgcagggacataaaaccttcctgaatgacgcctacaattgggaatttttaatctgggagacagccttgctgctgtttctgctgcggctcgcctcactggggagtgaaacaaataaaaaatacagtaatgttagcattctgctgaccgagcagataaacttatatctgaagatggaaaagaagccaaataaaaaagagcagctaaccctcgtgaacaacgtgttaaagctgtctacaaagctccttaaggagcttgacactccttttagactgtacggcttgacaatgaacccactcatctataatatcacgagagtggtcatactctctgccgttagtggcgtgataagtgacctgctggggtttaatatccgtttgtggaagatcaaatcctag

SEQ ID NO: 202085 - DNA, 2154 bp, synthetic construct
  misc_feature 1..2154: note = Description of Artificial Sequence: Synthetic coding sequence
  source 1..2154: mol_type = other DNA
atggccagcaacgagcgggacgccatcagctggtaccagaagaagattggcgcctatgatcagcagatctgggagaagagtattgagcaaacgcagataaagggcctcaagaataaaccgaagaaaatgggacacataaaacccgacctcattgacgtggacttaatcaggggttccacctttgccaaagctaaacccgagattccctggacttctctgactcgcaaaggcttggtacgcgtggtattcttcccattgttctccaactggtggattcaggtgaccagcctgcgtattttcgtctggctactgctcctgtacttcatgcaggtcattgcaatcgtgctatatctgatgatgccaatcgtcaatatcagcgaggtcctgggacccctctgcctgatgctgctgatgggcacagtccactgccaaattgtgagcactcagatcacgagacccagcggaaacaatggtaatagacggcggaggataaaacgcgtgaaactgataagcaacaaaggcaccgagacggataacgaccccagctgtgtgcaccccataatcaaacgacggcagtgccggcctgagatccgtatgtggcagaccagggagaaagccaagttttcagacggtgagaagtgtaggcgggaggcatttaggcgcctggggaacggcgtcagcgacgacctttctagtgaagaggacggagaggcaaggactcagatgattctcctgcgccggtctgttgaaggcgccagcagcgacaatgggtgcgaagtcaagaataggaaatccatactatctcgtcaccttaactctcaggtgaaaaaaaccacgacacgctggtgtcacatcgtgcgagattccgactcacttgctgagtctgagttcgagtccgcagccttttctcaaggatcacgcagcggggtgtcaggtggctccagatcccttaacatgtcacggagggattccgagagcactcgccatgacagtgaaacagaggacatgctttgggacgacctcttacatggccctgagtgtcggtcctcggtcacaagcgacagtgagggagcccacgtgaacacattgcacagcggaactaagcgagatcctaaggaggatgtctttcaacagaaccatctgttctggctacagaacagctcaccgagtagcgacagagtctccgccataatttgggaggggaatgagtgtaagaagatggatatgtcagttctcgagatctcaggcatcatcatgagtcgagtgaacgcgtaccagcagggtgtgggatatcagatgctcgggaatgttgtaactatcggcctggcctttttcccctttctccataggctcttccgggaaaaatcacttgatcagctcaagagcatctccgctgaagagatcctcactctattttgcggagctcctcctgtgacacctatcatagtgctttcaattatcaatttcttcgaacgcctgtgtcttacatggatgttttttttcatgatgtgtgtagctgagcggacatataaacagagatttttgttcgccaagttgtttagccacatcactagcgcccggaaggcacgtaaatacgagattccccatttccgtttaaaaaaagtggagaatattaagatttggttgtctttgaggtcttacctgaagaggcgcggaccccagcgcagtgtggacgtagttgtctcctccgtattcctgctgaccctgtccatcgctttcatatgctgtgcacaagtgttgcagggacacaagacgtttctcaatgacgcttacaattgggagtttctgatctgggaaactgctctgctgctatttctcctacgattggcgagcttgggatcagagaccaataagaaatacagcaatgtgtctatattgcttacagaacaaatcaacctttatctgaaaatggaaaaaaaaccaaataagaaagaacagctgactcttgtgaacaatgtcctgaagctctctacgaaactgctgaaagagttggacacacctttccggctttatgggttgaccatgaatcccctgatctacaatattaccagagtcgtgatcttgtcagccgtttctggtgtcatcagtgacctgctgggattcaacatcagaatctggaagcattcttcttag

SEQ ID NO: 202086 - DNA, 2154 bp, synthetic construct
  misc_feature 1..2154: note = Description of Artificial Sequence: Synthetic coding sequence
  source 1..2154: mol_type = other DNA
atggccagcaacgagcgggacgccatcagctggtaccagaagaagatcggtgcgtatgaccagcagatttgggagaagagtattgagcagacacagatcaaaggtctaaaaaataagcctaaaaaaatggggcacatcaaacctgatctaattgatgtggacctgataaggggatcgaccttcgcaaaggctaagccagaaattccttggacatccttaactcgtaaagggcttgtgcgggtcgttttcttccccctgttttctaactggtggatccaggttacttctttacgaatctttgtgtggctgctccttctgtattttatgcaggtaatcgcaattgtcctttacttgatgatgcccattgttaacatatctgaggtcctggggcccctctgtctcatgctgttaatgggcacggttcactgccagatcgtctccacgcagattacccggcccagtgggaacaatgggaatcgcaggcgaagaatcaagagagtcaagctaatcagtaacaaaggcacagaaactgacaacgacccttcttgcgtgcatccaatcatcaagcggcgacagtgtaggcctgagataagaatgtggcagactcgagaaaaggccaagttctcggacggtgagaagtgtcgaagggaggcctttcgacgtcttgggaacggcgtcagtgacgacctgtcttcagaggaagatggtgaagcaaggacacaaatgattctgctgagaaggagcgtcgagggtgcctctagcgacaacggctgtgaggtaaaaaatcgcaaaagcatcctctctcgccaccttaactcccaggtcaagaaaaccacaactagatggtgtcacatcgtgagggacagcgacagtttagccgagtccgagtttgagtccgcggctttcagtcaggggtccaggtctggtgtgtcaggaggaagcagatcacttaatatgagtaggcgcgactcggaatctacgcgccacgattcggagaccgaggacatgttgtgggatgacttgcttcacggaccagagtgtcggtcatccgttaccagcgattctgagggggcccacgtgaataccctacatagtggcactaagagagatcccaaggaagatgtgtttcaacagaatcatctgttttggctgcaaaacagttcgccgtcaagtgatagggtgagcgctattatctgggaagggaatgaatgtaagaaaatggatatgagcgtgttagagatttccggtataatcatgtcccgggtaaatgcgtatcagcaaggcgtgggataccagatgttgggaaatgttgtgactataggccttgcatttttcccctttctgcataggctatttagggagaagagcctggatcagctcaagagtattagcgccgaagaaattcttactctcttctgtggggctcctccggtaactccgattatcgtgctctctattattaactttttcgaaagactgtgcctgacctggatgtttttcttcatgatgtgcgtggccgaaagaacctacaaacaaaggtttcttttcgccaagttatttagccacattacctcggcccgaaaagcaaggaaatatgaaattccacactttagactaaagaaagtggagaacatcaaaatctggctttcactgcgctcgtacctcaaaaggcgcggtccacagaggtcagtggacgtggtggtctcatcagtttttttgctgactctctccatcgcctttatctgttgtgcccaagtgctgcaaggacataagacctttctgaacgacgcttataactgggaatttttgatctgggagaccgctcttctcttattcctgttgagacttgccagcctgggttccgagaccaacaagaaatattccaatgttagtatcctgttgaccgagcagatcaacctctatttaaagatggagaaaaagccaaataagaaggagcagctcactctcgtcaacaacgtattgaagttgtccactaaactcttaaaggagcttgacaccccattccgcctgtacggcctgacaatgaatcccttgatatataacatcacacgggtggtcattctctccgcggtgagcggagtgatctcagacctactgggttttaacatccgcctgtggaaaatcaaaagctag

SEQ ID NO: 202087 - DNA, 2130 bp, synthetic construct
  misc_feature 1..2130: note = Description of Artificial Sequence: Synthetic coding sequence
  source 1..2130: mol_type = other DNA
atggccagcaacgagcgggacgccatcagctggtaccagaagaagattggcgcttacgatcagcagatctgggagaaaagcattgaacagacccaaatcaagggtttgaagaacaagccaaaaaaaatgggtcatattaagccagatctcatagacgtcgacctgatacgcgtaatcgccatcgttctgtacctaatgatgcccatcgttaatatatctgaggtgctgggcccactctgcctgatgctgcttatgggcacggtgcactgtcaaattgtctctactcagatcactaggccaagtgggaataacggcaatcggaggaggcgcaaactaaggaaaaccgtgaacggggacggatctagggaaaacggtaataattcgtctgacaaggtgcggggcattgaaaccctcgaatctgtacccatcattgggggattttgggagaccatcttcggcaaccgtattaagcgggtgaaactgatttcgaataagggcacagagaccgacaacgacccctcgtgtgttcatccaataataaagagaaggcagtgccggccagagatccgaatgtggcagacccgggaaaaggccaagttcagcgacggagaaaagtgccgaagggaggccttcaggagactcggtaatggagtctcagacgacctgagtagcgaggaagacggggaagcccgtacacagatgattctgttgcggagatccgtggagggcgctagctcagataatggctgcgaagttaaaaatagaaaaagcatactgtctcgccacctcaacagtcaggtaaaaaagaccacaacacggtggtgccatatcgtcagagatagcgatagtttggctgaaagtgagtttgaatctgcagctttcagccaaggcagccgttccggcgtgagcggagggagccgttcactgaacatgagcaggagagattccgagagtacccggcacgatagcgaaacagaggacatgctctgggacgatcttctgcatgggccagagtgtcgttcttccgtgacatcagactcagaaggggcccacgtgaataccctgcattctggtacaaaacgtgaccctaaagaggacgtatttcagcagaatcacctcttttggctccagaatagcagtccgagctctgacagggtctcagcaataatctgggagggaaacgaatgtaagaagatggatatgtcagtgctcgagattagcggaattataatgtctagagtcaacgcataccagcagggcgtggggtaccagatgctgggcaatgtggtcacaatcgggctggcctttttccccttcctccaccgccttttccgggagaaatccctagatcaattgaagagcatttccgccgaagagattctcacgctgttttgcggggcacccccagtgactccaattattgtgctgagcattattaatttcttcgagagactctgcctgacatggatgtttttcttcatgatgtgcgtggccgaacgcacttataagcagagattcctttttgctaaactattcagccatattacctctgcgaggaaggccaggaagtatgagatcccacatttcagattaaagaaagtggagaacatcaaaatctggctttctctcagatcatatcttaagaggcgggggccccagaggagtgttgatgtggtggtctcttccgtgtttctcctgaccctttcgattgcctttatatgctgtgcccaggtgcttcaaggacataagacattcctgaacgacgcttataattgggagtttctgatctgggaaactgctcttttattgttccttctgcggctcgctagcctggggagcgagaccaacaagaagtatagcaatgtgtccatcttactaactgaacaaattaacctgtacttgaaaatggagaagaaaccgaacaagaaagagcagttgacccttgttaataatgtccttaaactgagcactaagctgctgaaggaactggacacccctttcagactgtatggactcactatgaatcctctcatttataacatcacgcgggtggtgatcctgtcggcagtaagcggtgttattagcgacctcctcggatttaatatccggctttggaaaatcaagagctag

SEQ ID NO: 202088 - DNA, 2289 bp, synthetic construct
  misc_feature 1..2289: note = Description of Artificial Sequence: Synthetic coding sequence
  source 1..2289: mol_type = other DNA
atggccagcaacgagcgggacgccatcagctggtaccagaagaagatcggcgcttatgatcaacagatatgggagaagtctatagagcagacccagataaagggtcttaagaataagcccaagaaaatgggtcacattaagcctgatctgatcgatgtggatttgatacgcggctccacctttgcaaaagcgaagccagaaatcccctggacttctctcacacgcaaagggttagtgagagtggtttttttccctcttttcagcaattggtggattcaggtcaccagcttgcgcattttcgtgtggttacttttgctgtactttatgcaagtcattgccattgtcctgtaccttatgatgccaatagttaacatctctgaagtgctggggccattatgcctgatgctactgatgggaactgtccattgccaaattgtttctactcagatcactaggccctcagggaataacgggaacagaagacggcgtaaattgaggaaaacagtcaacggtgacggcagcagagaaaacggcaacaattcttctgataaggtgcgtgggatcgaaacccttgagtctgtccctattatcgggggcttttgggaaacgattttcggaaacagaatcaagagagtgaaattgataagtaataaaggcacagaaaccgataacgatccctcctgtgtgcacccaatcatcaagagacgccaatgccgcccagagatccggatgtggcagacacgcgagaaagccaagtttagcgacggcgaaaaatgtcggagggaggctttccgccggttgggcaacggggtcagtgacgatcttagttctgaagaagatggtgaggctaggactcagatgatcctgttgcgtcgctctgtggagggggcatctagcgataacggatgtgaggtgaagaatcggaaatccatcctctcacgacacctgaactctcaggtgaagaagactacgactaggtggtgccatatcgtgcgagactctgacagcttagcggaatctgagttcgagtcagccgctttctcccaaggcagccgcagcggtgtgagcggtggctctaggagtctaaacatgagtcgacgtgattctgagtctacacgtcacgacagcgagaccgaagacatgctatgggacgacctactgcatggaccggaatgccgcagcagtgtaactagtgactccgagggagctcacgtgaacaccttacattcaggaactaagcgtgatcccaaggaagacgtgttccagcagaaccacttgttctggttacaaaattccagcccatccagtgatagagttagtgctataatatgggagggaaacgaatgtaagaaaatggacatgtccgtcttggagatctctggcattattatgagccgcgtcaatgcctaccagcaaggagtgggatatcagatgctgggtaacgttgtcacaatcggtttggcgttttttcctttcctccacaggttgtttagggagaagagccttgatcagttaaaatcaatcagcgctgaagaaatcctcactctgttttgcggtgctcctccggttaccccgattattgtgctcagcattataaacttcttcgaaaggctctgtttaacctggatgttttttttcatgatgtgcgtggctgaaaggacatacaagcagaggttcctattcgccaagctcttcagccatattacgtcagccagaaaggcgagaaaatatgagattccacactttcggctgaaaaaggttgaaaacataaagatctggctgtcactgcgtagctacctgaagaggcgcggcccccagagaagtgttgatgtggtggtcagtagcgtgttcctcctgacactgagcatagcttttatctgctgtgctcaggtcttgcaaggacataagacctttctcaatgacgcttataactgggaattcctgatctgggagacagccttgctgttattcttacttaggttggcctcactgggttccgaaactaataaaaaatactcaaacgtgtctatcctgttgacagagcagatcaacctgtacttaaagatggagaagaaacccaataaaaaggaacagctgacccttgtgaataacgtcctgaaattatcaactaagctgctcaaggaactggataccccattcagattgtatggcctgacaatgaatcctctaatctacaatatcactcgcgtcgttatcttgagcgccgttagcggtgtgatttccgacctgcttgggtttaatataaggctctggaaaattaagtcttag

SEQ ID NO: 202089 - DNA, 2289 bp, synthetic construct
  misc_feature 1..2289: note = Description of Artificial Sequence: Synthetic coding sequence
  source 1..2289: mol_type = other DNA
atggccagcaacgagcgggacgccatcagctggtaccagaagaagatcggggcctacgatcagcaaatttgggagaagagcatcgaacagacacagatcaagggactcaaaaataagcctaagaaaatggggcatattaagcctgaccttatcgacgtcgatctgatcagggggagcactttcgcaaaggccaagcccgagatcccatggacttctctcactcgcaaagggctggtgcgcgttgtgttctttccattgtttagcaactggtggattcaagtgacatcgctgcgaatcttcgtgtggttactgctgttgtattttatgcaggtgattgcaatagtcctttacctcatgatgcccatcgtcaacatctcagaggtactgggcccactctgccttatgctgctgatgggaacagttcactgtcagattgtctctactcaaataaccagaccgtctggcaataacggaaataggcgtcgtcggaaactgagaaagaccgtaaatggtgatggctcccgcgagaacggcaacaattcctcggataaggtgaggggaatcgagaccctggaatccgtgcctattatcggtggtttctgggaaaccatctttggaaacaggatcaagcgcgtcaagctgatttccaacaaaggtaccgagacagacaatgatccatcttgtgtccatcccatcataaaacggcggcagtgcagaccagaaatacggatgtggcaaactcgagagaaggcaaagttttctgacggagaaaagtgtcgaagagaagctttccggaggttaggtaatggcgtgtcagatgacttaagctctgaggaagatggagaagctcgaacacagatgatactgctaagacgaagcgtcgagggcgcttcttctgacaatggctgtgaggtcaaaaatagaaagtcgatcctgtcccgtcatctgaacagtcaagtgaagaagaccacgacgaggtggtgtcacattgtgagagattcagactctttggctgagagtgagtttgaaagcgctgccttttctcaaggatctaggagtggcgtgtcaggggggtcgcgttccctgaacatgagccggagggattcggagtcaacgaggcatgacagtgagacagaggacatgctttgggacgatttattacatggcccagaatgcaggtcatccgtcaccagcgattccgaaggcgcacacgtgaacacgttgcacagcggtacgaaaagagatccgaaagaagacgttttccagcagaaccaccttttttggctgcaaaattctagcccatcttcagaccgagtcagtgccatcatttgggaagggaatgaatgtaaaaagatggacatgagcgtgttggagatttctggcattattatgtccagagtgaatgcctaccagcaaggagtcgggtatcagatgttgggaaatgtggtaacaatagggctcgctttcttcccatttttgcaccggctctttagagagaaaagcttggatcagctcaagagcatttcagcagaggaaatcttgacactcttctgcggcgctcccccagtgacgcctatcatagttctatccatcataaactttttcgagcgtctttgcctcacctggatgttcttttttatgatgtgtgtggctgaacggacgtacaagcaacggttcctgttcgctaagcttttctcacatattacctctgccaggaaggccaggaagtacgaaatcccgcacttccgactgaagaaggtcgagaatatcaagatctggctcagcctacgttcctacttgaagagaagaggcccccagaggtcagtggatgtcgtggtgtcctcagtgttcctgctcaccctgtcaattgcctttatatgttgcgcacaggtcctccagggccacaaaactttcttaaatgatgcttataactgggagttcctcatttgggaaacagcgctgctgctcttcctgttgcgcctggcatccctgggaagtgaaacaaataagaagtactcgaatgtgtctatattgctgaccgaacagattaatctgtatttaaagatggagaaaaagccaaataaaaaggagcaattaactttagtgaataacgtcctcaagttatcgactaagttactaaaagaattagacacgcctttccgtctgtacggcctcaccatgaaccctctgatttataatattactagggtagtcattctctctgccgtgtccggggtgattagtgacttgctcggtttcaatataaggctctggaagataaagtcctag

SEQ ID NO: 202090 - DNA, 996 bp, synthetic construct
  misc_feature 1..996: note = Description of Artificial Sequence: Synthetic coding sequence
  source 1..996: mol_type = other DNA
tgacagacccgggagaaggccaagttcagcgacggcgagaagtgccgccgggaagcctttagacgcctcggaaatggcgtgtctgatgatctgagttccgaggaagacggggaggctcggacccaaatgattctgttgcgacgatccgttgagggggcctcaagcgacaatgggtgcgaggtgaagaaccgtaagtctattttgagtcgccatctgaatagccaggttaaaaaaacgaccactagatggtgccacattgtgcgggactcagactcactggctgaaagtgagtttgaatctgcagccttctctcagggatctcggtccggcgtcagcggcggttcacggagtctgaacatgtctagacgagattctgaatctacaaggcatgacagcgaaaccgaagacatgctctgggacgacctcctgcacggccctgagtgtcgttcgagcgtgacttctgacagtgagggggcccacgtgaatactctgcactcaggaacgaaacgggacccaaaggaagatgtgttccaacagaaccacctgttctggctgcagaacagttctccatcctcagatagagtgtccgccattatttgggagggaaatgaatgcaaaaagatggatatgtctgtgctggaaatctcagggattattatgagcagagtcaatgcgtatcagcagggtgtgggctatcagatgctagggaacgttgtgaccataggcctcgccttcttccctttccttcacagattgttcagagagaagtccctggatcagctgaaatcaatcagcgcagaagagattcttaccctcttctgcggcgcaccacccgtcacaccaatcatcgtgcttagtattattaattttttcgaacgtctctgtctaacgtggatgttcttctttatgatgtgcgtagcggagaggacatacaagcaggtctctggcgagatccgtaagatcttctatttattcctttacatgatttttcattag

SEQ ID NO: 202091 - DNA, 318 bp, synthetic construct
  misc_feature 1..318: note = Description of Artificial Sequence: Synthetic coding sequence
  source 1..318: mol_type = other DNA
atggccagcaacgagcgggacgccatcagctggtaccagaagaagatcggtgcatacgatcagcagatctgggagaaaagtattgagcagacccaaatcaagggcctgaagaacaaaccgaagaagatggggcatataaaacctgatctcatcgatgtcgatctcattagaggcagtacattcgcgaaggccaaaccagagataccatggactagtctcacaagaaagggcttagttcgggttgtgtttttccccttatttagtaactggtggatacaggtgacctctctgcggatctttgtgtggttgctcttatag

SEQ ID NO: 202092 - DNA, 702 bp, synthetic construct
  misc_feature 1..702: note = Description of Artificial Sequence: Synthetic coding sequence
  source 1..702: mol_type = other DNA
atggccagcaacgagcgggacgccatcagctggtaccagaagaagatcggtgcatacgatcaacagatttgggaaaagagtatcgaacagactcagatcaaagggctcaagaataagccaaagaaaatgggacatatcaagccagacttaatagatgtagacctgatcagaggtagcacatttgctaaagctaagcctgaaatcccctggacatcactcacaagaaaaggcctggtgcgggtggtgttcttccctttattttcaaactggtggatccaggtgacctctctacgaatattcgtgtggcttctgctcctgtatttcatgcaggtgatagccatagtgctctacctcatgatgcctatcgttaacatcagtgaggtcttgggccctctgtgtctgatgctactaatgggcaccgttcactgccagatcgtatcaacccagattactagacctagcggtaataacgggaataggcggcgccgaaagctccggaaaaccgttaatggagatggctcaagagagaacggtaacaatagctccgataaggttcgcggcatcgaaacactggaatcagtgcccatcattggaggtttctgggagacaatttttggtaataggcgattactgggagtgtgggtaatgggttgtctgatgacgtgccaagtgaaaaaaatggttaaacacggccatcgttag

SEQ ID NO: 202093 - DNA, 2760 bp, synthetic construct
  misc_feature 1..2760: note = Description of Artificial Sequence: Synthetic coding sequence
  source 1..2760: mol_type = other DNA
atgaagttcgcctaccggttcagcaacctgctgggcaccgtgtacagacggggcaatttgaattttacatgtgacgggaactcagtaattagcccggtgggaaacagggtaacagttttcgacttgaaaaacaataagagcgatacccttccactcgcaacccgttataacgtcaaatgtgtgggactgagtcccgacggccggctggccatcatcgtggatgaaggtggcgacgctctactcgtttccctcgtttgtcgcagcgtgctgcatcattttcatttcaaggggtcagttcactcggttagcttcagcccagacgggaggaagtttgtggtaaccaaaggcaatatcgcacagatgtaccacgccccaggaaagaagagagagtttaacgctttcgtactggacaagacttatttcggcccctacgatgaaaccacgtgtatcgactggaccgatgactcgcgctgtttcgtggtcggcagcaaagacatgtccacttgggtgttcggcgctgagcgctgggataatcttatctactacgcactcggcggccataaggacgcgatcgtggcctgttttttcgagtccaacagtcttgacctgtatagtctgtctcaggatggggtgctgtgcatgtggcaatgcgacaccccacccgaaggcctgcgtctgaagccccctgcgggatggaaggccgatctgctgcagagagaggaagaggaagaagaggaagaagatcaggaaggtgacagagaaacaacaattaggggaaaagctacgcccgccgaagaagagaagacaggcaaagtgaagtacagcaggctggctaagtacttctttaacaaggagggggactttaataatctaactgcagccgcctttcataaaaaaagccatctcttggtaactggctttgcgtccggaatcttccacctgcatgaactgcccgaatttaacctaattcacagtttgtccatttcagatcaatcaatcgcatctgtagccattaatagctctggcgactggatcgcatttggctgctccggacttgggcagcttttggtttgggagtggcaatctgaaagctacgtgctgaagcagcagggccacttcaattccatggtcgcgctggcctattctccagacgggcaatacattgtgaccggcggagatgacggcaaggtcaaggtgtggaatactttaagcggattctgctttgttactttcaccgaacattcatccggggtgaccggggtgacatttacagcaactggctacgtggtggtcacatctagtatggacggcacagtgcgggccttcgaccttcacaggtatagaaattttaggacatttacttctccccgcccaactcaattctcctgtgtggctgtggacgcttcgggagagatcgtctctgctggagctcaagattctttcgaaattttcgtttggagtatgcagaccggaaggctgctcgatgtgctctccgggcatgaaggccctatatctggactatgcttcaatccgatgaaaagcgttctcgcatctgccagctgggacaagactgtacgtctttgggacatgtttgacagctggaggaccaaagaaactctggctctcacctccgacgcactcgcggttaccttcaggcccgatggtgccgaactcgcagtcgccacactgaacagtcagataaccttctgggacccggagaacgcggtccagacaggcagcatagaagggcgccatgacctaaaaacgggacggaaagagctggacaagataaccgctaagcatgctgctaaaggaaaggccttcaccgctctgtgttattccgccgatggacactctattctagctgggggtatgtccaagttcgtatgtatatatcatgtgcgcgaacaaatcttgatgaagcggtttgagatcagttgtaacctttccctcgacgccatggaagaattcctgaacaggcgcaaaatgaccgagttcggcaaccttgctctcattgatcaagatgcaggtcaggaggacggagttgcaatcccccttccaggcgtcaggaagggggatatgagttcacgccattttaaaccggagattagagtgacttccttgcgattttctcctaccggccgttgctgggccgcaaccacaacagaagggctcctgatttactctctggatacgcgagtgctatttgacccattcgagttggacacgtcagtcaccccaggcagagtgcgggaggccctgcggcaacaggactttacgcgggcaatcctaatggctctaagactgaatgagtcaaaacttgtgcaggaagccctggaggcggtgcccaggggggaaatcgaggttgtgacgagttctctaccggagctgtacgtcgagaaagtcctagagtttttggctagcagctttgaagtgagcaggcaccttgaattctatttgctgtggacccataagttactcatgctccatggtcagaagctgaagtccagggctggcacacttcttcccgtgatccagtttttgcagaaatccatccaacgccatctggatgatctttctaagctatgcagttggaaccattacaacatgcagtatgccctggcggtgagcaagcaacggggcactaagcggtcccttgaccccctgggctcggaagaggaggcagaggcctccgaagatgactctttacacctgttaggcggaggtggcagagactctgaagaagagatgctggcctag

SEQ ID NO: 202094 - DNA, 1686 bp, synthetic construct
  misc_feature 1..1686: note = Description of Artificial Sequence: Synthetic coding sequence
  source 1..1686: mol_type = other DNA
atggccttcatggagaagccccccgccggcaaggtgctgctggacgatacagttcccttgaccgccgccatagaggcttcacagagcctccagtcccacaccattgtccgccggtatagtgattttgacctgttaaacaacagtctgcaaatcgctggcctgtcactcccactgccccctaagaaactcatcggtaatatggaccgggagtttatcgccgagcgccaaaaagggctgcagaactatttaaatgtcatcaccactaaccatattctctctaattgcgaactggtaaagaaattcctggacccaaataattacagtgcgaattataccgagattgcgcttcagcaggtctctatgttctttcgatccgaaccaaagtgggaggttgtcgagccgcttaaagatatcggttggcggatcaggaagaagtacttcttaatgaagatcaagaatcagcccaaagagaggctggtcctttcttgggcagacttgggacccgataagtacttgtcagacaaggatttccaatgtctcatcaaactgcttcctagctgcctacatccttacatatatcgggtcactttcgccaccgccaatgagagctctgccctgctaatcagaatgtttaatgaaaaggggaccctcaaggatttgatttataaggccaaacctaaggacccttttttgaagaagtactgcaatccaaagaagatccaaggattggagctgcaacagattaagacctatggcaggcagattctcgaggttttgaaatttcttcatgacaaagggtttccatatgggcatttacatgccagcaatgtgatgttggacggcgacacatgtaggctcctggacctggagaattctctgcttggtctcccttcattttatcgatcatacttctctcaattcaggaaaataaatactctggagtctgttgatgtgcactgttttggtcatcttctctacgagatgacatacggccgaccaccagactcagttccagtggatagctttccccctgcacctagcatggctgtggtcgccgtgctcgagtcaactctgagctgtgaggcctgcaagaacggcatgccaaccatctctcgtctgctgcaaatgcccctcttttccgatgtgctcttgacaacatccgaaaaaccgcagttcaagattcccactaaactgaaggaggcattgaggattgctaaggagtgtatcgaaaaacgtctcatcgaagagcaaaaacagattcatcaacacaggagattgacaagggcccagtctcatcacgggtctgaagaagaacggaagaaaagaaagattctggcgagaaaaaaatctaaaagaagtgcgttggaaaactctgaggaacactctgccaaatattccaactcgaacaactccgctggcagtggagcgagctctcccctcacaagcccgtcaagtcccacacccccttccacctcagggatcagcgcgctaccccccccacccccaccacccccaccaccggccgctcccctcccccctgcctctacggaagctccagctcagctgtccagccaggccgttaacggaatgagtagaggtgccttgctgtcaagcatacagaacttccagaagggaactctcaggaaggctaagacttgtgaccacagcgccccgaagatcgggtag

SEQ ID NO: 202095 - DNA, 1737 bp, synthetic construct
  misc_feature 1..1737: note = Description of Artificial Sequence: Synthetic coding sequence
  source 1..1737: mol_type = other DNA
atggccttcatggagaagccccccgccggcaaggtgctgctggacgatacggttcctctgacagcggcaattgaagcttctcagagcctacagagccacacagaatatattatccgagtccagagagggatcagtgtcgagaactcctggcaaatcgttcgcagatattccgattttgatctgcttaataattcgttgcagatcgcagggctcagcctccccttacctcccaagaaactgatcggcaacatggacagggagttcattgctgagaggcaaaagggtctccagaactaccttaatgtgatcacaactaaccacatcctgtcaaactgtgagctggttaagaaattcctcgatccaaacaactacagtgccaattacacagaaatcgccctgcagcaggtctcaatgttttttcggagtgagccaaagtgggaggtggtagagccgctcaaggacatagggtggagaatccgcaaaaagtatttcttaatgaaaataaaaaaccagcccaaagagcgcctagtcctgtcttgggccgatctgggacccgataagtacctgagcgacaaggacttccaatgtcttatcaaactgttgccatcctgcctccacccctacatctaccgcgtgaccttcgctaccgctaacgaatcatcagcgctccttattcgaatgttcaacgaaaaggggactctgaaagatctcatctataaagccaagcccaaggatcccttcctcaagaagtactgtaacccaaagaagatacagggtctagagttacagcagatcaagacatacgggcgccagattctggaggtgctcaagttcctgcatgataaaggattcccttacggccatctgcatgccagcaacgtaatgctggacggggatacctgtcgcttacttgacctagagaattccctgcttggactgccttctttctatcgtagctacttctcacagtttcgaaagattaacaccctcgaatccgtagatgttcactgcttcggccacctgctttatgagatgacttacgggcgcccccccgatagcgtcccagtggatagttttccccccgcaccgagtatggctgtggtggccgtgcttgagtccacattgagctgcgaagcctgtaagaatggcatgccgactatctctcggttgctccagatgccgctgttttccgatgtgcttctgacaacctctgagaagccccaatttaagatccctacaaagctcaaagaggcactgcgaattgctaaggagtgtatagaaaagagactaattgaggagcaaaagcaaatacaccaacatcggcggctcacccgagctcaaagccaccatgggagtgaggaggagaggaaaaagcgtaaaatccttgcccgtaagaaatcaaagcgctcagctctagagaactcagaagaacattcagctaaatatagcaatagtaataacagtgctggatctggcgcgagcagtccacttacaagcccgagctcaccaaccccccctagcacctctggaatatcagcgcttcccccacccccccccccccccccaccccccgctgctcccctaccccctgcttctactgaggcccctgcacagttatcatcccaggcagtcaatgggatgtcgcgcggtgccctgctctcaagcattcagaactttcagaagggtacattacggaaggccaagacttgtgaccactctgcaccgaaaatcgggtag

SEQ ID NO: 202096 - DNA, 1638 bp, synthetic construct
  misc_feature 1..1638: note = Description of Artificial Sequence: Synthetic coding sequence
  source 1..1638: mol_type = other DNA
atggccttcatggagaagccccccgccggcaaggtgctgctggacgacaccgtgccattaaccgccgccattgaggctagccagtctttgcagtcgcataccatcgctggtctgtctctgccactccctccaaaaaagctcatcggcaatatggatcgagagttcatcgccgagaggcagaaaggactccaaaactatctgaacgttatcactactaatcacattctctctaactgcgaacttgtcaagaaattcttagatcccaacaattactccgctaactatactgagatcgctttgcagcaagtctccatgttcttcaggtcagagccaaaatgggaggtcgtggagccactcaaggatataggctggcgcattcggaagaagtatttcctaatgaaaattaagaatcagcctaaggagcgcctggttctttcatgggccgatttgggcccagataaatacctctccgacaaggatttccaatgcctgatcaagctccttccctcttgtttacatccatacatttatagagtgacattcgctaccgctaacgaatcttctgctctgctgatacggatgtttaacgaaaagggcactctgaaggacctgatttacaaagccaaacccaaagatcctttcctgaagaagtactgtaatccaaagaagatccaggggcttgaactgcaacagattaagacttacggtcgacagatcctggaggtgctgaagtttttgcacgataaaggtttcccttatgggcacctgcatgcttctaacgttatgctggacggtgatacctgccggctgcttgatctggaaaattctctattgggcttgcccagcttctatcgctcttatttttcccaattcaggaaaattaacactctggagagtgtggacgtgcattgcttcgggcacttgctgtacgaaatgacttacggccgaccacccgattccgtacctgtggattctttccctccagccccttcgatggccgtggtggccgttctggagtccacattatcatgtgaggcctgcaagaatgggatgcccaccatctccagactcctgcaaatgccactttttagcgacgtgctgctgaccacatcagagaaaccacagttcaaaatccctacaaagctaaaagaggctctcagaatcgctaaggagtgtattgagaagcgtttgattgaagaacaaaagcagatccaccagcaccggagactgacgagggcccagagccaccacggcagtgaggaggaacgcaagaagaggaaaattcttgccaggaagaaatccaagcgctctgccctggagaactccgaagagcatagtgcaaagtattccaactccaataattcagccggaagtggagccagcagcccgctgaccagccccagctccccaactcccccgtcgacctcaggcatctcagctctcccgcctccccctccacctcccccgccccccgctgcccctctaccacctgcttccaccgaagccccagcccagctctcatcccaggcggtgaacggcatgtccagaggagctctgttgtcaagcatccaaaattttcagaaagggacactcagaaaagctaagacttgcgatcactcagcacccaaaatcggctag

SEQ ID NO: 202097 - DNA, 1548 bp, synthetic construct
  misc_feature 1..1548: note = Description of Artificial Sequence: Synthetic coding sequence
  source 1..1548: mol_type = other DNA
atggccttcatggagaagccccccgccggcaaggtgctgctggacgacaccgtgcctctcaccgctgccatcgaggcctcccagtcgctgcaaagtcacactgaatacatcatcagggtgcagaggggaatcagtgtggagaatagttggcagatcgtccggcgatattctgacttcgatctcctgaacaactccctgcagatcgccgggctgtccttgccattaccccctaagaaactgatcggaaacatggatagggagttcatcgcagaaagacagaagggactccagaattacctcaatgttatcacgaccaaccacatcctctctaactgtgaactagtgaagaagttcttggatcctaataattactctgccaactacaccgaaattgcactgcagcaggtgtctatgttctttcgcagcgagcccaaatgggaggtggtggagcccctgaaggatatcggctggaggattagaaagaagtacttcctcatgaagattaagaatcagcccaaggaacgactggttctttcctgggcagacctgggacctgataagtacctgagtgacaaggatttccagtgccttatcaagttactgcctagctgtctacacccttatatttacagggtaaccttcgcgacagctaacgagtcatcagctctactgatcagaatgttcaacgaaaagggcaccctcaaggacttaatctataaagccaagcccaaagatccattcctcaagaagtactgcaatccaaagaaaattcagggcctggagctgcagcagattaagacatatggccggcaaattctcgaagtcctcaaatttctgcacgataaagggttcccctacggacatctgcacgcatccaatgtcatgctcgacggggacacatgcaggttgctagaccttgaaaattccctgttaggactcccaagcttctaccggtcatatttctcccagtttcgaaagataaacaccctcgaatcagttgacgtacactgttttgggcacctattatatgagatgacttacggtcgacctcccgatagtgtgccagtggactcattcccccccgccccaagtatggccgtggttgcggtattagaaagcacattgtcctgcgaggcctgcaaaaatggcatgccaacaatcagcagactgctgcagatgcctctgttcagtgacgtgctcctgaccacttctgagaagccccaatttaagatccctacgaaactgaaggaggccctcaggattgccaaggagtgcatcgagaaacgcctgatcgaggaacagaagcagatccaccagcaccgccgcctgactcgcgctcagtcacatcacggatctgaagaggaacgaaaaaaaaggaagatcctcgctcgtaaaaaatcgaaacggagtgccctggagaacagcgaggaacacagtgcaaagtactcaaactccaataactctgccgggagtggcgccagcagcccgcttacctccccaagtagccccactccaccatctacgagcgtggagcacgcacctttctag

SEQ ID NO: 202098 - DNA, 1326 bp, synthetic construct
  misc_feature 1..1326: note = Description of Artificial Sequence: Synthetic coding sequence
  source 1..1326: mol_type = other DNA
atgttcttccggagcgagcccaagtgggaggtggtggagcccctgaaagatattggatggagaatccgcaaaaagtattttctgatgaagattaaaaaccagccaaaggaacgccttgtgctgtcctgggctgatcttggacctgataaatacctctccgataaggattttcagtgtttgataaaattgctgccttcttgcctccacccatacatctacagagtcacctttgcgactgcaaatgaaagcagtgcacttctcatcagaatgtttaatgaaaagggtactttaaaggaccttatctataaggcaaaaccaaaggacccgttcctgaaaaaatactgcaatcctaaaaagattcagggtctggagttgcagcagattaagacttacggacggcagatactggaagtgttgaagtttcttcatgacaaagggttcccttacggccacctgcatgctagtaacgtgatgcttgacggcgacacctgtcgcctgcttgatcttgaaaactccctactgggcttgcctagcttctacaggtcgtatttcagccagttcaggaagatcaataccctggagtccgtcgatgtgcattgctttgggcatctgttatatgagatgacatatggacggcctccagacagcgtccccgtcgactccttccctcccgctccgtccatggccgtagtggccgtcctcgagagtacactctcttgtgaggcctgcaagaacggtatgcctactatctcacgcctcctgcagatgcctctcttctctgacgttcttctgactacgagcgagaaaccccagtttaaaataccaaccaaactcaaggaggctctccgaatagcaaaggagtgcatcgaaaagcgactcatagaggagcaaaaacagatacatcagcatcggaggcttactcgagctcagagtcaccacggctccgaggaggagcggaaaaagaggaagatcctcgcaagaaaaaagtctaagcgatcagcacttgaaaactcagaggaacactctgcaaaatattcaaattccaataactctgccggtagcggtgcatctagccccttgacttccccttccagccccacgcccccttccacaagcgggatttccgccctgccaccaccaccccccccccccccaccccctgcggccccactaccgcccgccagtacagaagctcccgcccagttatctagccaggcagtgaacggcatgtctcgcggtgcgctgctctcatcaatccagaattttcagaaaggaacattacgaaaggctaagacatgcgaccacagcgctccaaagattgggtag

SEQ ID NO: 202099 - DNA, 1005 bp, synthetic construct
  misc_feature 1..1005: note = Description of Artificial Sequence: Synthetic coding sequence
  source 1..1005: mol_type = other DNA
atgttcttccggagcgagcccaagtgggaggtggtggagcccctgaaggatattgggtggagaattagaaagaaatacttcttgatgaagataaagaatcagccaaaggagagactcgtcctgtcttgggcagacctaggtccagataaatacctgtcggataaagattttcagtgcctgatcaaacttcttccaagctgcttgcacccttatatataccgcgtaaccttcgcaactgcaaatgaaagtagcgctttgctcatacggatgtttaacgaaaagggaactttaaaggatttgatctacaaagcaaagccaaaagaccctttcctgaagaaatactgtaacccaaagaagatacagggtctcgagctccagcagattaagacttacgggcgacaaatcctcgaagtgctgaagttcctgcatgataagggctttccatacggtcacctgcacgcgagcaacgtcatgcttgatggcgatacctgcaggctcttagacctggaaaactcactccttggcctgccatcattctatcgaagttacttcagtcaattcaggaaaatcaacaccctcgaatcagtcgatgtgcattgcttcgggcacctgctgtacgagatgacctacggccggccacccgactccgtgcccgttgacagtttccccccagctccctccatggcggtggtcgctgtcctggaatccactctgtcttgtgaagcttgtaaaaacggcatgcctactatttccagacttctgcagatgcctcttttcagtgatgtgctgctgaccacttccgagaagcctcagttcaaaatacctacgaaactgaaggaggcattgcggatagcgaaggaatgcatcgagaagcgtttgatcgaagagcaaaagcaaattcaccagcaccggcggcttactcgggcccaaagtcatcacgggtccgaggaagaacgcaagaaaaaagatttcagttccaaagaagttaagactatctgcagctag

SEQ ID NO: 202100 - DNA, 1110 bp, synthetic construct
  misc_feature 1..1110: note = Description of Artificial Sequence: Synthetic coding sequence
  source 1..1110: mol_type = other DNA
atgaagagccccgagaagaagcggcggaagagcaacacccagggcccggcttactcgcacttgacagaattcgcccccccaccaaccccaatggtcgatcatcttgtggcctccaatccatttgaggatgacttcggagctccgaaagtgggggtggcggccccgcccttcctggggtctcccgtgccattcgggggctttagggttcagggaggaatggcaggccaagtcccacccggctactccacaggcggggggggggggccccaacctctcagaagacaaccgccacctttccctccgaatccgatgggacctgcgttcaacatgcccccccagggacctggatatccaccaccgggcaatatgaattttcctagccagcctttcaaccagccattgggccaaaatttcagtccgcctagcgggcaaatgatgcctgggcccgttggaggattcggacccatgatctccccgactatgggacagccaccaagagccgaactcggtcctccttccctgtcacagcgctttgcccaaccgggcgctccattcggaccttctccactccagcgccccggacagggtttgccatcactccctcccaatactagcccctttcccggccctgatcccggcttccccgggccaggaggggaggacggtggaaaacccctgaacccaccggctagcacagcttttccccaagagccccattcaggctccccagccgcagcagtgaacggcaatcagcccagtttccccccaaactcctccggacgcggggggggtacgccagacgctaatagtctggctccaccaggaaaggcaggaggtggatctggaccccagccaccacctggcctggtgtatccatgtggcgcgtgcaggtctgaggtgaacgacgatcaagacgcaatcctgtgtgaagcttcatgccagaagtggtttcaccgcgaatgtacaggcatgaccgaaagcgcatatgggctgttgaccactgaagcaagcgcagtttgggcctgcgatctctgcctaaagaccaaagaaatccagtcggtttatatccgcgagggtatgggtcaactcgttgcggctaacgatgggtag

SEQ ID NO: 202101 - DNA, 1221 bp, synthetic construct
  misc_feature 1..1221: note = Description of Artificial Sequence: Synthetic coding sequence
  source 1..1221: mol_type = other DNA
atggccgccagcgccccccccccccccgacaagctggagggcggcggaggccctgctccacctccagcccctccgtccacggggcgcaaacaggggaaagctggcttgcagatgaagtcaccagagaagaaacgacgaaaatcaaatacccagggtcccgcctactcacacctgacagagttcgcccccccccccaccccaatggtggatcatttagtagcgagcaaccccttcgaagatgactttggagcacccaaggttggagtcgctgccccccccttcctaggcagcccagtcccattcggtgggtttcgggtgcagggggggatggcgggtcaggtgccccctggatacagtacagggggaggtgggggccctcagccgcttcgtaggcagccgcccccattccctccgaatccaatgggccctgccttcaatatgccgccccagggacccggctacccaccaccggggaatatgaatttcccttcccagccttttaatcagccgctgggccaaaatttctcccctccttctggacagatgatgcctgggccagtaggcggttttggtccgatgatatccccaactatgggacagccacctagagccgagttgggtccaccatctctctcacaacggtttgcacaacctggggcacccttcgggccatccccccttcagagaccaggtcagggacttcccagtcttcctccaaacacctcaccatttccaggaccggacccgggcttccctgggcccggaggggaagacggcggaaagcccctgaaccctcccgcatcaacagcattcccacaagagccacactcaggatcccccgctgccgccgttaacggtaatcaacctagcttcccgcccaactccagtggtaggggtggagggacacccgatgccaactccctagcaccacctggcaaggccgggggcggctccggtccccaacctccacctgggctggtgtatccttgtggagcatgcagaagtgaggtaaatgacgatcaggacgctatcctttgcgaagccagctgtcagaagtggttccatcgagaatgtactggcatgaccgaatccgcatacggcctgctcactacagaggcctctgcagtgtgggcctgtgatctgtgcctcaagaccaaggaaattcagtccgtgtacatcagggaaggaatggggcagctcgtggcggctaatgacggatag

SEQ ID NO: 202102 - DNA, 939 bp, synthetic construct
  misc_feature 1..939: note = Description of Artificial Sequence: Synthetic coding sequence
  source 1..939: mol_type = other DNA
atggaggaggagtgccgggtgctgagcatccagagccacgtgatcagaggttatgtaggcaacagagccgctacatttcctctgcaggtgctaggatttgagatcgatgctgtgaatagtgtccagttctccaaccacactggctacgctcactggaaggggcaagtgctgaactcggacgaactgcaagaactctacgagggtttacgattgaacaatatgaacaaatacgactacgtgctcactggttacactcgcgacaagagcttcttagcaatggtggtggatatagtgcaggaacttaagcaacagaatccccggctggtgtatgtctgtgatccagtgctaggggacaagtgggatggtgagggaagcatgtacgttccggaggaccttctccccgtttacaaggaaaaagttgtgcccctggccgatatcattacgcccaaccagttcgaagcggagctgctgtctggtcggaaaatccacagtcaggaggaggctctgcgtgtgatggatatgctgcatagtatgggtcccgacacggtggttatcacctctagtgatctgccatcccctcagggctctaattaccttattgtcctcgggtcccagaggagaagaaaccccgcaggttcagtggtgatggaaagaatcaggatggatattcggaaggtggacgcggtgttcgtcggcaccggcgacctgtttgcggctatgctcttagcctggacgcataaacacccaaataatttgaaggtggcgtgcgagaagactgtatcaaccctccaccacgtgctccaacgaacaattcaatgtgcgaaagcgcaggccggggaaggtgttcgacccagtcccatgcagctggagctcagaatggttcaatctaagcgcgatatcgaagaccccgaaattgtggtccaggccactgtgctctag

SEQ ID NO: 202103 - DNA, 855 bp, synthetic construct
  misc_feature 1..855: note = Description of Artificial Sequence: Synthetic coding sequence
  source 1..855: mol_type = other DNA
atggaggaggagtgccgggtgctgagcatccagagccacgtgatcagagggtacgtggggaatagggccgctacgttccccctacaagtcctgggatttgaaatcgatgcagtgaattctgtacagttttccaaccataccgggtacgcccactggaaggggcaggtgctgaattcagacgaactgcaggaactgtatgaaggacttcgcctgaataatatgaataaatacgattacgtgctcacagtttgtgatccagtactgggagacaagtgggacggagagggcagcatgtacgtgcccgaggacctcctgccagtatataaggagaaagttgtgcccttggccgacattataacccctaatcagttcgaggccgaactgctgagtggacgtaagatccactctcaagaggaggccctgcgggtgatggacatgctgcatagcatgggtcccgacacagtggtgatcacttcctccgacctgccgtctcctcagggctcgaattatttgatcgtcctgggcagccaacgaaggaggaaccccgcgggaagtgtagtgatggagaggatccggatggacattcggaaggttgatgctgtctttgtgggaaccggcgatttgtttgcagccatgttgctggcctggacccacaagcatcctaataatctcaaggtagcatgtgagaaaaccgtgtctacgcttcaccacgtcctacagcggacaatccagtgcgccaaagcccaagccggcgagggcgtgagaccttctcctatgcagcttgaattacgtatggtgcagagtaagagggacatcgaagaccccgagatcgttgttcaggctactgtactctag

SEQ ID NO: 202104 - DNA, 2322 bp, synthetic construct
  misc_feature 1..2322: note = Description of Artificial Sequence: Synthetic coding sequence
  source 1..2322: mol_type = other DNA
atgggcaagaacctgaaggaggccgtgaagatgctggaggacagccagcgaaggacagaagaagagaacggtaagaagctgatctccggtgacattcctggccccctgcaaggaagcggccaggacatggttagtatcctccagttggttcagaacctgatgcatggagacgaagatgaggaaccccagtcaccacgcatccagaacattggcgagcaaggccacatggccttactgggccattctctgggggcctatatttctactctcgacaaagagaaattaagaaaactcaccacccgaatccttagtgatactaccctgtggctgtgcagaatcttccggtatgaaaacggctgcgcatattttcacgaggaggaacgcgagggcctagccaagatctgccggcttgctattcactctagatatgaagactttgtcgtggatgggttcaatgttctgtataacaagaagccagttatctatttatccgcagccgcgcgaccgggacttggccagtacctatgcaatcagttggggctgccatttccttgtctttgcagggttccctgcaataccgtatttgggagtcaacaccaaatggacgtggcttttctggagaaactaattaaagacgacatcgaacgcggtcggctccctctgttattggtggctaatgcgggcacggctgccgtgggccataccgacaagattgggcgcctgaaggaactctgcgaacagtacggcatatggttacacgtcgagggcgtcaatctggcaaccttggcgctcggttacgtgagctcatcagtgctcgccgctgctaagtgtgatagtatgaccatgactcctgggccatggctcgggctccccgctgttccagcagtcactctatacaagcacgacgatcctgctctcaccttagtagccgggctcacttctaacaagcccacggataagctacgggctctgcccctgtggctgagtctgcaatacctgggacttgacgggttcgttgagcgaataaagcatgcctgccagcttagtcagaggcttcaggagagcctcaaaaaagttaactatataaagatcctggtcgaggacgaactgtcttcccccgttgtagtcttcaggttcttccaggagctccccggcagtgatccagtgttcaaggcagttccggtgccaaatatgaccccatcaggggtggggagggaacgccatagttgcgacgccctaaaccggtggttgggcgagcaacttaagcaactcgtacctgcttcaggacttacagtgatggacctggaggccgaaggcacatgcctgagatttagcccactgatgacagcagcagtgctggggacaaggggcgaggacgtcgatcagctagtggcctgcatcgaatctaagctgcccgtgctgtgttgtacactccaactgcgggaggaattcaagcaggaagtcgaagccactgccggactgctgtatgtcgatgaccctaattggagcgggataggcgtagtcagatatgagcacgctaatgacgataaatcaagcctcaaaagcgatcctgaaggcgaaaacatccacgctggactactaaaaaaattgaacgagcttgaatcggatttgacattcaagattggcccagaatataagtcgatgaagtcctgcttatacgtggggatggccagcgataatgttgatgctgcagagctggttgaaactattgccgcaaccgctagggagatcgaggaaaacagccgccttttagagaatatgaccgaggttgtgagaaagggtatccaggaagctcaggtcgagctgcagaaagccagtgaagaaagattgcttgaggagggcgttctgaggcagatcccagtggttgggtctgtgctgaattggttctcccctgttcaggccctgcagaaagggcggacttttaacctgacagcaggaagcttagagtccactgagccaatctacgtctataaggcccagggagcaggtgtcaccttgcctcccacaccttctggtagcagaacgaaacagcggctgcctgggcagaagcccttcaagcggagcttgagagggagcgacgcactcagtgagactagcagcgtgtcccacatcgaggatctcgaaaaagtcgaacggctgtcgagcggtcccgaacaaattacactagaggccagcagtaccgagggtcaccctggtgccccatctccacagcacaccgaccagaccgaggcatttcaaaagggggtccctcatcctgaagatgaccactcccaagttgagggcccagaatccctgcgttag

SEQ ID NO: 202105 - DNA, 2367 bp, synthetic construct
  misc_feature 1..2367: note = Description of Artificial Sequence: Synthetic coding sequence
  source 1..2367: mol_type = other DNA
atggacgccagcctggagaagatcgccgaccccaccctggccgagatgggcaagaatttgaaagaggctgtgaagatgctcgaagacagccagcggcgaaccgaggaggaaaacggaaagaagttgattagcggtgatattccggggccactgcaaggctccggccaggatatggtctcaattctgcagctggtgcagaacctgatgcatggcgacgaagacgaggaaccccagagcccccgcatccaaaatatcggcgagcagggtcacatggctctgctcggacactcactcggtgcatacatctccacactggataaagagaagctgagaaagctcactacaagaattctgtccgatactacactatggttgtgcaggatatttcggtatgagaatggctgcgcgtattttcatgaagaggagagggaaggcttggccaaaatttgccggctcgcaatccactccagatatgaagactttgtcgtcgacggttttaacgtgctgtataacaagaagcccgtgatctacctgtctgctgcagcgcgcccaggactgggccagtatctgtgcaaccaactaggcttgccttttccatgtctgtgccgagtgccctgtaataccgtgttcggcagccagcaccaaatggatgtggcattccttgagaaattaatcaaagacgacatcgaacgcgggcgccttcctttgctcctcgttgcaaatgccggaaccgccgctgttggccacactgataagattggtcggttgaaggaattgtgcgagcagtacggaatctggctccatgtggaaggggtgaatcttgccaccctggctctgggctacgtttcatcctcggttctggctgccgcaaaatgcgatagtatgacgatgacccccggaccatggctcggactgcccgctgttcctgccgtgacgctttacaagcacgatgaccccgccctgaccttggtggctggacttacctctaacaagccgactgacaagttgcgggctctgcccctctggttatcccttcagtacttggggcttgatggatttgtcgagcgtatcaagcatgcctgccagctgagtcagcgtctgcaggagagccttaagaaagttaactatatcaaaattttagtggaggacgagctttccagccccgtggtcgtttttaggttcttccaggagcttcccggctccgaccccgttttcaaggcagtgccggtccctaatatgacaccttccggcgtgggaagggaaaggcacagctgcgatgccctaaacaggtggctgggggagcagctgaagcagctggtacctgcaagtgggctaactgtgatggacctggaggccgaagggacctgtctgcgctttagcccattgatgaccgcagccgtcctgggcacccggggagaggacgtcgatcagttggtggcttgcatagaatccaaattgcccgtgctgtgctgtactctgcaactgagagaagaatttaagcaggaagtggaggctacagctggtcttctgtacgttgatgatcccaactggtcaggtatcggagtcgttcggtacgaacacgccaacgacgacaaatcctcgcttaagagcgatcctgaaggcgagaacattcacgctggattacttaagaagctgaacgagcttgaaagcgacctgacgtttaagatcggccctgaatacaagagcatgaaaagctgcctttacgtaggaatggctagtgataatgtggatgcagccgagttggttgaaacaatagcagccactgcgcgcgagatcgaggagaattcaaggctgttagaaaacatgactgaggttgttaggaagggcattcaggaggctcaggttgagcttcaaaaggctagcgaagagagactactcgaagagggcgtgctgagacagataccagtggttgggagtgtgttaaattggttctcccccgttcaggctttgcagaagggtaggacctttaaccttacagctggatcgctggaaagcaccgaaccaatctatgtgtataaggctcagggggccggcgtaacactgccacccacacctagcggaagccgtacaaaacagagactgcccgggcagaaacccttcaagcgctcacttcgtggtagtgatgctttgagcgagaccagctccgttagtcacatagaagatctagagaaggtggaacgactcagcagcggacctgaacagatcactctcgaagcctctagcaccgaaggccatcctggagccccttccccacagcacactgaccaaacagaggccttccagaaaggggttcctcaccccgaggatgaccactcacaggtcgagggccccgagtctctccgttag

SEQ ID NO: 202106 - DNA, 2094 bp, synthetic construct
  misc_feature 1..2094: note = Description of Artificial Sequence: Synthetic coding sequence
  source 1..2094: mol_type = other DNA
atgggcaagaacctgaaggaggccgtgaagatgctggaggacagccagcgcaggacagaggaagagaatggcaagaaattgatctcaggcgacatcccaggcccgcttcagggtagatatgagaatggatgcgcttactttcacgaggaggaacgtgaaggtctggctaaaatctgtagactggcaatccactctcgctatgaagacttcgtagtagacggctttaatgtgctttacaacaaaaaacctgtgatttatctatccgctgcagctcggcctggccttggacaatacctgtgtaaccagctgggcttgccgttcccatgtctgtgtcgcgtgccctgcaatactgtgtttggatctcaacatcaaatggacgtcgcttttctcgagaagctcatcaaggacgacatagagcgcggacggttgcctctcttgctcgttgcaaacgccggtaccgctgctgtgggccatactgacaagatcgggcgcttgaaggagctgtgcgagcaatacgggatttggctgcacgtggagggtgtgaatctggcaaccctcgcactggggtatgtgagctcttctgtactggctgctgcgaaatgcgattctatgaccatgacaccagggccctggcttgggcttccggcagtgccagctgtgaccctctacaaacacgacgaccctgcactgaccctagttgctggacttacttcgaataagccaactgacaagcttcgagctttaccgctctggctctctttacagtatctcgggctggatggcttcgtggaacggattaaacacgcctgtcaactgagccagcgcctgcaggagtctttgaaaaaggttaattacataaagatcttagtggaggacgaactttccagcccagtagtagtgttccggttcttccaggagctcccagggtcagaccccgtgtttaaagccgtgccagtgccaaacatgacgccatctggcgttggtagggagcgtcatagctgtgacgctctgaacagatggttgggggagcaactcaagcagctcgtgcccgcctccggcctcaccgtgatggacctggaggccgaggggacatgtcttagatttagtcctttaatgacggccgctgtgttgggcacccgtggcgaggacgtggatcagctcgtggcgtgtatcgagagcaaattgcctgttctgtgttgcactttacaactgcgagaagaattcaaacaggaggtcgaggcaacagctggtctgctctatgtggatgaccccaactggagcggaatcggagtggttagatatgaacacgccaatgatgataagagtagtctgaaaagcgacccagaaggggagaatattcatgcaggtctcctgaagaaactaaacgagctggaatcggacctgacttttaaaatcggccccgaatacaagagcatgaagagctgtctctacgttggcatggccagcgacaacgtcgacgctgccgaattagttgagactattgccgctacagcgagagaaatcgaggaaaatagcagattgctggagaacatgacagaagtggtcagaaaaggaatccaagaggcccaggtcgagctgcagaaggcttcggaggaaagattgctcgaggagggcgtgctgaggcaaatccctgtggtagggtctgtattgaattggttctcccccgtgcaggcactgcagaagggaagaaccttcaatctcaccgccggtagccttgaatctacggagcctatctatgtctacaaggctcaaggggccggagtgacactcccacctactccaagcggaagtaggacaaagcagcggctcccaggacaaaaacctttcaaacggtccctgcggggtagcgacgccttaagtgaaacttcctctgtttctcacattgaggacctcgaaaaagtcgagaggctgtcttcagggccggaacaaattactctggaagcctcttccacagagggacacccaggggcccccagcccccaacataccgaccagacggaagccttccagaaaggggtgccccaccctgaggacgatcacagccaggtggagggccctgaaagtctgaggtag

SEQ ID NO: 202107 - DNA, 2283 bp, synthetic construct
  misc_feature 1..2283: note = Description of Artificial Sequence: Synthetic coding sequence
  source 1..2283: mol_type = other DNA
atggacgccagcctggagaagatcgccgaccccaccctggccgagatgggaaagaacctcaaagaagccgttaaaatgttagaggattcacagcggaccgaagaagaaaatggcaagaagctgatttctggagacatcccagggccacttcaaggccggattcagaatatcggcgagcaaggacacatggccctgttggggcacagcctgggggcatacataagcacactcgacaaggagaagctgcggaaattgacaacccggatattatctgacactactctttggctgtgcaggatcttcagatacgagaacggctgcgcctacttccacgaggaggaaagggaggggctcgccaaaatctgtcgcctcgcgatacatagccgttacgaagatttcgtcgtagacggttttaatgtgctgtataataagaagcctgtgatttacctgagcgcagccgctcgccccgggctgggtcaatacctttgtaatcaactcgggcttccattcccatgtttgtgcagagtgccctgcaacacagttttcgggtctcagcaccagatggacgttgcctttctggagaagcttataaaggacgacatcgagcgtggaaggctgcccctgctgttggtggctaacgccggaactgccgctgtgggccatacagacaagattggccgcctgaaagagctgtgtgaacagtatggcatttggctgcacgtggagggggtgaacctagcaacgctcgcgctggggtatgtcagtagctctgtgcttgcggctgcaaagtgcgactcaatgacaatgacaccggggccgtggctaggactgcctgcggtaccagccgtcacattgtacaagcacgatgatcctgctctgacgctggtcgccggactgacctcaaacaaaccaaccgataaactgagagcgctcccgctttggctgtctctgcagtacttaggcctggatgggttcgttgaaaggattaaacacgcctgtcagctttcccagcggctccaggagtcgttaaaaaaagtcaactatattaaaattctcgtggaggacgaactgtcaagtcccgttgtggtctttcgattcttccaggagcttccaggttcggaccctgtattcaaagccgtccccgtacctaacatgactccttcgggggtcggcagagagcgtcactcatgcgatgcattgaatagatggctgggagagcaactcaaacaactcgttcccgcctccggacttacggtcatggatctagaggcagaagggacttgtctgcgcttctcccctctgatgacagcggcggttctgggaacacgaggggaagacgtcgatcagctcgtcgcctgcattgagagtaagctgcccgttttgtgctgcaccttgcagctgcgcgaggagtttaaacaggaggtggaggctactgccggattgttgtacgttgacgatcctaattggagcggaattggagtggtccgttacgaacacgctaacgatgacaaaagttcactaaaaagtgaccccgaaggggagaacatccacgctggcctgttgaaaaagctcaatgagcttgagagcgatctaacctttaagattggacctgagtataaatcaatgaaaagttgcttatacgtgggcatggcttctgacaacgttgacgccgcggaactcgtggaaactatagccgcaactgcaagggaaatcgaggagaacagcagactgctggagaatatgacggaggtggttcgcaaaggcatccaggaggcccaggtggaactgcagaaagccagcgaggagagactccttgaggaaggcgtcctgagacagataccggtagtagggtcagttcttaattggttcagcccagtgcaggccttacaaaaaggacggaccttcaacctgaccgccggatctctggaatcaactgagccaatttatgtgtacaaagcgcaaggggccggagtgaccctgccgcctacgccttcaggttcaagaaccaagcagagactgccagggcagaagccatttaagcggtctttaagggggagcgacgccttgtcagagacatcctctgtttcccacattgaagacctggagaaggtggagaggctgtcatctgggcccgagcagatcactctggaggcatcctccaccgagggacaccccggggctccgagcccgcagcacactgaccagaccgaggcattccagaagggcgtcccacaccccgaagacgatcactcacaggttgaggggcccgagtcattgaggtag

SEQ ID NO: 202108 - DNA, 1290 bp, synthetic construct
  misc_feature 1..1290: note = Description of Artificial Sequence: Synthetic coding sequence
  source 1..1290: mol_type = other DNA
ctgagcagcaccctgcggcggatcgccgaccccaccctggccgagatgggcaagaacctaaaagaggctgttaagatgctcgaggactcgcagagaaggactgaagaagagaatggaaagaagctgattagtggagatattcccggacccttgcagggttcaggacaggatatggtcagtatattgcagctcgtccaaaatctgatgcatggagacgaagatgaggagccccagtcaccacgtatccagaatattggcgagcaagggcacatggccctgctgggacattccctcggagcctacatctcaacgcttgataaagagaaacttcgaaagttgactacccggatactgagtgatacaaccctctggttgtgccgaattttccggtacgagaatgggtgtgcctatttccacgaagaagagcgcgaaggcctggccaagatttgccggttggctatacacagccgatatgaagattttgtggttgacgggtttaatgttctgtacaataagaagcctgtgatttacttaagcgccgccgcgcggcccgggttaggccagtacctgtgtaatcaggatgtagcgtttcttgagaagttgataaaggacgatattgagcgaggacggctgccactcctgctggttgccaatgccggtacagctgccgtaggtcacaccgataaaattggacgcctgaaggaactgtgcgagcaatacgggatttggcttcatgtggagggagtaaacctagcgacactcgcactgggctacgtctcctcatccgtgctggccgccgcgaagtgtgactcgatgactatgaccccgggtccttggctgggtctgcctgctgtgccagctgttacgctgtacaagcatgacgaccctgccctaactctggtggctggtctgacttccaacaagccgaccgacaagttgcgggctttacccctgtggctgtcactgcagtacctcggactggacgggtttgtagagaggatcaaacatgcctgtcagctgagccagaggctgcaggagtctcttaaaaaggtgaattacataaaaattttggtggaggacgagctatctagcccagtggttgttttcaggttcttccaggagcttcccggatctgaccccgtgtttaaagccgtgcccgtgccaaatatgactccatccggcgttggacgggaaagacattcctgcgacgccctgaaccggtgggtgaggatggcagtgactccgcttagttttcaggtgcctgtgcaccaccacccaacgtgctggtag

SEQ ID NO: 202109 - DNA, 1497 bp, synthetic construct
  misc_feature 1..1497: note = Description of Artificial Sequence: Synthetic coding sequence
  source 1..1497: mol_type = other DNA
atggacgccagcctggagaagatcgccgaccccaccctggccgagatgggaaaaaacctaaaggaagcagtgaaaatgcttgaagattctcagagacggaccgaagaagagaatgggaagaaactaatttccggagatattccaggcccactgcagggaagcggccaggacatggtcagcatactgcagctggtgcagaatctgatgcacggtgacgaggatgaagagccacaatcaccccgcattcagaatatcggggagcaggggcacatggcccttctggggcactcattaggcgcctatatctcaactctcgataaagaaaaattgcgcaagctgaccacaagaattctttccgacactaccctctggttgtgtaggatttttcggtatgaaaatgggtgtgcctatttccatgaggaggaacgcgaagggctggcaaaaatctgccgattggcaatccacagtcggtatgaggatttcgtcgtggatgggttcaatgtgttgtacaacaagaagcccgtgatttacttgtccgccgccgccaggccagggttgggccagtacctatgtaaccagctcggtctgccctttccttgcctctgtcgggttccctgtaatacggtgttcggaagccagcatcagatggatgtggcgttcttagagaagctgataaaggacgacattgagcgaggcaggctgcccctgctgttggtagccaacgctggcaccgctgccgtagggcacacggataagatcgggcgcctcaaggagctctgtgagcagtatggtatttggcttcatgtcgaaggcgtcaatctggccacacttgctctgggatatgtcagtagctctgtgctggctgctgccaagtgcgactctatgacaatgaccccgggtccatggctgggtctccccgcggttccagcggtaacactatataagcacgacgatcccgccctgactctggtggcaggcctgacaagcaataagcctaccgataagttgagggcattaccactttggttgagtctccagtacctgggactcgacggttttgttgaacggattaagcatgcatgtcaactgagtcagagattacaggagtcactcaaaaaagtgaattacatcaagatactggtggaggatgagctcagctcaccggtggtggtgtttcgcttctttcaggaacttcccgggagtgaccctgtatttaaagccgtcccagtcccaaatatgactccatctggcgtcggacgcgagcgtcactcctgcgacgccctgaatcgttggttgggagagcagctgaaacagttggttccagcatcagggttgacagtgatggatctcgaagcagaaggcacatgtctgcgcttctctcccctgatgacggctgccggctggtcccactgcggcacaactacccgctacgactgcgtccgctctcgattaacgacccgtttgcccggctctaccggggagcaggcgccgccctag

SEQ ID NO: 202110 - DNA, 615 bp, synthetic construct
  misc_feature 1..615: note = Description of Artificial Sequence: Synthetic coding sequence
  source 1..615: mol_type = other DNA
atgaccatgacccccggcccctggctgggcctgcccgccgtgcccgcagttaccctttacaagcacgacgacccagccctgacattagtggccggcctaacctcgaataagcccacagataagctacgagcactgcccctttggctgtctctacagtatctggggctggatgggtttgtggaacggatcaaacatgcgtgccagctgtcccagcgacttcaagagtcgctgaagaaggtaaattatattaagatcctagtggaggatgagctgtcaagtccagtcgtcgtgttcaggttctttcaggagctgcccgggagcgatcctgtgtttaaagcagtacctgtgccaaatatgacacctagtggtgtgggccgggagaggcatagttgtgatgccctgaatcggtggttaggcgaacagctcaagcagctcgtgccagcatcaggtctgacggtcatggatctagaagccgagggcacttgtctgaggttcagccccctgatgactgccgccggatggtctcactgtgggacaacaacacgctatgattgtgtgcgcagtcgtctgaccacccgcctgccaggctctacgggtgaacaggccccaccatag

SEQ ID NO: 202111 - DNA, 642 bp, synthetic construct
  misc_feature 1..642: note = Description of Artificial Sequence: Synthetic coding sequence
  source 1..642: mol_type = other DNA
atggaccccctgttccagcagacccacaagcaggtgcacgagatccaatcatgcatgggaaggctagagacagcagataaacagagtgtccatattgttgaaaacgaaattcaggcgtccatcgatcaaattttttctcgcctggaacgcctggaaatcttgtccagtaaagagccacctaataagagacagaatgcacgccttcgggtcgatcaattgaagtatgatgtgcagcacctgcaaactgcacttcgaaactttcagcaccggcgccatgcccgggagcagcaggagcgtcagcgggaggaattactgtcgagaacttttaccactaacgattccgataccacaattcctatggatgaatcactccagttcaactcaagtctgcagaaagtgcacaacggaatggacgacctgatcctcgacgggcacaacatcctcgacgggctgagaacgcagaggctgacacttaagggcacgcagaaaaagatccttgatatcgcgaacatgttaggcctctcaaatacagtgatgagactgatcgaaaagagggccttccaggacaagtacttcatgattggtacccaggggtcatgccagaccgcacacttcggtggccggagcgctggctcttcctag

SEQ ID NO: 202112 - DNA, 657 bp, synthetic construct
  misc_feature 1..657: note = Description of Artificial Sequence: Synthetic coding sequence
  source 1..657: mol_type = other DNA
atgacctgctggctgcggggcgtgaccgccaccttcggccggcccgctgaatggccgggctacttgtcccacctctgtgggcgaagcgcagccatggatctgggacctatgcgcaaaagttacaggggagatcgcgaggctttcgaagaaacacatctgacctcccttgatccggttaaacagtttgccgcctggtttgaggaagccgtgcagtgcccagatattggcgaagcgaatgccatgtgtttagctacctgcacccgggacggcaagccgagcgctcgcatgcttctgctaaagggtttcggtaaagatggctttaggttttttactaacttcgagtctcggaaggggaaggaactggacagtaaccccttcgcctcactagtgttctattgggaacccctcaataggcagtatcttcggaagaagaatgaggagcttgaacagttataccaagaccaggaggtccctaaacccaaaagctgggggggatacgtactttaccctcaggtgatggagttttggcagggacagacaaacaggctccacgaccggatagttttcagaagagggttaccaacgggcgattctcccctcggtccaatgacccaccgcggggaggaggattggttatatgagcggttagctccctag

SEQ ID NO: 202113 - DNA, 501 bp, synthetic construct
  misc_feature 1..501: note = Description of Artificial Sequence: Synthetic coding sequence
  source 1..501: mol_type = other DNA
atgctgctgctgaagggcttcggcaaggacggcttccggttcttcacgaacttcgagtctagaaaaggcaaagaactagacagcaatccctttgcaagtctggtcttctattgggagccactgaatcgtcaggtgcgggttgaggggccggttaaaaaattgcccgaggaggaggcagagtgttacttccactccagacctaagtctagtcaaatcggcgcagttgtctcccatcaatcaagtgtgatcccagacagagagtatcttagaaaaaagaacgaggagctagagcaactctatcaagatcaggaggtcccaaaacccaaaagctggggaggatacgtactctacccacaggtgatggagttttggcaaggacagacaaacagattgcatgacagaatagtcttcagaagaggattgccaactggtgattcgcccctgggccctatgacccaccgcggcgaagaagactggctatatgagcggctggccccatag

SEQ ID NO: 202114 - DNA, 732 bp, synthetic construct
  misc_feature 1..732: note = Description of Artificial Sequence: Synthetic coding sequence
  source 1..732: mol_type = other DNA
atgacctgctggctgcggggcgtgaccgccaccttcggccggcccgccgagtggcccggatatctgagccatttatgcggtcgatcagcggctatggacttgggcccaatgaggaaaagttatcgcggtgaccgggaggcctttgaagagacccaccttacttctttggacccggttaagcaattcgctgcatggtttgaggaggcagtccagtgcccagatatcggcgaggctaacgccatgtgcctggcaacatgcacaagggacggcaagccttcagcacgcatgctcctgctgaaggggtttgggaaggacggttttagatttttcacaaatttcgagtcgagaaaagggaaggaattggtgcgcgtggagggaccagtcaaaaagctgccggaggaagaagcagaatgctactttcactcaagaccgaagtcaagccagatcggcgccgtggtgtctcatcagagctctgtcatacccgatagggagtatctccggaaaaaaaatgaagagctcgaacagctgtaccaggatcaggaagtgcccaagcctaagtcctggggagggtatgtgctgtacccacaggtcatggagttttggcaagggcagactaacagactgcatgaccgaattgtgttccgccggggattacccacgggcgacagtcctctcggacccatgacccacaggggggaagaagactggttatacgagaggctggcgccttag

SEQ ID NO: 202115 - DNA, 1098 bp, synthetic construct
  misc_feature 1..1098: note = Description of Artificial Sequence: Synthetic coding sequence
  source 1..1098: mol_type = other DNA
atggccagcaccgagagcagcctgctgcggagcctgggcctgagccccggccctggaagttctgaggtcgaactggattgttggttcgacgaagacttcaagtttattctgctccccgtatcatacgccgtggtgtttgtcctcgggctgggtctgaacgccccaacattgtggctgtttatctttagacttagaccctgggatgcaaccgccacgtatatgttccatttggctctttctgatacattgtacgtgttatcattaccaactttaatctactattatgccgcccacaatcattggccttttggaactgagatttgcaagtttgtacggttcttgttctactggaacctgtactgtagtgtgctgttcctcacatgcatatcagtgcatcgctacctggggatttgtcaccctcttagagcactgaggtggggaaggcctcgacttgccggcttgctgtgcttggccgtctggctagttgtcgctggctgcctggtcccaaacctttttttcgtcacgacttctaataagggcacaactgtgctgtgccatgacaccactagacccgaggagttcgaccactatgtgcacttttcctctgcggtgatgggcctcttgttcggagttccatgtcttgtaaccctagtgtgttacggtctgatggcccgcaggctgtatcaacccctcccaggctcagctcagtcatcatcgagactgcggagccttcggactatcgccgtggtgttgaccgtgtttgctgtgtgtttcgtgcccttccacatcaccaggaccatatactacttggctaggctcctggaagcagactgcagagtcctcaatattgtgaatgttgtttataaggtgactcggcctttggcctccgccaactcttgcctggatcctgtactgtatctcctgactggtgacaaatatcgcaggcaacttcggcagctttgcggagggggaaagccacagcctcggaccgctgctagttccctggccctagtttctctccctgaggacagctcctgtcgttgggctgcgacacctcaggactcatcttgcagcacgccaagggcagataggctgtag

SEQ ID NO: 202116 - DNA, 987 bp, synthetic construct
  misc_feature 1..987: note = Description of Artificial Sequence: Synthetic coding sequence
  source 1..987: mol_type = other DNA
atggagtgggacaacggcaccggccaggccctgggcctgccccccaccacgtgcgtttatcgcgaaaattttaagcagctgctgttgccccctgtctactctgctgtgttggcggcagggttgccactgaacatttgcgtcataacacagatctgtacatcacggcgggctctaaccaggacagcagtgtacacacttaacctggcactcgctgatttgctgtacgcatgttcgctgcccttgctgatatacaattacgcccagggagatcactggccctttggtgattttgcatgccgcctggtgagatttcttttttacgccaatttacatggatcaatcctgttcttgacatgtataagctttcagaggtacctaggaatctgtcacccactggcgccgtggcacaaacgcgggggccgacgtgccgcctggcttgtgtgcgtggctgtgtggttggccgtaacaacccagtgccttcctactgctatattcgcagccaccggaatccagcgcaaccggaccgtgtgctacgacctctctcctcccgccctggccacgcattatatgccgtacggtatggccctgactgttatcggatttctgctcccattcgccgcacttctcgcatgctactgtctgcttgcatgtcgattgtgtcgacaagacggacccgcagagccagtcgcgcaggaacggagaggcaaagctgcacgtatggccgtggtcgtggccgccgccttcgccatttctttcctgcctttccatattactaaaaccgcataccttgctgtccgcagcacccccggtgtaccttgcactgtattggaggcctttgcagctgcctataaagggacaagaccgtttgcatcagcaaacagcgtgttggatccgattctgttctatttcactcagaagaagtttcgacggaggcctcacgaactgttgcaaaaattgacagccaagtggcagcgccaggggcggtag

SEQ ID NO: 202117 - DNA, 987 bp, synthetic construct
  misc_feature 1..987: note = Description of Artificial Sequence: Synthetic coding sequence
  source 1..987: mol_type = other DNA
atggagtgggacaacggcaccggccaggccctgggcctgccccccactacttgcgtttaccgagaaaatttcaagcagttgctgctacctcccgtttattcggccgtacttgccgccggacttcccttaaatatctgcgtgataacccaaatctgtacgagccgcagggcacttactcgcacggccgtgtatactctcaatttggctctggctgatttgctgtacgcctgtagtttgccgctgctgatatataattacgctcagggcgaccactggccttttggcgattttgcttgtcggttggttcgttttctattttacgcaaatctccacgggagcatcctgtttttgacttgcatatctttccagaggtacttgggtatatgccacccactggccccctggcacaagcggggcgggcgcagagctgcctggttggtttgcgtggccgtgtggttagccgtcactacacagtgtctccctacggccattttcgctgctacaggaatccaacggaatcgcactgtatgctatgacttgagcccgcccgctctggccactcactatatgccttatggcatggctcttaccgtgattggcttcctcctgcctttcgctgcactcctggcttgctattgcctgctggcatgtcggctgtgccgacaggatgggccggctgagccagtggctcaagaacgtcgcggtaaggcagcacgaatggcagttgtggtggcagcagccttcgctatcagtttcctcccctttcatatcacaaaaaccgcttatctggccgtccgttctacacctggcgtgccttgtactgttttggaggctttcgccgctgcctataagggaacccgcccctttgcaagtgccaactctgtgttggatccaatattgttctactttacccaaaagaagtttagaagacgaccacatgagctcctgcagaaactgactgcgaaatggcagagacaagggcggtag

SEQ ID NO: 202118 - DNA, 987 bp, synthetic construct
  misc_feature 1..987: note = Description of Artificial Sequence: Synthetic coding sequence
  source 1..987: mol_type = other DNA
atggagtgggacaacggcaccggccaggccctgggcctgccccccacgacatgcgtgtatcgggagaactttaaacaactactcctgcctccggtgtacagcgccgtgctcgctgcaggactgccgctgaacatctgtgtgatcacacagatttgcactagccgcagagccctgacgaggacagctgtgtacaccctcaacctcgctctggccgacctgctgtacgcctgctcactgccgttgctcatctataattacgcacaaggagaccactggccatttggcgactttgcatgcaggctggttcgattcttgttctacgctaatctgcatggaagtatactgtttctgacctgtatttcattccaacggtatctcggcatctgtcatccactggccccctggcacaagaggggtgggaggcgcgccgcttggctcgtttgcgtggccgtatggttggcagtgaccacccagtgcttgcctacggccattttcgctgcaacaggtattcagagaaaccggactgtctgctacgacttgtctccccccgctctcgcaacgcactacatgccgtacgggatggccctcaccgtcatcggattcctgcttccttttgccgctctgcttgcctgttattgtctgctggcctgtagattatgccgtcaggatggacctgctgagcctgtcgcccaggagaggcgcggcaaagccgcaagaatggcagtggtagtggctgccgcattcgccattagttttcttccctttcacataacgaagactgcttacttagccgtccgatcgacaccaggagtaccgtgcaccgtgttggaagccttcgccgcagcatacaaggggacacgacccttcgcttctgcgaactcggtattggacccaatactgttctacttcacccagaagaagttccgcaggaggcctcatgaattattgcagaaactgacggccaaatggcagagacagggaagatag

SEQ ID NO: 202119 - DNA, 987 bp, synthetic construct
  misc_feature 1..987: note = Description of Artificial Sequence: Synthetic coding sequence
  source 1..987: mol_type = other DNA
atggagtgggacaacggcaccggccaggccctgggcctgccccccacgacctgcgtgtatcgggagaattttaaacagttgctcctgccacctgtatatagcgctgtactcgccgctgggttgcccttgaacatatgcgtaattacacagatatgtacgtctagacgagccttgacgagaacggccgtgtatacactgaatctggccttagccgacctcctctatgcctgtagtctcccacttcttatctacaattatgctcagggcgaccactggccttttggagattttgcttgccggctggttaggttcctcttttatgctaatctccacggcagcattctcttcctcacgtgcataagtttccagcggtatctcggtatctgccaccctctggcaccctggcataagaggggcggacgtcgcgcggcgtggttggtctgtgttgctgtttggctcgccgtgaccacccagtgcttgccaaccgccatcttcgcagccaccgggatccagcgcaatcgtaccgtgtgctacgatctgtctccacccgctctggcaacccattacatgccatacggcatggctctgacagtgatcgggttcttactaccctttgcagccctgctagcctgttattgcctgctggcctgtaggctctgtaggcaggatggccctgctgagccagttgcccaggagcgacgtgggaaagccgctagaatggccgtggtggtcgctgcggccttcgccatctcatttcttcccttccacatcacgaagactgcttaccttgctgtacgctccaccccaggtgtgccttgtaccgtacttgaagcattcgccgcagcttataaggggactcgaccctttgcctccgcaaacagcgtgctcgacccgattctgttttacttcactcaaaagaagttcagacgaagaccccatgaactcctgcagaagctgactgccaaatggcaacgccagggtaggtag

SEQ ID NO: 202120 - DNA, 738 bp, synthetic construct
  misc_feature 1..738: note = Description of Artificial Sequence: Synthetic coding sequence
  source 1..738: mol_type = other DNA
atggagtgggacaacggcaccggccaggccctgggcctgccccccacaacctgtgtgtatcgggagaacttcaagcagctgcttctcccccccgtctatagcgctgtgctcgcagcaggacttcccctaaacatttgtgttattactcaaatctgtaccagtagacgtgcactcacacgaaccgccgtgtacactctgaacctggcgctggcagacctgctctatgcatgtagtctgcctctcttgatatataattatgcccaaggggaccactggcctttcggcgattttgcttgccggctcgttaggttcctcttctacgccaacctccatggcagtatcctgtttttgacctgcatcagctttcagaggtatttagggatctgtcatcctctagccccatggcacaagagagggggtcgcagagcagcatggctggtctgtgtcgccgtgtggctggctgtcactactcagtgcctgcccacagcaatcttcgccgcaaccggtatacaacgcaataggaccgtctgctatgatctgagtccgccagctctcgccacgcattacatgccttacgggatggcactgactgtcattggctttctcctgcctttcgcggcccttctcgcatgttattgccttctggcctgccgattatgcagacaggacgggcctgccgagccagtggcccaggaacgccgcgggaaggcagccagaatggctgttgtcgtagcatag

SEQ ID NO: 202121 - DNA, 987 bp, synthetic construct
  misc_feature 1..987: note = Description of Artificial Sequence: Synthetic coding sequence
  source 1..987: mol_type = other DNA
atggagtgggacaacggcaccggccaggccctgggcctgccccccactacatgtgtctatagagagaatttcaagcagttgttgttgccaccggtgtattctgcggtgctggctgcaggcctgcccttaaatatctgcgtgatcacccagatttgtacctcccggcgagcccttactcgaaccgcagtgtatacattgaatctggctctcgccgacctactctatgcctgctccctaccactgctcatctacaactacgctcagggcgaccactggcctttcggcgactttgcttgtagactcgttaggtttctgttttacgccaatcttcacggttctatcttgttcctgacatgcatttctttccagcggtatctggggatctgtcacccactcgccccctggcataagcgaggaggacgccgagccgcttggctggtgtgtgtggctgtctggcttgcggtgacaactcagtgccttcccacggctatctttgctgctactgggatccaacggaaccggacagtttgttacgatttgtcaccccctgcactcgccactcactatatgccctatggaatggcactgacagttattggatttctgctgccttttgccgctctgctggcatgctattgccttctggcctgtcggctttgcaggcaggacggtccggccgagccggttgcccaggagagaagaggaaaagccgccagaatggcagtagttgttgccgccgcctttgccattagttttttaccatttcacattacaaagacagcttacttggctgtgcgttccaccccgggcgtgccatgtactgtgctcgaagcgtttgcagcagcctataaaggcacccgcccatttgcctcagctaatagcgtgctggatcctattctgttttatttcacccagaagaaatttcgcaggaggcctcacgagcttttacagaagttgaccgccaagtggcaaaggcaggggcgctag

SEQ ID NO: 202122 - DNA, 987 bp, synthetic construct
  misc_feature 1..987: note = Description of Artificial Sequence: Synthetic coding sequence
  source 1..987: mol_type = other DNA
atggagtgggacaacggcaccggccaggccctgggcctgccccccactacatgtgtatatcgggagaatttcaaacagttgcttctcccccccgtatactcagccgttttagcagccgggctccctctgaacatatgtgtgattacgcaaatatgtaccagtcgcagggctcttacgcgcaccgccgtttacaccctgaatttagcactggcagacctgctgtacgcttgcagtctgccactactgatctacaactacgcccaaggcgaccactggccctttggagacttcgcctgccgactcgtccgctttctgttctacgcaaaccttcacggctctatattgttcctgacctgcatctccttccagcgttacctcgggatctgtcatccgctcgccccatggcacaaaagaggagggaggcgggcggcctggctcgtgtgtgtcgcagtgtggctcgccgtgacaacccaatgcctgcccacagcaatattcgccgctacagggatccagcgaaatagaacagtatgctatgacctgtctccgcccgccctcgctacgcactacatgccgtacggcatggccttgacggtcatcggcttccttcttcctttcgcagctttactggcctgctattgtctcctggcctgccgcttatgtcgtcaagatggccctgccgagcccgtcgctcaagaaagacgcgggaaggctgcacgcatggcagttgtggtcgccgcagctttcgccatatcttttctcccgtttcacataacaaagacagcctacctcgccgtgagaagcactccaggtgtaccgtgtacagtattagaagccttcgcggcggcctacaaaggcaccagaccgttcgcatctgcaaatagcgtgttagatcccatcttattctacttcactcagaagaaattcagaagacgcccccatgaactgctgcagaagctgactgcaaagtggcagcggcaggggaggtag

SEQ ID NO: 202123 - DNA, 987 bp, synthetic construct
  misc_feature 1..987: note = Description of Artificial Sequence: Synthetic coding sequence
  source 1..987: mol_type = other DNA
atggagtgggacaacggcaccggccaggccctgggcctgccccccacaacctgtgtgtaccgagagaactttaaacagctcctcctcccgcctgtatactccgcagtactcgccgccggcctgcctttaaacatctgtgtgattactcagatctgcacttctcgcagggctcttaccagaacagcagtgtacactctgaatttagcgttggctgatttgctgtacgcttgttctcttccattgctgatatataattatgcccaaggcgatcactggccttttggcgattttgcttgccgcctggtgcgcttcctgttctacgccaacctgcatggctcaatcctgtttctcacatgcatcagtttccagaggtatctcggaatctgccatccattagccccttggcacaagaggggaggcaggcgggctgcatggcttgtctgtgtggccgtgtggttggccgtgaccacccagtgcctgcccaccgcaatcttcgccgctaccgggatccaacggaacaggactgtgtgctacgatctttctccccctgccctggctacacactacatgccctacgggatggccctaactgttataggatttttgttaccatttgcagctctgctcgcctgctattgccttctcgcatgcaggctgtgcaggcaagatgggccggccgaaccggttgcccaagagcgcagaggcaaggctgcaaggatggcggtggtggtggccgctgcttttgccatttcgttcctgccatttcacatcaccaaaacagcttacctcgccgtgagaagcacgcctggcgtgccgtgtaccgtgctggaagccttcgccgctgcctacaagggcacgaggcctttcgcctctgccaactcggtgctcgacccaatcctcttctacttcacccaaaaaaaattccgccggcgaccccacgaactgttgcagaaattaaccgccaaatggcagcgccagggccgctag

SEQ ID NO: 202124 - DNA, 987 bp, synthetic construct
  misc_feature 1..987: note = Description of Artificial Sequence: Synthetic coding sequence
  source 1..987: mol_type = other DNA
atggagtgggacaacggcaccggccaggccctgggcctgccccccactacttgcgtgtaccgtgaaaattttaagcagttgcttctaccaccagtctactctgctgtgctggctgcaggcttgccactgaacatttgtgtcatcacccaaatctgcaccagtaggcgagccctgacacggacagcagtttataccctcaaccttgccttggccgatctactctacgcgtgttccctgcctctattgatttacaattacgctcaaggcgatcactggccattcggggactttgcatgtaggctcgtgaggtttttgttctacgccaatttgcacgggtcaatactttttctcacatgcatctcatttcaacgctacctgggaatatgtcatcctctcgcaccatggcataaacgcggcggcagaagagctgcttggcttgtatgcgtcgctgtttggctagcagtcactactcagtgcctgcccactgccattttcgcagcaacaggcattcaacggaatcggacagtctgttatgatctgagccctccagctctcgccactcactatatgccgtacgggatggcacttacagtcatcgggttcttgctgcctttcgcagctctgttagcgtgctattgcctgttagcatgcagactctgccgccaagatggtccggctgaaccagtcgctcaggagcggaggggaaaagccgccagaatggcggtagttgttgcagctgcatttgccatctcattcctgccattccatatcaccaagactgcctacctggcagtgcgcagcacccctggcgttccctgcactgtcctcgaagcatttgcagccgcatataaggggacaagaccgtttgcttctgcaaatagcgtgctggaccccattcttttctacttcacacaaaagaagttccggcgaagaccacacgagcttctccaaaaattgaccgcgaaatggcaacgccaggggaggtag

SEQ ID NO: 202125 - DNA, 387 bp, synthetic construct
  misc_feature 1..387: note = Description of Artificial Sequence: Synthetic coding sequence
  source 1..387: mol_type = other DNA
atggagtgggacaacggcaccggccaggccctgggcctgccccccaccacctgtgtatatagagagaactttaagcaacttctgctacctccggtgtacagcgcagttctcgccgccggccttcctctgaatatctgcgttatcacccagatatgtacctcccggagggctctcacacgcaccgctgtgtatacccttaatttggctcttgccgacttgctgtatgcatgctcactgcctctccttatttacaattacgcacaaggagaccactggccctttggtgactttgcctgtcgcctcgttagatttctcttctacgctaatcttcacggctccatactattcctgacatgtatctctttccaaaggtatctgggcatctag

SEQ ID NO: 202126 - DNA, 738 bp, synthetic construct
  misc_feature 1..738: note = Description of Artificial Sequence: Synthetic coding sequence
  source 1..738: mol_type = other DNA
atggccaacaactacaagaagatcgtgctgctgaagggcctggaggtcatcaacgactaccacttccgaatcgttaagtccctcctcagtaacgatttgaagctaaaccccaagatgaaagaggagtatgacaaaatccagatcgcagatctgatggaagagaagtttcctggtgatgcaggcctcggcaagcttattgaattctttaaggagatcccaacactgggcgatctggcggaaactctgaaacgagagaagctgaaagttgccaacaagattgaatcaataccagttaaaggaataattccatctaagaaaacaaaacaaaaggaagtgtacccagccactcctgcttgtactccaagcaatcgcttaacggcaaaaggggccgaggaaaccctcggcccccagaaacggaaaaagcctagcgaggaagaaacagggacaaaacggtcaaagatgtccaaagagcaaactcgccccagctgttccgctggcgccagcacatcaacggcaatgggtagaagtcctcccccccagactagctcttctgctccacctaatacctcatccacagaggcttacctgatgaatcttactttatctttgaccgcagggtccttcctaagttgcgctgtgtggggtagagatcgagagctaagaaacctggagttatccgctacagacagtctaagtacagcccctatctattatacccccatccctttcgcccactag

SEQ ID NO: 202127 - DNA, 1452 bp, synthetic construct
  misc_feature 1..1452: note = Description of Artificial Sequence: Synthetic coding sequence
  source 1..1452: mol_type = other DNA
atggccaacaactacaagaagatcgtgctgctgaagggcctggaggtcatcaacgattatcacttcaggattgtgaagtctctgctgtctaacgacctgaaactgaatcccaagatgaaggaggaatacgataagattcagatagccgacctgatggaagagaagttcccaggtgatgctgggctggggaagcttatcgagttcttcaaagaaatccctaccttgggtgatctggccgagactttgaaacgggaaaagctcaaagtaaaggggatcattccctcaaaaaagacaaaacagaaagaagtgtatccagccacacctgcctgcacaccttctaaccgtttgacagccaaaggagccgaggaaaccttggggcctcagaagcggaagaagccaagcgaagaggaaaccggaaccaagcgtagtaaaatgtccaaagaacagacgagaccgtcatgtagtgccggtgcttcaactagcacagccatggggagaagccccccacctcagacaagctcctctgcgcctccgaatacaagctccaccgaaagcttgaagccactcgccaatcgtcatgccactgccagtaaaaacatatttagagaggatccaatcattgcaatggtcctcaacgctacaaaagtgttcaagtacgaaagctctgaaaacgaacaacggcggatgtttcacgccacagtggcgacacagacacagttctttcacgttaaggtgctaaacataaacctgaagcgcaagtttatcaaaaaaaggatcataattatcagcaactatagtaagcgtaacagccttctcgaggtgaatgaggcctctagcgtcagcgaagccggtccggatcaaaccttcgaagtccccaaagacatcatccggcgcgcgaaaaaaatccctaagatcaatattctccataagcagacgagcgggtacattgtgtacggattgtttatgttacataccaaaatcgtgaatcggaagactacaatttatgaaatacaagacaaaactggatctatggctgttgtggggaagggcgagtgccacaacatcccttgtgagaagggggacaagctgcggctgttctgctttcgcctgcggaagagggaaaacatgtccaagctcatgtctgagatgcactccttcattcagattcagaaaaatacgaaccaacgtagtcatgattcccgttctatggccctgccacaggaacagagtcagcacccaaagcctagtgaagcaagcaccactctaccagaatcccatctgaagacgccccaaatgccccctaccaccccctctagttcctccttcaccaaaaaggatgaaactcaccccggagcccagagcagccctgcaaattttcgaattacctcgcccacggtcgcccctccactttcatcggacacaagtacaaataggcacccagcagttccatag

SEQ ID NO: 202128 - DNA, 1479 bp, synthetic construct
  misc_feature 1..1479: note = Description of Artificial Sequence: Synthetic coding sequence
  source 1..1479: mol_type = other DNA
atggccaacaactacaagaagatcgtgctgctgaagggcctggaggtcatcaatgattaccactttcgcatagtcaagagtctgctgtcaaacgacctaaagctcaacccaaaaatgaaggaagagtatgataaaatacagatcgccgatcttatggaggaaaagtttcccggagatgctggcctggggaaactgatcgagtttttcaaagaaatccctacccttggcgacctggccgagaccctgaaaagggaaaagcttaaagtcgccaataaaatagagtctatccctgtaaaaggaataatcccctcaaagaagactaaacaaaaggaggtataccctgctacccccgcctgcacacccagcaatcggcttaccgctaagggcgcagaagaaacgctgggccctcagaaaaggaagaaaccatctgaagaggagacaggaactaagaggtccaagatgtccaaagagcagactaggccttcttgttcggccggcgcctctacgtccactgcgatgggccggagtccccccccgcagacatcctcctctgctccacctaatacgtccagcacggaatcattaaagcccctcgcaaatagacatgccacggcaagcaagaatatctttcgggaggatcccatcattgccatggtgttaaatgccactaaagtctttaagtatgaaagtagcgaaaatgagcagcggagaatgttccacgcgactgtagcgacccaaactcaattcttccatgtaaaagtgctgaatatcaatctaaaaagaaagttcatcaagaaaagaattattatcatatctaactactctaagcgaaattcactgctggaagtgaatgaggccagtagcgtgtcagaagcagggcccgaccagactttcgaagtgccaaaggatatcatacggagggccaagaagattcctaagattaatatcctccacaagcagacaagcggatacatagtgtacggcctgttcatgctgcataccaaaatcgtcaaccggaagaccacaatttacgaaatccaggacaaaactggatcaatggccgttgtggggaagggcgagtgccacaacatcccttgcgagaagggcgataagctcaggttgttctgcttccgcctgcggaaaagggaaaacatgtcaaagctcatgtctgaaatgcattcctttatacagatccagaagaacaccaaccagagatcacatgattcacggagcatggcattaccgcaagagcagtcacagcaccccaagccctcggaggcttctaccacactgcctgagagccacctaaaaacaccacagatgcctcctacaacaccctcgtcctcatccttcaccaaaaaggatgaaacacatccgggcgctcagtcttccccagctaattttcggattaccagcccaacagtcgccccacctttatcttccgacacgtcaaccaatcggcatccagccgtgccttag

SEQ ID NO: 202129 - DNA, 1359 bp, synthetic construct
  misc_feature 1..1359: note = Description of Artificial Sequence: Synthetic coding sequence
  source 1..1359: mol_type = other DNA
atggccaacaactacaagaagatcgtgctgctgaagggcctggaggtcattaatgactatcatttccggatagttaaaagtctgctgagtaatgaccttaaattaaatccaaaaatgaaagaagaatatgacaagatccagatcgcggacttgatggaggagaagtttcccggagacgcagggctggggaagctcatcgagtttttcaaggagatccccacactgggcgatctagctgagactctaaagagagagaagcttaaggtgaaggggattatcccatccaagaaaacgaaacagaaagaagtttaccccgcaactcctgcttgtacgcccagtaatcggctgactgctaagggggcggaagagaccttgggacctcagaaaaggaaaaaaccttccgaagaggaaaccggaaccaaacggtctaagatgagcaaagagcagacacgtcccagctgctctgcaggagcatctactagcacagccatgggacggagtccacccccacagacaagctcctcagcccctccaaataccagtagcacagagagcctcaagcccttagctaatagacacgccacagcatcaaaaaacatttttcgtgaggatccaattattgctatggtgctgaacgccactaaggtgttcaagtatgaatcatctgagaatgaacagagacgcatgttccacgctacggttgccacccagacacagtttttccacgtcaaggtgctgaacatcaacttaaagcgtaaatttattaagaaaaggattatcataattagtaactattcgaagcgcaattcactgctggaagtcaacgaagcatcctcagtatccgaagcgggaccggatcagacttttgaagtgccaaaggatattatccggagagccaagaagatcccgaagatcaatatcctccacaagcaaacgagtggctatattgtatacgggctgtttatgctccacacaaagatcgtgaacagaaagaccacgatttacgaaatccaggacaagaccgggtccatggccgtcgttggtaaaggggagtgtcacaacatcccgtgtgaaaagggagataagcttaggctgttctgcttcaggctacgaaagcgcgagaatatgtcaaagctgatgtcagaaatgcatagttttatccagattcagaagaatactaatcagaggagccatgactctcgttccatggccctaccacaggagcagtcacaacaccctaagcctagcgaagcctcgaccacactccccgaatcccaccttaaaacaccgcaaatgccccctacaacgcctagtagcagttcgtttacaaaagtaactaaggacaaagacatcaaatag

SEQ ID NO: 202130 - DNA, 1386 bp, synthetic construct
  misc_feature 1..1386: note = Description of Artificial Sequence: Synthetic coding sequence
  source 1..1386: mol_type = other DNA
atggccaacaactacaagaagatcgtgctgctgaagggcctggaggttataaatgactatcacttccggatcgtgaagagcctgttgtcgaacgatctgaagttaaaccctaaaatgaaggaggaatatgataaaattcaaatcgcagatctcatggaggaaaagtttcctggagatgccgggctgggtaaattaatagagttttttaaagagattcctacactgggcgatcttgccgaaacattgaaaagagaaaagctgaaggttgcaaacaaaatcgagtcaatccctgtgaaagggattattcctagtaagaaaacaaaacagaaggaggtataccctgctacacccgcttgcacaccaagtaacaggctcaccgccaagggggcggaggagactctcggaccacagaaacggaagaagccgtccgaggaggagacaggcaccaaacgttccaagatgtccaaagagcagacccggccttcatgctccgctggagcctctacttcaaccgccatgggccgatcccctcctcctcagacaagctctagtgccccccccaatacttcaagcacagagtctctgaaaccactcgcaaacagacacgctaccgcttctaaaaatatttttagagaggacccaattattgctatggttcttaacgcgaccaaagtgtttaagtatgagtcaagcgaaaacgaacagaggcgcatgttccatgctacagtcgccacgcagacgcagttttttcatgtcaaggttctcaatatcaatcttaaacgaaaattcatcaagaagcgcatcattattatatccaattactcaaagcgcaactctctgcttgaggtgaatgaggcatcttcggtgtctgaagcaggacctgatcaaacctttgaggtgccgaaggacattatccggagggccaagaagattcctaagataaacattcttcataagcagacctctgggtacattgtatacggcctcttcatgttgcacactaaaattgtgaacaggaagaccaccatttacgaaattcaggataaaactggatctatggctgtggtcgggaagggagagtgtcataacattccgtgcgaaaagggcgataaactgcgcctcttttgcttccgcctgaggaagagagagaatatgtccaagctcatgagcgaaatgcattccttcatacagatccagaagaacaccaatcagcgaagtcacgactcacgttctatggcccttccccaggagcagagccaacaccctaagcccagtgaagcatcaaccaccctgcccgagtctcacctgaaaactcctcagatgccccctactactcctagcagcagctcctttaccaaagtgaccaaggataaggacattaagtag

SEQ ID NO: 202131 - DNA, 453 bp, synthetic construct
  misc_feature 1..453: note = Description of Artificial Sequence: Synthetic coding sequence
  source 1..453: mol_type = other DNA
atggccaacaactacaagaagatcgtgctgctgaagggcctggaggttatcaatgactaccacttcagaattgtaaagtcactgctttcaaatgatcttaagttgaaccccaaaatgaaggaagagtacgacaagattcagattgctgatctcatggaggaaaagttcccaggggacgcgggactgggcaaattaatcgagttcttcaaggaaatccctacccttggagatcttgctgaaaccctaaagcgggaaaagctaaaagtagccaataagatagagtccatccctgtgaagggaattattccttccaagaaaactaaacagaaagaggtgtaccctgctaccccagcttgtacaccttcaaatagactcacggccaagggcgcagaggagactctcggaccacagaagcggaagaaaccaagtgaggaggagaccggcaccaaatag

SEQ ID NO: 202132 - DNA, 399 bp, synthetic construct
  misc_feature 1..399: note = Description of Artificial Sequence: Synthetic coding sequence
  source 1..399: mol_type = other DNA
atggccaccaccgtgaccctggagaagtgcggccacaacaagggctacaaaggcctggacaattgcagattttgcccgggctcgcaatgttgcgtagaagatggccctgaatctatagatagtatcatcgacatggacgcagtctgtaaaagggtcactactttgggactggacgtgagcgtcactatttcccaagacgccggccgttacttgtgcgactttacgtactacacatcactgtaccagtcacatggtaggtccgctttcgtccatgtccccccgctgggcaagccatacaacgcagatcagctgggccgagcgctgcgcgccattatagaggagatgttggatctcctcgaacagagtgagggaaaaattaactattgtcataaacactag

SEQ ID NO: 202133 - DNA, 630 bp, synthetic construct
  misc_feature 1..630: note = Description of Artificial Sequence: Synthetic coding sequence
  source 1..630: mol_type = other DNA
atggagcagccccggaaggccgtggtggtgaccggcttcggcccctttggcgagcatactgtgaatgcctcttggatcgcagttcaggagctcgaaaaactaggactgggggactcagtcgatctccacgtatatgagattccagtggagtaccagacagtccagcggctgataccagctctgtgggaaaaacactccccccagctggttgtccacgtgggggtgtccggaatggcaactacggtgactcttgagaagtgtggtcataacaagggttacaaggggctcgacaactgtagattttgccccggttctcagtgttgcgtggaagatggccccgagagcattgactccataattgacatggatgctgtctgcaagagagtaacaacccttggcctggatgtttctgtgacaattagccaggacgctgggagatacctgtgcgatttcacctattataccagtttgtaccagagccacgggagatccgcattcgtgcatgtgccccctctcggtaagccttacaacgccgatcagctgggccgcgccctaagggctatcattgaggagatgctggatcttttggaacagtctgaaggtaaaattaactattgccacaaacactag

SEQ ID NO: 202134 - DNA, 609 bp, synthetic construct
  misc_feature 1..609: note = Description of Artificial Sequence: Synthetic coding sequence
  source 1..609: mol_type = other DNA
atgaagaaggcccggaacgacgagtacgagaacctgttcaacatgatcgtggagatcccaaggtggacgaatgcgaagatggagatcgctaccaaggagcccatgaatcccattaaacaatatgttaaagatggcaaactgcggtacgtggcgaatatttttccctacaaagggtatatctggaactacgggacactcccccaaacttgggaggacccccacgagaaagataaatcaacaaattgcttcggagacaacgatcctatcgatgtctgtgagatagggtccaaaattctttcttgcggggaagtgatccacgtgaaaattctgggtatactcgctttgatcgatgagggcgagaccgactggaagctaatagcgatcaatgccaacgatccagaggctagtaagtttcacggattgagaaacatccccgtgtacactattaataggatcgtaatcctccctagcttagaccggtcacagacctcaagcctctcctatcttccggcacaccaggattcttgcgtgcctctcgatgcggcgttgcatgtggtgttgtacttctgttcactcttaggcctccaatcatatcttagttgtttttag

SEQ ID NO: 202135 - DNA, 1005 bp, synthetic construct
  misc_feature 1..1005: note = Description of Artificial Sequence: Synthetic coding sequence
  source 1..1005: mol_type = other DNA
atgagcgccctgctgcggctgctgcggaccggcgcccccgccgccgcttgcttacgcctcggtaccagcgccgggacaggttcccgccgcgcaatggccctctatcacacggaggagaggggccaaccttgtagtcaaaactataggctgttcttcaagaatgtaacaggccattatatatctccctttcatgatatcccattgaaagtgaattccaaggaggaaaacgggattccaatgaaaaaggctcggaacgatgagtatgagaacctgttcaacatgatcgttgagattcccaggtggaccaatgctaaaatggagattgcaactaaagagcctatgaaccctatcaagcaatacgtcaaagatggcaaactccggtacgtggcgaatatcttcccatataagggctacatctggaactacggaactctcccacagacatgggaagatccccacgagaaggataaatccacaaattgtttcggagataatgatcctatagacgtgtgcgaaataggctccaagatactgagctgcggagaagtgatccacgtaaaaattctaggaatcctagccctaattgatgaaggggagaccgactggaaattaattgctatcaatgccaacgatcctgaggcgtctaaattccatgatattgatgatgtgaagaagttcaagcctggctatctggaagcgacactgaactggttccgactgtacaaggttccagacggaaagccagagaatcagtttgccttcaatggtgagttcaagaataaggccttcgcactcgaggtcattaagtcaacgcaccagtgttggaaggcactattgatgaagaagtgtaacggcggagcaataaattgcacaaacgtccagatcagcgattccccttttaggtgcacccaagaggaggccagaagtcttgttgagagcgtgtcctcgtctcctaacaaggagagcaacgaagaggaacaggtttggcactttctgggcaagtag

SEQ ID NO: 202136 - DNA, 918 bp, synthetic construct
  misc_feature 1..918: note = Description of Artificial Sequence: Synthetic coding sequence
  source 1..918: mol_type = other DNA
atgagcgccctgctgcggctgctgcggaccggcgcccccgccgccgcttgcctcagactcggcacctcagctggaacagggtctcgcagagccatggctctgtatcatacggaagagagggggcaaccttgttcgcagaattacaggcttttttttaaaaacgtgaccgggcactatattagccctttccacgacatacccctcaaggtcaatagcaaggaggagaatggtatccccatgaagaaagctaggaatgatgagtacgaaaatttgtttaacatgatagtcgagattcctcgatggacaaatgccaaaatggagatcgctaccaaggagcccatgaatccaataaaacaatacgtgaaggacggcaaactgcggtatgtggccaatattttcccatacaaaggttacatttggaactacggaacgctgcctcagatcctgtcctgcggagaagtgatacatgtcaaaatcctgggtattctggcactcatagatgaaggggaaaccgactggaaactgatcgccattaatgctaacgatccagaagcaagcaaattccatgacatcgatgatgtcaaaaaatttaagcccggatatctggaggcaaccctgaattggttccgcctctataaagttcctgacggtaagcccgaaaatcagtttgcctttaacggcgaattcaaaaataaggctttcgccctggaggtgataaaatctacacaccagtgctggaaggcactgctgatgaaaaaatgcaacggaggagccatcaattgtactaacgtgcagatttcagactcaccttttcggtgtacccaggaggaggcccggtcattggtcgaaagtgtgagttcatccccaaataaagagtcaaacgaagaggaacaagtctggcacttcctgggcaaatag

SEQ ID NO: 202137 - DNA, 507 bp, synthetic construct
  misc_feature 1..507: note = Description of Artificial Sequence: Synthetic coding sequence
  source 1..507: mol_type = other DNA
atgagcgccctgctgcggctgctgcggaccggcgcccccgccgccgcctgcctgcggctggggacatcagctgggacaggatcaaggcgcgcaatggcactgtaccacaccgaggaaagaggacagccctgtagccagaattaccggctctttttcaacatcgatgacgtgaaaaaattcaaacccgggtacctcgaagcaaccctgaactggtttcggctgtacaaggtgccagatggaaagccagagaaccagtttgccttcaacggtgagtttaagaataaggcttttgccttagaagtgatcaaaagcacacaccagtgttggaaggctctgttgatgaaaaaatgcaacggaggtgccatcaactgtaccaacgtgcaaatttccgattcacccttccgttgtacccaagaggaggcccgtagcttagtcgaatcagtgagttcttctcccaataaagagtctaacgaagaggaacaggtgtggcactttttggggaagtag

SEQ ID NO: 202138 - DNA, 1050 bp, synthetic construct
  misc_feature 1..1050: note = Description of Artificial Sequence: Synthetic coding sequence
  source 1..1050: mol_type = other DNA
atgagcgccctgctgcggctgctgcggaccggcgcccccgccgccgcctgtcttagacttggtaccagcgcaggaaccggaagccggcgggccatggccctgtatcatacagaagagaggggccaaccttgttcacagaactacaggttgtttttcaagaatgttacggggcactacatcagtccattccacgatattcccctgaaagtcaatagcaaagaggatacagaggcccagggtattttcatcgacttaagcaagatctgggagaacgggattcctatgaaaaaggcaaggaacgacgaatacgaaaacttattcaatatgatagtggaaattccacggtggactaatgccaagatggagatcgccactaaagaacctatgaaccctatcaagcagtacgttaaagacggcaaactccgctacgttgcaaacattttcccgtacaaaggctacatttggaactatggaactctgcctcaaacgtgggaagatcctcacgaaaaggacaagtctactaattgctttggcgataacgatccaatagatgtctgcgaaatcggctccaagattctgagttgtggcgaggtgatacacgtgaagattctgggtatcttggctctgattgatgagggtgagactgactggaagctaattgcgattaacgccaatgacccggaggcgtccaagtttcacgatattgacgatgtgaagaagttcaagcccggttatttggaggctactctcaactggttccgcctatacaaggtgcccgatggcaaacccgagaatcaatttgcattcaatggcgagtttaaaaacaaggcattcgcactggaggtgatcaaatctactcaccagtgctggaaagctcttctcatgaaaaagtgcaatggcggcgcaattaattgcacaaatgttcaaattagcgactcgccattccgttgtacgcaagaggaggctagatcactcgtcgaatctgtgtctagtagccccaacaaagagtccaatgaggaggaacaggtatggcattttctgggtaaatag

SEQ ID NO: 202139 - DNA, 951 bp, synthetic construct
  misc_feature 1..951: note = Description of Artificial Sequence: Synthetic coding sequence
  source 1..951: mol_type = other DNA
atgagcgccctgctgcggctgctgcggaccggcgcccccgccgccgcctgtctcaggctaggtacgtctgctggcacaggatctagacgtgcaatggccctgtaccatacggaggaaagagggcagccctgttcacagaattacaggctcttttttaagaatgtcactggacactatattagtccttttcatgatatccctttgaaagtgaactcgaaggaagaaaatggtattcccatgaaaaaggctaggaacgacgagtacgagatcgctaccaaggagcccatgaatcctatcaagcaatatgtgaaggacggtaagcttcgctacgtggcaaacatctttccgtacaaaggttatatttggaactatggcactctccctcaaacctgggaggatccccatgaaaaggacaaatcaaccaattgcttcggcgacaatgatcccatcgacgtctgcgagatcggatctaaaatcttgtcatgcggggaggttatccacgtgaagatcctgggcatcttggccctaatcgacgaaggggaaacagattggaagctcatcgccatcaatgccaatgatccagaggcatcaaagttccatgatatcgacgatgtcaagaagtttaagccaggctacctggaggccacactgaactggtttagattatataaagtcccggatggcaaacccgagaatcagtttgcttttaatggggagttcaaaaataaagcattcgcactcgaagtaatcaagtcgacacatcagtgttggaaggcactcctgatgaagaaatgcaacggaggcgccatcaattgcacaaacgtccaaatctctgacagcccatttaggtgcacacaggaagaggcaaggtcgctcgtggagagcgtctcatccagccccaacaaagaaagtaatgaggaagaacaagtctggcatttcttggggaagtag

SEQ ID NO: 202140 - DNA, 699 bp, synthetic construct
  misc_feature 1..699: note = Description of Artificial Sequence: Synthetic coding sequence
  source 1..699: mol_type = other DNA
atgagcgccctgctgcggctgctgcggaccggcgcccccgccgccgcctgtttacgcctgggtacgtctgctggaacaggctctaggagagcgatggccctctatcacaccgaggaacggggtcagccttgctcccagaattaccggcttttttttaaaaacgtcacgggacactatatatccccctttcatgatatcccccttaaggtgaacagtaaggaaattctgtcgtgcggagaggtgatacacgttaagatacttggtattctggccctgatcgatgaaggggagactgactggaagttgattgccatcaacgccaatgaccctgaggccagtaagttccacgatatcgacgacgttaaaaagtttaagccaggttacttggaggctaccctcaactggttcagactatataaggtgccggacggaaagccagaaaaccaatttgcgttcaacggcgagtttaaaaataaggcctttgcactcgaggtgattaagtccacacaccagtgctggaaagccctcctgatgaagaagtgtaacgggggcgctatcaactgtacgaacgtgcaaatttccgactctcccttccggtgcacacaggaagaagcaagaagcctcgtagagtcagtctcttcctcacccaacaaagaaagtaacgaggaagagcaggtgtggcattttttgggaaaatag

SEQ ID NO: 202141 - DNA, 960 bp, synthetic construct
  misc_feature 1..960: note = Description of Artificial Sequence: Synthetic coding sequence
  source 1..960: mol_type = other DNA
atgagcgtgggcttcatcggcgccggccagctggccttcgccctggctaagggatttacagccgctggcgtgttagctgcacacaaaatcatggcgtccagccccgacatggacttggcaacggtttccgccttgaggaagatgggggtcaagcttaccccccacaataaagaaactgtacagcacagcgacgtgctgttcctcgctgtcaagcctcatatcattccttttatactggacgagataggggcagatatcgaggaccggcacatcgtcgtatcatgtgccgccggcgtgaccatctcctccatcgagaagaagctgagcgcatttcgacctgctcccagggtgatcagatgcatgaccaacaccccagtggttgtgcgggagggtgccaccgtctatgccacaggcacacacgcccaagtagaggatggaaggctcatggagcagcttctgtcctctgtcggtttttgcacagaggtagaggaagatttgattgacgccgtaacagggctaagtggctctggcccagcttacgcttttacggcactggatgccctggccgatggcggagtaaagatggggctgccgaggaggcttgcagtgcggctgggggcccaggccctgcttggggcagctaaaatgcttttgcatagtgaacaacaccccggacaactcaaagacaacgtttctagtcctggtggcgccactattcacgcccttcacgttctggagagcgggggtttccgtagcctcctgataaacgctgttgaggcttcctgcatccgtaccagggagttacagagcatggcagatcaggagcaggtgagccccgcagctattaaaaagaccatcctcgacaaagtgaagctggacagccccgctgggactgccctctcaccttctggccacaccaagctgttgccacgttcattggcacccgcgggaaaggactag

SEQ ID NO: 202142 - DNA, 951 bp, synthetic construct
  misc_feature 1..951: note = Description of Artificial Sequence: Synthetic coding sequence
  source 1..951: mol_type = other DNA
atgagcgtgggcttcatcggcgccggccagctggccttcgccctggcaaagggcttcacagctgctggggtgctcgccgcccacaaaatcatggcgtcttccccagatatggatctggccacagtgtctgccttaaggaagatgggggtgaagttgacaccgcataacaaggagactgtccagcacagcgatgtgctttttctggctgtcaaacctcacatcatccctttcatcctagatgagattggtgcggacatagaagacaggcacatcgtggtgagctgcgcagcaggcgtgaccatttcttcgatagaaaagaagcttagcgccttccgcccagccccgcgcgttataaggtgcatgaccaataccccagttgttgtacgagagggcgccacagtttatgcaactggcacccatgctcaagtggaggatgggaggctgatggaacagctgctctcttctgtggggttttgcactgaagttgaggaggatttgatcgacgccgtaacaggtttatctggcagtggtcctgcatatgcgttcacagcactggatgcacttgccgatggcggtgtgaagatgggcctgccccgcagactggcagtgaggctgggggcgcaggctctgctcggtgcagctaaaatgctcctccatagcgagcagcaccccgggcaactgaaggacaacgtgtctagccccgggggcgccacgatccacgctctgcacgtgcttgaaagcggaggctttcgtagcctgctgattaacgctgtcgaagcctcttgcatcagaacacgtgagttacagagcatggccgatcaggaacaggtctcaccagcagccattaagaagacaatcctcgataaagaccatctgcctctggaactgggatctcctgagggtctgcatcctctcttgctgcaatatcagctggctcgagctccgtcctag

SEQ ID NO: 202143 - DNA, 1041 bp, synthetic construct
  misc_feature 1..1041: note = Description of Artificial Sequence: Synthetic coding sequence
  source 1..1041: mol_type = other DNA
atggtgggcggcggccggcgggtgggccgggacgagcccgtgccctccgtgggtgctctgggtcagggttccccagatagtatgtctgtgggctttataggagctggtcagcttgcctttgctctggcaaaaggctttaccgcggcaggcgtgttggctgctcataagatcatggcttcctcccccgacatggaccttgcgactgtgtctgcattacgtaaaatgggcgtcaagctgactccccacaataaagagacagtgcagcattctgatgtactgtttctcgcagtgaaaccgcacattataccgtttatcctggatgagattggtgctgacatcgaagataggcacatagtcgtgagctgtgccgcaggcgtcacaatctcctcaatcgaaaaaaagctcagtgcctttcggcctgccccacgcgtaattcggtgcatgactaataccccagttgtcgtgagagagggagccactgtttacgctaccgggactcatgctcaagtggaggacggacgtctaatggagcaactgctgagcagtgtgggattttgcaccgaggtcgaggaggacctgatcgatgcagttaccggtctgtccggttcgggccctgcctatgccttcactgccctggatgccctcgccgacggaggagtgaagatgggcctccccaggcgtttagccgttaggctgggagctcaggctctgctcggggccgctaaaatgctcttgcacagcgagcagcaccccggccagttgaaggataatgtttcgtcacccggaggagcaacaattcatgcacttcacgttcttgaaagtgggggcttcagatctcttttaattaatgctgtagaagcgagctgtattagaacacgtgagcttcagtctatggcagaccaggaacaggtttctccagcagccatcaaaaagacaatactggataaagtcaagctggatagtcccgcggggaccgccctcagtccctcaggacatacaaagctgctgcctcgaagcctggcgcccgccggcaaggactag

SEQ ID NO: 202144 - DNA, 819 bp, synthetic construct
  misc_feature 1..819: note = Description of Artificial Sequence: Synthetic coding sequence
  source 1..819: mol_type = other DNA
atgagcgtgggcttcatcggcgccggccagctggccttcgccctggctaagggcttcactgcggcaggcgtcctggcagctcacaagatcatggcgtctagcccggatatggacctcgctactgtcagcgcccttcgtaaaatgggggtgaaactgactccacataacaaggagactgtgcagcactctgatgtcctgttcctggctgtgaagccccatatcatcccatttatactcgacgagatcggggccgatatcgaggacaggcatattgtggtttcttgcgccgccggcgttacaatttcctctatagaaaaaaaactttccgctttccgacctgcaccacgcgtgataaggtgcatgaccaacacccctgttgtggtccgagagggcgctacagtctacgcaacaggaacgcatgctcaggtggaggatggaagactgatggagcaactgctgtccagcgtgggattctgtacagaagttgaggaagatctcatcgatgccgtgacaggcctgtcagggagcgggcctgcgtacgcctttacagccttggacgccctggctgacgggggagtaaagatgggactgcctcggcgcctcgcagtccggctcggagctcaggccttgctgggcggatgtcaggatgcggccgctctgcgtaccgcccctcgccccgcacagggtcaacgtcaactgtcgtggtggggccatcatccatgcttagcgtgcgctggggaatggggcctgcccttgccggcgcaccagcggtgcggagggttgctccaccctcataccggcgcagctgtgcatggttag

SEQ ID NO: 202145 - DNA, 723 bp, synthetic construct
  misc_feature 1..723: note = Description of Artificial Sequence: Synthetic coding sequence
  source 1..723: mol_type = other DNA
atgagcgtgggcttcatcggcgccggccagctggccttcgccctggctaagggtttcacagctgcaggggtcctggccgctcacaaaatcatggcctctagcccggatatggatctggctacagtatccgccctgaggaaaatgggggtgaaactgaccccccataataaggaaactgtgcagcacagcgacgtgctgtttctagcggtgaagccacatattattagtatagaaaagctgtctgcgttcaggcctgcccctcgagtgattcggtgtatgactaacactcctgttgtggtgagggagggggccaccgtctacgcaactggcacacacgctcaggtggaggacggacgtctgatggagcagctgctgtctagtgtgggattttgtaccgaagttgaggaagatttgattgatgctgttaccggcctttctggttccggaccagcctacggagccgcgaaaatgcttttgcactccgagcaacatccaggccagctaaaagacaacgtgagctctccgggaggggctaccatacacgcactccatgtgctcgagagtggtggttttagaagtttgctgatcaacgccgtcgaggcaagctgtattagaactcgatgggccccagccctgcccgcctccctcgtctccagtccatgtatggctgaggcgtcactgacacatatttgcagttttacccactccgccgatacctattag

SEQ ID NO: 202146 - DNA, 1590 bp, synthetic construct
  misc_feature 1..1590: note = Description of Artificial Sequence: Synthetic coding sequence
  source 1..1590: mol_type = other DNA
atgctgaagttccggaccgtgcacggcggcctgcggctgctgggcattaggcgtacttctacagcccctgctgcatctcctaatgtgcgcagactggagtacaaacccatcaaaaaagtaatggtggctaataggggagagatagccattagggtattcagagcttgcactgagctcggaatccgaactgttgcgatttactcggaacaggacacaggacagatgcaccgtcagaaggcggatgaggcctacttgataggacggggacttgcaccagtccaagcctatctacatatcccagatatcattaaggtcgccaaggagaacaatgttgacgctgtacaccctggctatggcttcctttctgagagagcagattttgcccaggcctgccaggatgcaggcgtcagattcataggaccaagcccagaagttgtgagaaaaatgggcgacaaggtcgaggctcgcgccatagccatcgccgcgggggtccctgtagttcctggcactgacgcgccgattactagcttgcacgaggcgcacgagttttcaaatacgtacggcttccctatcatatttaaagctgcatatggagggggtggacgcgggatgagggtcgtccatagttacgaggagctggaagagaactacaccagagcatacagtgaggcactggcagcattcggaaatggagccctgttcgtggagaaatttattgaaaagcccaggcacatcgaggtgcagattctcggcgaccagtatggcaatattctgcacctctacgagcgggattgcagcattcagagacgccatcagaaggtggtcgagatagctccagcagcacacctagatcctcagcttcggacacgtttgacatccgatagcgtgaagctggccaagcaagtgggctacgaaaatgcagggacagttgaattccttgttgatcgccacggaaagcattacttcattgaagtgaatagcaggctgcaagtggaacacacagttaccgaagagatcaccgatgtcgatcttgtgcacgcccagatacatgtggcagaaggacggagtctgcctgacctgggactgcgacaggagaatataaggattaacggatgtgcaatccagtgcagggtcaccaccgaagatccagctcggtctttccagcctgacacaggacgcatagaggtcttccgcagcggcgagggcatgggcatacgccttgacaacgcatccgccttccagggcgccgtcatctctccccactacgactcactgctcgtgaaagtgatcgcccatgggaaagatcatccaactgccgccactaagatgagcagggccctcgctgaattcagggttcgaggggtcaaggtgcggcgtcaccaggcccagcctctcgccgctgctctgggcagaccttgtgggcaggaggctcgtcggccccaggcagcagtgaccgcaccaaccggtccaggaagcccaaccctagtcagagtgcctcctgctgctagagtgctgagctcaagattaggggggccgtctcagacaactccggaaacttctaccgaggtctccccaactattctgttgtag

SEQ ID NO: 202147 - DNA, 3537 bp, synthetic construct
  misc_feature 1..3537: note = Description of Artificial Sequence: Synthetic coding sequence
  source 1..3537: mol_type = other DNA
atgctgaagttccggaccgtgcacggcggcctgcggctgctgggcataaggcgaacctccacggctcccgccgcgtcgccaaatgtgcgtagactagaatacaaacccatcaagaaggtgatggtagccaacagaggagaaatagccattcgagtgtttcgagcctgcaccgagcttgggatacggacagttgccatttactcggaacaagacaccggccaaatgcataggcagaaggcagacgaggcctacctgatagggcgggggctggctcccgtccaggcttacctccacattccagatatcataaaggtggccaaagaaaataatgtggatgctgtccacccagggtacggttttttatccgagcgcgcagattttgcgcaagcatgtcaggatgcgggagttcgcttcattgggccctcaccagaggtggtccgcaaaatgggggataaggtggaagctagagccattgcaattgccgccggagtcccagtggtgcctggcacagatgctcccattacaagtctgcatgaagctcatgaatttagtaatacttacggcttcccgataatcttcaaagccgcttacggagggggtggccggggcatgcgcgtggtgcacagctacgaagaattagaagaaaactatacccgcgcatatagtgaagccctagcagctttcggcaatggagctctctttgtagaaaagttcatagaaaaaccaagacatattgaagttcagatcctgggcgatcagtatggtaacatcctccacctctacgaaagagactgttcgatccagcggcgtcatcagaaagtggtggaaatcgcacccgccgctcatctggatccacagctgcgtactcgtctcaccagcgatagcgttaagctggcaaagcaggtcggttatgagaacgctggaactgtggagtttctcgtggaccgtcacgggaaacactacttcatcgaggttaattcccggctccaggtggaacatacagtgaccgaggagattaccgatgtggacttggtgcatgctcagattcatgtggcagagggtcgctccctgcctgacctgggcctccggcaggagaatatcaggatcaacggatgcgcaatccagtgcagggtgacaacagaagatcccgctagatcatttcagcccgacaccggacgcatagaagtgttccgctcaggggagggaatgggcatacgcctggacaacgccagtgcctttcaaggggccgtcatctctccacattacgattctctcctggtgaaggttatcgctcacgggaaggaccatccaactgcagctacaaaaatgtccagagcgcttgcggagttccgggttaggggcgtcaagaccaatatagctttcctgcagaacgtattaaataaccagcagtttcttgcagggacagttgacacgcagtttatagatgagaatcccgaactgttccaattgaggcccgcgcagaaccgagcccaaaaattgcttcattacttggggcacgttatggttaacggaccaactactccaataccagttaaggcgagtccatcacctacagatcctgttgtccccgccgtccctattggcccacctcctgccggttttcgggatatcctgttaagggaaggccctgaaggcttcgcaagggccgtccggaaccaccccggactgttgctcatggatactacattcagagacgcccaccaaagcctgctggcaacccgggtgcgcacacacgacctaaagaagatcgctccttatgttgctcacaacttctcaaagttgttctcaatggagaattggggcggggccacctttgacgtggccatgcggttcctatacgagtgcccatggaggcgtctccaggagctgcgggagttgatccctaatattcccttccagatgctgctgaggggagccaatgctgtgggatataccaactatcccgacaatgtagtgtttaagttttgcgaggttgctaaagaaaatggcatggacgtctttcgggttttcgatagtctcaattacctccctaacatgctactgggaatggaggctgctggttccgccgggggggttgtcgaggccgccatttcctacactggggatgtcgccgacccaagccgtacgaaatactcactacagtattacatgggactggccgaggagctggttcgggcagggacgcatatcctctgcatcaaagatatggccggacttctcaagccgacagcatgtactatgctagtgtcttctcttcgggaccggttcccagatctacccctgcacatacatactcacgacacttccggcgctggagtcgccgccatgttagcttgcgcccaggcaggcgccgacgtggtggatgtcgcggcagatagtatgtcaggaatgacctcccagcctagcatgggcgctttggtggcatgcactcgcggcactcctctggacaccgaagttccgatggaaagagtgttcgattacagtgagtattgggagggtgcacgcggactttacgccgcatttgactgcactgcaaccatgaagagcggcaattcagacgtgtatgaaaatgaaattcccggcgggcaatatacgaatctgcattttcaggctcacagtatgggtcttgggtcaaaattcaaagaggtgaagaaggcctacgtggaggctaatcagatgctcggagatctcatcaaggtgacaccttccagcaagatcgtcggcgacctggcacagtttatggtgcaaaatggcctgtcacgcgcagaggccgaagcccaagctgaggaactgagcttcccacggtcagtggttgagttcctccagggatatatcggagtgcctcatggaggcttccctgaaccatttcgcagcaaagtcctcaaagacctaccacgcgttgaagggcgcccaggcgcctcccttcccccactggatcttcaggctctcgaaaaagaactggtcgaccgccacggcgaggaggtgacacctgaagacgtgcttagtgctgcaatgtatccagacgtttttgcccacttcaaggattttacagcaactttcggacctttggactctctgaatacccgactattcctccagggacccaaaatcgctgaggaattcgaagttgagctagaaaggggcaaaacactgcatataaaggctctggccgtgagcgatctgaatcgcgctggacagagacaggtcttctttgaactgaacggacagctgcggagcatactggtgaaagacactcaggcaatgaaagagatgcactttcaccccaaagccttgaaagacgtgaaagggcagattggggccccaatgcccggcaaagtgattgatatcaaggtcgtggcaggggccaaggttgccaaaggacagcctctttgcgtgctcagcgctatgaagatggagaccgtcgtgacctccccgatggagggcaccgtccggaaggttcatgtcactaaagacatgaccctcgagggggacgacttgattttagaaatagagtag

SEQ ID NO: 202148 - DNA, 3537 bp, synthetic construct
  misc_feature 1..3537: note = Description of Artificial Sequence: Synthetic coding sequence
  source 1..3537: mol_type = other DNA
atgctgaagttccggaccgtgcacggcggcctgcggctgctgggcattagaagaacatcgaccgccccagcagccagccccaacgtcagacggctggaatataagcccataaagaaagtgatggtggccaacaggggcgaaatcgctattcgcgtcttcagagcctgtactgagcttggtatccgcacggttgctatttacagcgagcaagacaccggacagatgcacagacagaaagccgacgaagcatatttgattggaaggggcctcgcccccgtacaggcttacttgcacatcccagacataattaaggtcgctaaagaaaataatgtcgatgctgtccaccctggatacggctttctgtctgagcgcgctgactttgcccaggcatgccaagatgccggtgtcaggtttatcggcccgtcgcctgaggtcgttaggaagatgggcgacaaggtggaggctagagcgatcgcaatcgccgcaggggttccagtggtcccgggaactgacgccccaatcacctctctgcatgaggcccacgagttctctaatacttatggctttccaattatctttaaggcagcctatggaggcggaggtcggggcatgcgcgttgtgcacagttacgaagagctggaggagaattatactcgcgcgtactccgaagccctggccgccttcgggaacggagcactgtttgtcgaaaagtttatcgaaaagccgagacacattgaagttcagatcctgggggaccaatacgggaacatactgcatttatatgagcgagattgcagcatccagcgccgtcaccaaaaagtggtagaaatcgccccggcagcacaccttgacccccaattacggacaaggctgacctccgattcggttaaactggccaagcaggtgggttacgagaacgcgggtacagttgaattcttggttgacaggcacgggaagcactactttatcgaggtgaacagcagactgcaggttgaacacaccgttaccgaggaaataacagacgttgatctggttcacgcccagatccacgttgcagagggccggtccctgcctgatctggggcttcggcaagaaaacatcagaataaatggctgcgccatacagtgtcgtgtcaccacagaggatccagcacgttctttccaacccgataccgggaggatcgaggtttttaggtccggtgaaggaatgggaattcggttagacaatgcttcagccttccagggcgcagttatctccccgcactacgacagcctccttgtcaaagtaattgcccatggaaaggaccacccaaccgccgctactaagatgtctagggccttggctgaatttcgggtgaggggagtgaagaccaatatcgccttcctgcagaatgtactcaataaccagcagtttctcgccgggaccgttgacacccagttcattgatgaaaacccagaactgttccagttgcgcccggctcagaatcgagcacagaagctgctacattacctgggccacgtcatggtaaacggccctaccactcccattccagttaaggcatccccctccccaacagaccctgtggtccccgctgtacccattggacctccaccagccggcttcagagacattctcctcagagagggacccgaaggatttgctagggcagtgcgcaaccacccgggccttctcctgatggacaccacttttcgagacgcgcaccagagcctgctcgccactagagtccgaactcacgacctgaaaaaaatagctccatatgttgctcacaatttctctaagttgttcagcatggagaactgggggggtgccaccttcgacgttgccatgcggtttttgtatgagtgtccatggagacgactccaggaactacgcgagctgattcctaacatccctttccaaatgttattgagaggggccaatgccgttggttatacaaactatcccgacaatgtggttttcaagttctgcgaggttgctaaggaaaacggcatggatgtgttcagagtctttgattctctgaactatctgcctaacatgttgttaggaatggaggctgcgggtagcgctggtggcgtcgtcgaggccgcaatctcctacaccggggacgtcgccgatcctagtcggaccaaatattcattacagtactacatgggcctcgctgaggaactggtgcgcgcaggcactcacatcttgtgtattaaggatatggcaggactgctgaaaccaactgcgtgcacaatgctcgtatccagccttcgagaccggtttccagatctccccttacacattcacacccacgacacatctggagctggggtggccgctatgctggcctgcgctcaggctggagccgatgtcgtcgacgtggccgcagattctatgagtgggatgaccagtcagccctccatgggagctctggtggcatgtacacgcggcacacccctggacaccgaggttccaatggaaagggtgtttgattatagtgagtactgggaaggagccagggggctgtacgcggccttcgattgcaccgctaccatgaagtccggcaattccgatgtatacgaaaacgaaattccaggcggacagtacactaatctgcatttccaggcccactctatggggttgggttcaaagtttaaagaagtgaagaaagcgtatgttgaggcaaaccagatgctgggtgacctgataaaggtgacacctagctctaaaatcgtgggcgacctcgcccaatttatggtgcaaaacgggctcagccgcgctgaggccgaagctcaggccgaggaactgagctttcctagatctgtggtggagtttctccagggatatattggcgtaccccatgggggctttcccgagccctttcggtctaaggtcctgaaagacctgcctcgcgtggagggacggcctggggcaagtttgccgcctttggaccttcaggccctcgaaaaagaactcgtggacagacacggagaagaggtgaccccagaagatgtgctcagcgccgcaatgtatcctgatgtctttgcccactttaaggactttacagcaacattcggccctctggacagcctgaatacacgtctgttcttacaggggcctaaaattgcagaagagtttgaagtcgaactggaaaggggtaagactctgcatataaaggcgctcgccgtttctgacttgaatagagcagggcagcgacaggtctttttcgagctgaacggacagctcagaagtattctcgttaaggatacacaggcaatgaaagagatgcacttccaccccaaggccctgaaggatgtgaagggccagatcggggctcccatgcccgggaaagtgattgacatcaaagtagtggccggggccaaggtcgccaaagggcaacccctctgcgtactctccgccatgaaaatggaaacagttgtgactagtccaatggaaggaacagtgagaaaggtgcatgtgactaaagacatgacactggaaggcgatgacctgattctggagatcgagtag

SEQ ID NO: 202149 - DNA, 3537 bp, synthetic construct
  misc_feature 1..3537: note = Description of Artificial Sequence: Synthetic coding sequence
  source 1..3537: mol_type = other DNA
atgctgaagttccggaccgtgcacggcggcctgcggctgctgggcataagacggacctcaaccgctcccgccgcaagtcccaacgtcaggcggttggaatacaagcccattaaaaaggttatggtggctaatcgtggtgagatcgccatacgcgtgttcagagcctgcactgagctcggcatccggactgtggcaatctactctgagcaggatactgggcaaatgcatcgccaaaaggccgacgaagcctaccttattgggcgtggactggcacccgtgcaggcctacctgcacattcccgacatcatcaaagttgctaaagaaaataacgttgatgcagtacaccccgggtatggcttcctgagtgagcgggccgacttcgctcaggcttgccaggatgctggggtgcgatttataggaccttcaccagaggtggtaagaaagatgggcgacaaagtggaagccagggctatcgcaatcgccgccggtgtgccagtggtgcccggaaccgacgcccccataacctctctgcacgaagctcatgaattctcaaacacatatggattccctattatatttaaggcagcttatggaggtggggggagagggatgcgagttgtgcacagctatgaggagttagaggaaaattacacccgtgcctactccgaggcccttgctgcctttggtaacggagcgctgtttgtggagaagtttattgagaagcccaggcatatcgaggtccagatactcggagaccagtatggtaacatcctacacctgtacgagcgtgattgcagcatccagcgccgtcatcagaaggtggtggagattgcccccgccgctcatctcgacccccagctcaggacgagactcacatccgattctgtgaaattggctaagcaggtcggctacgagaatgccggtaccgtagagttcctcgtggaccgccacggcaagcactattttatagaagtcaattctcgcctccaagttgaacacacagtgacggaggagatcaccgacgttgacctggtgcatgcccagatacatgtcgctgagggcagaagcctgccagacttggggctgcgccaggagaacattcggataaacggatgcgcaatacagtgcagagtgaccactgaggatcctgcccgttctttccagccagacaccgggcgcattgaggtctttagaagcggagaagggatggggatccgccttgataacgcaagcgcctttcagggcgctgtgatttccccacactacgacagtctgctggtgaaagttatcgcccacggaaaggatcatcccactgcagcaaccaagatgagtcgcgctttagccgagtttcgagtccgcggtgtcaagacaaacatcgccttcctgcagaacgtgttgaataaccaacagtttttggccggcacagtggacacccagtttattgatgaaaacccagagctctttcagcttaggcctgcccagaatcgcgcacagaaactgctgcattacctgggacacgtcatggtcaacggtcctactaccccaatccccgtaaaggctagcccttcaccaactgaccccgtggtaccagcagtgccaatcggccctcctccagcaggatttcgggatatcttattgcgggagggcccagagggctttgcgcgcgccgtcagaaaccacccagggctgctgctgatggataccacattcagagacgcccaccagagcttgctggccacccgcgtgcggacacacgacctcaagaagattgcgccgtacgtagctcacaacttctccaagctgttcagcatggaaaattggggtggcgccacctttgatgtggcgatgaggttcctctatgagtgcccctggcggaggctgcaagagctgagagaactgataccgaatattccctttcagatgctcctgagaggagcgaatgccgtcggatacactaactatcctgacaatgtcgttttcaaattttgcgaagtagcaaaagaaaacgggatggacgtattccgtgtgttcgacagtctgaactatctacctaacatgcttcttggaatggaggcagccggttccgcaggcggtgtcgtcgaggctgccatctcctataccggagatgtagctgatcctagcaggacaaaatattccttgcagtactacatggggctggctgaagaattagtgcgcgccggaactcatatactctgtattaaggacatggccggactcctgaagcctacagcttgtacaatgctcgtgagcagccttcgggatcgttttcccgatctccccctccacatccacacacatgacacatctggggcaggtgtagccgccatgctcgcttgcgcccaagctggagctgatgtggtggatgtggccgcggattctatgtccggaatgacatcccagccgagtatgggcgcactcgtcgcatgtacacggggaaccccgctggacaccgaggtgccaatggaaagggtgtttgactatagtgaatactgggagggagctcgaggcctgtacgccgccttcgattgcacggctactatgaaatcaggcaatagcgacgtttatgagaacgagatacccggtggtcaatatactaacctacatttccaggcccacagcatgggcctgggctccaagtttaaggaggtcaagaaagcttacgtcgaagctaatcagatgttgggggatcttataaaggtgacaccatcttcaaaaatagtgggagatcttgcacagttcatggtccagaacgggctctcacgggccgaggcggaggcgcaggctgaagagttgagcttccccaggtccgtggtggagtttttgcagggttacatcggcgtcccccatggggggttcccggagccctttcgtagcaaagtcttaaaagatctgccgagagtggagggccgcccgggggcgagcctacctccactggaccttcaggctctagaaaaagagttggttgacaggcatggggaagaggtaacccctgaagatgttctgagtgcagctatgtacccagacgttttcgcccatttcaaagacttcactgctacatttggacctctcgacagtctcaacacgaggttgttcctccagggacccaaaatcgccgaagagtttgaggtcgagttggagcgcgggaaaacactgcatattaaagctttggccgtttcagatttgaatcgggctggccagcgacaagtgttctttgagctgaatggacagctgcgttccatattagttaaggacacccaggccatgaaagaaatgcactttcaccccaaggcccttaaagacgtcaaaggccagataggagctcctatgcccgggaaggttatcgatatcaaagtagttgcaggcgctaaggtagccaagggacagcctctgtgtgtcctaagcgccatgaaaatggagactgtcgttaccagcccgatggagggcactgtccgcaaagtacacgtcaccaaggatatgacgctagagggtgacgacctgattctggaaatcgagtag

SEQ ID NO: 202150 - DNA, 615 bp, synthetic construct
  misc_feature 1..615: note = Description of Artificial Sequence: Synthetic coding sequence
  source 1..615: mol_type = other DNA
atgcggaagatgctggccgccgtgagccgggtgctgagcggcgcctcgcagaaacccgcatctcgggttctcgtcgcttccaggaacttcgcaaacgacgccaccttcgagatcaagaagtgtgacctccaccgtttggaggagggccctcctgtgacaaccgtcttaacaagagaagacggactgaagtattacaggatgatgcagactgtgcgcagaatggaactcaaggcagatcagctgtacaaacaaaagatcattcgcggattttgtcacctgtgcgatggccagtttctcctgcccctgactcaggaagcctgttgcgtgggcctggaagctgggatcaaccccacagaccacttgataaccgcctaccgcgcccacgggtttacgttcactagaggtctgagtgtgcgggaaatactggccgagctgacgggcaggaagggaggatgtgcgaaaggcaagggcgggtccatgcatatgtatgcaaaaaatttttacggtggcaacggaatagtgggcgcacaggtgccactgggcgccgggatcgccctggcttgcaagtacaacggtaaggacgaagtgtgcctcaccttatacggcgatggttag

SEQ ID NO: 202151 - DNA, 330 bp, synthetic construct
  misc_feature 1..330: note = Description of Artificial Sequence: Synthetic coding sequence
  source 1..330: mol_type = other DNA
atggagctgcagacctaccggtaccacggccacagcatgagcgaccctggggtgagttaccgcacccgcgaagaaatccaggaagtccgctcgaagtcggacccgattatgcttttaaaggatcggatggtgaactccaatctcgcttctgttgaggagctgaaggagatcgacgttgaggttcggaaggaaattgaggatgctgcacagtttgcaacagcagatccggagcctcccttagaagagcttggctaccatatatactcttctgaccctccatttgaggtacgaggtgccaatcagtggatcaagttcaagtctgtctcttag

SEQ ID NO: 202152 - DNA, 543 bp, synthetic construct
  misc_feature 1..543: note = Description of Artificial Sequence: Synthetic coding sequence
  source 1..543: mol_type = other DNA
atgcggaagatgctggccgccgtgagccgggtgctgagcggcgcctcccagaaacccgcctcgcgagtcttggtggcttcaagaaactttgctaacgatgccacctttgagattaaaaagtgcgacctgcacagactggaggaggggcccccggtgacaacagtgttgacacgagaggatggactcaaatactatcgaatgatgcagacagttcgccgaatggagctcaaggccgaccaattgtacaagcagaaaataataagaggcttctgccacctgtgtgatggccaggaggcgtgctgtgtcggactcgaagccggcatcaatccgactgaccatctgatcacagcatatagagcccatggcttcacatttacaagaggcctgagtgtgcgcgagattctggccgaacttacaggtcgaaaaggcggctgtgccaaaggcaagggcggcagcatgcacatgtacgctaaaaatttctatggtgggaatggcattgtgggggctcaggttgtgaaagatgaggattgcgtgctcctttag

SEQ ID NO: 202153 - DNA, 1287 bp, synthetic construct
  misc_feature 1..1287: note = Description of Artificial Sequence: Synthetic coding sequence
  source 1..1287: mol_type = other DNA
atgcggaagatgctggccgccgtgagccgggtgctgagcggcgccagccaaaagcccagacatggacttgcaactctgccttccctagtgagcatctccagattgaagcagagtagtcacctgggactaccgaaatgctgggactacagccacagtctgaagacacggcaggcatcgagagttcttgtggccagtaggaattttgcaaatgacgctactttcgagatcaagaagtgcgacttgcatcgccttgaggaaggtcctccagtgaccacggtgctgaccagagaggatgggctgaagtattaccgaatgatgcagacagtgcgacggatggaactgaaagctgatcagctatacaagcaaaaaatcatccggggcttctgccatctatgcgacggacaagaggcatgctgcgtgggactggaagccggtattaaccccacagaccacctcatcactgcctatcgggcgcacggatttacctttacacgaggcttgtccgtgcgcgagatcttggcagagcttaccggtaggaaaggtgggtgcgcgaagggtaaaggcgggagcatgcacatgtacgccaagaatttttacggcggtaacggcatcgtgggcgctcaggtccccctgggcgcgggaatcgctctggcatgtaaatacaatgggaaagacgaggtgtgtcttacgctctacggcgacggtgctgccaatcaggggcagatctttgaagcatataatatggccgccctgtggaagctgccgtgcatatttatatgcgagaataaccgatacggaatgggtacgagtgtagagcgagccgctgcatcaactgattattacaaaaggggggacttcattcctggactccgcgttgatggaatggacatcctctgtgttagggaggccaccagattcgcggctgcttattgtaggtcgggcaagggccctatactgatggagctccagacataccggtaccacgggcattcgatgtcagatccgggggtgtcatacaggacgagggaggaaatacaggaagtgcgctccaagtctgatcctattatgctcttgaaagacaggatggtcaatagcaacctggcctccgtcgaagaactgaaagagatcgacgtcgaggtgagaaaagagattgaggatgctgcacagtttgcaaccgccgacccagagcctccgctagaggagttaggctaccacatctatagctccgacccccccttcgaggtgcgaggagccaaccaatggatcaaattcaagtccgtaagctag

SEQ ID NO: 202154 - DNA, 366 bp, synthetic construct
  misc_feature 1..366: note = Description of Artificial Sequence: Synthetic coding sequence
  source 1..366: mol_type = other DNA
atgcggaagatgctggccgccgtgagccgggtgctgagcggcgccagtcagaagccttttgcgggatcaccacccccacggcacttaaccgtgggccgcaagctgtccagtcggtacgaagtgaccttcgaatcggctcaggcctcccgagtgttggtggccagtcgcaattttgccaacgatgctacgtttgagataaagaagtgcgacctgcatcgcctcgaggaggggcctccggtgacgacagtgctaaccagagaggacgggcttaagtactaccgcatgatgcagacagtgcgacgcatggaactgaaggccgatcagctttataagcagaaaataattcgcggcttttgtcacctgtag

SEQ ID NO: 202155 - DNA, 366 bp, synthetic construct
  misc_feature 1..366: note = Description of Artificial Sequence: Synthetic coding sequence
  source 1..366: mol_type = other DNA
atgcggaagatgctggccgccgtgagccgggtgctgagcggcgcctcacagaaaccgtttgctggaagtccccctcccagacatctcacagtcggaaggaagctttcctcccgttacgaagtgaccttcgagtcagcacaagcctctcgcgtgctagttgcctctcgcaatttcgcaaacgatgcgacgttcgaaatcaagaagtgcgacctgcaccggctggaggaaggaccgccagtgacaacagtactcactcgagaggatggattgaagtattatcgcatgatgcagaccgtacgccgtatggaactgaaggcagatcagttgtataaacagaaaatcattagggggttctgtcacctctag

SEQ ID NO: 202156 - DNA, 1173 bp, synthetic construct
  misc_feature 1..1173: note = Description of Artificial Sequence: Synthetic coding sequence
  source 1..1173: mol_type = other DNA
atgcggaagatgctggccgccgtgagccgggtgctgagcggcgccagccaaaagccagcctctcgcgtcttagtagcttcacggaatttcgccaacgatgccacgtttgagatcaagaaatgcgatttacacaggctggaagaaggcccgccagttactactgttctgaccagagaggacgggctgaagtattacagaatgatgcagacagtccgtcggatggagttaaaggccgatcagctctataagcagaaaattattcggggtttttgccatttgtgcgacggacaagaagcttgctgtgtcggccttgaggctggaatcaaccctaccgaccatctcattacagcctatcgtgcccacgggtttacattcacgcggggcctttctgtgcgggaaatcttggccgagcttacagggaggaaggggggctgcgcaaaaggaaagggcgggagcatgcacatgtatgccaaaaacttttatgggggcaacggtatcgtcggtgctcaggtgccactgggcgcaggcatcgctttggcctgtaagtacaacggtaaagatgaggtctgtctaaccctgtatggagacggagccgcaaaccagggtcagattttcgaagcctataatatggccgctctgtggaaattgccttgcattttcatatgtgaaaacaaccggtacgggatgggaacctccgtcgagcgtgcagctgccagtactgattactacaagagaggagacttcatccccggccttcgtgttgacgggatggacatactgtgtgttcgggaagcaacacgttttgcagctgcgtactgcagatccgggaagggccctatattgatggaactccagacctacagatatcacggacactctatgtcagacccaggtgtctcctacagaacccgcgaggagatccaggaggttcgatcgaagagcgacccaatcatgctgctcaaggacagaatggtgaactccaacctggcaagcgtggaggaactcaaggagatagatgtcgaagtgcgaaaagaaattgaggatgcagctcagttcgcaaccgccgatccagagcctcccttagaggaattgggctatcatatctatagcagcgaccctccttttgaggtgagaggggccaatcagtggatcaagtttaagagcgtttcatag

SEQ ID NO: 202157 - DNA, 618 bp, synthetic construct
  misc_feature 1..618: note = Description of Artificial Sequence: Synthetic coding sequence
  source 1..618: mol_type = other DNA
atgcggaagatgctggccgccgtgagccgggtgctgagcggcgcctctcagaagccaaggcacgggctggccacactgccttctctcgtgagtattagtcggctgaagcaatcttcccatctgggcctgccaaagtgctgggattactctcacagcttgaaaacgaggcaggccagccgcgtgcttgtggcttcaagaaacttcgcgaacgacgccacatttgaaataaagaaatgtgacttgcatagactggaggaaggcccgcctgtgaccaccgttttaacccgggaagacggtctgaagtactaccgtatgatgcagaccgttagacggatggaactgaaagcagatcagctgtacaagcagaaaataattcgaggtttttgccatctctgcgatggccaggaggcctgctgcgtcggactggaggcagggatcaacccgacagatcatctcatcacagcttatcgcgcccacggatttactttcactcggggcctcagcgtgagggaaatcctggccgagttgacaggtcgcaaaggtggatgcgcgaaagggaaaggcggatcaatgcacatgtacgcaaagaacttctatggggggaacgggatagtctag

SEQ ID NO: 202158 - DNA, 1080 bp, synthetic construct
  misc_feature 1..1080: note = Description of Artificial Sequence: Synthetic coding sequence
  source 1..1080: mol_type = other DNA
atgcggaagatgctggccgccgtgagccgggtgctgagcggcgcctcacaaaagccagcaagccgcgtactggtggcaagcagaaacttcgccaacgacgccactttcgaaatcaaaaagtgtgacctccatcgcctcgaggaagggccccccgtgactaccgtccttactcgcgaagatggtctgaaatattatcggatgatgcagaccgttcggcgaatggagctcaaggcagaccaattatacaaacagaagattatccgaggcttctgccacttgtgcgacgggcaggaagcctgttgtgtgggcctggaagctgggatcaatcctacagaccacctgataacagcctatagggcgcacggctttacctttacaagaggcctgagcgtgagagaaattttagctgagctgaccggtcgcaaagggggttgtgctaagggaaaggggggttccatgcatatgtatgcaaaaaatttttacggcgggaatggaattgtgggagctcaagggcagatcttcgaggcatacaacatggcagcactgtggaagttgccgtgcattttcatttgtgagaacaacaggtatggcatgggcacctctgtggagcgcgctgctgccagcactgactattacaaacgcggagactttatcccaggattgcgtgttgacggaatggatatcctgtgcgtgcgggaggcaacacggttcgcggctgcatactgcagatcaggtaaagggccgatcctgatggaattgcagacttatcgttaccatggtcatagcatgagcgaccctggggtcagctataggaccagggaagagatccaagaagtgcgatctaagagcgatccaatcatgctgttgaaggataggatggtaaatagcaacctagcctccgtcgaagaactgaaggagatcgatgttgaggtccggaaagaaatcgaagacgccgcacagttcgctactgccgaccctgagcccccgttggaggaattggggtaccacatctattcatctgaccccccattcgaggtgcgtggtgccaaccaatggatcaaatttaagtctgtctcttag

SEQ ID NO: 202159 - DNA, 129 bp, synthetic construct
  misc_feature 1..129: note = Description of Artificial Sequence: Synthetic coding sequence
  source 1..129: mol_type = other DNA
gccaaccagtggatcaagttcaagagcgtgaagggccggcggcggcgaggatatactttcaggggactgcctgattcagtgttgaatctcgtgaaagaggaggaaaacccagttaacgagatacagtag

SEQ ID NO: 202160 - DNA, 1194 bp, synthetic construct
  misc_feature 1..1194: note = Description of Artificial Sequence: Synthetic coding sequence
  source 1..1194: mol_type = other DNA
atgcggaagatgctggccgccgtgagccgggtgctgagcggcgcctcccagaagccggcttccagagtgttggtggccagtaggaatttcgccaacgatgctacatttgaaattaaaaaatgcgatttacatagactagaagaaggaccgcctgtgaccaccgtgctaaccagagaggacggcctcaagtactatcgcatgatgcagacagtgagaaggatggagctcaaggctgatcagctgtataagcagaagataattaggggattctgtcatctctgcgacggtcagttcctccttcccctgactcaggaggcttgttgcgtgggccttgaagcgggcatcaatccaacagatcatctaatcacagcttatcgagcacacggcttcacgttcacaaggggcctatctgttagagaaatattagcggagctgacaggtaggaagggaggctgtgccaagggaaaaggtggctcgatgcatatgtatgcaaaaaacttttacggcggtaacggaatcgttggagcccaggtccctctgggggctgggatagctctggcctgcaaatacaacggcaaagatgaagtgtgcctgacactgtatggcgacggcgccgctaaccagggccagatatttgaggcctacaatatggccgctctgtggaagcttccctgcatcttcatttgtgagaacaacagatacggaatgggaacctcagttgagagggcagccgcttccaccgattattacaagcgtggagacttcatcccaggccttagagtcgacggaatggacatactgtgcgtgagggaagcaactaggttcgccgccgcgtactgtcgatcaggaaaaggacctattctgatggagctccagacctataggtatcacggccatagtatgtccgaccccggcgtgtcttatcggactcgtgaggaaatccaagaagttcgttcaaagtccgaccctattatgcttcttaaggatagaatggtgaatagtaatctggcaagcgtcgaagagctcaaagagattgatgttgaggtgcgcaaagagattgaggatgcggcacagtttgccacagcggatccagaaccgccgttagaggaattgggctatcacatctacagtagtgatcctcctttcgaggtccgtggtgcaaatcagtggatcaagttcaaaagcgtcagctag

SEQ ID NO: 202161 - DNA, 1167 bp, synthetic construct
  misc_feature 1..1167: note = Description of Artificial Sequence: Synthetic coding sequence
  source 1..1167: mol_type = other DNA
atgctggccgccttcatcagccgggtgctgcggcgggtggcccagaagtccgcccgccgcgtcctcgttgccagccggaattccagtaatgatgcgacattcgagatcaaaaaatgcgacctttatcttttggaggaagggcctccagtgacaaccgtcctgactcgggctgaagggcttaagtactacagaatgatgctgactgtgaggagaatggaattaaaagctgaccaattgtataaacagaagtttataagaggattctgtcacctctgcgatggccaagaagcctgctgcgtaggcctggaagctggtattaatccgtccgatcatgttataacaagctacagggctcacggcgtgtgctatactagagggttatccgtaaggagcattctggccgaactgaccggtcgacggggcggctgtgcaaagggaaaaggcggaagtatgcacatgtacaccaagaacttctacgggggaaacggaattgtcggagcccagggaccactgggcgctggaatcgcgctggcttgcaagtacaagggcaatgacgaaatctgcctgaccctctacggtgatggagctgccaatcagggccagatcgccgaagcatttaacatggccgcactgtggaagttgccatgcgtcttcatttgtgagaacaacttgtacggaatgggtacaagtacagagcgcgctgcagcaagcccagactattacaagcggggtaacttcatccccggactgaaagtcgatggaatggatgtcttatgcgttcgggaggccaccaagttcgctgccaactactgcaggtctgggaagggaccaatattaatggaactccagacataccgctatcatggccactcaatgtctgaccctggtgtctcctacaggactcgggaggagatccaggaagtaaggagtaaacgcgaccctatcattatactccaggaccgtatggtaaattcaaaactcgctaccgtggaagagcttaaggagatcggagccgaggttcgtaaggagatcgatgatgcagcgcagtttgccacgacggaccctgaaccccatcttgaggagctgggccaccatatatactcttccgattcatctttcgaagtgcgcggtgctaacccgtggatcaagtttaaatctgtatcttag

SEQ ID NO: 202162 - DNA, 1080 bp, synthetic construct
  misc_feature 1..1080: note = Description of Artificial Sequence: Synthetic coding sequence
  source 1..1080: mol_type = other DNA
atggccgccgtgagcggcctggtgcggcggcccctgcgggaggtgtctgggctgctcaaacgaagatttcactggaccgcaccagctgctctgcaggtgacagtccgcgatgcaatcaaccaaggcatggatgaagagttagaaagggacgaaaaggtattcctcctgggagaggaggtggctcagtacgacggtgcttacaaggtctccagaggcttgtggaagaagtatggtgacaagagaataatcgacacgcctatctcagagatgggtttcgccggcattgccgttggggctgctatggccgggctccgacccatttgtgagtttatgacctttaacttcagcatgcaagctattgatcaggtgatcaattcagccgcgaaaacttactacatgtccgggggcctgcaacctgtgccaattgtgttccgtggccctaacggagcatctgcgggcgtggctgcacagcattctcagtgctttgcagcttggtacggacactgccctggactgaaggtggtgagcccttggaacagtgaagacgccaagggcctgattaaaagtgccatacgagacaacaaccctgtggttgtgttagagaacgagttaatgtacggcgtgccatttgaatttcccccggaagctcagagtaaggacttcctgattccaattggaaaggccaaaattgagcggcagggaactcacattaccgtggtgagccacagcaggccagtaggacactgcttggaagctgctgctgtgctgtcgaaagaaggcgtggagtgcgaggtaataaatatgagaactatccgtcctatggacatggagacaatcgaagctagcgtaatgaagacaaatcaccttgtgactgtcgaggggggctggccccagtttggcgttggggcggagatctgcgcccgaataatggaggggccagcctttaactttttggacgctccggccgtgcgcgtgactggagcagacgttcccatgccttacgcaaaaatcctcgaggacaactctatcccacaagtcaaggatataattttcgctattaagaagacgctcaacatttag

SEQ ID NO: 202163 - DNA, 1026 bp, synthetic construct
  misc_feature 1..1026: note = Description of Artificial Sequence: Synthetic coding sequence
  source 1..1026: mol_type = other DNA
atggccgccgtgagcggcctggtgcggcggcccctgcgggaggtgaccgtgagggacgccatcaaccaggggatggatgaagaactggagagagatgaaaaagtgtttctgctgggggaggaagttgcacagtacgacggcgcctataaagtctcacgaggtttatggaaaaaatacggagacaagaggatcatagatactccgatatctgagatgggattcgcagggatagcagtcggcgctgccatggctggcctccgacccatatgcgagttcatgacctttaacttcagcatgcaggccatcgaccaggtgatcaacagcgccgctaaaacctattacatgtctgggggcctgcagcccgtgcccattgtttttagagggccaaacggagcctctgcaggggtggctgcccagcattctcagtgcttcgccgcctggtatgggcattgtcctggactcaaggttgtttccccatggaatagtgaagacgccaagggcctgataaagtcagccatccgagataataacccagtcgtcgtcctggaaaatgagttaatgtacggagtcccatttgagttcccccctgaggctcagagtaaggatttcctgattcccatcggaaaggccaaaattgagagacagggcacgcatattaccgtggtgtctcatagcagaccagtaggacattgtctcgaggcagctgcagtgctgtccaaagagggtgtagaatgtgaggtgattaatatgcggaccattcgacctatggacatggagaccatcgaggcttctgtcatgaagactaaccatctagtgacagttgaagggggctggcctcagtttggggtgggtgcagaaatctgtgcccgaattatggaagggcctgcatttaatttcctcgacgctcccgccgttagggtgaccggggctgatgtaccaatgccctatgcgaaaatactcgaggacaactctattccccaggtgaaggacatcatatttgctattaagaaaaccctaaatatatag

SEQ ID NO: 202164 - DNA, 1026 bp, synthetic construct
  misc_feature 1..1026: note = Description of Artificial Sequence: Synthetic coding sequence
  source 1..1026: mol_type = other DNA
atggccgccgtgagcggcctggtgcggcggcccctgcgggaggtgagcggcttgctgaagcgacgttttcactggacggcccccgctgctttgcaggttaccgtccgggacgctattaatcaagggatggatgaagaactcgagcgcgacgaaaaggtgtttctgctcggggaagaagtggcacagtatgatggggcctacaaggtatcaagaggcctgtggaagaagtacggcgataaaagaattatcgacacgcctattagtgaaatggggttcgccggtattgccgtgggagctgcaatggcaggtctgagacctatctgtgaatttatgaccttcaacttctcaatgcaggcgattgaccaggtgatcaattcagccgcgaagacatattacatgtctggagtggctgcgcagcactctcagtgcttcgccgcctggtatgggcattgtccaggtctcaaggttgtgagtccatggaactctgaggacgccaaagggctgattaagagcgctataagagataataatcccgtagtcgttctcgagaatgagctgatgtatggggtgccatttgagttcccccctgaggcacagtccaaggactttctcatccccatagggaaggcaaagatcgaacgacagggcactcatatcacggtggtgtcccattccaggcctgtcggacattgtttggaagctgctgcagtcctgtctaaagaaggagtcgaatgcgaagtgataaatatgaggactatccggccaatggatatggagactattgaggcatcggtcatgaaaacaaaccacctcgttacagtggaaggcggttggcctcagtttggcgtgggagctgagatatgcgctagaataatggaaggtccagctttcaacttcctcgatgccccagctgtgagagtgactggagctgatgtaccgatgccctatgcaaagattctcgaagataacagcatcccccaagtcaaagatataatttttgccatcaaaaagacactgaatatttag

SEQ ID NO: 202165 - DNA, 1236 bp, synthetic construct
  misc_feature 1..1236: note = Description of Artificial Sequence: Synthetic coding sequence
  source 1..1236: mol_type = other DNA
atgaaggccgcccggttcgtgctgcggagcgccggcagcctgaacggggctgggctggttcctcgcgaggtggaacatttcagtagatacagcccttctccactgtcaatgaagcagctcctggattttggctccgaaaacgcatgcgaacgtacatcattcgcctttctgaggcaggagctccccgtgaggttagctaacatccttaaggagatcgacatcctcccgacacagctggtgaatacgtccagcgtgcagctcgtaaaatcctggtatatccagtcactcatggaccttgttgaattccacgagaaaagtcctgacgaccagaaggcgttgtcagacttcgtcgatacgctgattaaagtccggaacagacatcataatgttgtgccaacaatggcccaggggattatcgaatacaaagacgcctgtactgtggacccagtgacaaaccaaaatttgcagtatttcctggatagattctatatgaacaggatcagtacacgcatgctgatgaaccagcacattctcatcttttctgattcccagacaggcaacccttcacacattggctccatcgaccctaactgcgacgttgtggcagttgtacaggacgccttcgaatgtagtcggatgttatgcgaccagtattatttgtcctcccccgagctcaagctgacacaggtgaatggcaagttccccgatcagcccatccacatcgtgtacgtccctagtcacctgcaccacatgctgttcgagctgttcaagaacgccatgagagctactgtggaacaccaggaaaaccagccatctttgacaccaattgaggtcatcgtagtcctggggaaagaggatttaacgatcaaaatctccgataggggcggcggggtacctctaagaatcattgatcggttattcagctatacctacagcaccgccccaaccccagtgatggataactcccgaaatgctcctctcgccggctttggttacgggcttccgatttcacggttatacgccaaatattttcagggtgatctgaacctctactctctatccggatacggcactgacgcaatcatttatttgaaggcactgtccagtgaaagtatcgagaaactacctgtttttaacaaatccgcgtttaagcactatcagatgagcagcgaagccgacgattggtgcatcccctcaagagaaccaaaaaacctggccaaagaagtagcaatgtag

SEQ ID NO: 202166 - DNA, 1128 bp, synthetic construct
  misc_feature 1..1128: note = Description of Artificial Sequence: Synthetic coding sequence
  source 1..1128: mol_type = other DNA
atgaagcagctgctggacttcggcagcgagaacgcctgcgagcggacatccttcgccttcctgcgccaagagctcccagtccgcctcgctaacatcctgaaggagatcgatatcctcccaactcaactggtgaacacttcaagcgtgcaattggtgaaaagttggtatattcagagtctaatggacctggttgaattccacgagaagtctcctgacgaccagaaggccctgtccgattttgtcgacaccttaatcaaagtgcggaaccggcaccacaatgtggtgccaactatggctcaaggcatcatagagtacaaagatgcctgcactgtcgaccccgtcactaatcagaatttgcagtactttctggacagattctacatgaatcgcatctctacccgcatgcttatgaaccaacatatactcatctttagtgacagtcagaccgggaatccttctcacattggttctatcgatccaaactgcgacgtcgtagccgtggtacaggacgcgtttgaatgctcacgaatgctgtgcgatcagtattatctatccagtccagagctgaaattaactcaagtgaatgggaaatttcccgatcagccgatccacattgtgtatgtgccctctcacctacaccacatgctattcgaactgttcaagaacgccatgcgggctaccgtcgagcaccaagagaatcaaccgtccctgaccccgatcgaggtgatcgttgtgctgggcaaggaggacctcacaattaagatctcggatcggggtggcggggttcctcttcgcattatcgatcgactcttctcctacacatattctaccgcccccaccccggtgatggataactcacgcaatgctcctctagcgggattcggttatgggctgcctatttcaagactgtacgcaaaatactttcagggagatctgaacctgtacagcctgagcggttacggcacagacgctatcatttacttgaaagcccttagcagcgagagtatcgagaagctgccggtgttcaataaatcagccttcaaacactaccagatgagctctgaggctgatgactggtgcatccctagccgagaacccaagaacctggccaaagaggttgcaatgtag

SEQ ID NO: 202167 - DNA, 1614 bp, synthetic construct
  misc_feature 1..1614: note = Description of Artificial Sequence: Synthetic coding sequence
  source 1..1614: mol_type = other DNA
atgcccgcccccacccagctgttcttccccctgatccggaactgcgaactctctagaatctatggcaccgcctgctactgccatcacaagcacctctgctgttccagctcctacatccctcaatcgcgcctgaggtacaccccacatcccgcttacgctactttttgtcgcccaaaggagaactggtggcagtatacacaggggagacgttacgcttcgactcctcagaaattttatttgaccccacctcaggtaaacagtatcttgaaagcaaatgagtattccttcaaggtgcccgagttcgatggcaagaatgttagcagtattctgggtttcgattccaaccagctgcctgctaacgcccctatagaggatagacggagcgcagcaacttgtctgcagacaaggggcatgctgctaggggtatttgatgggcacgctgggtgcgcgtgttcacaggccgtgagtgaacggctgttctactatatcgccgtgagcctgctgcctcacgagacactcctggagatcgagaacgccgttgaatccggccgcgccctgctcccgatcctacaatggcacaagcaccccaacgactacttctccaaagaggccagtaaactgtactttaatagcttacgtacctactggcaggagctgatcgaccttaataccggcgagtcaacagacatagacgtcaaggaggctctgatcaacgcgtttaaaagactagataacgatatcagtcttgaggctcaggtgggcgatccgaactcgtttctcaattatctagtcttaagggtggccttttcaggagccacagcctgtgttgcacacgtggatggcgtagatcttcacgtcgctaacaccggggactcacgcgccatgctgggggtgcaggaagaggacggcagctggagcgctgtgaccctgtccaatgaccataatgcacaaaacgaacgcgagctggagcgactcaagctggagcatccaaagagcgaggctaaatctgtggtgaagcaggatcggctgctcggcctgctgatgccattccgcgcattcggggacgtcaaattcaagtggagtattgatctccagaagagagtgatcgagagtggccctgaccaactaaacgacaacgaatataccaagtttatcccccccaactatcacacgcccccgtatttgacagcggagcccgaggttacttatcaccggctacgcccacaggacaaatttctcgttttagccactgacggcttatgggagaccatgcaccggcaggacgtcgtaaggattgttggcgagtacttaactggaatgcaccatcaacagcccatcgccgtgggtggctacaaggtgactctagggcaaatgcacggactgctgacagagagaaggactaagatgagcagcgtattcgaagatcagaatgctgcaacacatttgatcaggcatgccgttgggaacaatgagttcggaaccgtggaccacgagagactttccaagatgttaagccttcctgaggaactggcccggatgtaccgagacgatattacaattattgtggtccagtttaacagtcatgtggtaggtgcctaccaaaatcaggaatag

SEQ ID NO: 202168 - DNA, 1689 bp, synthetic construct
  misc_feature 1..1689: note = Description of Artificial Sequence: Synthetic coding sequence
  source 1..1689: mol_type = other DNA
atgtgcgtgtgccccggcccccggcggatcggcatccccgtgcggagctccagtctcccattgttctccgacgccatgcctgcccccacacaactcttttttcccctgatccgaaattgcgaattgtctcgaatttacggaactgcctgctattgccatcataagcatctctgctgttcctccagttacattcctcaaagccggttgcggtacacacctcaccccgcatacgccactttttgtagaccaaaggagaactggtggcaatatacccagggacggcgatacgccagtactccccagaagttttacctgacccccccgcaggttaactccattctgaaagccaatgaatacagctttaaagtacccgagtttgatggcaagaacgtcagctctatactgggatttgatagtaatcagctccccgcaaacgctcctattgaagaccgacgctccgccgccacctgccttcaaacccgtggaatgctcctgggcgtcttcgacggacacgctgggtgcgcttgctcacaggccgttagcgaaagactgttttattacattgccgtctccttgttgcctcacgagacgcttctggagattgaaaatgccgtcgagagcgggcgggccctgctcccaatcttacagtggcacaaacatccaaacgactacttttccaaggaggcctccaaactctattttaattctctgagaacgtattggcaagagctgatagacctcaacacaggggagtctactgacatcgatgtgaaggaggctttaattaacgcttttaaacgcttagacaatgatataagcctcgaagcccaggtgggtgatccaaattcctttctgaattacctggtcctgcgcgtggccttctctggcgccactgcttgcgtagcacacgttgatggggtggatctacatgtggcgaatacaggggatagccgggctatgctgggggttcaggaagaagatgggagctggtctgctgtgaccctctccaacgaccacaacgctcaaaacgaacgcgagctggagcgccttaaactggagcaccctaaatctgaggctaaatcagtcgttaagcaggatcgcctcttgggcctcctcatgccgtttcgggcattcggggacgtcaagtttaaatggtcgatagacctccagaagagggtcatcgagagcggccctgaccagctcaacgacaatgagtataccaagtttatacctcctaactatcacaccccgccctatttgaccgccgaacccgaagtgacttaccatcggctgcgcccccaggacaaatttctagtccttgctactgatggtctttgggaaacaatgcacaggcaagacgttgtgagaattgtcggagagtacctgacaggtatgcatcatcaacagcccatagccgtagggggttacaaggtgaccttaggccagatgcacggcctgctgaccgagagacgaacaaaaatgagcagtgtgtttgaggaccagaacgcagctacacaccttatccgccacgcagtaggcaacaatgagttcgggaccgtcgatcatgaaaggcttagtaagatgttatcacttcccgaagagctagctcggatgtaccgggatgatataactatcatagttgtccagtttaatagtcatgtcgtgggcgcgtatcagaatcaagagtag

SEQ ID NO: 202169 - DNA, 1614 bp, synthetic construct
  misc_feature 1..1614: note = Description of Artificial Sequence: Synthetic coding sequence
  source 1..1614: mol_type = other DNA
atgcccgcccccacccagctgttcttccccctgatccggaactgcgagctttctcgcatttatggcacggcttgttactgccaccataagcatctgtgctgttctagtagttatatcccccagtcaaggctgcgctataccccacacccagcatacgccacattttgcaggccaaaggaaaactggtggcagtacacccagggcagacggtacgcaagtacaccccaaaagttttatcttacacctccacaggtgaatagtattctaaaggcaaatgaatattccttcaaggtgccagaatttgacggaaaaaacgtgtcttcaatcctaggcttcgattcaaatcaactaccagctaatgcgcccatcgaagataggcggagtgccgccacctgcctgcaaaccaggggaatgcttcttggtgtgttcgacgggcatgcaggatgcgcttgttcccaggccgtttctgaaaggcttttttactacattgcggtttcactgctgccacatgagaccttgctggagatcgagaacgctgtggaatctggccgtgcattgctgcccatcctgcagtggcacaaacatcccaacgattatttcagtaaggaagcttcaaaactgtactttaattctctcagaacgtattggcaggagctgatagacctgaatactggagagtctactgacatagacgtaaaggaggctttaattaacgcctttaaaaggttagacaacgacatttcgcttgaggcccaggtgggggatccaaatagcttcctcaattatctggtccttcgagtggcattctcgggagctacggcctgcgtggctcacgtggacggcgtcgatcttcacgtggccaacacgggagactcaagggctatgttgggggtgcaagaggaagatggatcttggagtgccgtaacacttagtaacgatcacaacgctcagaatgagagggaactagaacgattaaagctggaacatcccaagtccgaagctaagagtgtggtcaagcaggaccggctgctgggcttactgatgccattccgggccttcggagatgtgaagttcaaatggagcattgatctccagaagagggtaatcgagagtggacccgaccaattaaacgacaacgaatacactaaatttattcctcctaactaccatactcccccttatctgaccgccgaaccagaggttacataccacagacttcggccccaggataagttcctggtgctggctaccgacgggctttgggagacaatgcacagacaggatgtggtgagaatcgtgggagagtatctcactggtatgcaccatcagcaacctatcgccgtggggggctataaagttaccctggggcagatgcacggccttctcactgaaaggagaactaaaatgtcttctgtgttcgaagaccagaatgccgccacacacctgatcagacatgcggtggggaataatgagttcggcactgtcgaccacgaacgcttgtctaaaatgctgtcactccccgaggaacttgcacggatgtacagggatgacatcaccatcatagtcgtgcagttcaatagtcatgtggtcggcgcttatcaaaatcaggaatag

SEQ ID NO: 202170 - DNA, 231 bp, synthetic construct
  misc_feature 1..231: note = Description of Artificial Sequence: Synthetic coding sequence
  source 1..231: mol_type = other DNA
atgcccgcccccacccagctgttcttccccctgatccggaactgcgaactttctagaatttacggtactgcctgctactgtcaccataaacacctgtgttgctcaagttcttacattccccagagcaggctgcgatacactccccatccggcctacgccaccttctgtcggcctaaagagaattggtggcagtacacacagggacggcggtatgcctcaaccccccaatag

SEQ ID NO: 202171 - DNA, 387 bp, synthetic construct
  misc_feature 1..387: note = Description of Artificial Sequence: Synthetic coding sequence
  source 1..387: mol_type = other DNA
atgcccgcccccacccagctgttcttccccctgatccggaactgcgagctctcacgaatatatgggaccgcgtgttattgtcaccacaaacacctgtgttgttctagttcatatattcctcagagccgtctgcggtacacccctcacccggcttatgctactttttgccgacctaaagagaattggtggcagtacacacaaggaaggcgatacgcgagcaccccacaaaagttctatctgacaccacctcaggtcaactccatcctgaaggcaaatgagtattcatttaaagttccagaattcgatggtaagaacgtatcatcgatactgggtttcgacagtaaccagcttcctgccaacgcccccattgaagatagacgttcctag

SEQ ID NO: 202172 - DNA, 699 bp, synthetic construct
  misc_feature 1..699: note = Description of Artificial Sequence: Synthetic coding sequence
  source 1..699: mol_type = other DNA
atgcccgcccccacccagctgttcttccccctgatccggaactgcgaactctcacgtatctatgggaccgcatgctactgtcatcacaagcacctgtgttgtagtagcagctacattcctcagagtcggctgagatacacacctcacccagcctacgccacattctgtaggccaaaagaaaactggtggcagtacactcagggacggcgatatgcaagtactccccagaaattctacctgaccccccctcaagttaactctatcctgaaagccaacgaatacagctttaaagtgcccgagttcgatggcaaaaatgtctctagcatactgggcttcgatagcaaccagctgcctgctaatgcgcccatcgaagaccggcgcagtgccgccacgtgtctgcagacacgcgggatgctcttgggagttttcgacggtcacgctggttgcgcttgctcacaagctgtgagcgaacgacttttctattatatagccgtgtcactcctcccacatgaaacactgctcgaaatcgagaatgcagtggagagtggacgcgctcttcttccaatcctgcagtggcacaaacacccaaacgactactttagtaaggaggcttctaagttgtattttaacagcttgaggacgtactggcaggaattgatcgacttgaataccggcgagagtactgatattgacgtttag

SEQ ID NO: 202173 - DNA, 219 bp, synthetic construct
  misc_feature 1..219: note = Description of Artificial Sequence: Synthetic coding sequence
  source 1..219: mol_type = other DNA
atgcccgcccccacccagctgttcttccccctgatccggaactgcgaactgtcccggatttacgggacagcatgctattgtcatcataagcatttgtgctgcagctcttcatatataccccaaagccggctgaggtacacacctcacccggcctatgccaccttctgccgcccgaaggaaaactggtggcagtacactcagggacgcaggtacgcatag

SEQ ID NO: 202174 - DNA, 1614 bp, synthetic construct
  misc_feature 1..1614: note = Description of Artificial Sequence: Synthetic coding sequence
  source 1..1614: mol_type = other DNA
atgcccgcccccacccagctgttcttccccctgatccggaactgcgagctgagccgcatatacggaacagcgtgctactgtcatcacaaacacctgtgttgtagctcctcctacattccacaatcaaggctccgatacactccccaccctgcatatgcaaccttctgtcggccaaaggagaactggtggcagtacactcagggcaggagatacgccagcacacctcaaaagttctacctgacgccaccccaagtgaactccatactgaaggccaatgagtacagcttcaaagttcccgaatttgatgggaaaaatgtttcgtctattctgggttttgactccaaccagctgccagcaaatgctccaattgaagatcgccggagtgctgccacctgtcttcagacccgcgggatgttactcggcgtgtttgacggtcacgccggctgcgcctgttcccaagcagtctcagaacggcttttctactatattgctgtcagcctacttccacacgagacacttttggagattgagaacgccgtcgagtccggacgggcactcctgccaattctgcagtggcacaaacaccctaatgattacttcagcaaggaagcctcgaagctgtactttaattctctccgaacctattggcaggagctgattgacctcaacactggggagtccaccgacattgatgtgaaagaggctctcatcaacgcattcaagcgtttagacaacgacatctccttagaggcacaggttggcgatcctaactcctttctcaattatttagtgctgcgagttgcattcagcggtgcaaccgcctgcgtggcccatgtggacggggtcgatctacacgtagcaaacactggcgacagcagggcaatgttaggagtgcaagaagaggatggcagctggagcgccgtcacactttccaatgaccataatgcccaaaatgaaagagagctggaacgcctgaaactggagcatccaaagtctgaggcaaaaagcgtcgtgaagcaggataggctgctggggttactaatgcctttcagggcctttggggacgtcaagtttaagtggtcaatcgatctgcagaaacgagttattgaaagcggtccggaccagctgaacgacaatgagtacaccaagttcatacccccgaattatcatacacctccctacttgaccgcggaacctgaggtaacgtaccaccgccttcgtcctcaggataagtttctggtgctcgccaccgacggtctgtgggagaccatgcacagacaggatgtggtccggattgtgggggaatatctgactggtatgcaccatcagcagccaattgcagtgggtggatataaagtgactctgggccagatgcatgggctgttgaccgaacgcagaactaaaatgagcagtgtgtttgaggatcaaaatgccgcaactcacctcataaggcacgccgttggaaataacgagtttggcaccgtcgaccatgagaggctgagtaaaatgctgtctcttccagaagaattagcaagaatgtacagagacgacattaccattatcgtagtacagtttaattcccacgttgtcggggcataccagaaccaagagtag

SEQ ID NO: 202175 - DNA, 444 bp, synthetic construct
  misc_feature 1..444: note = Description of Artificial Sequence: Synthetic coding sequence
  source 1..444: mol_type = other DNA
atgcccgcccccacccagctgttcttccccctgatccggaactgcgagctgtcaaggatttatggcactgcctgctattgccaccataagcatctgtgttgctctagctcctatatcccccagtccagactgaggtataccccccatcctgcatatgcaacattttgtcgccccaaagagaactggtggcaatacacgcaggggcgtaggtatgcatcgactccacagaagttctacttgaccccgccccaagtgaattctattttgaaagccaacgagtattcatttaaagttccagaatttgacggaaagaacgtgtctagcatcctgggatttgatagtaaccagctgcccgccaatgcccctatcgaggatcggagatctgccgctacatgtctacagactaggggcatgctgttgggcgtctttgatggccacgcctag

SEQ ID NO: 202176 - DNA, 1467 bp, synthetic construct
  misc_feature 1..1467: note = Description of Artificial Sequence: Synthetic coding sequence
  source 1..1467: mol_type = other DNA
atggccgacaccttcctggagcacctgtgcctgctggacatcgacagtgagcccgtcgcagcgcgttccacgtctatcatcgccacaataggcccggcgtccaggagcgttgaaaggctgaaagaaatgatcaaggccggcatgaatattgctcgcctcaatttctctcatggaagtcacgaataccacgctgagtcgatagctttagacaccaagggaccagaaatcaggactggcattctccaaggtggacctgagagtgaagtcgagctggtgaaaggcagccaggtgctggttactgtagatccagcattccgtacccggggcaacgccaacacagtctgggtggattaccctaacattgttcgcgtggtacccgttggtggtaggatctatatcgacgatggcctgatatctctggtcgttcagaagattggccccgaaggactagttacgcaggtggagaatgggggggtgctcggatctagaaagggcgtaaatctgcctggcgcacaggtcgacctgccaggcctgtccgaacaggatgtgcgggacctgagatttggggtggaacatggggtggatatcgtctttgcatcatttgtacggaaggcttccgacgtggccgccgtgcgggccgcacttgggcccgagggccatggcattaaaatcatctccaaaatcgagaaccacgagggtgtaaagcgcttcgatgagatcctggaggtctctgatggcataatggtggcccgtggtgacttagggattgagattccggctgagaaggtatttctggcacaaaagatgatgatcggccggtgtaatctagcagggaaacccgtggtgtgtgccactcagatgttggagtcgatgatcaccaaacccagaccaacaagagctgaaactagtgacgtggcaaatgcagtgttggatggggccgattgcatcatgctgtctggagaaaccgccaaaggaaactttccggtcgaggccgttaagatgcaacacgccatagcccgcgaggccgaagccgcagtgtaccacagacagctgttcgaagagctgcgaagagccgctcctttgtcaagagaccccacagaggtgaccgccatcggagcagtggaggccgcttttaaatgctgcgcagccgcaattatagtgctgaccaccaccggtcgctctgctcaactgttaagccgctaccggccacgcgctgccgtcattgccgtaacgagaagcgcccaggcggcccgccaggttcacctgtgccggggcgtttttcccctgttataccgcgaaccccccgaggcaatttgggcggacgatgtggaccggcgcgtccaattcggcattgagtccggtaagctgcgggggttcctgcgcgtaggagatctggtgatagtcgtgactggctggcgaccagggagcggttacaccaatattatgagagtgctctcgatctcctag

SEQ ID NO: 202177 - DNA, 1725 bp, synthetic construct
  misc_feature 1..1725: note = Description of Artificial Sequence: Synthetic coding sequence
  source 1..1725: mol_type = other DNA
atgagcatccaggagaacatcagcagcctgcagctgcggagctgggtgagcaagtcccagagggatctcgccaagagtatccttataggcgcccccgggggacccgctggctatctacggcgagcctccgttgcacagctcacacaggagctgggtaccgcatttttccagcagcagcagctgccagctgccatggcagatacatttctggaacacctgtgtctactcgatatcgacagcgagccagtggcagcgcgctctactagtattattgctaccataggacccgcgtcccgtagtgttgagcggctgaaagaaatgataaaggcagggatgaacatcgccaggctgaatttttcccacggaagtcacgagtaccatgcagagagtattgccaacgttcgagaagctgtggagagctttgctggatctccactgtcttaccggcctgtggcgatcgcgttagatacgaaaggacccgaaatcagaaccggcatcctccaaggtgggccagaaagcgaggtcgagctcgtgaaaggatcccaggtgcttgtgaccgtcgatcccgcattccgaactcggggtaacgctaacactgtgtgggtggattaccccaatattgtccgggtcgtgcctgtgggcgggaggatctacatcgacgatggcctaattagcctagttgtgcagaaaattggccctgaagggctggtaacacaggtcgagaacggcggtgtcctgggcagtcgaaagggcgtcaatcttcccggagcccaagtcgatctccccggcttgtctgaacaggacgtgagggaccttagattcggcgtggagcatggagtagatattgtttttgcaagttttgtgcgcaaggccagcgacgtggcggccgtaagagccgccctcgggcctgaagggcatggcatcaagatcatctctaaaatcgagaatcatgagggagtgaagaggttcgacgaaatactcgaagtctccgacggcatcatggtagctcgaggcgacctaggtattgagattcctgcagagaaagtctttttagcacagaagatgatgataggtcgctgcaatctggccgggaagccagttgtatgcgcgacccaaatgcttgagtcaatgatcacaaaaccacgccccacgagggcagagacctcagatgtggcaaacgctgtattggatggcgctgattgtatcatgctgagcggagagacagccaagggcaactttcctgtggaggccgtgaaaatgcagcacgctatcgcccgcgaggccgaggctgccgtctaccacagacagctgtttgaggagctgcgcagagccgccccactgagccgagacccaaccgaggtgacggcaataggtgccgtcgaggctgccttcaagtgttgtgctgcagcgatcatagtgctaactactacaggaaggtcggcgcagctactgtcaagatacagacctagagctgcagtgatcgctgtgacccgatctgctcaggccgccagacaagttcacctgtgccgcggcgtgttccctctgctctatagggaaccgcctgaggcgatttgggccgatgacgttgacagacgggtgcaattcggtattgaaagcgggaaactcagaggcttcctgcgagttggggaccttgtgatcgtggtgacaggatggcgccctggatccggctacaccaatatcatgcgggttctgtcaatctcctag

SEQ ID NO: 202178 - DNA, 1632 bp, synthetic construct
  misc_feature 1..1632: note = Description of Artificial Sequence: Synthetic coding sequence
  source 1..1632: mol_type = other DNA
atggagggccccgccggctacctgcggcgggccagcgtggcccagctcacgcaggaacttggaacagctttcttccaacaacagcagcttcccgcagctatggcagacacctttcttgaacacctttgtctcctggacatcgacagcgaaccagtcgcggcccgatctaccagtatcattgccactattggaccagcttcacgcagtgtcgagagattaaaagagatgattaaggctggcatgaacatcgcacggttgaatttctctcacggcagccacgagtatcacgcggaaagtatcgccaatgtgcgagaggccgtggagtcgttcgccgggagtcccctgtcttacagaccggtcgccatcgctctcgacacaaagggacccgagatccgcaccgggatcctgcagggcgggccggagtctgaagtcgagttagtgaaaggatcacaggttctcgtgaccgttgatccagctttccggacacgtggtaatgctaatactgtctgggtcgattatccaaatattgtgcgggtcgttccagtgggtggtcgcatttatatcgatgatggcctgatctcactcgtggttcagaaaatagggcccgagggattagtgacccaggtggagaatgggggtgtgctgggtagtcgtaagggagtgaacctaccaggggcccaggttgacctgccaggcctgtcagagcaagacgtgcgggatctacggtttggggtcgaacatggcgtcgatatcgtctttgcatccttcgtgagaaaagctagtgatgtagccgccgtccgggcggctctcgggccagagggccatggaatcaaaatcattagtaagatcgaaaatcacgaaggcgtgaagagatttgatgagatactcgaagtcagcgatggcatcatggtggccaggggagatctggggatcgagattcctgcagagaaggtgtttctggcccagaagatgatgattggccgttgtaacctagcagggaaacccgtagtatgcgcgacccaaatgctcgagtccatgattactaagccacggccaaccagagccgaaacgtcggatgtggcaaatgcagtgttggacggcgccgactgcattatgttgtcaggagaaaccgctaagggcaatttccctgtggaagcggttaagatgcagcatgctatagctcgagaggctgaggctgccgtgtaccacaggcaactgtttgaagagctgaggcgggcagcccctctgagccgggaccccactgaagttacagcgattggggccgttgaggccgccttcaagtgctgcgcagccgccattattgtcctgaccacaaccggcaggagcgcccagctcctgtcacgctacaggcctagggccgctgtgattgcagtcactcgctccgcgcaggctgcaagacaggtgcacctgtgtagaggggtgttccctctcctgtatcgtgagcccccagaggctatctgggcagacgatgtggatagacgcgtgcagtttgggatagaaagcggtaaattgcgcggtttcctgagagtgggggatctcgttatagttgtgacaggatggcgtcctgggtctggatataccaacatcatgagagtgctatccatctcatag

SEQ ID NO: 202179 - DNA, 1800 bp, synthetic construct
  misc_feature 1..1800: note = Description of Artificial Sequence: Synthetic coding sequence
  source 1..1800: mol_type = other DNA
atgagcatccaggagaacatcagcagcctgcagctgcggagctgggtctccaaatcccagcgagacctggcgaagtctatcttgattggcgccccaggagtaccactcacaactcaacagtgtggggctgaccctcagagagggcggcctcgagaggtgtgttcaggaatggagggcccggctggttatctgaggcgagccagcgttgctcagttgactcaagaattgggtacagctttttttcaacaacaacaactcccagctgctatggcagatacttttcttgaacatctgtgccttcttgacatcgatagcgagcccgtggctgcacggtctacgagcatcatcgctaccatcggtccagcaagtcggtctgtggagcggctgaaggagatgataaaagcagggatgaatatcgcccgcctgaacttcagccacggcagccacgagtatcacgccgaaagcattgcaaacgtgcgggaagctgtggaatcgttcgccgggtctccattatcctatagaccagttgcaatagcactggatacgaaggggcccgaaataagaaccggcattcttcaggggggccccgaaagtgaggttgaactggtgaaggggagtcaggtactagtgacggtggaccccgcttttaggaccagagggaacgctaacacagtctgggtcgactatccaaacattgttcgtgttgtgcccgttgggggccggatatatatagacgatgggctcattagtctagtcgtgcagaagatcggacccgaagggttggtcacccaggtcgagaacggcggagttctaggtagtcgcaaaggcgttaaccttccgggagcacaggtggatctccccggattgtcagagcaggacgtgcgagacctgagatttggcgtggagcacggagtcgacatagtgttcgcgtcatttgtacgcaaagcctctgacgtggcggccgtcagggctgcccttggacctgagggccatggtattaagattattagcaaaatagagaatcacgagggtgtgaaaagattcgatgagatcctcgaggtgagtgatggcattatggtcgcacgcggcgacctcggaatagagattcctgcagagaaggtgtttcttgctcaaaaaatgatgattggcagatgtaatttagcagggaagcctgtggtgtgtgccacccaaatgctggagagtatgattacaaaacccaggcccacgcgagcagaaaccagtgacgtggccaacgccgttttggacggggccgattgcatcatgctcagtggcgaaactgctaaagggaatttccccgtggaggccgtgaagatgcagcacgcaatcgctagggaggcagaggctgctgtgtaccacagacagctgttcgaggaactgaggcgggcagcccctttgagccgtgaccccactgaggtgacagcgatcggcgccgtggaggctgcatttaagtgctgtgcagctgcaattatcgtcctcactacaaccggacgatctgcacaactcctgtcccggtaccgtcctcgggcagccgtcatcgcagttactagaagcgctcaggccgccaggcaagtccacctatgccggggagtgttccccttactgtatcgtgaaccacccgaggccatttgggccgacgatgtcgaccggagagtccagtttggtatcgagtcaggtaagcttcggggatttctccgagtgggggacctcgtaatcgtcgttaccgggtggagacctgggtcgggctacacgaatattatgcgagtgttaagtatttcatag

SEQ ID NO: 202180 - DNA, 1596 bp, synthetic construct
  misc_feature 1..1596: note = Description of Artificial Sequence: Synthetic coding sequence
  source 1..1596: mol_type = other DNA
atgagcaagccccacagcgaggccggcaccgccttcatccagacccagcagctccacgcggccatggctgacacatttctcgagcatatgtgtcgacttgatatcgactctcccccaatcactgcccgcaacacgggtattatttgcaccattggccccgcctctagaagtgtggaaacattgaaagagatgatcaaatcggggatgaacgttgctcgcctgaacttctcgcacggcactcatgaatatcatgctgaaactatcaagaatgttaggacggccacagaatctttcgcgtcagaccctatcctttatcgccccgtcgccgtggcactcgacaccaaggggccggagattcgcactgggctgataaaaggtagtggcacggcagaggtggagctcaaaaagggcgcgacacttaagataacgttggataacgcctatatggagaagtgcgacgagaacatactgtggctggattacaaaaacatttgtaaagtcgtggaagtgggaagcaaaatctacgtcgacgatggtctgattagtttacaggtgaaacagaagggcgccgacttcctggtgaccgaggtggagaatggcggaagtctgggaagcaagaagggcgtgaatctccctggagcagccgtggatctgcctgccgtgagtgaaaaggacatacaagatctcaagtttggagtggagcaggacgtggatatggtatttgccagctttatccgcaaagctagtgacgtgcatgaagttcgaaaggtactcggagagaaggggaaaaacatcaaaatcatctcgaaaattgagaatcacgaaggtgtgcggcggttcgatgagatcctggaggccagcgacggtattatggtggcccgcggcgatctggggatcgagatccccgcggagaaagtgttcctggctcagaagatgatgatcggaaggtgcaatcgagctgggaagcctgtcatttgcgccactcagatgctggaaagcatgattaaaaagccaagacccacgcgagccgagggctcggacgttgcaaatgctgtgcttgacggcgcagattgcatcatgctctcaggcgaaacagcaaaaggtgactaccctcttgaagccgtcagaatgcagcatctcatagcacgggaggccgaggcagcgatgttccacagaaagctgttcgaggaactcgtgcgagcctctagccacagtaccgatttaatggaagctatggccatggggtcagtggaggcttcctataaatgcctggccgccgcgctgatcgtgcttaccgaaagcgggagatctgcacaccaagtagccaggtatcggccaagagcaccaatcatcgccgttactaggaatcctcagaccgcgcggcaggcacacctgtaccggggcatctttccagtcttgtgcaaggaccctgttcaggaggcctgggccgaggatgtcgatctgcgcgttaattttgcgatgaatgttggcaaagctcgcgggttttttaaaaagggagatgtggtgatcgtgttgaccggatggcgccctgggtctggtttcacaaacactatgcgagttgtgccagtcccctag

SEQ ID NO: 202181 - DNA, 1101 bp, synthetic construct
  misc_feature 1..1101: note = Description of Artificial Sequence: Synthetic coding sequence
  source 1..1101: mol_type = other DNA
atgagcaagccccacagcgaggccggcaccgccttcatccagacccagcagctccatgccgccatggccgacactttcctcgaacatatgtgcagactggacatcgatagtccacccatcaagaaaggtgtgaatctccccggagccgccgtcgacctcccggcagtgagcgaaaaggacattcaggatctgaagttcggagttgagcaagacgttgatatggtgtttgcctccttcataagaaaggcttctgatgtgcacgaagtgagaaaagttttgggagaaaaggggaaaaatattaagataatatctaagattgagaatcacgaaggagtacggagatttgacgagatcttagaagcttccgatgggatcatggtagcccggggtgatctgggaattgagatcccggcagagaaggtctttctggctcagaaaatgatgataggccgctgcaatcgggcggggaaacctgtgatatgcgcaactcaaatgcttgagagtatgatcaagaagccccgacccactcgagcggagggctccgatgtggccaacgctgtgttggacggcgctgattgcatcatgctcagtggggagaccgcaaagggcgattatccccttgaggctgtgcggatgcagcacttaatcgctcgtgaggcggaggccgctatgtttcatagaaaactgttcgaggagctggttcgggcgtctagtcactctacagacctaatggaggctatggcaatgggaagcgtggaggcctcttataaatgcctggccgcggctctgatcgtgctgaccgagtccggacggtcggcccatcaggtcgcaagatacaggccgagagcccctatcattgccgtcacccgaaacccacaaaccgcaaggcaggcccatctctaccgcggcatatttccagtcctctgcaaggacccggtccaggaagcctgggccgaggatgtggacctgcgtgttaattttgctatgaatgtgggaaaagcccggggctttttcaaaaaaggggatgtcgtgattgtactgacaggttggagacctggatctggtttcacaaataccatgcgggtggttcccgtcccttag

SEQ ID NO: 202182 - DNA, 1596 bp, synthetic construct
  misc_feature 1..1596: note = Description of Artificial Sequence: Synthetic coding sequence
  source 1..1596: mol_type = other DNA
atgagcaagccccacagcgaggccggcaccgccttcatccagacccagcaactccatgcggccatggctgacacctttcttgaacatatgtgtagactcgacatcgactctccccctatcacggcgaggaacacgggaatcatttgcactattggtcccgcatctcgaagcgtggagacgctcaaagaaatgatcaagtcggggatgaacgtggcccgcttaaacttttcacacgggacacacgagtatcacgcggagaccatcaaaaatgtccggaccgccactgagagttttgccagcgatccaatcctttatagacccgtcgcggttgcactcgataccaagggcccggaaatccggaccgggctgattaagggctctggaacggccgaggttgagctgaaaaagggagctacacttaagattacactagataatgcctatatggaaaagtgcgatgaaaatatattatggctggactataagaatatctgcaaggtagtcgaggtggggagcaagatctatgtggacgacggcctaatctccctgcaggtgaaacagaagggagcggactttcttgttaccgaagtggaaaacgggggatccctcggaagcaagaaaggagtgaaccttccgggcgctgccgtcgatctccccgccgtcagcgagaaagacattcaggatctgaaattcggcgtggaacaagacgtggatatggtgttcgccagtttcattaggaaggcctccgatgttcacgaagtgcggaaagtgcttggagagaagggcaagaatattaaaattatcagtaagattgagaaccatgaaggggtcagacggtttgatgagatactcgaagcttccgacggcattatggttgccaggggcgacctcggaatagagatcccggctgaaaaggtgttccttgcccaaaagatgatgataggacgatgcaaccgcgccggaaaaccagtgatctgcgcaacccagatgctcgagtccatgattaaaaaacccaggccaacaagagctgaggggtctgacgtggcaaatgcagttctggacggggcagattgcattatgctgtccggagaaacagccaaaggcgactatcctctcgaggctgtgcgaatgcaacacctgattgcaagggaggcggaggctgccatctaccacttacagttgttcgaggaacttcggagactagcacccattacctccgatcccaccgaggccacggctgtgggggctgtcgaggcctcttttaaatgctgtagcggtgctattatcgtgctgaccaaatccggaaggtcagctcaccaggttgcccgctacagacctagagcacctattattgccgttacccgaaatcctcagaccgcccgccaggcccacctatataggggcatttttcccgtgctctgcaaggatccagtgcaggaggcctgggcggaagatgttgatctgagagtgaattttgctatgaatgtgggaaaagcccgcggattctttaaaaagggcgatgttgtgatcgtgctgaccggctggagaccgggcagcggctttacaaatacaatgagagtagtcccagttccctag

SEQ ID NO: 202183 - DNA, 1596 bp, synthetic construct
  misc_feature 1..1596: note = Description of Artificial Sequence: Synthetic coding sequence
  source 1..1596: mol_type = other DNA
atgagcaagccccacagcgaggccggcaccgccttcatccagacccaacagctgcatgccgctatggcggatacatttctggagcatatgtgtagactagacatagacagtcctcccatcaccgctcggaatacgggaatcatctgtaccatcggccctgcaagccgaagcgtggagacattgaaagaaatgatcaaatctggcatgaacgtggcaaggcttaatttttcacatggcacccacgagtatcacgccgaaactataaagaatgtacgcacagctacagaaagtttcgccagcgacccgatcctttacagaccagtggccgtcgcactggacactaagggcccagagatccgcactggccttatcaagggctcagggacagcggaggtagagctgaagaaaggcgcaaccctgaaaattacattggacaatgcttacatggagaagtgtgatgaaaacatactgtggctggactataagaacatctgcaaggttgtggaggtgggaagcaagatttacgtggatgacggacttatttccttgcaggtcaaacagaaaggagccgacttcctggttactgaagttgagaatggtggctccttggggtcgaaaaagggtgtcaatcttccaggtgctgctgtggatctgcccgctgtctctgagaaagacatccaggacctcaagtttggcgttgaacaggatgttgacatggtctttgccagcttcatccggaaggccagcgacgttcacgaggtccgtaaggtccttggtgagaaaggaaaaaatatcaagattatttccaaaattgaaaaccacgagggagtgcgacgctttgatgagattctggaggcgtccgacggcatcatggtcgcacgcggtgacctaggtatcgagatacctgccgaaaaggtctttctggcacagaaaatgatgatcggcaggtgcaaccgcgccggtaagcccgtgatttgcgctactcagatgctcgagagcatgataaaaaagccgcgacctacgcgtgctgagggatcagacgttgccaacgcagtgctagatggagctgactgcattatgctttctggcgaaaccgctaagggtgattatccactggaggccgttagaatgcagcatctgatcgccagggaagccgaggccgccatgttccaccgtaagttgtttgaagagctcgtccgagcctccagccactcaactgatcttatggaagccatggctatgggaagcgtggaggcatcctataagtgtcttgctgccgcgcttatcgtgctgaccgagtccggcaggtctgcccatcaggtggctaggtataggcctcgcgccccaataatcgccgtgaccagaaacccgcagacggccaggcaggctcatctgtacaggggaattttccccgtcctgtgtaaggatcccgtgcaggaagcttgggcagaggatgtcgacctaagagttaattttgcaatgaatgttggcaaggcgcgcgggtttttcaaaaagggcgacgtcgttatcgtattgacaggatggcggcccggaagcggatttaccaacacaatgcgggttgttcccgtcccctag

SEQ ID NO: 202184 - DNA, 1377 bp, synthetic construct
  misc_feature 1..1377: note = Description of Artificial Sequence: Synthetic coding sequence
  source 1..1377: mol_type = other DNA
atgagcaagccccacagcgaggccggcaccgccttcatccagacccaacaacttcacgctgctatggccgatactttcctggagcatatgtgtcgcctcgatatagattccccacccattacagcgcgtaataccgggatcatctgcaccatcgggcctgctagccgaagcgaggtggagctgaaaaaaggagctactctgaagattacgctcgataatgcgtacatggagaagtgtgatgaaaacatcttgtggctcgattataaaaacatttgtaaagtggtagaggtgggctccaaaatctatgtagacgacggactcatttcactgcaggtcaagcagaaaggcgccgacttcctggtcacggaagtggaaaatgggggctcactcggtagtaagaagggcgtgaacctgccaggtgctgcagtggacctcccagccgtgagtgaaaaggacattcaggacttgaagtttggtgtagagcaagatgtcgacatggtgtttgcgtcttttatccggaaagccagcgacgtgcacgaggtgaggaaagtcctgggggagaaaggtaaaaacatcaagattatctcaaagattgaaaatcatgagggcgttaggcggttcgatgagattttagaagcaagtgatggaattatggttgcgcgaggcgatctgggtatcgagatacctgcggagaaagtgtttctggcccagaagatgatgattggccgatgcaatagagctggaaaacctgtgatatgcgccacccaaatgctggagagtatgataaaaaaaccgagacccactcgtgccgaaggcagtgacgtagcaaatgccgttctcgatggagctgattgcattatgctgtccggcgagacagccaaaggagattacccactggaggccgtgcgcatgcagcacttaattgcacgtgaagctgaggctgccatctaccacctccagttgttcgaggagttacggcgcctggctcctatcacctccgacccaacagaggccactgcagtgggcgccgtcgaagcaagctttaaatgctgcagcggcgccatcattgtgcttaccaaaagcggcagaagtgctcaccaggtggcccggtatcggcctagagccccgattatcgccgttactcggaaccctcagaccgcccgccaggcacacctctataggggtattttccccgtgctttgcaaagaccctgtacaagaggcatgggccgaggatgtggacctgcgggtcaacttcgccatgaacgttgggaaagcaagaggattctttaagaagggggacgtagtgatcgtgttgaccggctggcgtcccggaagtgggttcaccaataccatgcgcgtggtgccggttccgtag

SEQ ID NO: 202185 - DNA, 1551 bp, synthetic construct
  misc_feature 1..1551: note = Description of Artificial Sequence: Synthetic coding sequence
  source 1..1551: mol_type = other DNA
atgagccccgaggcccagccccagcggaccaagggcccccagcagccttgcagaagtcctattgttaagcctggcctcccatcatttaggcccagtagctgcacccagccttggttgactcactcctggtcgacatgtgccgcttggactctgatccatcatccttcacagcctggaacccttgcatcctccgtgccactgtaccacgcagagaccattaaaaacgtcaggacggccacagagagttttgccagtgaccccattctgtatcggccagtcgccgtggcactagacaccaaaggccctgagatcaggaccgggctcattaagggttcggggactgcggaggtagagttaaagaagggagccacgcttaagatcactctggacaatgcttatatggaaaaatgcgacgagaacatcctgtggctcgactacaagaatatttgcaaggtagtcgaggtggggtctaagatctatgttgatgacggcctgattagcttgcaggtgaaacagaagggcgcagatttccttgtcactgaagtggaaaatgggggctcgctgggaagcaagaaaggtgtcaaccttccaggggctgctgttgatttaccggcggtatctgagaaagacatccaggatctaaaattcggcgtggagcaggacgtggatatggttttcgcctcctttatccgcaaagcatccgatgtccacgaagtccgcaaggtgcttggagagaagggcaagaacatcaagattatttctaagatagagaatcacgaaggagtgcggcgcttcgatgaaatccttgaagcgagtgatggaatcatggtcgccaggggtgacctcgggattgaaattccggcagaaaaagtgtttcttgcccagaagatgatgatcgggagatgcaatcgcgccggtaaaccagtcatctgcgccacacaaatgctggaatccatgatcaagaagccacgaccaacacgtgccgagggctcggatgtcgctaatgccgtgttagatggagcagactgcattatgctgtcaggagagactgcaaaaggggattacccactggaagccgtgagaatgcagcacctgatcgctagggaagcagaagcagctatttaccacctgcaactgttcgaggagttacgccgcctggcccctatcacctctgatcctaccgaggctactgctgtcggtgcagtggaggcatcctttaagtgttgcagcggagctattatcgtgctgacaaagagtgggcggtccgctcaccaagtcgcacgataccgaccaagagcccctatcattgctgtgacccgcaatcctcaaaccgcaagacaggcccatctctacaggggtatctttcctgtactgtgtaaggatccagtccaggaagcatgggcggaggacgtggacctacgggtgaatttcgccatgaatgttggcaaagctcgtggcttttttaagaagggcgacgttgtgattgtactcactggatggagaccaggctctggttttactaacacgatgcgcgtggtgcccgtcccctag

SEQ ID NO: 202186 - DNA, 1212 bp, synthetic construct
  misc_feature 1..1212: note = Description of Artificial Sequence: Synthetic coding sequence
  source 1..1212: mol_type = other DNA
atggccggcgccgccacccaggccagcctggagagcgccccccggatcatgcggttggtcgcggagtgctctcgctccagggccagggccggtgaactgtggctgcctcacggaaccgtagctacccctgtcttcatgcccgtgggaacccaagcgactatgaagggcatcaccaccgaacaactcgatgcgctgggctgtcggatatgtctggggaatacttaccatctggggctgcgccctgggcccgagctgattcagaaggctaatggcctacatggtttcatgaactggccccacaatctgcttaccgacagtggtgggtttcaaatggtcagcttagtgagtttaagtgaagtgacggaggagggggtccggtttagatccccctatgacggtaacgagaccctgctgtccccagaaaagtctgtacagatacagaacgctctcggctccgacattattatgcaactggatgacgtggtttcttcgacagtgactggacctcgcgtggaggaggcaatgtatagaagcatcaggtggctggatcgttgtattgctgcccaccagaggcccgataaacagaatttatttgctattattcaaggaggactcgacgccgacctgcgcgctacctgcctggaggagatgaccaagcgagatgttcccggttttgcaataggtgggctttcagggggagagtctaagtctcaattctggaggatggttgctctgagcacctcgcggttaccaaaagacaagcccagataccttatgggagtcggctacgccactgacttggttgtgtgtgtggccctggggtgtgatatgtttgactgcgtctttcctactagaaccgctcgtttcgggtcggccttagtgcctaccgggaatctgcagcttcgaaaaaaagtgtttgagaaagattttgggcctattgatcccgagtgcacatgccccacttgccagaagcatagccgagccttcttgcatgcgcttctacactccgacaataccgccgctctgcaccaccttacagtgcataatatcgcctatcagttgcagctgatgtctgccgtgaggaccagtattgtggagaagaggttccctgatttcgttcgcgacttcatgggagctatgtacggggacccaacgctgtgtccaacttgggccaccgacgcgctcgcatccgttggtattaccctaggctag

SEQ ID NO: 202187 - DNA, 678 bp, synthetic construct
  misc_feature 1..678: note = Description of Artificial Sequence: Synthetic coding sequence
  source 1..678: mol_type = other DNA
atggccggcgccgccacccaggccagcctggagagcgccccccggattatgagacttgtagcagagtgttcgcggtcgcgggccagagccggagaactctggcttccccacggaacagtggcaacacctgtgttcatgcccgtcgggacacaggccacaatgaaaggaataacgacagagcagctggacgccttggggtgccgtatctgtcttggaaacacttatcacctgggacttagacctggccccgagttgatacagaaggccaatggcttgcatggctttatgaactggccccacaacctgctgacggactcagggggctttcagatggtctcactggtctcactgtctgaagtaactgaagaaggcgtacgattccgcagtccgtacgacggaaatgaaacgttgctgagccctgagaagagcgttcagattcagaacgcacttggcagcgatataattatgcaactcgacgacgtcgtgtcctccacagttacaggccctagggtggaggaagccatgtaccgcccactggggctcgtaactggcgctctcttacaggttaatcctctggcaggtccagtacactgcagccctagtgcagcaggtcaggcggaacctctgcggcactaccccggctgggccggtcgaaggtccccaggccatctgccctag

SEQ ID NO: 202188 - DNA, 2097 bp, synthetic construct
  misc_feature 1..2097: note = Description of Artificial Sequence: Synthetic coding sequence
  source 1..2097: mol_type = other DNA
atggccgccgccggcgccgccgtggcccggagccccggcatcggcgccgggccagctcttagagccaggaggtctcctcccccccgcgctgcccgtcttcccaggctgctggtcctgctggcggccgcagcagtgggtcctggcgccggcggagccgccaggctgtatagggccggggaggacgctgtatgggtgctggatagcggttcagtgaggggagcgacggccaattcttcagccgcctggctggtacagttctactctagttggtgtggccattgcatcggttacgcccccacgtggagagcccttgctggtgatgtgcgagactgggcctccgctataagagttgctgcattggattgcatggaagagaaaaatcaggctgtttgccatgactacgatatccatttctacccgacttttcgttatttcaaggcctttacaaaggagttcaccaccggtgagaatttcaagggccctgatcgagagctgcgcaccgtgaggcaaactatgatcgacttcctgcagaatcacacagagggctcccgtcctccagcatgtccccgtctggatccaatccaaccgtctgacgtgctgagcctgctcgacaatagagggagccactacgtggctatcgtattcgagtcaaattcatcataccttggcagagaagtgattttggatttgataccatatgaaagcatcgtcgtgactcgtgcactggacggggacaaggctttcctggaaaaactcggcgtcagttccgtgccctcttgttacctcatttaccctaatggaagtcacgggttgatcaatgtcgtaaaaccactgcgtgcctttttctcatcttatctgaaatcactgcccgacgttcgcaagaaatctcttccattgccagagaaaccacataaggaggaaaactccgagattgttgtgtggcgtgaattcgataagagcaagctctacacagttgatctcgaaagcggactgcactacttgttgcgtgtcgaactcgccgcacataaatcacttgcaggagcggaactgaagacccttaaagattttgtcacagtgctggctaagctgttccctgggcgaccacctgttaaaaaacttcttgagatgttacaggagtggttggcctcactaccattagaccggattccctataatgctgtgttagacctggtcaataataaaatgcgcataagtggaatatttctcacaaatcatatcaagtgggtgggatgccagggctctcgctcagagctgaggggttacccctgcagtctgtggaaactttttcatacattgacagtcgaggcctcgactcatccagatgcgctagtgggcaccggtttcgaggacgaccctcaagcagtgttgcagacaatgaggcgatacgtccatactttttttggttgtaaggagtgtggcgagcattttgaggaaatggcaaaagaatctatggacagcgtgaaaacacccgaccaggccattctctggttgtggaaaaagcataacatggtgaatggacgcttggccgggcacctgagtgaggatccaaggtttccgaagcttcagtggccgactccagacctgtgtccagcatgtcatgaggagatcaagggactcgctagctgggatgagggacatgtcctaacgtttctaaaacagcactacgggcgagacaaccttctggatacatacagcgcagaccagggggatagtagtgaaggtggcaccctagcccgtggcgaggaggaggaaaaaaggctcacccctcctgaggtgtctcacggagatagggatacacagagcgttcgcccccccggtgccctagggcctaggccagccctgccagaatcattgcatcatagtctcgatggcaagctgcaatcacttgatgggcctggggcacacaaggaagtagggggtgccgcaccatttctgggcgtggattttagctcactggacatgtccctttgcgtggtactatacgtggcctcctcactgttcttgatggtgatgtacttcttcttccgcgttaggagtagacgatggaaagtcaagcatcaccatcccgccgtgtag

SEQ ID NO: 202189 - DNA, 948 bp, synthetic construct
  misc_feature 1..948: note = Description of Artificial Sequence: Synthetic coding sequence
  source 1..948: mol_type = other DNA
atggaggagaagaaccaggccgtgtgccacgactacgacatccacttctaccctacattccgctacttcaaagcctttaccaaggagttcaccaccggcgaaaacttcaagggcccagatagagaattgcgaaccgtccgccagacaatgatcgacttcttacagaatcataccgagggatccagaccccctgcttgtccaagactcgaccccatacatgtgaagcccctgcgggccttcttcagctcctatctcaagtctctccctgacgtgcggaagaagtcattgccattgcccgaaaagccccacaaagaagagaatagcgagatcgttgtgtggcgggaatttgataagagtaagctgtacactgtcgatttggaatctggcctgcactacctgcttagggtggaactggctgcacacaagagtctggcgggggctgagcttaagaccctaaaagactttgtgactgtcctcgctaaactgttccctggtcggccacctgtcaaaaagctgctcgaaatgcttcaagaatggttggccagtcttcccctggaccgaatcccatacaatgctgtgctggacctagtgaataacaagatgcggatctcaggaatctttttaactaatcatataaagtgggttgggtgtcagggatcacggagcgaactccgcggctacccatgtagcctgtggaagttgttccatacactgacggtcgaggcttccacccacccagatgctctcgtcgggaccggtttcgaggatgacccacaagctgtgctccagacaatgcgtcgctacgtgcacaccttcttcgggtgtaaagaatgcggcgagcatttcgaggagatggctaaggagagtatggacagcgtcaaaacgcctgatcaagctatactctggctgtggaaaaagcacaacatggtgaatgggcggctggcatag

SEQ ID NO: 202190 - DNA, 735 bp, synthetic construct
  misc_feature 1..735: note = Description of Artificial Sequence: Synthetic coding sequence
  source 1..735: mol_type = other DNA
atggccgccgccgccgccgccggcgaggcccggcgggtgctggtgtatgggggaagaggggccctcggaagtcgctgcgtgcaggcttttcgagcccggaattggtgggtagcttctgttgacgtggtggagaacgaagaagcttcagcgtccatcattgtaaaaatgacagattctttcactgaacaggccgatcaggtgacggctgaggtgggaaaattacttggcgaagagaaggtggacgcaatattgtgtgtcgccggaggttgggcaggcggcaacgccaagagcaagtctctgttcaagaattgtgatctaatgtggaagcagtcaatttggacaagcacaatttcttcccacctggccaccaagcacctaaaagaaggaggtctccttaccctggctggcgcaaaagccgcactagatggcacccctggcatgatcggatacggcatggcaaagggggctgtgcatcaactgtgtcagagcctggctgggaaaaactctggtatgccccctggcgctgctgccattgcagtattgccggtgaccttggatacccccatgaatagaaaatccatgcctgaggctgacttctctagttggactccactggaatttcttgtcgagacatttcatgattggatcacaggcaagaacaggccctcctcagggtcactgattcaggtggtgaccaccgaaggtagaaccgagttgacgccagcatacttctag

SEQ ID NO: 202191 - DNA, 681 bp, synthetic construct
  misc_feature 1..681: note = Description of Artificial Sequence: Synthetic coding sequence
  source 1..681: mol_type = other DNA
atggccgcccccctgctgcacacccggctgcccggcgacgccgccgcaagtcccagcgccgtcaaaatgttgggcgcatcaaggaccggcatctctaacatgcgcgctttagaaaacgatttctttaactcccctccaaggaagactgtacagtttggaggaactgtaacagaagtgttgctcaagtacaagacaggcgaaactaatgacttcgaactcctgaagaatcagctcttggaccccgacattaaggacgaccagatcatcaactggctattagagttcagatcctccatcatgtatctcaccaaagactttgagcagctgatctctatcattctgaggctaccttggctgaacagaagtcaaacagtcgtggaagagtacttggcttttttaggcaacctcgtgtcggcccaaactgtgttccttcgaccttgtctgagtatgattgccagtcacttcgttccaccacgggtcatcattaaagagggagacgtcgacgtgtcagattcagacgatgaggacgacaacctgccagctaatttcgatacttcccagtccttagcgaacaattccaaaatttgtactatagacacggtggtgtcccatgctaatactggcggaaaaattagtatttgttccaaaatccgcgaaaacacaggaatgctccgatcgtag

SEQ ID NO: 202192 - DNA, 894 bp, synthetic construct
  misc_feature 1..894: note = Description of Artificial Sequence: Synthetic coding sequence
  source 1..894: mol_type = other DNA
atggacgccgagggcctggccctgctgctgccccccgtgaccctggctgccttagtcgacagctggctaagggaggactgccccggtctgaattatgcagcccttgtgtccggtgcgggcccttcacaggcagcgttgtgggcaaagtcgcccggcgtcctggccggacagcccttcttcgatgccatcttcacacagctcaattgtcaggtgtcctggtttctgcccgagggcagcaagctcgtgcctgtagcaagagtcgccgaagtccgcggtcctgcccactgtcttctcttaggcgaaagagttgctctgaatacgttagcgcgttgcagcgggattgctagtgctgccgcggccgccgtggaggccgcccgcggggctgggtggactggccacgtcgccggcacacgcaagactaccccaggctttaggcttgtcgaaaagtatggtttgttggtgggcggggccgcatcccaccgatacgatcttggtggattggttatggttaaggacaatcacgttgttgctgccggcggcgtggagaaagcggtccgggcagctcggcaggcggcagacttcacactcaaagtggaggtagaatgtagcagcctgcaggaggcagttcaggcagctgaggccggagcagatctggttttgctggataacttcaaacccgaggaattgcaccccacagccactgtcctgaaggctcagttcccgtctgtagcagttgaggcgtcagggggcataacgctagacaatctccctcagttttgtggaccacatatagatgttatctcaatgggtatgctgactcaggcagcgccagccctggacttttctctgaaactgtttgcgaaggaagtagctcctgtgcctaagatccactag

SEQ ID NO: 202193 - DNA, 498 bp, synthetic construct
  misc_feature 1..498: note = Description of Artificial Sequence: Synthetic coding sequence
  source 1..498: mol_type = other DNA
atggacgccgagggcctggccctgctgctgccccccgtgaccctggctgcccttgtagattcatggctacgagaagactgcccgggcctgaactacgcagcccttgtgtcaggtgctgggccctcacaggcagctctgtgggctaagtctccaggggtgctggccgggcagcctttcttcgatgccattttcacgcagctgaattgccaggtcagctggttccttcccgagggatcgaagctggtccccgtcgcacgtgtcgcagaggttcgtggtcccgcccactgtttgctgctcggtgagcgagtggccctgaacactctggctcggtgttccggcatcgctagcgctgctgccgctgcagtagaagctgcacgcggggcggggtggactggtcacgtggccggaactcgcaagactacccccgggttcaggttggtggaaaaatatggtctgctggtcggaggagccgcctctcacaggtacgatcttggatag

SEQ ID NO: 202194 - DNA, 2154 bp, synthetic construct
  misc_feature 1..2154: note = Description of Artificial Sequence: Synthetic coding sequence
  source 1..2154: mol_type = other DNA
atggccgtggccgtgcggaccctgcaggagcagctggagaaggccaaagagagcctgaagaatgtggatgagaatattcgcaagttgactgggcgagatcccaacgatgtcaggccaattcaggcccggctcctggcactgagtggacccgggggtggccggggcaggggatccctgctgcttaggcgcggattctctgactctggaggtggccctccagctaagcagcgggaccttgagggagccgtgtcccggctcggtggtgaacgccgcacccggagggaatctagacaggaatctgatccagaggatgacgacgtgaagaaaccagctttgcagtcttccgtggtagctaccagcaaggaacgaaccagaagagatctgatacaggatcaaaacatggatgagaaggggaagcagagaaaccgccggatcttcggcctgttgatgggcacgttacagaaattcaagcaggaaagcaccgtggccacagagcgccagaaacgccgacaggagattgaacagaaacttgaggtgcaggctgaggaggaaagaaaacaggtagagaatgagcgccgcgagctctttgaggagaggcgagccaagcagactgaactgcgcctgctcgagcagaaggttgagctggcccagttacaggaggagtggaatgagcataacgctaagatcatcaaatacatacgcactaagacaaagccgcatcttttctacattcctggccgcatgtgccctgccacacagaagctaatagaagaatctcagcgcaagatgaacgctttatttgagggcagacgtatcgagttcgctgaacaaatcaacaagatggaggctaggcctcgtcgccaatccatgaaggagaaagagcatcaagtggtccgtaatgaggagcagaaggcagagcaggaggaaggaaaagtcgcccagcgagaagaggagctggaggagactggaaaccagcacaacgacgttgaaatcgaggaagccggggaggaagaggaaaaggaaatcgccattgtgcacagcgacgcagaaaaggagcaagaggaagaagaacagaaacaggagatggaagttaaaatggaagaggaaacagaggtcagggagtccgaaaagcagcaagactcccaaccagaggaggtcatggacgtcctggaaatggtggaaaacgtgaagcacgttattgccgaccaggaggtgatggagactaatagggtggagagtgtcgagccctcagaaaacgaggcttccaaagagctggagccggagatggagttcgaaattgagcctgataaagaatgcaagacactgtctccagggaaagaaaacgtctcggcgctggatatggaaaaggagtctgaagagaaagaggagaaggaatctgagccccagcccgagcccgtggcgcagccccagcctcaatctcagccacagttgcagctgcagagtcagagtcagccagtcctccaatctcagccgccatcgcagcctgaggacctgagcctggctgtgctgcaacccaccccacaggtgacccaagaacaaggacatttgctgccagagcgaaaggacttcccagtagaatctgtaaagctcaccgaggtgcccgttgaacccgtgttgacagtacaccccgagtccaagagcaaaaccaagacaaggtctcggtctcgaggtcgggctcgtaataagacatccaaatcaagaagccgaagcagcagcagcagctcctcctcttcctcttcaacctcctctagctccggatcaagcagctcgtctgggtcatcaagcagccgctcttcctcaagcagctcaagctcaacgagtggaagtagcagcagggatagtagcagttcaacttccagttctagtgagagtagaagcagaagcagaggtcgaggccataacagagaccgaaaacaccggagatcggtggatcggaagaggagggatacgtccgggctggagcgctcccacaaatcatccaaaggcggatcaagtcgggacaccaaggggagtaaggacaagaactcgcgatctgaccgcaagcgctcaattagtgagtcatcaaggtccgggaaacgtagctcgcgtagcgaaagagacagaaagtccgatagaaaagacaaaaggaggtag

SEQ ID NO: 202195 - DNA, 1704 bp, synthetic construct
  misc_feature 1..1704: note = Description of Artificial Sequence: Synthetic coding sequence
  source 1..1704: mol_type = other DNA
atgcacggccggctgaaggtgaagaccagcgaggagcaggccgaggccaagaggctggaaagggaacagaagctgaagctgtaccagtctgccactcaagccgtgtttcagaaacgccaggcaggggaattggacgagtccgtgttggagctgacgtcacagattcttggcgcaaacccagacttcgcgaccctctggaactgtagacgcgaagtgttgcagcaattagaaacccagaaatctcccgaggaactggcggctctggtgaaggccgaattgggctttcttgaatcttgcctgcgggtgaatcctaaatcctacggtacttggcaccatcgctgttggctacttggccgactgcctgagcctaattggactcgggagttggagctgtgtgcaagattcctggaagtggatgaacggaatttccattgttgggactaccgacggttcgtcgctacacaggccgctgtcccccctgcagaggagctcgcatttacagactccttaatcaccaggaacttcagtaactactcttcctggcactatagaagttgtctgctgccacagctccatccacagccagacagtggcccacagggccggctgcctgaggacgtgctactgaaggagctggagcttgtccagaacgcattttttacagatccaaatgaccagtctgcctggttctaccatagatggttgctggggcgcgcggacccacaggatgccctgagatgccttcacgtttcacgagatgaggcttgcctgactgtgtctttttcaaggccgctgctcgtagggagccgtatggaaatccttcttttgatggtggatgacagtccgctgattgtcgagtggcgcactcccgacggcaggaataggccttcacatgtgtggctctgcgatctcccggcagcatccctcaacgatcagttacctcagcacacctttagggttatctggacggctggcgacgttcaaaaggaatgtgtgctactgaagggacggcaggaaggctggtgcagagactccactaccgatgagcaactgtttaggtgtgagttaagtgtcgaaaagtcaactgtcctgcagtccgagctcgagtcatgcaaagagctgcaggagttggagccagaaaataaatggtgcctacttacgatcattttgctgatgagagccttggatcctctgctgtacgagaaggagacccttcaatatttccagaccctaaaagctgtagatcctatgagagccacatatttggatgatttacgctctaagtttctgcttgagaattcggtgctcaagatggagtatgctgaggtgcgggtgttacacttggctcataaagacctaactgttttgtgccatcttgaacagttgctgctggttacacatcttgacctgagtcacaatcgcttgagaaccctgcctcctgctttggccgcgctccgctgcctggaggtgctgcaggcaagcgataatgctattgaaagtcttgatggggttacgaatctgcctagacttcaggaactacttttgtgtaataaccgcctgcaacagccagctgtcctccagccccttgcatcgtgcccacgcctggtattactgaaccttcagggcaacccattgtgtcaagccgtggggatcctcgaacagcttgcagagctcctaccaagcgtttcatcagttcttacctag

SEQ ID NO: 202196 - DNA, 996 bp, synthetic construct
  misc_feature 1..996: note = Description of Artificial Sequence: Synthetic coding sequence
  source 1..996: mol_type = other DNA
atgggcaccccccagaaggacgtgatcatcaagagcgacgcccccgataccttgctactggagaagcacgctgattatattgcttcctatgggtcaaaaaaggatgactatgagtactgcatgtccgaatacctgcggatgtcgggtatctattgggggctgactgttatggacctaatgggtcagctacatcgtatgaatagagaagaaatcttggcatttattaaatcttgccagcacgagtgtggagggatctccgcgtcaattggccacgatccacatctgttgtacaccctgtccgctgtccagattcttacactgtatgattctattaatgtgatagacgtcaataaggtcgtggaatacgtgaagggcctgcagaaagaggatggatcatttgccggggacatttggggggagattgatacccgcttttccttctgtgccgtggcaaccctggcacttctcggtaaactggatgctattaatgtggaaaaagctatcgagtttgtactgagttgcatgaatttcgatggaggcttcgggtgccgacctggttccgaatcgcatgcaggtcagatctactgctgtacgggcttcctcgccatcaccagtcagttgcaccaggtgaactcagacttgctcggttggtggctgtgtgaacggcagttgccaagcggcgggctcaatgggcggcccgaaaagctccccgacgtctgctatagttggtgggtgctggcttccctcaagattatcggtcgtctgcattggattgacagggaaaagttacgcaatttcatacttgcatgccaagatgaggagactggcgggttcgctgaccgccccggggatatggtcgacccctttcatacactgttcggcatcgcagggttgagcctgctcggcgaagaacagataaagcccgtcaatcctgtgttctgcatgccggaggaggtactacaacgggtcaatgtgcagcctgaactagtgtcctag

SEQ ID NO: 202197 - DNA, 963 bp, synthetic construct
  misc_feature 1..963: note = Description of Artificial Sequence: Synthetic coding sequence
  source 1..963: mol_type = other DNA
atgggcaccccccagaaggacgtgatcatcaagagcgacgcccccgacacattgttactggagaagcatgctgactatatcgctagctatggatcgaaaaaagacgactacgaatactgcatgtctgagtacctccggatgtcaggaatttattggggtctaacagtaatggacctgatgggccagctgcatagaatgaatagagaggagattttagctttcattaagagttgccagcatgaatgtggaggcatttcagcatctatcggccatgatccccatctgctctacacactgtctgcagttcagatcctgaccctatacgactcgattaacgtaattgatgtcaacaaggtagtcgaatatgttaagggcttgcaaaaagaggacggatccttcgccggggacatctggggggaaatagacacccgttttagtttctgcgccgtggccaccttggccctattgggcaagctcgacgccataaacgtggaaaaagcaatcgaattcgtcctatcttgcatgaatttcgatggggggttcggatgtcggcctggaagcgaatcacacgccggccagatttattgttgcacggggttcctggctataacctcacagctgcatcaggtaaatagcgatctgttgggctggtggctttgcgagaggcagctcccctccggggggctcaacggtcgccccgagaagctccctgatgtctgttatagttggtgggtgcttgcctccctgaaaatcatcggcagactccactggatagatcgtgagaagcttcgaaacttcatactggcatgccaggatgaggagacaggcggattcgccgataggccaggcgatatgcatttcatttatcagaactacccgaaaaaagagctgagttctaataaagagaccttgactgaatcgttactgccgcggttagaacgtagctctacgatcagcgcatag

SEQ ID NO: 202198 - DNA, 459 bp, synthetic construct
  misc_feature 1..459: note = Description of Artificial Sequence: Synthetic coding sequence
  source 1..459: mol_type = other DNA
atgggcaccccccagaaggacgtgatcatcaagagcgacgcccccgacaccctcctgttggaaaagcatgctgactatattgcaagctacggaagtaaaaaggacgattatgaatactgtatgagcgagtatttaagaatgtctgggatttattggggactgacagtaatggacctcatgggccagcttcataggatgaacagggaggaaatccttgcgtttatcaaaagttgtcaacatgagtgcggtggcatttccgcttccatcggacacgacccccatcttttgtataccctgtcagccgtgcagatcctgacgctttacgactcaatcaacgtgatcgatgtgaacaaggtggtagagtacgttaaaggcctccagaaggaagacgggtcatttgccggggacatctggggcaacgtacggttctcccctttttatccaaagtaccagtactag

SEQ ID NO: 202199 - DNA, 474 bp, synthetic construct
  misc_feature 1..474: note = Description of Artificial Sequence: Synthetic coding sequence
  source 1..474: mol_type = other DNA
atgaacttcgacggcggcttcggctgccggcccggcagcgagagccacgcgggccagatatattgctgcaccggcttcctagcgattacctctcagcttcatcaggtgaactctgatctgctgggctggtggctctgtgagcggcagctgccttctggaggcctgaatggccgccccgaaaagctccccgatgtctgctacagctggtgggtgctggcgagtttgaagattatcggccggctgcactggatcgacagggagaaactgagaaacttcatccttgcatgccaggacgaggagacaggcgggttcgcagacaggcctggggatatggtggacccctttcatactctctttggaatcgcaggcttgtccctgctgggcgaggaacagatcaaaccagtgaatcccgtattttgcatgccagaggaggttctgcagagggtcaacgtgcagccagaacttgtgtcttag

SEQ ID NO: 202200 - DNA, 1476 bp, synthetic construct
  misc_feature 1..1476: note = Description of Artificial Sequence: Synthetic coding sequence
  source 1..1476: mol_type = other DNA
atgagcctgaagagcgagcggcggggcatccacgtggaccagagcgacctcctgtgcaaaaaaggatgtgggtactacggtaacccagcgtggcaaggcttctgttctaagtgttggagagaagaataccacaaagcgcgccagaagcagattcaggaagattgggagctggccgaaaggctgcagcgtgaagaggaggaggccttcgcatcctcgcagagctcccagggggcacagagtttgacattttctaagttcgaagaaaagaaaactaatgaaaaaacccgcaaggttactactgtgaagaaattctttagcgccagtagtagagtaggttccaaaaaggaaattcaggaagcaaaagccccaagtccttctatcaatcggcaaacctcaattgaaactgatcgcgtatccaaggaatttattgagtttttgaaaacctttcacaagaccggacaggaaatttataagcaaactaagctgtttctagagggcatgcactacaagcgcgacttgagcatcgaagaacagagcgagtgcgcccaggatttttatcacaatgttgccgagcgcatgcagaccaggggcaaggtacctcccgaaagggtcgagaaaatcatggaccagattgagaaatatattatgacgcgtttgtataagtacgtgttctgtcccgaaactaccgatgatgagaaaaaagacctggccatccagaaacggatcagagccctgaggtgggtcacaccacaaatgctatgcgtgcccgtgaatgaggacatccccgaggtcagcgatatggtggtcaaagcaatcacagatataatcgagatggactccaaacgggtgccacgggataagctcgcatgtattacaaagtgctccaagcacatcttcaacgcaattaagatcaccaagaatgagccggcgtctgccgacgactttctgcccacactgatctacatcgttcttaaaggtaatccgccacggttgcagtctaacatacagtacatcaccagattttgtaaccccagcaggttgatgacaggggaggatggatactactttaccaatctctgctgtgccgtggcatttattgaaaagctcgacgctcagtccttgaacttatctcaggaagattttgacagatatatgtccggtcagacttccccccggaaacaagaggctgaaagctggtctcctgatgcttgtttgggggtgaaacagatgtacaagaacctggatttactgtcccagctgaacgagaggcaggagcgcattatgaatgaggcaaagaaactggagaaagacctcatagattggaccgacggaattgcccgggaagtccaggatatcgtcgaaaagtatcccctggagatcaagccgccaaatcaacctctggcggctatcgattcagagaatgtggaaaacgataaactacctcctcccctgcagcctcaggtttatgccgggtag

SEQ ID NO: 202201 - DNA, 1518 bp, synthetic construct
  misc_feature 1..1518: note = Description of Artificial Sequence: Synthetic coding sequence
  source 1..1518: mol_type = other DNA
atgatggccagcagctaccacgaggtggtgagccggaagaagatgagcctgaagtctgaacggaggggcattcacgtcgaccagtcagacctcctgtgtaagaagggctgcggctactatggcaatccagcctggcagggattttgtagtaagtgctggcgagaagagtaccacaaggcaaggcagaagcagatccaggaagactgggaattagcagagaggctgcagagggaagaggaagaggcctttgcctcttctcagagctcccagggagcccagtctttaacatttagcaaatttgaagaaaaaaaaaccaacgaaaagacaaggaaggtcacaactgtgaagaaatttttctcagccagctcgcgagtcggaagcaagaaggagattcaggaagcaaaagccccaagtccctccatcaatagacaaacttccatagaaacggatcgggtcagtaaggagtttattgagttcctgaaaacctttcacaagactggccaggaaatttataagcaaaccaagttatttctggaaggaatgcattacaagcgtgatttgtctatcgaagaacagagcgagtgtgcccaggatttctatcacaatgttgcagagaggatgcagactaggggcaaagtcccgccggagcgcgtggagaagattatggatcagatagagaaatacataatgactcgcctttataaatacgtgttctgccctgagaccaccgacgatgagaaaaaggatctcgcaattcagaaacggatcagggctctccgatgggtgaccccgcagatgctttgcgttcccgtgaatgaagatattccagaagtaagtgatatggtggtgaaagccatcaccgacatcattgagatggattccaagagagttccgcgggataagctggcttgcatcaccaaatgttctaaacacattttcaatgcaataaaaatcaccaaaaacgagccggccagtgctgatgacttcctgccgactctgatttacatcgtgctgaaaggcaatcctccgcggctccagtcaaatattcagtacataacacggttttgcaatccatccagattgatgactggcgaagacggctactacttcactaacctgtgttgtgctgtggccttcattgaaaagctggacgctcagtcattgaacctcagccaagaagattttgatcgctatatgtcaggtcaaacgtccccgcgaaaacaggaggctgaatcatggagcccggatgcatgcctcggtgtaaagcagatgtacaagaacctcgacctgctgtcccagttgaacgaacggcaggagaggattatgaacgaagccaagaaactggagaaggatctaatcgactggactgatggaattgccagggaagtccaggacattgtcgagaaataccccttagaaattaagccacctaatcaaccgcttgccgcaatcgattccgagaatgtcgagaatgataagctccccccacccctccagcctcaagtgtacgccggctag

SEQ ID NO: 202202 - DNA, 138 bp, synthetic construct
  misc_feature 1..138: note = Description of Artificial Sequence: Synthetic coding sequence
  source 1..138: mol_type = other DNA
atgagcctgaagagcgagcggcggggcatccacgtggaccagagcgatcttctctgtaaaaagggctgcggttactatgggaaccccgcttggcagggcttttgctcaaagtgttggagagaagagtatcataaatag

SEQ ID NO: 202203 - DNA, 1476 bp, synthetic construct
  misc_feature 1..1476: note = Description of Artificial Sequence: Synthetic coding sequence
  source 1..1476: mol_type = other DNA
atgagcctgaagagcgagcggcggggcatccacgtggaccagagcgacctgctgtgcaagaaaggatgcggctactacgggaatcccgcttggcaaggcttctgtagcaagtgctggcgggaggaatatcacaaagcacgccagaagcagatacaagaagattgggaactcgcggagcgcctccagagagaggaagaggaggcgttcgcctcctcgcagagcagtcagggcgcgcaaagcttgacattctccaaatttgaggagaagaaaacaaacgagaagacacgtaaggtgactacggtgaaaaaatttttctcagctagcagccgggtgggtagcaaaaaagagatacaagaagcgaaggctcccagcccttcaattaaccgccagacatctattgaaaccgatcgggtcagtaaagagttcatcgagttcctgaagaccttccataagacaggccaggagatatacaaacagactaaactgtttctggaaggaatgcactataagcgagacctgtccatcgaggagcagagtgagtgcgctcaagacttctaccacaacgtggccgagagaatgcagactcgcggcaaggtgcctcctgagagggtggaaaaaatcatggaccagatagaaaaatatattatgacacgactctacaagtacgtattttgtcccgagaccacagacgatgaaaagaaagacctcgccatacagaagcgtatcagagctcttcgttgggtgaccccacagatgttatgcgtcccagtgaatgaggacattcccgaggtgagcgatatggtagtaaaggctattactgatattattgaaatggattccaaacgcgtgccaagagataagctcgcttgtatcaccaagtgctctaaacatattttcaatgccattaaaatcacgaagaacgagcccgccagcgcagacgatttcttacctacccttatctacatcgttctaaaaggaaatccccctaggctccagagcaatattcaatacatcactaggttctgtaacccatcaaggctgatgactggagaggatgggtattatttcacaaatctctgctgtgccgttgcctttattgagaagctcgatgcacagtccctgaacctctcacaggaagatttcgatcgctatatgtcgggccaaacaagcccgagaaagcaggaagccgagtcatggagcccggacgcctgccttggcgtcaaacagatgtacaaaaatcttgatctgttgtcccaactgaatgagcgacaagagagaatcatgaatgaggcaaagaagttagaaaaggacctgattgactggactgatgggatagcacgggaagtgcaagacattgtagaaaagtaccctctggagatcaagccccccaatcaacccttagccgccatcgactccgagaacgtggagaacgataaattacctccaccactgcagccacaggtgtacgcaggttag

SEQ ID NO: 202204 - DNA, 372 bp, synthetic construct
  misc_feature 1..372: note = Description of Artificial Sequence: Synthetic coding sequence
  source 1..372: mol_type = other DNA
atggagcccgccgagcagcccagcgagctggtgagcgccgagggccgcaatcggaaggccgtgctatgccagagatgtggcagcagggtgctccagcccgggacggccctgttcagtagacgtcagctattcttaccatcgatgcggaagaagccggcactttcagatggaagcaatcctgatggcgatctactacaggaacactggctcgttgaagacatgttcatatttgagaacgtgggcttcaccaaggatgtggggaacataaaatttctggtgtgcgctgattgcgaaatagggcctatcgggtggcactgcctggacgacaaaaactctttctacgtggccttggaaagagtgagtcacgaatag

SEQ ID NO: 202205 - DNA, 1206 bp, synthetic construct
  misc_feature 1..1206: note = Description of Artificial Sequence: Synthetic coding sequence
  source 1..1206: mol_type = other DNA
atggagccccggcgggccgcccccggcgtgcccggctggggcagccgcgaggctgccggctctgcttcagcagctgagctggtgtatcacttggcaggggccctgggtaccgaactgcaggacctggctaggaggtttggtccagaagcggccgccggattagtgcctcttgtcgtgcgggctctggaacttctggagcaggccgccgtcggcccagcgcccgactctctgcaggtaagcgctcagcccgccgagcaagagctacggaggctaagggaggagaacgagaggctgcgccgcgagctcagggcaggaccacaagaggagcgagccctactgagacagctaaaggaagtcactgacaggcagagggatgaactccgcgcccataaccgggacctcagacaaagaggccaggaaactgaggccctgcaggaacagttgcaaagactgctattagtgaacgcggagctgcggcacaagttggctgcaatgcaaacccagttacgcgctgcccaggacagagagagggagaggcagcaaccaggtgaagcggccacccctcaggcaaaagaaagggctcgtgggcaggccggccggcctgggcaccagcacggccaagagcctgagtgggccaccgctggtgccggcgcaccaggcaatcctgaggaccccgccgaagccgcccagcagctgggaaggccttctgaggccggccagtgcagattttcgcgcgaggagttcgagcagatccttcaagagcgaaatgagctgaaggcgaaggtcttcctacttaaggaagagttggcatactttcagagagagctgctcaccgatcatagagtgcccggactgctgctggaagccatgaaggttgccgtgaggaaacagagaaagaagatcaaagccaaaatgctgggtacacccgaagaggccgagagttcagaagacgaggctggtccttggattctgctgagcgacgacaagggtgatcatcccccaccccccgaatccaagattcagagctttttcggactgtggtatcgggggaaagcggagtctagtgaagacgagacaagttccccggcgccaagcaaacttggcggggaggaggaagcacagccccagtcccccgctcccgacccaccatgtagcgcacttcacgagcacctgtgccttggagctagcgccgcccccgaggcctag

SEQ ID NO: 202206 - DNA, 1212 bp, synthetic construct
  misc_feature 1..1212: note = Description of Artificial Sequence: Synthetic coding sequence
  source 1..1212: mol_type = other DNA
atggaggaggagcggggcagcgccctggccgccgagagcgccctggagaagaatgtggccgagctgacagtaatggatgtatacgacatcgcgagcttggtgggacacgagtttgaaagagtgattgaccagcacggctgcgaggcgatagctcggctgatgcccaaggtggtgcgcgttctggagattctcgaggtcctggtgagccgccaccacgtggccccagaactggatgaactccggttggaattggatcgccttaggcttgagcgtatggatagaatcgagaaagaaaggaaacatcagaaggagcttgagctggtggaggatgtgtggcggggtgaggcacaggatctgctcagtcaaatcgcccagctccaggaggagaacaaacagttaatgaccaatctgagtcacaaagacgtaaacttctcggaagaggagttccagaagcacgagggaatgagtgagagggaaaggcaggttatgaaaaagctaaaggaggttgtcgataaacagagggatgaaatccgcgctaaggaccgcgagctgggtctgaaaaacgaagacgtggaagccctgcagcagcaacaaacgcgcctgatgaaaatcaaccacgatcttcgccatagagtgaccgttgtagaggcccagggcaaggcgctgatcgagcagaaggtcgagttggaagcagatcttcagaccaaagagcaggaaatgggttctctgcgtgcagagctcggcaagctgcgcgaacgactccagggcgaacactcccagaacggtgaggaggagcctgaaacagagcctgtgggggaagagagcattagcgacgccgagaaagtggcaatggaccttaaggatccgaatcggcccaggtttactcttcaggagctcagggatgtgcttcacgagcgcaacgagctgaagagcaaggttttcctgctacaggaggagcttgcatactataaaagcgaggaaatggaagaggaaaatagaatcccgcagccgccgccgatagcccatccaaggaccagcccacagcctgaatctggtattaagaggctattctcgtttttttcaagggataaaaagagactggccaatacccagcgtaatgtgcacatccaggaaagctttggccagtgggcaaacacacatagggatgatggatataccgaacagggccaggaggcactgcaacacctttag

SEQ ID NO: 202207 - DNA, 636 bp, synthetic construct
  misc_feature 1..636: note = Description of Artificial Sequence: Synthetic coding sequence
  source 1..636: mol_type = other DNA
atggaggagccccccgtgcgggaggaggaggaggaggagggcgaggaggatgaggaacgtgacgaagtgggccctgagggcgcccttggcaagtccccgttccagctgaccgctgaggacgtgtatgatatttcctatctgctggggagagagcttatggccctgggaagtgatcctcgtgtcactcagctccaattcaaagtcgttagggtgctcgagatgctggaggctctcgttaacgagggatccctggctttggaagagttgaaaatggagcgtgaccacctccgaaaagaagttgagggcctccgccgccagtccccaccagccagcggagaagttaatctcggacccaacaagatggtcgttgacctgaccgatcctaacagacctcgctttaccctgcaagagctgcgagacgtgctgcaggaaaggaataagctcaaatcacaactgctcgtggttcaggaggaactgcagtgttacaagagcgggttgatcccccctagagaggggcccggaggccgccgcgagaaggacgcagtggttacgtctgctaagaatgcagggagaaataaggaagagaagaccattatcaagaagttgttcttctttcgctctggaaagcagacatag

SEQ ID NO: 202208 - DNA, 717 bp, synthetic construct
  misc_feature 1..717: note = Description of Artificial Sequence: Synthetic coding sequence
  source 1..717: mol_type = other DNA
atggccgaggacaagaccaagcccagcgagctggaccagggcaagtacgatgccgatgacaacgtcaaaattatctgtttaggagattcagccgttggcaagtctaagctcatggagcgctttttaatggacggattccagccacagcagctgtccacgtatgctctgaccttgtacaaacataccgcaactgtggacggccgcactattctggtggacttttgggatacagctggacaggagcggtttcaatccatgcatgccagctattaccataaggcgcacgcctgtattatggtgtttgatgtgcagcgcaaggtgacttacagaaacctctctacatggtacaccgagctacgcgagttccgcccagagatcccatgtatagtcgtcgcaaacaaaatcgatgacatcaatgtgacccagaaaagctttaactttgccaagaagttcagcctccccctgtacttcgtgtccgccgccgacggcacaaatgttgtcaaagtgtggttgacggctgaagtggctagtaagctttttaacgatgccatccggctggcggtgagttacaagcagaactcgcaagatttcatggatgagatctttcaggagctcgaaaacttttccctcgaacaggaggaagaggatgtgcctgatcaggagcagtccagcagcattgaaacaccttccgaggaggcggcttctcctcacagctag

SEQ ID NO: 202209 - DNA, 498 bp, synthetic construct
  misc_feature 1..498: note = Description of Artificial Sequence: Synthetic coding sequence
  source 1..498: mol_type = other DNA
atggccgaggacaagaccaagcccagcgagctggaccagggcaagtacgacgccgatgacaatgttaagatcatatgcttgggggacagcgccgtcggcaagtctaaactgatggaaaggttcttgatggatggctttcagccccagcagctgtccacctatgcgctcacattatataaacataccgcaactgtcgacggaaaaacaatcctcgtcgctgacattaacgttacccagaaatccttcaattttgcgaaaaagttcagcctgcctctgtacttcgtatctgccgcagatggcactaatgtagtgaagctcttcaacgatgccattcgactggcggtcagctataagcagaactcccaggacttcatggatgaaatcttccaggaactggaaaacttttctcttgaacaggaagaggaggacgtgccagatcaagagcaaagttcatccatcgaaacaccgtcggaagaagttgcaagcccccatagttag

SEQ ID NO: 202210 - DNA, 690 bp, synthetic construct
  misc_feature 1..690: note = Description of Artificial Sequence: Synthetic coding sequence
  source 1..690: mol_type = other DNA
atggccgaggacaagaccaagcccagcgagctggaccagggcaagtatgacgctgacgataatgtaaaaataatttgtctcggagactccgctgttggcaagagcaagttgatggagcgcttcctgatggatgggttccagccccaacagctttcaacatacgcgctgacactatacaagcatacagccacagtggatggaaagactatccttgttgacttctgggataccgcaggacaagaacgttttcaatctatgcatgcttcttattaccacaaggctcacgcttgcatcatggtcttcgacattcagcgcaaggtgacttacaggaatctttccacctggtacaccgagttgcgggaattccgtccagagattccatgcattgtggttgcaaacaagatcgatgcagacattaacgtgactcagaagtccttcaacttcgccaaaaagttttcactgccactgtattttgtgagtgccgctgacgggacaaacgtggtgaaactgtttaatgacgccattcggctggctgtctcttacaagcagaattctcaggatttcatggacgaaattttccaggaactggagaatttctctctggaacaggaggaggaagacgtgcctgaccaggagcaatcctcaagtatcgagacgccttccgaggaggtcgctagcccccatagctag

SEQ ID NO: 202211 - DNA, 687 bp, synthetic construct
  misc_feature 1..687: note = Description of Artificial Sequence: Synthetic coding sequence
  source 1..687: mol_type = other DNA
atggccgaggacaagaccaagcccagcgagctggaccagggcaagtacgacgccgatgataacgttaaaataatctgtctgggcgacagtgctgtgggaaaatcgaagctcatggagcggtttctgatggacggtttccaacctcagcagctctcgacttacgcgctgacactatacaagcacaccgcaaccgttgatggtaaaactattctggtggacttttgggacacggcgggtcaggagagatttcaaagcatgcacgctagttattatcacaaggcccacgcctgtatcatggtttttgatatccagcgaaaggtgacctatcggaatttgagtacctggtacaccgagctccgagagtttagacctgagatcccctgtattgttgtcgctaataaaattgatgacataaatgtgactcagaaaagcttcaattttgccaagaaattcagtctgccattatattttgtgtcagcagctgatgggaccaacgtggtcaaactatttaatgacgctataagactggctgtttcctataaacagaactcacaagactttatggacgagatcttccaggaactcgaaaatttctctttagagcaggaagaggaggatgttccagaccaggagcagagtagctccatagagactccgagcgaggaggtcgcgtcaccgcacagttag

SEQ ID NO: 202212 - DNA, 687 bp, synthetic construct
  misc_feature 1..687: note = Description of Artificial Sequence: Synthetic coding sequence
  source 1..687: mol_type = other DNA
atggccgaggacaagaccaagcccagcgagctggaccagggcaagtacgacgccgatgacaatgtgaaaattatttgtctgggggactcagcagtcgggaaatccaagcttatggagagatttctgatggacggctttcaaccccagcaactgtcaacttacgctctgactttgtataagcacacggcaacagtcgatggcaagactatcctggtggacttttgggatactgccggccaggaacgtttccagtctatgcatgcatcatattatcacaaagcgcacgcttgtataatggtgttcgatatccagagaaaagtgacttatcggaatctctcgacctggtatacggaattacgagaattcagacctgagatcccatgtatagtcgtcgccaacaagattgacgacatcaatgtgacccagaagtcattcaatttcgccaagaagtttagcctgccactgtacttcgtttcagccgcagacggaacgaatgttgtgaaactgtttaacgacgcaattcgtcttgccgtaagttacaaacagaattcgcaggatttcatggacgaaatctttcaagagctcgagaacttcagcctggaacaggaggaagaagatgtgccggaccaggagcaaagctctagcatagaaacaccaagtgaagaagttgcctctcctcatagctag

SEQ ID NO: 202213 - DNA, 717 bp, synthetic construct
  misc_feature 1..717: note = Description of Artificial Sequence: Synthetic coding sequence
  source 1..717: mol_type = other DNA
atggccgaggacaagaccaagcccagcgagctggaccagggcaagtacgatgcagatgataatgttaaaattatatgcctgggcgactctgccgtgggcaaatccaagctgatggagcggttcctgatggatggtttccagcctcagcagctcagtacctacgcgctaaccttatacaaacacacggcaactgttgacgggaaaaccatcctcgtcgacttttgggacacagccggtcaggaacgcttccagtcgatgcacgccagttattatcataaggcccatgcgtgtatcatggtgtttgacattcagaggaaagtgacatatcggaatttaagcacatggtacacggagctgcgcgaattcaggcctgaaattccttgcatcgtggtcgctaataagattgacgatataaatgtgacgcagaaatcctttaacttcgccaagaagttttcactacctctgtacttcgtctccgcagcggacgggacaaacgttgtaaaagtgtggctgaccgctgaggtggccagtaaattgtttaacgacgccattagactggcagtgtcatacaaacaaaattcacaggactttatggacgaaatcttccaagagctcgagaattttagcctggaacaggaagaggaagatgttccggaccaggaacagtcttctagtattgaaaccccgtcggaagaggtggcaagccctcatagctag

SEQ ID NO: 202214 - DNA, 345 bp, synthetic construct
  misc_feature 1..345: note = Description of Artificial Sequence: Synthetic coding sequence
  source 1..345: mol_type = other DNA
atggccgaggacaagaccaagcccagcgagctggaccagggcaagtatgatgcggacgataatgtgaagatcatatgcctgggagattcggccgttggcaagagtaaattgatggagaggttccttatggacgggtttcaaccacagcagctctctacctacgcacttacgttatataagcacactgccacagtggatgggaagacaatccttgtggatttttgggacaccgcggggcaggagcgctttcagtccatgcacgcttcatactaccataaggcacacgcctgcattatggtgtttgacattcagagaaaggttacatatcgaaacctcagcacgtag

SEQ ID NO: 202215 - DNA, 306 bp, synthetic construct
  misc_feature 1..306: note = Description of Artificial Sequence: Synthetic coding sequence
  source 1..306: mol_type = other DNA
atggccgaggacaagaccaagcccagcgagctggaccagggcaagtatgatgccgacgacaacgtgaaaattatttgcctcggcgattcagcggtgggaaaatcaaaattaatggaacggttcctgatggatgggttccagcctcaacaactatctacatacgccctgacactctataaacatactgcaactgttgacggaaagaccatcctggtggacttttgggatactgccgggcaggagaggtttcagtcaatgcatgcttcatattaccacaaagctcacgcctgcatcatgcagacctag

SEQ ID NO: 202216 - DNA, 690 bp, synthetic construct
  misc_feature 1..690: note = Description of Artificial Sequence: Synthetic coding sequence
  source 1..690: mol_type = other DNA
atggccgaggacaagaccaagcccagcgagctggaccagggcaagtacgatgccgacgacaatgtaaaaatcatatgcctgggggatagtgctgttggaaagagcaagctgatggaaagattcttgatggatggctttcaacctcagcaattgtccacttatgccctaacattgtacaagcataccgcgaccgtggatggaagaaccatactggtcgatttttgggatacagctggacaggaacgcttccaatcgatgcacgccagttattaccacaaggcccatgcatgtatcatggttttcgatgtgcagcgaaaggtaacatatcgcaatctgtctacatggtacacagaactgcgagagtttagacccgaaattccgtgcattgtggttgcaaataaaatagatgctgacatcaatgtgactcagaaatctttcaactttgccaagaaattctccttgcccttatatttcgtctctgcagctgacggaaccaacgttgtcaaattgttcaatgatgcaattcggctggccgtgtcctacaaacagaacagtcaggactttatggatgagattttccaggagctggaaaatttctctttggagcaggaagaagaggatgtccccgatcaagaacagtccagcagtattgagaccccgtcggaggaggccgcctcgccgcactcttag

SEQ ID NO: 202217 - DNA, 690 bp, synthetic construct
  misc_feature 1..690: note = Description of Artificial Sequence: Synthetic coding sequence
  source 1..690: mol_type = other DNA
atggccgaggacaagaccaagcccagcgagctggaccagggcaagtatgatgccgacgacaacgttaagatcatctgcctcggagactcagccgtagggaagagcaagttgatggagagattcctgatggacggttttcagcctcaacagctgagcacttacgctctcaccctttacaaacataccgctactgttgacgggcgaactatcctggttgacttttgggacaccgctgggcaggaaagatttcagtctatgcacgcttcgtactatcacaaggcgcacgcatgcataatggtgttcgatgtgcagcgaaaggttacttatagaaacctgtcaacttggtatacagagcttcgagaatttagacccgaaatcccctgtattgtggtagctaataaaatcgacgcagacattaatgtgacacagaaaagctttaacttcgctaaaaagttctctctcccactgtattttgtcagtgcagccgatgggacaaatgtcgttaagctctttaacgacgccattcgtctggccgtgtcctacaagcagaatagtcaggactttatggatgaaatcttccaggaactcgaaaatttctccctggaacaggaggaggaagacgtaccagaccaggagcaaagtagtagcatcgagacaccctccgaagaagctgcctccccccactcctag

SEQ ID NO: 202218 - DNA, 687 bp, synthetic construct
  misc_feature 1..687: note = Description of Artificial Sequence: Synthetic coding sequence
  source 1..687: mol_type = other DNA
atggccgaggacaagaccaagcccagcgagctggaccagggcaagtacgacgccgatgacaacgtgaaaattatctgtctaggggatagcgcagtcggcaagtccaaactgatggaacgcttcctcatggacgggttccagccccaacagttatccacgtatgcactgacactgtataagcacacagcaaccgtggatggaaggaccattctggtcgatttttgggataccgctggccaggagaggttccaatcaatgcacgcctcgtattatcacaaggctcacgcatgcattatggtattcgatgtccagcgcaaggtgacctatagaaatctctcaacctggtatactgagcttagagagtttcggccagagataccttgtattgtcgtagctaataagattgatgacatcaatgtcacacaaaagagcttcaactttgccaaaaagttcagcttgcctctgtattttgtgtcagcagccgatggtacgaacgtagtgaagctttttaacgacgctataaggctcgccgttagctacaagcagaactctcaggacttcatggacgaaatctttcaggaactggagaacttttccctggaacaggaagaagaagatgttcccgatcaggagcaatccagttcaatcgagaccccaagtgaggaagcagcatcaccacactcctag

SEQ ID NO: 202219 - DNA, 63 bp, synthetic construct
  misc_feature 1..63: note = Description of Artificial Sequence: Synthetic coding sequence
  source 1..63: mol_type = other DNA
atggccgaggacaagaccaagcccagcgagctggaccagggcaagtacgacgccgacgattag

SEQ ID NO: 202220 - DNA, 687 bp, synthetic construct
  misc_feature 1..687: note = Description of Artificial Sequence: Synthetic coding sequence
  source 1..687: mol_type = other DNA
atggccgaggacaagaccaagcccagcgagctggaccagggcaagtatgacgcggacgacaacgtcaaaattatttgcctgggtgattctgccgtggggaagtctaaactcatggaacgtttcttgatggacggattccaaccacagcagctctctacctacgcgctgaccctttataagcatacagccaccgtcgatggccgaacaatcctggtagacttctgggatacagccggtcaggaaaggtttcaaagcatgcacgcctcctactatcataaggcgcacgcatgcattatggtgttcgacgtccagcgaaaggtcacataccgtaacttgtcaacctggtacacagagttgcgtgaattcaggcctgagataccatgtatcgtggtggccaacaagatcgacgatatcaatgtgacgcagaagtcattcaactttgctaagaagttttctttacccctatatttcgtctcagctgcagatggtaccaatgtggtcaagctgttcaacgatgctataaggttagccgtgtcatacaagcaaaattcccaggatttcatggacgaaattttccaggagctggaaaatttcagtcttgagcaagaggaggaggacgtcccggatcaggagcagtcatcctccattgagacaccctctgaagaggccgcatctccacatagctag

SEQ ID NO: 202221 - DNA, 603 bp, synthetic construct
  misc_feature 1..603: note = Description of Artificial Sequence: Synthetic coding sequence
  source 1..603: mol_type = other DNA
atggccaagaagacctacgacctgctgttcaagctgctgctgatcggggatagtggagtggggaaaacttgtgtgttgttccgcttttctgatgatgcttttaatacaacatttattagcacaatagggattgacttcaagatcaagaccgtggagttacaaggaaagaagatcaaacttcagatttgggatacggccgggcaagagaggtttcacacaatcactacgtcgtattatagaggggcaatgggtattatgttggtgtatgatattacgaatggtaaaagtttcgagaacatttccaagtggctgcgcaatattgacgagcatgccaacgaagatgttgaacggatgctcctgggaaacaagtgtgatatggacgacaagagggttgtccccaaaggtaaaggggaacagatagcccgagagcatggaatacgtttcttcgagaccagcgccaaggccaacatcaacatcgagaaagcctttttaacgttggcagaagacatccttcggaaaactcctgttaaggagccaaatagcgaaaatgtggatatttcaagcggaggcggagttacagggtggaaatccaaatgctgctag

SEQ ID NO: 202222 - DNA, 1950 bp, synthetic construct
  misc_feature 1..1950: note = Description of Artificial Sequence: Synthetic coding sequence
  source 1..1950: mol_type = other DNA
atgagcctgatggtgagcgccggccggggcctgggcgccgtgtggagtccgacccatgtacaagtgaccgtcttgcaagctagagggctgagggcaaaaggacccggaggaaccagtgacgcgtatgccgtcattcaggtcgggaaggaaaagtacgcgactagtgtttccgagcggagcctcggtgcccctgtgtggagggaggaagcaacatttgagcttccgtcattgctgagctcagggcctgccgccgctgccactctccaactgactgtcctacatagggctttgctgggcctggacaaatttttaggcagggccgaagtcgaccttagagatctgcatagagatcagggaagacgtaagacccagtggtacaaactaaagtccaaaccgggcaaaaaagacaaggagcggggcgagatcgaggttgacattcagtttatgagaaacaatatgactgcgagcatgttcgacctgagcatgaaagataaaagccgcaatccttttggcaagctcaaggataagatcaaagggaagaacaaggactccgggagcgataccgcgagcgcgatcatcccaagtaccaccccttcagtggactccgacgatgagtccgtcgtaaaagataagaaaaagaaatctaagattaaaacactgctgtccaagtccaatttgcaaaagacaccactttctcagagtatgtccgtgttgcccacttcgaagccagagaaagtccttctcaggccgggagatttccagtctcagtgggacgaggacgacaatgaagatgaatcctcaagcgcttcagatgtcatgtcacacaagcgtacggcctctactgacctgaaacagctgaaccaggtgaacttcacactgcccaagaaggaagggcttagttttctgggggggctgaggtctaagaacgatgtcctttctagatcgaatgtttgcataaatgggaatcacgtgtacctggaacagcctgaagcaaaaggcgaaatcaaggactcctcaccgtctagctcaccgtcgcctaaaggcttcagaaaaaaacacctgttcagttctactgaaaacctggccgccggaagctggaaggaacctgcagaggggggggggcttagttccgataggcagctctctgaaagctccaccaaggacagcctaaagtcaatgacattgccaagctacagacccgcgcctctcgtatcaggcgatctccgagaaaacatggcaccggctaattcggaagctacgaaggaagccaaggagtctaagaaacccgagagtcgtcgtagctccttgctttccctcatgacgggtaagaaagacgtggccaaaggctctgaaggcgagaatccactgactgtccccggtcgtgaaaaagaaggaatgctaatgggagttaagccgggggaggacgccagtggacctgcagaggatctggtaagacgttccgaaaaggacacagctgccgtggtatcacggcaaggatcaagtctaaatctctttgaggacgtgcagattaccgagccagaggccgaaccagagtcaaaaagcgaaccgcgtccccctatatctagcccaagggccccacagacccgtgccgtgaagccccgccttcatccagtcaaacccatgaacgctatggcaaccaaggttgcgaattgcagcctgggcacggctacaatcatctcagaaaacttgaataatgaagttatgatgaagaaatatagcccatcggatcctgcatttgcatatgcccagcttactcatgatgagctcatacagctcgtactcaagcagaaagagaccatcagtaaaaaagaattccaggtgcgggaactcgaggactacattgataacctcctcgtgcgagtgatggaagagacacctaatatactgagaatacccacccaggtggggaagaaggccgggaaaatgtag

SEQ ID NO: 202223 - DNA, 3852 bp, synthetic construct
  misc_feature 1..3852: note = Description of Artificial Sequence: Synthetic coding sequence
  source 1..3852: mol_type = other DNA
atgagcctgatggtgagcgccggccggggcctgggcgccgtgtggagcccgacccacgtgcaggtcacagtcctgcaggcgagggggctgcgagcaaagggccctggcgggacgtctgatgcctacgctgtgattcaagtaggtaaggaaaagtacgccactagcgtgtctgaacggagtcttggtgcaccggtctggagggaggaagctacatttgaacttccaagcctcctgagctccggccctgcggctgccgctactctgcagctaaccgtgctccacagggcactccttgggcttgataagttcctgggacgagcggaggttgacctgagggatcttcaccgcgatcagggaaggcgcaaaacccagtggtataaactaaagtccaagcctgggaagaaggataaggagaggggtgaaattgaagtcgatatccagtttatgcgcaacaacatgacagcgtcaatgttcgatctgtctatgaaagataagagcaggaatccctttggcaagttgaaggataagattaagggaaagaacaaggacagcggatcagacacagcgtctgccattatccccagcaccacgccctctgtcgattctgacgacgagtccgttgtcaaagacaagaaaaagaaatccaagatcaaaaccttgctgtccaaaagcaacttacagaagacgccactcagtcagtccatgagtgttctgcccaccagcaaaccggaaaaggttctgctcagacctggggactttcagagccagtgggatgaagacgataacgaagatgaatcatcgtccgcatctgacgtaatgtctcacaagcgcacagcatccactgaccttaagcaactcaaccaggtgaactttacattacctaagaaagagggtctttcattcctcgggggtctaagaagcaagaatgacgtgctgtcacgttccaacgtctgcataaatggtaatcacgtctatctggaacaaccagaggctaaaggcgagattaaggacagcagtccatcctcttccccaagtcctaaaggtttccgcaagaaacatctgtttagcagcaccgagaatctggcagctgggagctggaaggagccggccgagggagggggactctccagcgatcgacagctgtctgagtcctccacgaaggactccctgaaatccatgacactaccctcctaccgccccgctcccctcgtatctggcgatttgagggagaatatggccccggccaatagtgaggccaccaaggaggcgaaggaaagcaagaaacctgagtcacggaggtccagcttgctgtctctgatgactggtaaaaaggatgtggctaaaggatccgagggcgaaaatccacttactgtgccaggcagagaaaaagaggggatgctaatgggagtgaaacctggcgaagatgctagcggccctgccgaggacttggtaagaagatcagagaaagataccgcggccgtcgtcagccggcagggatccagtctcaacctgtttgaagatgtgcaaatcacagaaccggaagcagaacctgaatctaagagtgaacctcgaccaccgatttcttctcctagggcgccccagactagggccgtaaagcccaggttagaagtgtctcccgaggctcagcccaccgcacggctgccctctccaaccgattccccctcaagccttcccccactgccctcctcatctggccaggcttccgttcctagtgagctggggcatggagcggacacacagtcatcagagtctccttctgtgttttctagtttatcttcacctatagcagccccaatctctacgtccacaccaattgagagctggcctctcgtggaccgcggccaggctaaatcagagggaccacccctgttgcctaaagctgagttgcagacagagtctttgacgcccgtgccaaactccgggagctccgctttgggtagcctgttcaaacaaccatcattccctgccaacaaaggcacggaagacagtctgatggggcgtacccgggagaccggaacagagaagaatacaagtagtcttgaacttgaagaaagccttccggaacaacctgaaaccggccgtcaggaagaggagcttccaagattcccatgcaagaaacaggactattcaccctcctccggtgaggctcaagaagtgccattcgccctctctcttagctctgacggagcagtgtcccctgtgggcgaactcgccgcaggaggcgaccgggacctagagagtcaggcaggatctctggtggaaagcaaagcgcgggatgcggcagaggaggtggctccacccctcccaatgggggcatcagtgccgagtatcgacagtatgatgagaaagctggaagaaatgggattaaacctgcgcaaggaccaaaagaagactaaaaagcgggtatctttttctgagcagctgttcacagaagaggccgttgcgggagcagccttattggtcgagggccattcttcgtgccctcaggagctgaacccagcttggagcgtggccggcaacgcatcagacggtgagccacccgagagcccacacgctgaggattccgaacgggaatccgtcaccactccagggcccgcaacctgcggagcccccgcctcccccgcagaccatctgttgcttccctcccaagaggagagtttctcggaggtgcctatgagtgaagcaagcagcgcaaaggacaccccgctgtttcgaatggaaggggaggacgctctggttacccaataccagagcaaggcaagcgaccacgagggcctcctgagtgacccactctccgaccttcagctcgtttctgacttcaagagccctatcatggccgatctgaatctgtctctgccaagtataccagaggttgctagcgacgacgagaggattgatcaggtcgaagacgacggggaccaagtggaagatgacggggaaaccgctaaaagctcaacccttgatatcggggccctgtctctgggcctggtcgtgccttgcccggagagaggaaaaggaccttcaggcgaggcagaccgattagttctcggagaggggctgtgcgattttcgcctccaggcccctcaggcctccgtgaccgctccttctgagcagaccacggagttcgggatccataagccccatcttgggaagtcaagctccctggataagcaattgcccgggccttcgggaggtgaagaagagaagcccatggggaatggatcaccaagtcctcctcctgggacatcactggataatccagtgccttctccgagtccaagcgaaatattcccagttacgcatagttttcctagttcagcgcacagcgatacgcaccacacctctacggcagagagccagaagaaagccaccgccgaaggctctgccggtcgtgtggagaacttcgggaaaagaaaaccattactgcaggcatgggtgagtccatcagagacacaccccgtgagcgcccaacccggggcaggaactggaagcgcaaagcatcggctccaccctgtgaagcccatgaatgctatggccacaaaagtcgcaaactgctcactgggcactgctacaattatcagcgagaacctgaacaacgaagtcatgatgaagaaatactccccttcagatccagcttttgcttacgcacaattgacccacgacgagttgatccaactcgtcctaaagcagaaggagacgatatccaagaaagaattccaggtcagagaactggaggattatatcgataacttgttggtcagggtcatggaggaaactcccaacatactgcgcatccccactcaggttggaaaaaaggctgggaaaatgtag

SEQ ID NO: 202224 - DNA, 429 bp, synthetic construct
  misc_feature 1..429: note = Description of Artificial Sequence: Synthetic coding sequence
  source 1..429: mol_type = other DNA
atgagcctgatggtgagcgccggccggggcctgggcgccgtgtggagccctacacatgtgcaggtcacagtgctgcaggctcgcggcctgagagccaagggccctgggggcacgagtgatgcttacgcggtgattcaggttgggaaggaaaagtatgcaacctctgtgtctgagcgctcgctgggtgctcccgtgtggagggaggaagccacattcgagcttccaagcctgctgagcagcggacccgcggctgcagcgactctgcagcttaccgtgctgcacagggccttgctcggtctggataaattcctagggcgggcagaggtagacttgcgggacttgcacagagacctgggaaaaagtttcttcaagacattaaagaagagagcctgggctatttttctaagactctgcttgaagaaaaattag

SEQ ID NO: 202225 - DNA, 1320 bp, synthetic construct
  misc_feature 1..1320: note = Description of Artificial Sequence: Synthetic coding sequence
  source 1..1320: mol_type = other DNA
atgcggaacaacatgaccgccagcatgttcgacctgagcatgaaggataaaagcagaaatcccttcggtaagctgaaagataagatcaaaggaaagaacaaggatagcggtagcgacactgcctcggccataattccatctaccactccctccgttgatagcgacgacgaaagcgtggtgaaagacaagaagaaaaagtccaagatcaagaccctcctgagcaaatcaaatctccagaagacccccttgtcccaatctatgagcgtgcttccgacttctaaaccagagaaagtcctattacgacccggggacttccagtctcagtgggatgaggatgataacgaagatgagagctcttccgcttctgatgtgatgtcccataaaaggacagcaagcaccgatctgaagcagctgaatcaggttaacttcacattgcctaagaaagaaggcctaagttttctagggggcctcaggagcaagaacgatgtcctgtctagatccaacgtctgcataaatgggaaccatgtgtatctggaacagccagaagctaagggcgagataaaggacagctctccctcctccagcccctcccccaagggttttagaaaaaagcacctgttctcatcgacagaaaacctggccgcaggtagttggaaggaaccggctgaaggcggcggactgtcatccgaccggcagctttcggaatcatcaaccaaggacagcctaaagtcaatgactctcccttcttatcggccagccccgcttgtgagtggcgacctccgcgagaacatggcacccgccaatagtgaggccacgaaagaggccaaagagtccaaaaagcccgaatcccggcggagttcccttctgtctctgatgacaggcaaaaaagacgttgccaaggggtcagagggagaaaacccgctcaccgtccccgggagggagaaggagggaatgctaatgggcgtgaagcctggcgaggacgcgtccggcccagctgaagatttggtccgacggtccgagaaggatacagccgccgttgtatctcgccagggctcctcgttgaatctcttcgaggacgtccagataacagaacctgaggcagagcccgagagcaagagcgagcctcggcctccaatcagttctcctcgagcgccccagactcgtgctgttaaaccacgcttgcatccggtgaagcctatgaatgcaatggccacgaaggtcgctaattgctcattaggaacagcaactattatctcagaaaacttaaacaatgaggttatgatgaaggtctgtcccctgcggtcctggtgtgttcggtag

SEQ ID NO: 202226 - DNA, 1539 bp, synthetic construct
  misc_feature 1..1539: note = Description of Artificial Sequence: Synthetic coding sequence
  source 1..1539: mol_type = other DNA
atgatgctgagcgagcaggcccagaagtggttccccacccacgtgcaagtcaccgtcctgcaggctaaggacctgaaacccaagggaaagtcaggcaccaacgacacctatactatcattcaattggggaaggaaaagtattctacatctgtggccgaaaagacgctggaacctgtatggaaggaagaggcctctttcgagctgccaggactcctgatacagggcagcccggaaaagtacatcctcttccttattgtcatgcatagaagcctggtgggcttggacaaatttcttggtcaagtagcaataaatcttaacgacatctttgaggataagcagcgccggaagacagagtggttccggctcgagtccaaacagggcaagcgcatcaaaaacaggggcgaaattaaggtgaatatccaatttatgcgcaacaatatgacagcaagcatgttcgacctgtccatgaaagacaagactaggtcacccttcgccaaacttaaggataagatgaagggccggaaaaacgacgggacttttagcgatacttcttcggcaattatccccagcacacacatgcctgacgccaactccgaattcagttccggcgaaatccagatgaagagcaagcccaaaaaaccatttctgctgggacctcagcgactcagctcagcccatagcatgagtgatctgtctgggtcccacatgtcctcagaaaaattgaaggctggcacaatcggacagacccatctgctgggtcatcagctcgattcttttggtacagtacccgagtctggtagtctgaagtcaccccaccgacgtactctatcattcgacacttccaaaatgaaccagccagactcaatcgttgatgagggtgagctgtgctttggacgacagaacgacccttttaccaatgtgaccgctagtctgccacagaaattcgctactctcccccgcaagaagaaccctttcgaggagagttccgaaacttgggattcgtcaatgaaccttttctcaaaaccaatcgaaattcgaaaagaaaacaaacgcgagaagagggaaaaggtgtccctgtttgagcgggtgactggtaagaaagatagccgcaggagtgataaactaaacaatggaggctctgacagcccttgtgatctgaaaagtccaaacgccttctctgaaaatagacaagattactttgactatgaatctacaaacccattcacagccaaatttcgcgcctccaacatcatgccttcttcaagtttccatatgagccccacgtccaatgaggacttacgaaagattcccgactcgaacccttttgacgctaccgcaggctatcgctcactcacatacgaggaggtgctgcaggagcttgtgaaacataaggagctcttacgccgaaaagatactcacattagggagctcgaggattatatagataacttactggtccgcgtgatggaagagactcccagcatcctgcgggtcccatatgagccatcccgcaaagctggcaagttcagcaactcatag

SEQ ID NO: 202227 - DNA, 1599 bp, synthetic construct
  misc_feature 1..1599: note = Description of Artificial Sequence: Synthetic coding sequence
  source 1..1599: mol_type = other DNA
atgatgctgagcgagcaggcccagaagtggttccccacccacgtgcaggttaccgtcttgcaggccaaggatctgaaacccaagggaaaatcagggactaatgacacttataccatcatccagttggggaaggaaaagtactcaaccagcgtagccgagaaaactctggagcccgtatggaaggaggaagccagctttgaacttccaggtctgctgatacaggggagccccgagaaatacattctgttcttaatagtgatgcaccgctccctggtggggctggataagtttctagggcaggtggccattaatttaaatgatatttttgaagataaacaaaggagaaagacggagtggtttcgactggagtctaaacagggaaagcggatcaaaaacagaggggaaattaaggtaaatattcagttcatgcgaaacaacatgacggcttccatgttcgatctttctatgaaggataaaacccggagtccctttgctaagttaaaagataagatgaagggtagaaagaacgacggcacatttagtgatactagttctgcaatcatcccgtcgacacatatgcctgatgcaaactcggagttcagctctggcgagatacagatgaaatccaagcccaaaaaacccttcttgttagggccacaacgcctttcatcggctcactctatgtctgatttaagcggaagccatatgtccagtgaaaaattgaaggccggcactattggacagacgcacttgctggggcatcaactggactctttcggaaccgttccagagtccggatctcttaagtctccccatcgaaggaccctgagctttgacacttccaaaatgaatcagcccgacagcatcgtggacgagggtgagctttgtttcggcagacagaacgatccatttaccaacgtcacggccagcctgcctcagaagttcgccactctgccacgaaagaagaacccctttgaggaatcgtccgaaacctgggactccagcatgaatttattttccaagccaattgaaatcagaaaagagaataaaagagaaaaaagggaaaaggtgagcctctttgaacgagtcactggaaagaaggattcccgccggagtgacaagctaaataacggcgggtccgattctccatgtgacttgaagagccctaatgcattcagcgagaatagacaggattactttgattacgagagtactaatccattcacagccaaattccgcgcttcgaacataatgcctagttccaggaacacactcttaacaccggcagttgccgagtggaggggctcccttaggtgggccgagctgttccacatgtcccccacttcgaatgaggacttacggaaaatccccgactctaatcccttcgacgctacagctgggtacaggagcctgacctatgaagaagtgctgcaggaattggtcaagcataaagaactgttaagacgaaaggatacccatattagggaactggaggattatatcgataacctcctcgtacgcgtgatggaggagactccaagtatcttacgagttccctatgaaccctctcgcaaggccggaaaattttccaacagctag

SEQ ID NO: 202228 - DNA, 2271 bp, synthetic construct
  misc_feature 1..2271: note = Description of Artificial Sequence: Synthetic coding sequence
  source 1..2271: mol_type = other DNA
atggccagcgccccccccgccagcccccccggcagcgagccccccggcccggatcctgaaccaggggggcctgatggacccggggccgctcagttagcgcctggaccggccgagcttagattgggtgcgccggtggggggccccgatccccagtccccaggattggacgaaccagctccaggagccgccgccgatggtggtgctcggtggtctgcaggccccgcacctggcctcgagggagggcccagggaccccggaccttccgctccccccccccgttctgggccccgggggcagttggcctccccagacgcaccaggccccggacctcggagcgaggcaccactgccggagctggatcctctgttcagctggacggaagaaccagaagagtgtggacctgccagttgtcccgagagcgcccccttccggcttcagggctcttcatctagccatcgggctcggggtgaagtggacgtcttctccccctttcccgcaccaaccgctggtgaactggctctggagcagggccccggttctcctccacagcccagcgacctttctcagacacacccccttccttcagagcccgttggatcccaagaagatggtcctcgattacgggctgtgtttgacgccctggacggagatggcgacggctttgttcgtatcgaggatttcattcagtttgccacagtttacggggccgaacaggtcaaagacctgaccaagtatctggatccaagcggcctgggcgtgatctcgttcgaggacttctaccaaggtatcactgccatccgcaacggggatcctgatggacagtgctatggcggcgtcgctagcgcacaggacgaggagcccctggcatgccccgacgaatttgacgattttgtgacttacgaggctaacgaggtgacagactctgcctatatgggctcagagtccacctatagcgaatgcgaaactttcacggacgaggataccagtacccttgtgcatcctgagctccagccagaaggagacgcggacagcgcaggcggtagcgctgtaccttcagaatgtcttgatgcgatggaggagcccgaccacggagctttgctcctcctgcctggtcgccctcacccccatggccaatctgtcattacagtcatcggcggcgaagaacacttcgaggattacggcgaaggcagtgaggccgagctgtctccagaaactttgtgcaatggtcagctgggttgtagcgacccagcctttttaacgccctcaccaactaaacggctgtcatctaaaaaagtcgctagatacctccatcaatctggagcgctaacgatggaggccctggaagacccttctcccgagctcatggaagggccagaagaggacatcgcagacaaggtggtcttcctcgagagaagggtgctagaattagaaaaagacaccgccgccaccggggagcaacattcccgcctcaggcaggaaaacctacaactcgtgcatcgcgctaatgccctggaggaacagttgaaagagcaggagctaagggcgtgcgaaatggtgttagaagagacgcggagacaaaaggagctgttatgtaagatggaaagagagaagtctatcgaaatagaaaacctccagacccgtcttcagcagttggacgaggaaaattcagagctgaggtcatgcaccccatgtctgaaggccaatatagaaagactggaggaggagaagcagaaattgctggacgaaatcgaatctctcactctccgactgtctgaggagcaggagaacaagaggcggatgggcgacagactctcccacgagcgccatcagtttcagagggacaaggaggccacacaggaacttatcgaagacctgagaaaacaactagaacatctgcaacttttgaaactggaagcagaacagaggcggggccggtcttctagcatggggcttcaagagtaccactctcgggcacgggaatccgagttggaacaggaagtacgcagattaaagcaggataatcgcaatttaaaagaacaaaacgaagagttgaatggacagatcataacactctccattcaaggcgcgaagagtctcttctcaacagcattctccgagtcgctggcagcggagatctcatccgtaagcagagatgagctcatggaagcgattcagaagcaggaggaaatcaattttcgattgcaggattatatcgaccgaataattgtggccattatggagaccaatccttccattctcgaagtaaagtag

SEQ ID NO: 202229 - DNA, 1383 bp, synthetic construct
  misc_feature 1..1383: note = Description of Artificial Sequence: Synthetic coding sequence
  source 1..1383: mol_type = other DNA
atgagcctgctgcgggccaacgaggtgaccgacagcgcctacatgggttcagagtcaacatatagcgaatgcgaaacattcactgatgaagacacctccaccctggtgcaccccgagctgcagcccgagggcgacgcagactccgctggaggaagcgctgtgccctcagagtgcctcgacgccatggaggagcctgaccacggtgcattactgcttctgccgggaaggccacacccacatggtcagagtgtaattactgtgatcggaggagaggaacactttgaggactacggcgaaggtagcgaagcagagctgtcacctgagaccctgtgtaacggacagctcgggtgcagcgatccagcctttctaacccccagccccaccaaacggctgagttccaagaaggtggcccggtacctgcaccagagtggggcgctgaccatggaggcgctggaggatccatccccagagttgatggaggggcctgaagaggacattgcagataaagtggtgttcttagaacggagggtgctggaactggaaaaagacaccgccgccacaggagagcaacattcccggctacgccaggaaaatctccaactggtccaccgcgctaatgccctggaagaacagttgaaagagcaagaattgcgagcctgtgagatggttctcgaggaaacccggcgccaaaaagaattgctgtgcaagatggaaagagaaaagtccattgagatagagaacctgcagacgcgactgcagcagctggacgaagagaacagtgaacttagatcatgtacaccttgtcttaaggctaatatcgaaaggcttgaggaagagaaacaaaagctgctggacgagatcgaatcccttacccttaggctgagcgaggaacaggaaaataagcggcgcatgggtgatcggctgagtcacgaacgtcatcagtttcagcgggacaaggaggccactcaagaattgatcgaagatctgagaaaacagttagaacatctgcagctgctcaagctggaggctgaacagcgccgcgggcgcagctccagcatgggcctgcaggagtatcattctcgcgcccgcgagtcggaactagaacaggaggtgcgtaggcttaaacaggataacagaaatctgaaggagcaaaatgaggaactgaacggacagataatcactctgtctattcagggcgccaaaagcttattctctacagctttctcggaatcccttgcagcggagatcagcagtgtgagccgtgacgaactcatggaggctattcagaagcaagaggaaattaacttcagactgcaggactacattgacaggattatcgtggccatcatggagacaaacccctctattctcgaggtgaagtag

SEQ ID NO: 202230 - DNA, 1383 bp, synthetic construct
  misc_feature 1..1383: note = Description of Artificial Sequence: Synthetic coding sequence
  source 1..1383: mol_type = other DNA
atgcccttcctgaaggccaacgaggtgaccgacagcgcctacatgggttctgagtcaacctactccgaatgcgagaccttcaccgacgaggacacctctactctagtacaccctgagttacagcccgaaggtgatgccgacagcgctgggggatcggctgtcccaagcgagtgccttgacgccatggaagaaccggaccatggggctctcctcctcctgccagggcgcccacatccacacggacaaagcgtcatcacagtgattggcggagaggagcactttgaggattacggagagggaagtgaagccgagctcagtcccgaaaccctctgcaacggacaattggggtgttctgacccggcctttcttacaccctcccctaccaaaaggctgagcagtaaaaaggtcgccaggtacctacaccagtctggcgccctgacaatggaggctctagaggacccctcgccagagcttatggaagggcctgaagaagacattgcagacaaggttgtgttcctggaacggagggtcctggaactggagaaagacaccgctgctaccggcgagcaacatagcagactccgacaagaaaatctgcagctggtgcatagagccaacgctttggaagaacagctcaaagaacaggagcttcgcgcatgtgagatggtgttggaggaaacccgccggcagaaggagctcctctgtaaaatggaacgcgaaaaatctattgagattgagaatctccagacacgcctgcaacagctagacgaggagaactccgagcttagatcctgcacgccttgcctgaaggcaaacattgagcggctggaggaggagaaacaaaagctgctggatgaaatcgagtccttgacactccggctgtcagaagaacaggagaataagcgacgcatgggagaccgtctgtcacacgaacgacatcagttccagcgggataaagaagctactcaggagttgattgaggatctgcgcaagcagctggaacacctgcaactcctgaaactggaggcagaacagcgccgtggcagaagttcctctatgggactacaggagtatcacagtcgcgccagagaatccgaactagagcaagaggtccgtaggctcaaacaggacaacaggaacctcaaagagcaaaacgaggaactgaacggacaaatcatcaccctttctatccaaggcgcaaagtctctgttctcaaccgccttctcggaatctcttgcagcagagatctcttctgttagtcgcgacgaattgatggaagcaatccagaaacaggaagagatcaacttccgcctgcaggactacattgaccgcattattgtagcaattatggagactaacccttccattctcgaggtgaaatag

SEQ ID NO: 202231 - DNA, 549 bp, synthetic construct
  misc_feature 1..549: note = Description of Artificial Sequence: Synthetic coding sequence
  source 1..549: mol_type = other DNA
atgggcagcgagagcacctacagcgagtgcgagaccttcaccgacgaagacaccagcacattggtgcaccccgagctgcaaccagagggagatgctgacagcgccggaggcagcgccgtcccctccgagtgcttggatgctatggaggaacccgaccacggagccttgctgctgctccccggtcggccacatccccacgggcagtcagttatcacagtcatcggcggcgaggaacacttcgaggattatggcgaaggaagcgaagccgaattatcccctgaaaccctgtgtaatgggcagcttggttgctccgatcctgccttccttactccttcccccacaaagaggttgagcagcaaaaaggtggcaagatatctgcaccagagtggtgctttaacgatggaggcattggaagatccctccccagagctgatggaaggcccggaggaagatatagcagacaaagtcgttttcctggagcgccgagtgctggagctcgaaaaagacacggcggcgaccggcgagcagcacagccgactgcgacaatag

SEQ ID NO: 202232 - DNA, 2406 bp, synthetic construct
  misc_feature 1..2406: note = Description of Artificial Sequence: Synthetic coding sequence
  source 1..2406: mol_type = other DNA
atggccagcgccccccccgccagcccccccggcagcgagccccccggcccagaccctgaacctggaggaccggacgggcctggggctgctcagttggcccctggtcccgctgagctgcgccttggagcgccagtcgggggccctgatccgcagtcccccggcctcgacgagcctgctccaggcgctgccgctgacgggggggcccgctggagtgcaggcccggccccaggactcgagggtggccccagagacccagggcctagtgcccctcctcccaggagcggccccagggggcaacttgctagtccggacgcaccaggccccggcccacgctctgaagcccctctccctgagttggaccctctgtttagctggacggaagagcccgaggaatgtggtcccgcatcttgccccgaatctgcccctttcagacttcagggttcttcttcctctcaccgggctaggggtgaggtcgatgtcttttccccttttccagcacccactgcaggagagttggctctggaacagggacctggtagtccgccccagccatccgatttgagccaaacgcatccactgccgagtgagcccgtcggatcccaagaagatggcccccgacttagggccgtgttcgacgccttggatggtgatggcgacggcttcgtcagaattgaggacttcatccagtttgcaaccgtgtacggcgccgaacaggtcaaagacttgaccaaatatctggacccttcaggccttggggtgatcagctttgaagatttttaccagggtattactgccatcaggaacggcgaccctgacggtcagtgttatggcggagtcgcctcagcccaggatgaggaacccctggcctgccctgacgaattcgacgacttcgtaacttatgaggccaatgaggtcaccgacagtgcctatatgggctccgagagtacctatagtgagtgtgagactttcaccgatgaggataccagcacgctggtgcacccagagctgcagcccgagggtgatgcagactcagccggcggctctgccgtgcctagcgagtgtttggatgctatggaagaacccgaccacggcgccctactcttactacctgggcgacctcatcctcatggacagtcagtcattactgtcatcggcggagaggagcactttgaggattatggggaagggtcagaggcggagttatcccccgagacactgtgcaatggtcaactgggctgctcagaccccgcttttttaacacctagcacggaccctttagccgccaaattacactccatactcacggatgaggctttcgagttttactgttcacagtgtcacaagcagattaatagattggaagatttgagtgcacgactctctgatctggaaatgaattcaccaactaaacggctgagtagcaagaaggtggcaagatacctgcatcaatcaggagcgcttacaatggaggccctggaggatcctagccccgagctgatggagggccccgaggaggatattgcggacaaggtggtgttcttagagcggagggtgctagagctggaaaaagataccgcagcgactggcgagcagcattctaggttgcgacaagagaatctgcagctggtccatcgagccaacgcactggaggagcagctgaaagagcaggaactgagggcgtgcgaaatggtgctggaggagacccgcaggcagaaggagctactctgtaaaatggagagagagaagtcaatcgaaattgaaaatctccagacgcggttacagcaactggacgaagagaattcggagttgaggtcgtgcaccccatgtctaaaggcgaatattgagcggctagaagaagagaagcaaaaactcctggacgaaatcgaatccctcaccctaagactgagcgaggaacaagaaaacaagagacgaatgggagaccggctctcccacgagcgccatcagttccagcgcgataaggaagctacacaggagctcatcgaagatctccggaagcagctggaacatctgcagctgttgaagctggaagcagagcagcggaggggtaggtcatcaagcatggggctgcaggagtaccactcgagggcacgcgaatccgagctcgaacaagaagtccgacgtctaaaacaggataaccgcaacctgaaggaacagaacgaagaacttaacgggcaaattattaccctgtccatccagggagccaagtccttgttctccaccgcctttagtgagtcacttgctgctgaaatttcctccgtctctcgggacgagctgatggaagctatacaaaaacaagaggagatcaactttcgactgcaggactacatagatagaatcattgttgccattatggagaccaacccaagcatactcgaggtgaagtag

SEQ ID NO: 202233 - DNA, 1914 bp, synthetic construct
  misc_feature 1..1914: note = Description of Artificial Sequence: Synthetic coding sequence
  source 1..1914: mol_type = other DNA
atggccggcggcgccggctggagcggcgcccccgccgccctgctgagatccgtcagacgcctgagagaggtgtttgaggtgtgcggccgggatcctgacggcttcctgagggtggaacgtgtggcagctctcgggcttaggttcggacagggagaggaagtggaaaaactggtgaagtatctagacccaaacgacttagggaggatcaattttaaggatttttgccggggagtctttgctatgaaaggctgcgaggagctgctcaaggacgtactgtccgtagagtcagcgggcaccctaccttgcgcacccgaaatccccgattgcgttgaacaagggtctgaagtgacagggccaacctttgccgatggtgaactaataccccgagagcctggattctttcctgaggatgaggaagaagctatgacactcgcgcctcctgaagggccacaggaattgtatacagacagccctatggagagcacacaaagcctcgaaggctctgtgggtagccctgccgagaaggatggggggctgggcgggctctttctcccagaggataaatcgctggtgcatactccctctatgacaacatccgatctctcaacccactcaacaaccagtctgatatccaacgaagagcagtttgaggattatggggagggtgacgacgtggattgcgcaccctcgagcccatgcccggacgatgagactcgcaccaatgtctactcagacctaggtagttcagtcagcagctctgccgggcagacaccaagaaaaatgcgccacgtctataatagcgaactcctcgacgtgtattgttctcagtgttgcaaaaagattaatctgctgaatgatctcgaggctagactaaagaacctgaaggctaattcacccaatcgcaaaatatcttctaccgcgttcgggcgccagttaatgcacagctctaacttttcaagttcaaacgggagcaccgaagatcttttcagagattccattgactcatgcgacaatgatatcaccgagaaggttagctttctggaaaaaaaggtcaccgagctagaaaacgatagcctcactaacggagacctaaagtccaagctgaagcaggaaaacactcaattagttcacagggtgcacgagttggaggaaatggtaaaggaccaggaaactaccgccgagcaagcacttgaggaagaggctaggcggcaccgtgaggcttacggcaaattggaacgggagaaagcgaccgaagtcgaactgcttaacgcgagggtgcaacagctagaagaggaaaatacagaactgcgaacaaccgttactaggctgaagagtcagaccgagaagctggatgaagagagacagcgtatgtcggataggcttgaagacacatccctgcgtttaaaagacgagatggatctgtacaagcgtatgatggataaactacgacagaaccgcttggaattccagaaagagcgggaagccactcaggagctcatcgaggaccttcggaaggagctcgaacatcttcaaatgtataagctcgactgcgagcggccaggccggggccggtctgcatcgtcagggttgggtgaattcaacgcgagagccagagaggtagaactggagcacgaagtgaaacggctgaagcaagagaactataaattgcgggatcaaaacgacgatttgaacggtcagatcctcagcctaagcctgtacgaggccaagaacctgttcgccgcccaaaccaaggcacagtcccttgctgcagagatcgatacggcgagcagagatgaattgatggaagccctgaaagagcaagaggagatcaacttccggttacgccagtatatggataaaattattctagcgatcctcgaccacaacccgtcaatactcgaaatcaaacactag

SEQ ID NO: 202234 - DNA, 1914 bp, synthetic construct
  misc_feature 1..1914: note = Description of Artificial Sequence: Synthetic coding sequence
  source 1..1914: mol_type = other DNA
atggccggcggcgccggctggagcggcgcccccgccgccctgctgcgaagtgtgcgtaggctccgggaagtcttcgaggtctgtggtcgcgaccctgacggtttcctaagagtagagcgggtggctgccttgggcctaagattcggacagggcgaagaggtggagaagctggttaagtacctggatcctaatgatctggggcgcattaatttcaaggatttttgtagaggggtgtttgctatgaaaggatgcgaggaactactaaaggatgtgctctccgtggaaagcgctggcactttaccttgcgcgccggaaatacccgactgcgttgagcagggttccgaggtaaccggacctacattcgctgatggggagctgatccctcgggagccaggattcttccctgaagacgaggaggaggccatgaccctcgccccaccagaggggccccaggagctgtacactgacagccctatggaatcaacacagagcctcgagggatccgtgggcagccctgccgagaaagatggtgggctaggaggactgttcctccctgaggataagagcttagtgcacacaccttcgatgactacttctgacctctccacacatagtacaaccagcctgatttccaacgaagagcagttcgaggactatggcgagggcgacgacgttgactgcgccccaagcagcccctgccccgatgatgagaccagaacaaatgtgtacagtgacctgggctcctctgtgtctagctcagctggacagaccccgaggaagatgaggcacgtatataactccgagctgctggacgtgtattgctcccagtgctgcaagaagatcaacctgcttaatgacttggaagctcggttgaaaaatctgaaggcaaacagcccaaacaggaaaatatccagcactgcatttggacgacagctcatgcactcttctaatttctccagctcaaatggctcaaccgaagacctctttcgggacagcatagacagctgcgacaatgatattacagagaaggtgtcatttctggagaaaaaggtgacagaactagagaatgattcgctaactaacggcgatctcaaatctaagctgaaacaggaaaacacccaactcgtccatcgcgtgcacgagctcgaagaaatggtgaaggaccaggagacaaccgctgaacaggcattggaggaggaagcccgccgtcacagggaagcctatggtaaactggagagggaaaaggccacagaggtagagttacttaatgccagggtccagcagctggaggaagagaatacagagctgagaacaacagttacacggctgaagagccagacagagaagctcgatgaagaacgccaacgaatgtccgatcggctggaggacacatcattgcgcctgaaagatgaaatggatttgtataagcgcatgatggacaagctgcgccagaaccgccttgagtttcagaaagagagggaggccacccaggagctgattgaggacctcaggaaggagttagagcatctgcagatgtacaagttagattgtgaaagacccggaaggggcagaagcgcatcaagtggcctgggcgagttcaatgcccgtgcccgcgaagttgagctcgaacacgaagtaaaacgcctgaagcaggaaaactataagctgcgggatcagaatgatgacctcaatgggcagattctctctctctcattgtacgaagccaagaacctgttcgccgctcagactaaggcccagagcctggccgccgaaatcgacactgcgtcacgagatgaactcatggaggctctcaaggaacaagaagaaatcaattttagactgcgtcagtacatggataaaatcattttggccatcctcgaccacaatccctccatcttagagatcaagcattag

SEQ ID NO: 202235 - DNA, 651 bp, synthetic construct
  misc_feature 1..651: note = Description of Artificial Sequence: Synthetic coding sequence
  source 1..651: mol_type = other DNA
atgggcacccgggacgacgagtacgactacctgttcaaggtggtgctcatcggcgacagcggcgtaggaaaatccaatctgctctcccgcttcacccggaacgagtttaacctggagtctaaatcaaccattggcgtcgaattcgctacccggagtatccaggtcgatggcaagaccatcaaggcacagatttgggatacggctgggcaggaacggtacagggcaatcacgagtgcatattaccggggcgccgtgggggcgctcctcgtatacgatatcgccaagcacctgacttatgaaaatgtcgagcgctggctcaaagaattgcgtgatcacgccgattcgaacattgtcatcatgctggttggaaacaaatcagacctcagacaccttcgtgctgtcccaaccgacgaagcccgagcatttgcagagaagaatggcctgtcattcattgaaacatccgcattggacagtacaaacgtggaggcggcattccagaccatcctcacggagatctaccgcattgtgagccaaaaacagatgagtgaccgtagggagaatgatatgagtcccagtaataatgtggtgcccattcatgtccctccaacgaccgaaaacaagccaaaggtacaatgctgtcagaacatctag

SEQ ID NO: 202236 - DNA, 468 bp, synthetic construct
  misc_feature 1..468: note = Description of Artificial Sequence: Synthetic coding sequence
  source 1..468: mol_type = other DNA
atgggcacccgggacgacgagtacgactacctgttcaaggtggtgctcattggggacagcggtgtgggcaagtccaatctgctctctcggttcactcgcaacgaattcaaccttgagagcaagtctaccattggagtagagttcgccaccagatccatccaggtagacgggaaaacaataaaggctcagatttgggatacagcgggtcaggagcggtatcgcgccatcacatccgcctattataggggcgcagtgggtgccttgcttgtgtacgacatagccaagcacctcacgtacgagaatgttgagaggtggctgaaggagctgagggatcatgctgactccaatatcgtgataatgctggtcggcaacaaaagtgacctcaggcacctgagggccgtaccaacagacgaggcccgagcgtttgcaggttacaacaaggctaacgtgcggcagacacggaagtag

SEQ ID NO: 202237 - DNA, 612 bp, synthetic construct
  misc_feature 1..612: note = Description of Artificial Sequence: Synthetic coding sequence
  source 1..612: mol_type = other DNA
atggccaaggcctacgaccacctgttcaagctgctgctgatcggcgattcaggcgttggcaagacatgtcttatcatccgctttgctgaggataacttcaacaacacctacatatcgaccatcggcatcgacttcaaaatacggactgtggacattgaggggaagaagatcaaactccaggtgtgggacacggctgggcaagaacgattcaagaccatcaccaccgcctattatcggggcgccatgggaatcattctggtgtacgacatcacagatgaaaaatcctttgagaatatacaaaactggatgaaatccattaaggaaaatgccagtgctggggtggagaggctcttgttaggaaacaaatgtgacatggaggcaaaaaggaaagtgcagaaagagcaggccgacaaactggcacgtgagcatgggatcaggtttttcgaaacctccgctaagtcctcaatgaacgtggatgaagccttcagcagtctcgcgcgcgacattcttctgaagagtggcggtcgccgcagcggcaatggcaacaaacccccttctactgaccttaaaacctgcgataagaagaacaccaataaatgctcactgggatag

SEQ ID NO: 202238 - DNA, 648 bp, synthetic construct
  misc_feature 1..648: note = Description of Artificial Sequence: Synthetic coding sequence
  source 1..648: mol_type = other DNA
atggccaccgccccctacaactacagctacatcttcaagtacatcataatcggcgacatgggggtgggcaagagctgcctcctacaccagtttacagaaaaaaaattcatggccgattgcccccataccatcggagtcgagttcggcactcggatcatcgaagtcagtgggcaaaagatcaagctccagatatgggacaccgccgggcaagaaaggtttagagctgtgacgagatcttactacagaggcgccgccggtgctctgatggtttatgatatcacacgtcgcagtacatataatcatctgtcatcttggctcacagacgccaggaatctgaccaatcccaacacagttatcatactaattggtaataaggccgacctagaggctcagagggatgtgacctatgaagaagctaaacagtttgctgaagagaatggcctcctgtttttggaggcctccgccaaaacaggagaaaatgtagaggatgctttcctggaggctgcaaagaagatctaccagaatatccaagatggctctctcgatctgaacgccgccgagtctggcgtgcagcacaaacccagcgctccccagggcggccgcttaactagcgaaccccagccacagcgggaaggctgcggatgctag

SEQ ID NO: 202239 - DNA, 546 bp, synthetic construct
  misc_feature 1..546: note = Description of Artificial Sequence: Synthetic coding sequence
  source 1..546: mol_type = other DNA
atggccaccgccccctacaactacagctacatcttcaagtacatcatcataggtgacatgggcgtgggaaagtcatgcttgttgcatcagtttacagaaaagaagttcatggcagattgccctcacaccataggggtggaatttggaacaaggatcatagaagtcagcggacagaagattaagcttcagatatgggacactgcagggcaggaacgcttccgcgccgtaacccgctcgtattaccgtggcgctgctggcgccctgatggtttatgatattacacggagaagtacctataaccatctctcgtcatggctgacagatgcccgaaacttgactaaccccaacaccgtgatcatactgataggaaataaggccgatttggaggcacaacgagacgtcacctatgaggaagccaaacaattcgccgaggagaacggtctgctgttcctggaggcaagtgcaaagaccggcgagaatgtggaggacgcatttttggaggcagcgaagaagatttatcaaaacattcaagacggatcactgtag

SEQ ID NO: 202240 - DNA, 711 bp, synthetic construct
  misc_feature 1..711: note = Description of Artificial Sequence: Synthetic coding sequence
  source 1..711: mol_type = other DNA
atgggccagaaggccagccagcagctggccctgaaggacagcaaggaagtgccagtggtgtgtgaggtggtgagcgaggctatcgtgcacgccgcccagaagctgaaagaatacctgggtttcgaatatcctccttccaagttgtgtccagctgccaataccctaaatgaaattttcctgattcacttcatcaccttttgtcaagaaaagggcgtggacgagtggcttaccaccacgaagatgactaagcaccaggcttttctcttcggcgccgactggatatggaccttctggggctctaataaacagatcaagttacagctagccgtccagacacttcaaatgagcagcccccctcctgtggagagtaaaccatgcgatctctcgaatcccgaatctagggtcgaagaaagcagctggaaaaaaagtcggtttgacaagcttgaagagttctgcaacctcataggcgaggactgcttgggcctgtttatcattttcggaatgcccggtaaaccaaaagacatccggggcgttgtcctcgattctgttaagtcccagatggttaggagccacctcccgggcggaaaggcggtcgcacagttcgtcctcgagaccgaagactgtgttttcatcaaagagttactgagaaattgcttaagcaagaaggatgggctgcgggaagtcggtaaggtatatatcagtatcctttag

SEQ ID NO: 202241 - DNA, 639 bp, synthetic construct
  misc_feature 1..639: note = Description of Artificial Sequence: Synthetic coding sequence
  source 1..639: mol_type = other DNA
atggcccaggcccaccggaccccccagccccgggccgcccccagccagccgcgagtttttaaacttgtccttctgggaagcggctcagtgggaaaaagcagcctagccctgaggtatgttaagaatgacttcaaatccatactgcccactgtagggtgcgcgttttttactaaagtggtggacgtgggagccacgtctttgaagctggagatttgggacacagcgggacaggagaaataccatagtgtctgtcacctgtattttcgtggcgccaacgccgctttattagtctatgacattactcggaaggattcctttctcaaggctcaacaatggctgaaagatcttgaggaagagcttcatcccggcgaggtccttgtgatgctcgtcggcaacaagacagatctttcccaggaaagggaagtaactttccaggaagggaaagagtttgccgattctcagaaacttcttttcatggaaacatccgccaaactgaatcaccaggtttctgaagtatttaacactgtagctcaggagcttttgcaacgttcggatgaggaagggcaagctctcagaggtgatgcagcagtagcactgaacaaaggacccgcacggcaagctaaatgctgcgctcattag

SEQ ID NO: 202242 - DNA, 258 bp, synthetic construct
  misc_feature 1..258: note = Description of Artificial Sequence: Synthetic coding sequence
  source 1..258: mol_type = other DNA
atgctggtgggcaacaagaccgacctgagccaggagcgggaggtgacgtttcaagagggtaaggagtttgccgattcacagaagctgctgttcatggaaacgtccgccaagctgaatcaccaggtctcagaggttttcaataccgttgcacaggaactgctgcagcgcagcgatgaggaaggccaagctctgcggggagatgcagccgtagccctgaataagggccctgctcgccaggccaaatgctgcgcccactag

SEQ ID NO: 202243 - DNA, 621 bp, synthetic construct
  misc_feature 1..621: note = Description of Artificial Sequence: Synthetic coding sequence
  source 1..621: mol_type = other DNA
atggacgaggacgtgctgaccaccctgaagatcctgatcatcggcgagagcggagtgggaaaaagttccctcctcctccggttcaccgacgatacgttcgaccccgaacttgctgctactatcggcgtggatttcaaagtgaagacaatttccgttgacgggaacaaggcaaaattggccatctgggataccgccggccaggaaagattccgcacactgactccgtcatattaccgaggagcacagggggtgatcctcgtttacgatgttaccagacgcgataccttcgttaaattagacaattggctgaatgagctcgagacatattgtacaaggaacgatatcgtgaatatgctggtcggtaataaaatcgataaggaaaaccgcgaggtcgatcggaacgaggggctgaaattcgctagaaaacatagcatgctgttcattgaagcctcagccaaaacctgtgatggtgtgcagtgcgccttcgaagaacttgtagagaagatcatccaaaccccaggattgtgggaatcggagaatcaaaataaaggcgtaaagctgtcacatcgggaggaaggacagggcggcggagcttgtggtggctattgcagcgtcttgtag

SEQ ID NO: 202244 - DNA, 486 bp, synthetic construct
  misc_feature 1..486: note = Description of Artificial Sequence: Synthetic coding sequence
  source 1..486: mol_type = other DNA
atggacgaggacgtgctgaccaccctgaagatcctgatcatcggcgaaagcggggtggggaaatcttctttactccttcgatttacggacgacactttcgacccagaactggccgcaactatagtgtacgacgttacccggagagacaccttcgtgaagctcgacaattggttaaatgagcttgagacgtactgtacccggaacgacatcgtgaacatgctggtcggcaataaaattgataaagagaacagggaggtggatcgaaatgaaggccttaaattcgcaagaaaacattccatgctgtttatcgaggctagcgccaagacatgcgacggcgtccagtgtgcattcgaggagttagtggaaaaaattattcaaacaccaggactctgggagagtgagaaccagaataaaggagtgaagctttcacacagggaagaaggccaaggagggggcgcctgcggggggtactgttctgtgctctag

SEQ ID NO: 202245 - DNA, 876 bp, synthetic construct
  misc_feature 1..876: note = Description of Artificial Sequence: Synthetic coding sequence
  source 1..876: mol_type = other DNA
tgacggctgcccggcagccggcccctgcccggccccagcagcctgggccgaagcccatcatgcagcgctgaaaaaacccccttcaggggtccccccctgggaaggcagtcagccgtaaaggagctggacctcgtcaccgccggaaagttccggttttcagtccgtagcgaatgctttagtcgcggaccgccccttaaaatcaaatgtaattgctatttcagtttttgccacatactctggcgccaaaagatatcggtagtgctttcattttttacgttttctctgggtaagattatcctaaccgtggaactgagtatttcgttattactgcggtttactgacgacacctttgatcccgagctcgctgctaccataggtgtggatttcaaggtaaagacaatctctgtcgacggaaataaagctaaattggccatctgggttacccttcaccagcagactgccaactttttcctcaaaagccaaatcggcaattcccctatcttgaagtgggcgatgtggcagtacgacaccgcaggacaggaaagatttcgaactctgactccaagttactatagaggcgcccagggcgttatcctggtttacgacgtaacccgccgagacacattcgtcaagctggacaactggctcaatgagttggagacttattgcaccagaaatgacatcgtgaacatgctggtgggcaacaagatcgataaagagaaccgcgaggtggaccgaaacgaaggactcaagttcgctcggaagcattcaatgttatttatagaggcttcagccaaaacatgcgacggtgtgcagtgcgccttcgaggaacttgttgaaaagatcattcaaactccaggcctttgggaatcttag

SEQ ID NO: 202246 - DNA, 429 bp, synthetic construct
  misc_feature 1..429: note = Description of Artificial Sequence: Synthetic coding sequence
  source 1..429: mol_type = other DNA
atggacgaggacgtgctgaccaccctgaagatcctgatcatcggcgagagtggagtaggcaagagctcgctgctcctgagatttacagatgatacctttgacccagagcttgccgccaccatcggggtagactttaaggtcaagactatatctgtggacgggaataaagccaaactagctatctgggagaatagggaagttgaccgaaatgaaggattaaaatttgcccggaaacattccatgctgtttattgaggcctccgccaagacttgtgatggagtgcaatgtgcattcgaagagcttgttgagaaaatcatccagactccaggtctctgggaatccgagaatcagaataaaggcgtgaagctctcccacagagaggagggccagggcgggggcgcatgtggtggatactgtagcgtgctttag

SEQ ID NO: 202247 - DNA, 555 bp, synthetic construct
  misc_feature 1..555: note = Description of Artificial Sequence: Synthetic coding sequence
  source 1..555: mol_type = other DNA
atggacgaggacgtgctgaccaccctgaagatcctgatcatcggcgagtccggagtgggcaagtccagtctcttgctccgcttcaccgacgacacttttgatcctgagctggcagctactgacacggcggggcaggaacgctttcggactctgacacctagttactatagaggggcacagggggtcattctcgtgtatgatgtcacaaggagggacacgtttgtgaagctggataattggctgaacgaactggagacgtattgcacaaggaacgacattgtcaacatgctagtcggaaacaaaatagataaagagaacagggaggttgatcggaacgagggccttaagtttgcaaggaaacactctatgctgttcatcgaagcatcagccaaaacctgcgacggagtccagtgcgccttcgaagagctggtggagaaaatcatccaaacccccgggctgtgggagagcgaaaaccagaacaaaggagtaaagctatcccaccgagaggagggccagggagggggtgcctgcggaggatattgcagcgtgctgtag

SEQ ID NO: 202248 - DNA, 390 bp, synthetic construct
  misc_feature 1..390: note = Description of Artificial Sequence: Synthetic coding sequence
  source 1..390: mol_type = other DNA
atgagcagcatgaaccccgagtacgactacctgttcaagctgctgctaataggcgacagtggcgttggcaaatcctgtctccttctacgcttcgctgacgacacatataccgagtcttatatttccactataggtgtggattttaagatcaggacaattgaactggacggtaaaacaatcaaactgcaaatcgaatttgctgactctttggggatccctttcttagagacctctgctaagaatgctaccaacgtggagcagtccttcatgaccatggcggccgaaattaaaaaaagaatggggcccggggctacagccggcggggccgagaagtcgaatgtcaagattcagagtacccccgttaaacagtctggaggtgggtgttgttag

SEQ ID NO: 202249 - DNA, 390 bp, synthetic construct
  misc_feature 1..390: note = Description of Artificial Sequence: Synthetic coding sequence
  source 1..390: mol_type = other DNA
atgagctgcctgcaccccaccagcgactacctgttcaagctgctgttgatcggtgactcgggggtggggaagtcgtgtttacttttgagatttgccgatgacacatacactgagagttacatttctactattggagttgattttaaaatacgtacaatagagctcgacggcaagaccataaagctccagatcgagtttgccgactccctggggataccctttctagaaaccagcgccaagaacgctaccaatgtggaacagagctttatgaccatggccgcggaaatcaagaagcgtatggggcccggggctactgccggaggcgctgagaagtcaaatgtgaagattcagtcaacacccgtaaaacagtccgggggagggtgctgttag

SEQ ID NO: 202250 - DNA, 522 bp, synthetic construct
  misc_feature 1..522: note = Description of Artificial Sequence: Synthetic coding sequence
  source 1..522: mol_type = other DNA
atgagcagcatgaaccccgagtacgactacctgttcaagctgctgttaatcggagacagtggggtgggtaaatcctgcttgttgcttaggttcgcagacgatacgtacacagaaagctacatttcaaccattggggtagattttaagatcaggactatagagctcgatggaaagaccattaagttgcaaatcgagtcctttaacaacgtgaaacagtggctgcaggagattgacagatacgctagtgaaaacgtgaataagcttctcgtggggaataagtgcgacctaaccacaaaaaaggtggtggactatactactgcaaaggaattcgcagactctttgggaatccccttcctcgaaacatcagcaaagaatgccacaaacgttgaacaaagctttatgaccatggctgctgaaataaaaaagcgtatgggccccggagccacggcaggcggcgctgagaaaagcaacgtcaaaattcagtctacgcccgtgaaacagtccggaggaggctgctgctag

SEQ ID NO: 202251 - DNA, 522 bp, synthetic construct
  misc_feature 1..522: note = Description of Artificial Sequence: Synthetic coding sequence
  source 1..522: mol_type = other DNA
atgagcagcatgaaccccgagtacgactacctgttcaagctgctgctgattggagactctggcgttgggaagagttgcctcctcctgaggttcgcctgggacaccgcaggccaggagcggtttcgaactattacttctagttactaccggggggcacatggcatcatcgtagtgtatgacgtgaccgaccaggagagctttaacaatgtgaaacaatggctacaggaaatcgacagatacgcttcagagaatgtcaacaagctactcgtgggcaataagtgcgatctcacgacaaaaaaggtggttgactacaccacggctaaagagtttgcggattccctgggtatcccgttcttggaaaccagtgcaaagaacgccacaaacgtggagcagtcttttatgactatggccgcagagattaaaaagaggatggggcccggagcgaccgcgggaggtgcggagaaatccaatgtgaagatccagtcaaccccggtgaaacaaagcgggggcggttgttgctag

SEQ ID NO: 202252 - DNA, 618 bp, synthetic construct
  misc_feature 1..618: note = Description of Artificial Sequence: Synthetic coding sequence
  source 1..618: mol_type = other DNA
atgagcagcatgaaccccgagtacgactacctgttcaagctgctgctcattggagactctggcgtgggcaagagttgcctgttgctccgattcgcagatgatacttatactgagtcttacatcagtaccatcggagttgactttaagatccgcactattgagctggatggtaaaactattaagttacagatctgggacactgctggccaggaacggtttcgcaccatcacgtctagctattaccgcggagcccatggaatcatagtcgtctacgatgttaccgaccaggaaagcttcaacaacgtcaaacagtggctgcaagagatcgatagatatgcgtcagagaatgtcaataagttactggttggaaataaatgtgatttgaccactaagaaggtggtggattacacaaccgccaaggagttcgcagattccctggggatcccattccttgagacgagcgccaagaatgccacgaacgtggagcaatccttcatgaccatggcagcagaaatcaaaaaaaggatgggccctggcgccaccgcaggcggggcagagaagtcgaatgtaaagatacagtcaacccccgtcaagcagagtgggggtggatgttgttag

SEQ ID NO: 202253 - DNA, 426 bp, synthetic construct
  misc_feature 1..426: note = Description of Artificial Sequence: Synthetic coding sequence
  source 1..426: mol_type = other DNA
atgagcagcatgaaccccgagtacgactacctgttcaagctgctgcttatcggcgattccggcgttgggaaatcatgtctcctcctgcgctttgccgaatcttttaataacgtaaaacaatggttgcaggagattgaccgctacgcgtcggaaaacgttaataagttgttggtaggtaacaaatgcgacctcacaacaaaaaaagtggttgactacacaacagctaaagaatttgcagattcactgggcattccctttctggagacatccgcgaaaaatgccaccaacgttgagcagagctttatgaccatggctgccgagatcaagaagcggatgggacctggagcgaccgccgggggggccgagaagtcaaatgtgaaaattcagagtacccctgtcaagcagtccggaggcggctgctgttag

SEQ ID NO: 202254 - DNA, 606 bp, synthetic construct
  misc_feature 1..606: note = Description of Artificial Sequence: Synthetic coding sequence
  source 1..606: mol_type = other DNA
atgaaccccgagtacgactacctgttcaagctgctgctgatcggcgatagcggcgttggaaagtcatgccttctcttacgcttcgccgatgacacgtatactgagtcatatattagtaccataggcgtggactttaagatcagaaccatcgagctggatggcaaaactatcaaacttcagatttgggacacagccgggcaggagcgattcagaactataacaagctcctattaccgcggggcgcacggaatcatcgtggtatacgacgtgactgatcaagagtcctatgcaaacgtgaagcagtggctccaagaaatcgataggtacgctagcgagaatgtcaataagcttctagtggggaataagtcagatcttactactaaaaaggtcgttgataatacaacagcaaaagaatttgctgatagcctcgggatcccgttcttggaaaccagtgccaagaacgccaccaacgtcgaacaagctttcatgacaatggccgccgagatcaagaaacgcatgggccctggggctgccagcggcggcgaaagacccaacctcaaaatcgattccacccctgttaagccagctgggggcggttgctgttag

SEQ ID NO: 202255 - DNA, 489 bp, synthetic construct
  misc_feature 1..489: note = Description of Artificial Sequence: Synthetic coding sequence
  source 1..489: mol_type = other DNA
atgaaccccgagtacgactacctgttcaagctgctgctgatcggcgacagtggagtgggtaagagctgcctgctcctccgcttcgcagacgatacttacacagagagctatattagcaccatcggtgtcgatttcaagatccgcacaatcgagctggacgggaagacaatcaagctccagatatgggacactgcaggccaagagaggttccgaactatcaccagctcctactacaggggcgcccacggcattatagtggtgtacgatgtcacagatcaggagtcttatgcaaacgtgaagcaggggtgccggcggcttactgcgatgcctgcacgcacatccatcagctcttggtgggccacaagggccaccagccccccccgcagatggtggaccactccacagccgaggagtctccaaacactttgggcatctccatcctggaggcgagcccctcgaatgcctcctatgtcgagtcggcgaagctag

SEQ ID NO: 202256 - DNA, 360 bp, synthetic construct
  misc_feature 1..360: note = Description of Artificial Sequence: Synthetic coding sequence
  source 1..360: mol_type = other DNA
atgaaccccgagtacgactacctgttcaagctgctgctgatcggcgactcaggtgttggcaagtcgtgcctgctgctaagatttgcggatgatacttacaccgagagctacatttcaacaattggagtggatttcaagatcagaactatcgaactggacgggaagaccattaagctgcagatctgggatactgcgggccaggagaggttccggactataacctcatcttactaccggggggcccacggaattattgtggtgtacgacgtgacagaccaggaaagttacgctaatgtaaagcagtggctccaagagatcgacaggtacgctagtgaaaatgttaacaaattgttagtgtag

SEQ ID NO: 202257 - DNA, 678 bp, synthetic construct
  misc_feature 1..678: note = Description of Artificial Sequence: Synthetic coding sequence
  source 1..678: mol_type = other DNA
atggccgccgccggcggcggcggcggcggcgccgccgccgccggccgtgcctattcctttaaggtggtcctgctgggcgagggatgcgttggaaaaacgagtctcgtacttcggtattgtgaaaacaagttcaatgacaagcatatcaccaccctacaagctagttttctgactaaaaaactgaatatcggagggaagcgtgtgaatctggctatttgggataccgcgggccaagagaggtttcacgctctggggcccatctactatcgggactctaatggggcaatcctggtttatgacataaccgacgaggattctttccagaaagtgaagaattgggtcaaggaactccggaaaatgctcggaaatgagatctgtctctgcattgtcggcaataaaatagacttagagaaagaacgacatgtctctatccaggaagctgagagctatgcagagtccgtcggggcaaaacactatcatacaagcgccaagcagaacaaggggatcgaggagctgtttctggacctttgcaagcgaatgattgaaacggcccaggtagatgagagggcaaaaggtaatggatcaagccagcccggtacagctaggcggggtgtgcaaatcatcgacgacgagccccaagctcagaccagtgggggaggttgctgtagtagcggctag

SEQ ID NO: 202258 - DNA, 585 bp, synthetic construct
  misc_feature 1..585: note = Description of Artificial Sequence: Synthetic coding sequence
  source 1..585: mol_type = other DNA
atggccctgcgggagctgaaggtgtgcctgctgggcgacaccggcgtcgggaagtccagcatcgtatggcgcttcgtcgaggattcattcgaccctaatatcaatcctacaatcggggctagctttatgacaaagaccgtgcagtatcagaatgagctgcataagtttcttatctgggatactgcagggcaagaacgcttcagggccttggcaccaatgtattaccgcggttccgccgccgcaattattgtgtacgatatcaccaaagaagaaaccttttctaccctgaaaaattgggttaaagagctgaggcagcacggcccgccaaatatagtagtggctatagctgggaacaaatgtgatctcatcgacgtgagagaggtgatggagcgggatgcaaaggactatgcggactccattcacgcgatatttgtggagacatctgcgaagaacgccatcaacatcaacgaactcttcatcgagatatccaggcggattcctagcacggacgcaaatctcccctccggcgggaagggcttcaagctcaggagacagccttctgagcccaaaagatcttgttgctag

SEQ ID NO: 202259 - DNA, 714 bp, synthetic construct
  misc_feature 1..714: note = Description of Artificial Sequence: Synthetic coding sequence
  source 1..714: mol_type = other DNA
atgctggaggaggacatggaggtggccatcaagatggtggtggtgggcaacggagccgtcggcaaaagcagtatgatccagagatattgtaaaggcatcttcacaaaagactataaaaaaacaattggagttgatttcctggaaaggcaaatacaggtgaacgatgaagacgttagactgatgctttgggataccgccggacaggaagaatttgatgcaataacgaaggcgtactaccgcggagctcaagcatgcgtcctggtgttctccaccaccgaccgggagagttttgaagcagtaagcagctggagggaaaaagtggttgctgaagtcggtgacattccaacagtactcgtccagaacaagatagatctgttagacgattcctgtattaaaaacgaagaagccgaggctcttgctaaaaggctgaaactgcgtttctataggacctcagtgaaagaggacctgaacgtcaacgaggtgttcaagtatctggcggaaaaatatctgcaaaagcttaagcagcaaatagcagaagaccctgagctgacccacagcagctccaataaaataggtgtcttcaatacaagtggtgggtcacactccgggcagaattccgggacgctaaacggaggagatgtgataaatctacgccctaataagcagaggacaaaaaagaaccggaacccatttagttcatgttccatcccttag

SEQ ID NO: 202260 - DNA, 714 bp, synthetic construct
  misc_feature 1..714: note = Description of Artificial Sequence: Synthetic coding sequence
  source 1..714: mol_type = other DNA
atgctggaggaggacatggaggtggccatcaagatggtggtggtgggcaatggcgccgtggggaaatcgagtatgatccaacgctattgtaaaggcatctttacaaaggactataaaaaaacaattggggtggatttcctggaaagacagatccaggtgaacgatgaggacgtgaggctaatgctctgggatacagccgggcaagaagagttcgatgcgatcacaaaagcatactatcggggggcccaagcatgtgtcttagtgttctccacaacagacagagagtcatttgaggctgtgtctagctggcgggagaaggttgtagctgaggttggagacatccctacagttttagtccagaataagattgatctgctcgatgacagctgcatcaaaaatgaagaagcagaggctttagcgaaacggctaaagcttcgcttctacagaacatcagtaaaagaggatctcaatgttaatgaagtgtttaaatatctagctgagaagtacctccagaaactaaagcagcagatcgcagaagatcctgagttaactcactcctcaagcaataagatcggggtattcaataccagcggcggctctcatagtggccaaaacagtgggaccctgaatggtggtgacgttattaacttgcggcctaacaagcagcgaactaaaaagaataggaacccattcagctcctgcagcatcccatag

SEQ ID NO: 202261 - DNA, 612 bp, synthetic construct
  misc_feature 1..612: note = Description of Artificial Sequence: Synthetic coding sequence
  source 1..612: mol_type = other DNA
atgagcggccagcgggtggacgtgaaggtggtgatgctgggcaaggagtatgtggggaaaacctccctggtggaacgatatgttcacgaccggttcctggtgggcccctaccagaacacaatcggggctgccttcgtggccaaggtaatgtccgtgggggacaggacagttaccctcggcatctgggatactgctggctctgagaggtacgaggccatgagtcggatttattatcgcggagcgaaagccgcaatagtctgttatgacctgacagattcctctagttttgaaagggcgaagttttgggttaaagagttaaggagcttggaggaggggtgccagatttacctctgcggcaccaagtccgacctcctggaggaagaccgaagacgccgccgcgtcgatttccacgacgtgcaggactacgccgacaacattaaagcacagctgttcgaaacttcgagcaaaacagggcagtccgtcgatgaactgtttcagaaggtcgccgaagactacgtatctgtcgccgcttttcaagtgatgaccgaagataagggcgtggacctcgggcagaagccaaatccgtacttttatagctgctgccaccactag

SEQ ID NO: 202262 - DNA, 612 bp, synthetic construct
  misc_feature 1..612: note = Description of Artificial Sequence: Synthetic coding sequence
  source 1..612: mol_type = other DNA
atgagcggccagcgggtggacgtgaaggtggtgatgctgggcaaggagtacgtgggcaagacgtccctggtcgaaagatatgtgcatgatcgattcctagtgggcccctatcagaatacgattggagccgctttcgtcgctaaggtgatgtcagtcggcgaccgcacagtgaccctgggcatctgggatacagctggcagtgagaggtacgaagctatgtcacgaatttactatcgcggtgcgaaggccgcaattgtttgttacgatctgaccgattcctccagcttcgagcgcgccaaattttgggtgaaggaattgaggtccctggaggagggttgtcagatttatctgtgcgggacaaagtccgatctattggaggaggaccggcggcgcagacgcgtcgactttcacgacgtccaggattacgctgacaacatcaaagcacagctttttgaaacctccagtaaaaccgggcaatctgttgatgaattattccaaaaggttgccgaggattacgtgagcgtggcggccttccaggtcatgaccgaggataaaggcgtcgatctgggacagaagccaaacccatatttttattcttgttgccaccattag

SEQ ID NO: 202263 - DNA, 201 bp, synthetic construct
  misc_feature 1..201: note = Description of Artificial Sequence: Synthetic coding sequence
  source 1..201: mol_type = other DNA
atgagcggccagcgggtggacgtgaaggtggtgatgctgggcaaggagtacgtcgggaagactagtctggtggagcgctatgtccacgaccgtttccttgtaggtccatatcagaatactatcggcgctgcatttgtcgcgaaggtgatgtccgtgggcgaccgaacagtgactctgggcatttgggacacagccggctag

SEQ ID NO: 202264 - DNA, 642 bp, synthetic construct
  misc_feature 1..642: note = Description of Artificial Sequence: Synthetic coding sequence
  source 1..642: mol_type = other DNA
atgggcaacggcaccgaggaggactacaacttcgtgttcaaggtggtattaatcggagagagtggcgtgggtaagacgaatctgctcagcagatttacacgcaacgagtttagtcacgattcacggacaacaatcggcgtggaattttccacgcgtaccgtaatgctcggaaccgcagctgtgaaggcccaaatctgggatacagcgggcctggaacgctaccgagcaataacatccgcatactacaggggagccgtcggtgctctcttagtgtttgatctcacgaaacaccagacttacgctgtcgtggagcgttggctgaaagaactttatgaccacgctgaagccactattgtggtcatgctggtcggtaacaagagcgatctctcgcaagctcgggaagtgccaaccgaggaggcccgcatgttcgcagaaaataatggcctcttgtttctggagacatctgctttagacagcactaacgtagagctcgccttcgagactgtcttgaaggagatttttgccaaggtgtcgaagcagaggcagaacagtatcaggaccaatgcaatcaccctgggctcagcccaggcaggtcaggagcctggaccgggagagaaacgcgcctgttgtatttcactctag

SEQ ID NO: 202265 - DNA, 1110 bp, synthetic construct
  misc_feature 1..1110: note = Description of Artificial Sequence: Synthetic coding sequence
  source 1..1110: mol_type = other DNA
atggagggcagcctggagcgggaggcccccgccggcgccctggccgccgtgctcaaacacagctccacactgcctccagaaagtacccaagttcggggctatgattttaatagaggggtcaactacagggctctactcgaagcatttggcacaacaggatttcaagccacaaacttcggaagagctgttcagcaggtgaacgcgatgatagagaaaaagctggagccgctgtctcaggacgaagatcaacacgctgacctgacgcagtcaagaagacccttaacctcttgtaccatattccttggatatacgagcaaccttatttccagcggcattagggaaaccatcaggtacctagttcagcacaatatggtggatgtgctggtaaccaccgcagggggagtggaagaggatcttatcaaatgcttggcacccacttatctgggcgagttctcacttagaggcaaagagctgcgggagaatgggatcaaccgaatcggcaatctgctggttcctaacgaaaattattgcaaatttgaagattggcttatgcctatccttgatcagatggttatggagcagaacacagagggggtcaaatggacacctagtaaaatgatcgcacgcctgggaaaggagattaacaacccggaaagcgtatactattgggcacaaaagaaccatatccccgtgttcagtccagcactcacagatggatctctgggggatatgatttttttccatagctacaaaaaccccggcctggtgctggatattgtggaagacttgaggctgataaacactcaggctatcttcgcgaagtgtaccggaatgataatcttaggtggaggagtggtaaaacaccacatcgccaacgctaatctgatgcgaaacggggccgattatgcggtttacattaataccgcacaggaattcgatggaagcgactccggcgcccgacccgacgaggccgtgagctggggcaagattagggtggatgcccagcctgtcaaggtatacgcggatgcctccctggtatttccactgctggtagccgaaaccttcgcccagaagatggacgccttcatgcacgaaaaaaacgaagattag

SEQ ID NO: 202266 - DNA, 573 bp, synthetic construct
  misc_feature 1..573: note = Description of Artificial Sequence: Synthetic coding sequence
  source 1..573: mol_type = other DNA
atgctggtgggcgacagcggcgtgggcaagacctgcctgctggtgagatttaaggatggcgccttccttgccggaacatttatttcgacagttggcattgactttaggaataaagtgcttgatgttgatggcgtcaaagttaagctccagatgtgggatacggcagggcaggaacgctttaggtcagtgacccacgcgtattacagggacgcacacgccctgctgttactgtacgatgtgacgaataaagccagcttcgataacatccaggcctggctcacagaaatccatgagtacgctcagcatgacgtggcccttatgctcttaggcaacaaagtggatagtgcccacgaacgtgtcgtcaaacgagaggacggggaaaagttagccaaagagtatggactgccttttatggagacctccgcaaaaacagggcttaatgtggacctggctttcacagccattgccaaggaacttaaacagcgatcgatgaaggcgcctagcgaaccaaggtttcgattacatgattatgtgaaacgagaaggccgaggtgcgagttgctgccggccttag

SEQ ID NO: 202267 - DNA, 666 bp, synthetic construct
  misc_feature 1..666: note = Description of Artificial Sequence: Synthetic coding sequence
  source 1..666: mol_type = other DNA
atgagcgacggcgactacgactacctgatcaagttcctggccctgggggactctggggttggcaagacgtccgtgctgtaccaatataccgacgggaaatttaatagcaagtttattacgacagtgggcatcgattttcgggagaagcgagtggtgtacagagcgagtgggccagacggcgccacagggcgtggacaaaggatccacctgcagctgtgggatacagccggacaagaacggttccgttcgctgaccaccgcgttttttcgcgatgccatggggttcctgctactgttcgacttaacaaacgaacagagcttcttgaacgttagaaactggatctcgcaactccagatgcacgcttattgtgagaatcctgacattgtgttgtgcggaaacaagtcggatctggaagatcaacgcgtggttaaggaggaggaggccatcgctctcgcggagaaatacgggatcccatactttgagaccagtgccgccaatgggactaacatctcccaggccattgagatgcttctggaccttatcatgaaacgcatggagcggtgtgtagacaagagctggatacccgaaggcgtggtccgatcgaacggacatgcttccacggatcagctgtctgaagagaaagagaagggcgcgtgtggatgctag

SEQ ID NO: 202268 - DNA, 642 bp, synthetic construct
  misc_feature 1..642: note = Description of Artificial Sequence: Synthetic coding sequence
  source 1..642: mol_type = other DNA
atgagcgacggcgactacgactacctgatcaagttcctggccctgggggacagcggagttggaaagactagtgtcctgtatcaatacaccgatggaaaattcaatagcaagtttattactacggttggaatcgacttccgtgaaaagcgagtggtgtacagagccagtggcccggatggagctaccggtcggggccagagaattcacttgcagttatgggacacggcgggccaggaaagattccgctccctgactaccgcattttttagggacgctatgggtttcttgctgctattcgacctgacgaatgagcaaagcttcctgaatgtgcgaaattggatctcccagctgcagatgcacgcctactgtgagaatccggatatagttctgtgcggtaacaaatccgacctggaggatcagcgagtagtgaaggaaaaatacgggatcccctatttcgaaacatcagcagccaatgggacaaacatctcccaggcaatcgagatgcttttggacctgatcatgaagcggatggaacgctgcgttgacaagagctggattccggagggagtggtccggagcaacgggcatgcctcgacagaccaactcagtgaggaaaaagaaaaaggggcctgcggatgttag

SEQ ID NO: 202269 - DNA, 666 bp, synthetic construct
  misc_feature 1..666: note = Description of Artificial Sequence: Synthetic coding sequence
  source 1..666: mol_type = other DNA
atgagcgacggcgactacgactacctgatcaagttcctggccctgggggactcgggcgtaggcaaaacttccgtgctgtatcaatataccgacggcaagttcaacagtaaattcatcaccactgttggcatcgattttagagagaaaagggtggtgtacagagcaagcggtccggacggggcaacaggccgcggtcagcgcatccatctgcagctttgggataccgcaggacaggaacgatttcgctcgttgaccactgcgtttttcagagatgccatgggcttcctgctgctgtttgatctgaccaacgagcagagcttcctcaacgtcagaaactggatctcacagctccagatgcatgcctactgtgagaacccggatatagtcctgtgcggtaataagtcggatctggaggaccagcgagtggtgaaagaagaagaagcaattgccctggcagagaagtatgggatcccctactttgagaccagcgccgccaatggcacaaatatcagccaagctatcgagatgcttttagacctcatcatgaaacgaatggagcgctgcgttgataagtcatggattcctgagggcgtcgtcagatcgaatgggcatgcatcaaccgaccaactgagcgaggaaaaggaaaagggcgcttgcggctgctag

SEQ ID NO: 202270 - DNA, 663 bp, synthetic construct
  misc_feature 1..663: note = Description of Artificial Sequence: Synthetic coding sequence
  source 1..663: mol_type = other DNA
atgagcgacagcgaggaggagagccaggaccggcagctgaagatcgttgttctgggcgacggtgcctcaggcaaaacgtccttaacaacatgcttcgcacaggaaacgttcggcaagcagtacaaacaaacaatcgggctggatttctttttacgccggattacattaccagggaacctgaacgtgacactccagatctgggacatcggtggccagaccatcgggggcaaaatgctggacaaatacatatatggagcgcagggggtccttttggtgtatgacatcaccaactaccagtctttcgaaaatcttgaggactggtacacagtggttaagaaagtgtccgaagaaagtgagactcagccactcgtagccctggtaggtaacaaaatagatctggagcacatgaggacaattaaacctgagaaacatttgagattctgtcaagagaatggattttccagccacttcgtatctgccaaaacaggagatagtgtttttctttgttttcagaaggtggctgccgaaatcctcggaataaagctcaacaaggcagagatcgaacagtcccagcgaatcgtacgagccgagatcgtgaaatatcccgaggaggagaaccaacataccacctcaacccagtccaggatatgtagcgtccagtag

SEQ ID NO: 202271 - DNA, 666 bp, synthetic construct
  misc_feature 1..666: note = Description of Artificial Sequence: Synthetic coding sequence
  source 1..666: mol_type = other DNA
atgagcgacagcgaggaggagagccaggaccggcagctgaagatcgtcgtattaggcgacggagctagcgggaagacttccctcactacttgttttgcccaggagacgttcggaaaacagtataaacagactatcggtctggattttttcttaagacgcatcaccctgcccggtaacctgaacgtgactcttcagatatgggatatcggtggccagactatcgggggcaagatgttggataagtatatttatggggcgcaaggtgttctgctggtctacgatattacaaattaccagagcttcgaaaacctagaagattggtacaccgtggtaaaaaaagtatccgaggagagcgagacccaacctttagtggctcttgtcggtaacaaaatagacctggaacacatgcggaccatcaaacccgagaaacacctacggttttgccaggagaacggtttttcctcccactttgtaagtgccaagaccggcgacagtgtgttcttatgctttcaaaaagtggccgctgaaattctgggcatcaagctgaataaggcggagattgaacagagtcaacgcgtcgtgaaagcagatatcgtcaattataaccaggagccgatgagtaggactgtgaatcctcccagatcttcaatgtgcgctgtccaatag

SEQ ID NO: 202272 - DNA, 615 bp, synthetic construct
  misc_feature 1..615: note = Description of Artificial Sequence: Synthetic coding sequence
  source 1..615: mol_type = other DNA
atgagcgacagcgaggaggagagccaggaccggcagctgaagatcgtcgtgctcggcgacggagcttccggcaagacgtccctaacaacctgtttcgcgcaagaaacctttgggaagcagtacaaacagaccatcgggctagacttctttctgaggcgaatcactctgcctggtaatctcaacgtgactttgcagatttgggacatcggaggccagactatcggaggaaaaatgctggataaatatatctacggcgcccagggcgtcttgctggtgtacgatattacaaattaccagagctttgagaaccttgaagactggtatacagtcgtaaaaaaggtcagcgaggaatccgagacacaacccctagttgccctggtgggtaataagatcgatcttgaacacatgaggaccattaaacccgaaaaacacctacggttttgccaggagaatggtttctccagtcactttgtgtccgcgaagacaggagattctgtgtttctgtgctttcagaaggtggcagctgagatcctgggaattaagctgaacaaggccgagattgaacagagtcaggggcattttatcatcttcatctccagtacgaaccgagagtag

SEQ ID NO: 202273 - DNA, 288 bp, synthetic construct
  misc_feature 1..288: note = Description of Artificial Sequence: Synthetic coding sequence
  source 1..288: mol_type = other DNA
atgagcgacagcgaggaggagagccaggaccggcagctgaagatcgtggtgctcggtgatggcgcctccggcaagacgagtctaacaacgtgtttcgctcaagaaacatttggcaagcagtataagcaaaccatcggtctggacttcttcctgaggcgtatcacgctgcctgggaacctcaatgtcacgctgcagatctgggatataggcggtcaaactattggcggaaagatgctcgacaaatacatctacggtgcacagctgatatggagcatttgtgagcagtag

SEQ ID NO: 202274 - DNA, 639 bp, synthetic construct
  misc_feature 1..639: note = Description of Artificial Sequence: Synthetic coding sequence
  source 1..639: mol_type = other DNA
atggcctacgcctacctgttcaagtacatcatcatcggcgacaccggtgtgggaaaaagttgcctactcctacagtttacagacaaacgctttcagcctgtgcacgatctgaccatcggcgtggagttcggtgctagaatgataaccatcgacggcaagcagattaagcttcagatttgggatactgccgggcaggagtccttcagatccataacacggtcgtactatcgcggggctgcaggcgcccttctggtctacgacatcactcgacgtgacacctttaaccatctcacaacctggttagaagatgccagacagcacagcaattctaacatggttatcatgttaatagggaataaatctgatcttgagagccgaagagaagttaaaaaggaagaaggtgaagcgttcgcccgcgagcacggcctgatcttcatggaaacatcagccaagaccgcatccaatgtggaggaagcttttataaacactgccaaagaaatctacgagaaaattcaggagggtgtgttcgatatcaataatgaagctaatggtattaaaattgggccacagcatgccgctaccaatgccacgcacgcagggaaccaaggagggcagcaggcaggtggtgggtgctgttag

SEQ ID NO: 202275 - DNA, 567 bp, synthetic construct
  misc_feature 1..567: note = Description of Artificial Sequence: Synthetic coding sequence
  source 1..567: mol_type = other DNA
atggcctacgcctacctgttcaagtacatcatcatcggcgacaccggcgtcgagtttggagctcggatgatcacaatcgatgggaagcagataaaactgcagatttgggacactgcaggccaagagtcctttcgatcgatcacaaggtcctattataggggtgccgccggcgcccttctggtttatgacataacccgtcgggatacgtttaatcacctgacaacttggctcgaagacgcgagacagcattccaactccaacatggtcatcatgctgatcggtaataagtcggatctggaatctcgaagagaggttaagaaggaagagggcgaggcctttgcccgagagcacggtctcattttcatggaaacaagcgctaagaccgcgtccaacgtcgaggaggctttcatcaataccgcaaaagagatttatgagaagatccaggagggtgtcttcgatatcaacaacgaggctaacgggattaaaattggaccacagcatgccgctaccaatgcaacccatgctggaaaccaggggggccaacaagccggtgggggatgttgctag

SEQ ID NO: 202276 - DNA, 501 bp, synthetic construct
  misc_feature 1..501: note = Description of Artificial Sequence: Synthetic coding sequence
  source 1..501: mol_type = other DNA
atgatcaccatcgacggcaagcagatcaagctgcagatctgggacaccgctgggcaggagtcattccgttctataacacggagctactatcggggcgctgccggagcactgctcgtgtacgatatcacacggcgcgatacctttaatcatcttactacctggctcgaggacgcaagacagcactccaactccaacatggtgataatgctgatcggaaacaagtcagatttggaatccaggagagaagttaaaaaggaggaaggtgaagctttcgcacgcgagcatggacttatctttatggaaacttcagccaaaactgcttcaaacgttgaagaggcttttattaataccgccaaagaaatatacgagaaaattcaggaaggcgtgttcgacattaataatgaagcgaacgggattaagattggtccacagcacgcggccacaaacgctacacatgctggcaaccagggtgggcaacaggcgggcggtgggtgctgctag

SEQ ID NO: 202277 - DNA, 630 bp, synthetic construct
  misc_feature 1..630: note = Description of Artificial Sequence: Synthetic coding sequence
  source 1..630: mol_type = other DNA
atgacctacgcctacctgttcaagtacatcatcatcggcgacaccggcgtaggaaagagttgtctcctcctacagtttacagataagcggttccagccagtacatgatctcaccatcggggttgaatttggagcacggatggtcaacattgatggaaagcagattaagttgcagatctgggatactgccggccaggagagtttccggagtatcactagaagctattacaggggagcagccggtgctctgctcgtttatgacattacgcggcgcgagacgttcaaccacctgacttcgtggcttgaggatgccagacagcacagtagctcgaatatggtcatcatgctcataggaaacaagtcagacctggagagccgaagagatgtgaaaagggaagaaggcgaggccttcgcgcgggagcatggactgatcttcatggagacttccgctaagaccgcctgcaacgtagaggaggctttcatcaacaccgccaaggagatttatagaaagattcagcagggcctgtttgacgtccacaacgaagcgaacggcattaagatagggcctcagcagtccatcagcacaagcgtggggcccagcgcctctcagtccgctggcctgcaggtctag

SEQ ID NO: 202278 - DNA, 651 bp, synthetic construct
  misc_feature 1..651: note = Description of Artificial Sequence: Synthetic coding sequence
  source 1..651: mol_type = other DNA
atgacctacgcctacctgttcaagtacatcatcatcggcgacaccggggtgggtaaatcttgtctgctgctacagtttaccgataaacgctttcagcccgtgcatgacctgacaataggcgtcgagttcggagcacgcatggtgaatatcgatggaaagcagatcaaactgcaaatttgggatacagccggccaggaaagtttcaggtccattacccggagctactatcgcggcgctgccggcgcactacttgtgtacgacattaccagaagggagacctttaatcatctgacatcctggctcgaggacgcacgccagcacagcagctcaaacatggtgatcatgctcatcggaaacaagagtgacctcgagtcccggagagatgtaaaacgagaggaaggggaagcttttgcccgcgagcacggcctgattttcatggagaccagcgctaaaacagcatgtaatgtggaggaggccttcatcaataccgcgaaggagatatatcggaagatccaacagggactctttgatgttcataacgaggccaatggaatcaaaattggcccccagcaaagtatttccacatccgttggcccttcggcatcccaacgcaatagtcgcgatatcggcagtaattctggctgttgctag

SEQ ID NO: 202279 - DNA, 189 bp, synthetic construct
  misc_feature 1..189: note = Description of Artificial Sequence: Synthetic coding sequence
  source 1..189: mol_type = other DNA
atgacctacgcctacctgttcaagtacatcatcatcggcgacaccggcgtgggcaagtcatgtctcttactgcagtttaccgacaaacgttttcaacccgtccacgacctaaccatcggggtggagtttggcgccaggatggtcaatatagatggcaagcagattaaactgcagatttgggatacatag

SEQ ID NO: 202280 - DNA, 2946 bp, synthetic construct
  misc_feature 1..2946: note = Description of Artificial Sequence: Synthetic coding sequence
  source 1..2946: mol_type = other DNA
atggccgccgacagcgagcccgagagcgaggtgttcgagatcaccgatttcacaacagcctccgagtgggagaggttcatatctaaagtggaggaagtactcaacgattggaagctgatcgggaattccttagggaaacccctcgaaaagggcatttttacctctggaacttgggaggagaagtcagacgaaatatcgtttgccgactttaagttctccgtcacacaccactacttggtccaagaaagcactgataaggagggcaaggacgaactgcttgaagatgtagtgccccaaagcatgcaagacttactgggaatgaacaatgacttccccccccgggcccactgccttgtccggtggtatggcctgcgagagttcgtcgtgattgcacctgctgctcattctgacgccgtgctgtcggaatctaagtgcaatttgctcctgagctccgtatctatagctctgggaaataccggctgtcaggtgcctctgttcgtccagatacaccataagtggcggaggatgtacgttggcgaatgtcagggacctggggtgcgtactgatttcgaaatggtgcacctgcgaaaggttcctaaccagtatacccacttgtctggcctgctggatatattcaagtccaagattgggtgcccattaaccccactgccacctgtgagcatcgcaatccgcttcacatatgtgttacaggattggcagcagtacttctggcctcagcagccgccagacatcgacgcacttgtgggcggagaggttggaggcctggaattcgggaagctcccattcggggcctgtgaggatcctattagcgaactgcacttagcaactacctggccgcacctgactgagggaattattgtggacaacgacgtgtactcagaccttgacccaatccaggcacctcactggagtgtcagagtgcgcaaagctgaaaaccctcagtgtcttctgggagactttgtcaccgaattctttaaaatttgccgtcgtaaagagagcacagatgagattctgggtcgtagcgcctttgaggaggaagggaaggagaccgcggacatcacgcatgccttgtctaagctgaccgagccagccagcgtcccaatccacaaactctcagtctccaacatggtacacacagccaaaaagaagatccggaagcatcgcggggtcgaggaaagtcccctgaataatgatgtgctgaatactattcttctgtttctgttcccagatgcggtgagcgagaagccccttgacggtaccaccagtactgacaataacaacccaccatcagagagtgaggattacaatctgtataaccagttcaagtccgccccaagcgatagtctaacatacaagctagctctgtgcctgtgcatgatcaacttctatcacggcggcctcaagggcgtcgcccacttatggcaggaattcgttctggaaatgcggttccggtgggaaaataattttttgattccgggtctggcaagcggtccgcctgatctcaggtgctgtctcttgcaccagaagctgcagatgctcaattgttgtatcgagcggaaaaaggctagggatgagggaaagaagacctcagcctctgatgtgacgaatatctaccctggggatgccggaaaggctggggaccagctcgtcccagataatctcaaagagactgacaaagaaaagggggaggtaggaaaaagctgggattcgtggtcagactctgaggaggagttctttgagtgtctctccgatactgaggagctaaagggaaatggacaagagtcgggaaaaaagggggggccaaaggagatggcgaatctgcgcccagagggtcggttgtatcagcacggaaagttgacactgctgcacaatggcgagcccctttacattccagttactcaggaaccggcaccaatgacggaggacctgttggaagaacaatccgaggtgctggcaaagctggggacctccgccgagggggctcatttgagggcccggatgcagtctgcttgcctattatccgacatggagagttttaaagccgccaatccgggttgctcgctggaggactttgtacgttggtatagcccacgtgattatatcgaagaggaagttatcgacgagaaaggcaacgtcgtgctcaaaggggagctgtcggccaggatgaaaatcccctcaaacatgtgggtcgaagcctgggagacggccaaacccattcccgcccgcaggcagcgcagactctttgacgacacgcgagaggccgagaaggtccttcactatctggcaattcaaaaacccgccgacttggcccggcacctcctgccctgcgtgatacacgccgcagtgctcaaagtgaaagaagaggaaagcctggagaacatctcatcagttaaaaagatcatcaaacagatcatttcccatagcagtaaagtcctacactttccaaaccctgaagataaaaaattagaagaaatcattcaccagatcaccaatgttgaagctctgatcgcgcgggcacgcagtctaaaggctaaattcggaaccgagaagtgtgagcaggaagaggagaaggaagaccttgaacggttcgtcagttgcctgctggaacagcccgaggttctcgtgacgggtgctggtcgggggcatgcaggtagaatcatccataaattattcgtgaacgctcagagggcggcagctatgacgcctccggaggaggagctaaagcgaatggggtcccctgaggaacgtaggcagaactctgtctctgacttcccaccgcctgccggacgcgagtttatcctgaggactactgtgcccaggcccgccccctactccaaagcactgcctcagcggatgtactcggtcctgaccaaagaagacttcagactcgccggagcattttcatcagatacttcattcttttag

SEQ ID NO: 202281 - DNA, 2808 bp, synthetic construct
  misc_feature 1..2808: note = Description of Artificial Sequence: Synthetic coding sequence
  source 1..2808: mol_type = other DNA
atgttcagcctgatcagcggcatcttcaccagcggcacctgggaggagaagtctgacgagatcagcttcgcagactttaagtttagcgttacacaccattatctggtccaggaatctaccgacaaagagggcaaggacgagcttctggaggatgtcgtaccacagtccatgcaggatttgctgggaatgaataacgattttccccccagggcgcactgcctggtaagatggtacggactgagagaattcgtcgtgatcgccccagcagcccatagcgatgccgtgttgtccgaatcaaaatgcaacctgctgctctcatccgtaagcatcgccctgggaaacactggctgtcaagtccctttgtttgtccagattcatcacaaatggcgcaggatgtatgttggtgagtgccagggtcccggcgttagaaccgacttcgagatggtgcatctccgaaaagttccaaatcagtatacccatctgtcaggcctcctggacatatttaagtctaagatcggatgccctctcacccctctgccaccagtcagcatcgctatacggttcacctatgtcctccaggactggcagcagtacttttggcctcaacagccacctgatatcgatgcccttgtcgggggcgaggtcggtgggttagaatttggcaaactgcctttcggtgcttgtgaggaccccatctccgagcttcatttggccactacatggccccaccttaccgagggaatcatcgtcgacaacgacgtgtacagcgacctggacccgattcaagcgccgcattggtcagtcagagtccgtaaggcagaaaacccacaatgtcttttgggggacttcgttacggaatttttcaagatctgccggaggaaagaatccaccgacgaaattttaggccggtcagctttcgaggaggaaggtaaagagacagccgatattacccacgccctgtcaaagctgaccgagcctgcctctgttccaattcacaagctttccgtctccaacatggtgcatactgcaaagaaaaaaatccggaaacacagaggagtggaagagagtcccctgaacaacgatgtcttgaatactatcctcctatttctgtttcctgatgctgtaagcgagaagccattggacggaaccacctccacagataacaacaatcccccatcagagtcggaggactacaatctgtataaccagtttaagagcgcgcctagcgacagcctgacatataagctggccctttgcctttgtatgatcaacttttaccatgggggcttaaaaggcgtggcccatctgtggcaggagttcgtgttggagatgagatttagatgggagaacaattttttgatacctgggctggcctcgggccctccagacctccgttgttgtttgcttcaccagaagctgcagatgcttaattgttgtatcgagcggaagaaagcccgggacgagggcaaaaagacgtccgcctccgacgttaccaatatttatcccggcgacgctggcaaagccggggaccagctcgtgcctgataatctaaaagagaccgataaagagaagggcgaggtcgggaagtcttgggatagttggtcagactccgaagaggagttcttcgagtgcttatctgatacagaggagctgaaagggaatggacaagagtctggtaagaaagggggacccaaagaaatggccaaccttaggcccgaaggacgcctgtaccaacacgggaaacttacactcttgcacaacggtgagcctctctatatcccagtgactcaggagcccgctccgatgaccgaggatttgctcgaagagcagtccgaagtgctggcaaagctcggtacctcagctgagggtgctcacctcagggccagaatgcagtcggcgtgcctgctgtcagatatggagagtttcaaggccgcgaaccccggctgttctttggaggattttgtcaggtggtatagcccccgtgactacatcgaggaagaagtgattgatgagaaaggcaatgtggtgctgaagggcgaactgtccgctcgcatgaaaattccgtctaatatgtgggtggaggcatgggagacggctaagcccatccccgcaagaaggcagcgacgcctctttgacgacactcgggaggccgaaaaagtcctgcactacctggctatccagaaaccagctgatcttgcgagacacctgctgccatgcgtcattcatgccgccgttcttaaggtcaaagaggaagagagtctagaaaacatctcatcggtcaagaagatcattaagcaaatcattagccactcgtccaaagtgctgcatttcccgaaccccgaagacaagaagctagaggaaataattcaccagatcactaacgtcgaggcgctcattgcccgcgcccgctctctaaaagcaaagttcggaacagaaaagtgcgagcaggaagaagaaaaagaagatttagagagatttgtcagctgcttgctcgagcaacctgaagtcctcgtgactggagccggcagagggcatgccgggcgaataatccataagctattcgtaaatgcccagcgagcagccgctatgacacccccggaggaggaattaaagcgcatgggatcacctgaggaaagacggcagaatagcgtgtctgacttcccccctcccgccggtagagagttcatcctgaggacaactgtacctagacccgccccttatagcaaagccctgcctcagagaatgtactccgtgctcactaaggaagatttccgcctggctgtgaagattatcgatggggatgtctag

SEQ ID NO: 202282 - DNA, 2967 bp, synthetic construct
  misc_feature 1..2967: note = Description of Artificial Sequence: Synthetic coding sequence
  source 1..2967: mol_type = other DNA
atggccgccgacagcgagcccgagagcgaggtgttcgagatcaccgactttactaccgcctctgaatgggagagatttatctcaaaagttgaggaggtgctaaacgattggaaattgataggaaacagcttgggcaaacctctggaaaaggggatattcactagtggtacgtgggaggagaagtccgatgagattagttttgccgacttcaagttcagcgtaacccaccattatctagttcaagaaagtaccgataaggagggaaaggacgaactgctcgaggatgttgtcccccagtccatgcaggacctcctgggcatgaataatgacttccccccccgggcgcactgcctcgtaaggtggtatggccttcgggaatttgtcgtgatagcaccagctgctcatagcgacgccgtcctatccgaaagtaagtgcaatctccttttgtcctcagtttccattgcactgggaaataccggatgtcaagtgccactttttgtgcaaatccatcacaaatggcgacgtatgtatgtgggagagtgtcaagggccaggggtaagaactgatttcgaaatggtgcatttacgaaaagtgcctaaccaatacacacatttgtccggtctcttggatattttcaaaagcaagatcggttgccccctgacccccctcccccctgtgagtattgccattaggtttacttatgttctccaggactggcagcagtatttttggcctcagcagcctcccgacatcgatgctctcgtaggaggcgaggtaggaggactagaattcggaaagttaccttttggcgcctgtgaagatcctatctcggaacttcatcttgcaaccacatggccacatttgaccgagggcatcatcgtggataatgatgtctatagcgaccttgaccccatccaggccccccactggagtgttcgtgtgcggaaggccgaaaaccctcagtgcctgctgggtgacttcgtgacagagttttttaaaatctgccggaggaaggaaagtacagatgagatcctcggtaggtcagccttcgaagaggagggaaaagagactgcggacatcactcacgcgcttagcaaactcaccgagccggcctcggtccccatacataagctgtctgtgtctaatatggtccataccgcaaagaaaaaaattagaaagcatagaggggttgaagagtctcctctgaataatgacgtgctgaacacgatcttgcttttcctcttccctgatgccgtcagtgagaaaccgctggatggaaccacgagtaccgacaacaataaccccccctcagaatctgaagactacaacctgtacaaccagtttaagtctgctccaagtgattctctgacctacaaactggccctgtgcctgtgtatgatcaacttctaccatggcggattgaaaggtgtggcccacctatggcaggaattcgtcttggaaatgaggttccggtgggagaacaacttccttattcccgggctggcttccggccctcctgacttacgttgttgtttactccatcaaaaactgcaaatgctcaactgctgtatcgagaggaaaaaggcaagggacgagggcaagaaaacctccgcaagcgatgtaacgaacatttaccccggtgacgccggcaaggcaggggatcaactggtgccagacaacctaaaggaaactgataaagagaagggagaagtgggaaaatcatgggactcctggtctgactctgaggaggagtttttcgagtgcctgtctgataccgaggaattgaaagggaatggtcaggaatccggaaagaaggggggaccaaaggaaatggctaatctccgacctgaggggcgactgtatcaacacggcaagctcaccctactccacaatggtgagccactgtacatccctgtaacccaggagcctgccccaatgacagaagaccttctggaagaacagtccgaggtgctcgccaagttgggaacttctgctgagggggcccacctcagggcacggatgcaaagcgcgtgcctgctgtccgatatggagtcttttaaggccgccaacccaggatgcagcctggaagattttgtgcggtggtattcaccacgggactatatagaagaggaggtgatcgacgagaaaggaaatgttgttctgaaaggggagctgagcgcgcgaatgaaaatacccagtaacatgtgggtagaggcgtgggagacggccaaaccgataccagcgcggcgacagcggaggttgtttgacgatacccgggaggccgaaaaggtgctgcactatctagctattcaaaaacctgctgatctcgcacgtcacctgttgccctgtgtcattcacgcagccgtcctcaaagttaaagaggaggagagcttagaaaatattagctctgtcaaaaagatcataaaacagatcattagccactcatccaaggtcctgcattttccaaaccccgaggacaagaagcttgaggaaatcatccaccagataaccaacgtcgaggccttaatagctagggcacgcagcctgaaagctaagtttggaacggagaaatgcgaacaggaagaggaaaaagaagatttggagcggttcgtgagctgcctcttggaacagcctgaggtgctggtgaccggcgccggcagaggacatgccggtcgcatcatacacaagctattcgtcaacgctcagaggctaaccgagagctccgacgaagccgcggcgatgactcctccagaagaagaactaaagcgcatgggtagccctgaggaacgccgacagaactccgtgagcgactttccacctcccgccggtagggagttcatcctccggaccaccgtccccagacctgcgccttattcaaaagcactccctcagaggatgtatagcgtacttaccaaagaggacttcaggctggcaggagcattctcctctgacacgtcattcttttag

SEQ ID NO: 202283 - DNA, 4182 bp, synthetic construct
  misc_feature 1..4182: note = Description of Artificial Sequence: Synthetic coding sequence
  source 1..4182: mol_type = other DNA
atggcctgcagcatcgtgcagttctgctacttccaggacctgcaggctgcacgcgatttcttgttccctcacctgagggaggaaatcctatctggtgccctgaggcgagaccctagtaagtctaccgactgggaggacgatggctggggtgcctgggaggagaacgaaccgcaagaaccagaagaagaaggaaatacctgtaagacccagaagacctcctggctgcaggactgtgtcctgagcttatccccaaccaatgatctgatggtgatcgccagagagcagaaggcagtgtttcttgtgcctaaatggaaatatagtgacaagggtaaggaagaaatgcagtttgccgtcgggtggtctgggtcactgaacgtggaggagggggaatgcgtaacaagcgcactgtgcatcccactagccagccaaaagcgcagctccaccggccggcctgattggacctgcatcgtggttggcttcactagcggttacgtgcgcttctataccgaaaatggggtcctgctgctggctcagctcctcaacgaggaccctgtactgcagctcaaatgtcgaacatacgagattccgcgccatccaggggttactgaacagaatgaggaactgtccatcctctaccccgccgctatcgtgaccattgatggcttttctctctttcaatcactaagggcctgtagaaatcaagtagccaaagccgctgccagcggtaatgagaatattcagcctccaccactcgcttataagaagtgggggctccaggacattgatacgattattgaccacgcaagcgttggtattatgaccctctcccctttcgaccaaatgaagactgccagcaatatcggtggttttaatgctgccatcaagaatagcccgccagccatgtcccagtacattacggttggctccaatccctttacaggttttttctatgctctggaagggtctacccagcccctgctgagccatgtagctctcgcagtcgcatctaaactgacctcggctctgttcaacgccgcttctgggtggttggggtggaagagcaagcatgaggaggaggccgtgcagaaacaaaagcccaaagtggagcctgcaacacctctcgccgtacgttttggactccccgacagtcggcggcatggggagtctatctgcctgtctccttgcaatacccttgctgcagtcaccgacgactttggacgggtaattctgctggacgtggctagaggaatagcaatcaggatgtggaagggttatcgagatgctcagattggatggatccagacggtggaagacctgcacgaaagagtgccagagaaggctgacttttcgccgttcgggaattctcagggaccctcacgggtggcccagttcctggtgatctatgcgccccggaggggcattctggaagtgtggagcacacagcagggccccagagtcggcgcgtttaacgtcgggaagcattgccgcctcctatatcccggttacaaaatcatgggattgaacaatgtgacctcccagagttggcagccccagacttatcagatctgtttggtggaccccgtgagtggcagcgtcaagacagtgaacgtgccgtttcatctggccctgtcagataaaaaaagcgagcgggcaaaagacatgcatctggtgaaaaagctggccgcgctgttaaagactaagtctcccaacttggatctggtggagacagaaattaaagagctaattctggacataaagtaccctgcgaccaagaagcaggccctggagtctatcctcgcctctgagcgccttccttttagctgtctgagaaatattactcaaaccctgatggatactcttaagagccaagaattggaatccgtggatgaaggcttattacagttttgtgctaacaagttaaagctgctgcagctatacgagagcgtctctcaacttaattctctggatttccatcttgatactcccttctccgataatgatctcgctctgctgttgcgactggatgagaaggagctgctgaaactacaggcactgctagaaaagtataagcaggaaaatacccgcactaatgtgcggttttccgatgacaaggacggcgtgttacctgtcaagaccttcttggagtacctggagtacgaaaaagacgtcctaaatatcaagaagataagcgaggaagagtatgttgctcttggatcttttttcttctggaagtgtctacatggggaaagctcgaccgaagacatgtgccacaccctggagtccgcaggactatccccacagcttctgctcagcctcttgttgtcggtatggttgagtaaagaaaaagatattctggataaaccgcagagcatctgctgcctgcacaccatgctatctctgctgtccaagatgaaagtagctatcgacgagacatgggacagtcagtctgtgtcaccctggtggcagcaaatgcgcaccgcctgtatacagagcgagaacaatggcgccgccctcctttctgcacacgtgggccactccgtggcggcccagatctcaaataacatgaccgagaagaagttttcgcaaacagtcctcggcgcagattcagaagctctgaccgatagttgggaagcgctctctttggataccgaatattggaagttacttttgaagcaacttgaggattgcctcattcttcaaactttgttgcacagtaaaggaaacacacagacatccaaagtgtcatcactccaagccgaaccactgccccgtctaagcgtgaagaagctgctggagggtgggaaaggaggcatagccgatagcgtggctaaatggatatttaaacaggatttttcccccgaggttctgaaactggcgaacgaagagcgggacgctgagaatccagatgagcccaaggaaggcgtcaacaggtcttttctggaggtcagcgaaatggagatggatctgggagcaattcccgatctcctgcaccttgcatatgagcagtttccctgttccttggagctggacgtcttacacgcgcactgttgctgggaatatgtggttcaatggaataaagatcctgaagaagctcggttttttgtacgtagcatcgaacatctcaagcagattttcaacgcacacgtgcagaatgggattgcactgatgatgtggaacaccttcctggtgaagaggttctcggccgcaacgtacctgatggataaggtgggcaagagcccgaaggataggctgtgtaggcgagacgtcgggatgtcagatactgcaatgaccagcttcctcggatcttgcttagacctgttacagatcctgatggaggctgatgtttcacgagacgagatccaggttcccgttctggatacagaagacgcctggttgtccgtagaggggcctattagtattgtggaacttgctctcgagcagaagcacatacattatccgctcgtggagcaccattccattctgtgttccattttgtatgcagtcatgcgcttctcacttaaaacagtgaagcccctgtccctcttcgatagcaagggcaagaacgcctttttcaaagacctgacttctatccagctgttgccttcaggggagatggaccctaactttatttccgttcgccaacagttcctgttgaaggttgtgagcgcagctgtccaggcacagcacagtgctactaaggtcaaagatccgactgaggaggcgaccccgaccccctttggcaaggaccaggattggcctgccctggcggttgacctggcacaccacctgcaagtctcggaggacgtcgtgcgacggcattatgtgggcgaactgtacaattacggagtggatcatctgggagaagaggctattttgcaggtgcatgataaagaggttctggcgagtcaattgctcgtcttgacggggcaaaggctcgcacatgccttgctgcatacacagacaaaggaagggatggagctcctcgctcgtttaccccctacactctgcacctggctgaaagcaatggatcctcaggacctgcaaaataccgaggtgccaattgcaacgaccgccaagctggtgaacaaggtcattgaattgctgccggagaagcacggccagtacgggctcgcactgcatttgatcgaggctgtcgaggccataagcctgccaagcctttag

SEQ ID NO: 202284 - DNA, 612 bp, synthetic construct
  misc_feature 1..612: note = Description of Artificial Sequence: Synthetic coding sequence
  source 1..612: mol_type = other DNA
atgagcatggaggactacgacttcctgttcaagatcgtgctgatcgggaacgcaggcgtaggaaaaacgtgtcttgtccggaggtttacgcagggcctgttccccccgggccagggagcaactattggggtcgatttcatgatcaaaactgtggaaatcaatggggagaaagttaaactccagatctgggatactgccggacaagagcgctttagatccattacgcaaagctattaccgttccgcaaatgctctcattctgacttatgatatcacatgcgaggagagttttaggtgtctccctgagtggttgagagagatcgaacagtatgcatctaacaaagtgatcactgtgctggttggcaacaagattgatctggctgaacgccgtgaggtctcacagcagagggctgaggaattcagtgaggcgcaggacatgtactacttagaaaccagtgccaaggaaagtgacaatgtggaaaagctcttcctggatttggcctgcagactcatctccgaggcgaggcagaacaccctggttaataatgtgagctctccactacccggagagggaaagtcaatttcctacctgacatgttgtaattttaattag

SEQ ID NO: 202285 - DNA, 345 bp, synthetic construct
  misc_feature 1..345: note = Description of Artificial Sequence: Synthetic coding sequence
  source 1..345: mol_type = other DNA
atgagcatggaggactacgacttcctgttcaagatcgtgctgatcggcaatgcaggggtcgggaaaacttgtctcgtccggcgttttactcagggactttttcccccaggtcagggagccacaatcggtgttgacttcatgattaaaacggtggagattaatggagagaaggtaaagctacagatatgggacactgcggggcaagagcggttcaggtccattactcagtcctactacagatccgcaaatgctctgatattaacctatgacattacttgcgaggaatcattccgctgtctgcctgagtggctgcgcgaaatcgagcaatacgcctctaacaagtag

SEQ ID NO: 202286 - DNA, 612 bp, synthetic construct
  misc_feature 1..612: note = Description of Artificial Sequence: Synthetic coding sequence
  source 1..612: mol_type = other DNA
atgagcatggaggactacgacttcctgttcaagatcgtgctgatcggaaatgcaggcgtggggaagacatgtctcgtacgtcggttcacacagggcttgtttccgcccggccagggtgcaacaattggagtggattttatgataaaaaccgtggaaataaacggagaaaaggtgaagctgcagatctgggacaccgccgggcaggagaggttccgctctatcacccaaagctactacagaagtgccaacgcactcattttgacatatgacatcacctgcgaggagagttttcgatgtcttccagaatggttgagggagatcgagcagtacgcatccaacaaggtcatcacagtcctcgtgggaaataagattgacctggccgaaaggcgagaggtttctcagcagcgcgctgaagaatttagcgaagcgcaagatatgtattatctggaaacgtctgccaaggagagcgacaatgtagagaagctgttcctggatttggcttgccgcttaatctctgaggcgcgccagaacactctggtaaataacgtgagtagtcccctgccgggagaaggaaagtcgatatcttatctcacctgctgcaacttcaattag

SEQ ID NO: 202287 - DNA, 168 bp, synthetic construct
  misc_feature 1..168: note = Description of Artificial Sequence: Synthetic coding sequence
  source 1..168: mol_type = other DNA
atgagcatggaggactacgacttcctgttcaagatcgtgctgatcggaaatgccggtgttgggaagacatgcctggtccgcaggttcactcaaggactgtttccgcctggacagggcgcaaccattggtgttgacttcatgatcaagacagtggaaatcaacgggtag

SEQ ID NO: 202288 - DNA, 507 bp, synthetic construct
  misc_feature 1..507: note = Description of Artificial Sequence: Synthetic coding sequence
  source 1..507: mol_type = other DNA
atgagcatggaggactacgacttcctgttcaagatcgtgctgatcggaaacgcgggcgtaggaaagacatgcctcgttcgccggttcactcagggactgtttccccccggccagggagccactatcggggtcgacttcatgattaagactgtggaaattaatggcgagaaggttaagctgcagatctgggacaccgcaggccaggagcgcttccggtccatcacgcaaagctattataggtcagctaatgcactcatcctgacttacgatataacttgcgaagaaagtttcaggtgcctgccagaatggctgcgtgagatcgaacaatacgcaagcaataaagtcataaccgtgctcgtcgggaacaagatcgaccttgccgaacgccgcgaagtcagtcagcagcgcgcagaggagttctcagaggcacaagatatgtactacctggagactagtgccaaggaatccgacaacgtggaaaaactcttcttagacctggcatgctag

SEQ ID NO: 202289 - DNA, 183 bp, synthetic construct
  misc_feature 1..183: note = Description of Artificial Sequence: Synthetic coding sequence
  source 1..183: mol_type = other DNA
atgagcatggaggactacgacttcctgttcaagatcgtgctgatcgggaatgccggggtaggaaagacttgcctcgtgcggagatttacccaagggcttttcccaccgggacaaggagccacaataggagtggatttcatgattaagactgtagaaattaatggcgaaaaggtaaaactgtag

SEQ ID NO: 202290 - DNA, 612 bp, synthetic construct
  misc_feature 1..612: note = Description of Artificial Sequence: Synthetic coding sequence
  source 1..612: mol_type = other DNA
atgagcatggaggactacgacttcctgttcaagatcgtgctgatcggaaacgctggcgtcggcaaaacatgccttgtgagacgcttcactcagggactctttcctcccgggcagggcgcgacaattggcgtcgattttatgatcaaaaccgtggagataaatggagagaaagttaaattgcagatttgggataccgctggccaggagcgcttcagatctattacacagtcctattaccggagtgcaaatgccctgattctgacctatgacatcacatgcgaagagtcgttcaggtgcctgccagagtggctccgggagatcgagcaatacgcaagcaataaagtgatcacagtacttgtcggcaataagatcgaccttgccgagcgcagagaggtaagccaacagcgcgccgaggagttctccgaggctcaggacatgtattacctggagacatccgcgaaagagtccgataatgttgaaaaactctttctagacctcgcttgcagactcatatctgaagctcgccagaacacactggtgaacaacgtttcttcacctctgcctggggagggaaagtccatctcttatctcacttgttgcaatttcaattag

SEQ ID NO: 202291 - DNA, 303 bp, synthetic construct
  misc_feature 1..303: note = Description of Artificial Sequence: Synthetic coding sequence
  source 1..303: mol_type = other DNA
atgagcatggaggactacgacttcctgttcaagatcgtgctgatcggaaatgcgggcgtgggaaagacgtgtctcgttcgccgctttactcaggggctctttccgccggggcagggtgccacgattggtgtggacttcatgattaagacggtcgagatcaacggcgagaaggtgaaactccagatctgggacacagcgggacaggagagattccgatcaattactcagtcatactacagaagtgctaatgccctcattctgacatacgacatcacatgtgaggaaagttttagatgcctgtag

SEQ ID NO: 202292 - DNA, 495 bp, synthetic construct
  misc_feature 1..495: note = Description of Artificial Sequence: Synthetic coding sequence
  source 1..495: mol_type = other DNA
atgagcatggaggactacgacttcctgttcaagatcgtgctgatcggcaatgcaggtgtgggcaagacctgtctggtccgacgttttacacagggactgtttcctccaggccagggagctaccataggggtggatttcatgatcaagaccgtcgaaatcaatggggaaaaggtgaagcttcagatttgggacacagccgggcaggaacgatttcgcagtatcacccagagctattaccggtctgccaacgcactgattctgacctacgacatcacatgcgaggagtccttccggtgtctgcccgagtggctccgggaaattgagcagtacgcaagtaacaaggttatcactgtcttggctacccggctgacctggttaaagggcgaaaggtttccttctagtgagctgaagaacagccagaagttgcggacttgcatcatctggagacctcagccccggaacctcatcatgtggaggaactctagcctcacgtag

SEQ ID NO: 202293 - DNA, 420 bp, synthetic construct
  misc_feature 1..420: note = Description of Artificial Sequence: Synthetic coding sequence
  source 1..420: mol_type = other DNA
atgagcatggaggactacgacttcctgttcaagatcgtgctgatcggcaacgcaggagtgggtaaaacctgcctggtacgccgcttcactcagggtctgttcccacccggccagggggccaccattggggtggacttcatgattaaaactgtggaaatcaatggagagaaagtgaagttacagatttgggatacggctgggcaagagaggtttagatccataacacagagttactaccgttctgccaatgccctgatccttacttacgatatcacctgcgaagagtccttccgatgcctgcccgaatggctcagggagatagaacagtatgcttcgaacaaggtgattaccgtcctggtgggtaacaagatcgacctagccgaacgccgcgaagtgtcgcagcagcgggccgaggagtag

SEQ ID NO: 202294 - DNA, 588 bp, synthetic construct
  misc_feature 1..588: note = Description of Artificial Sequence: Synthetic coding sequence
  source 1..588: mol_type = other DNA
atgatggccatccgggagctgaaggtgtgcctgctgggcgacaccggagttggaaagagctctattgtctgcaggtttgtccaggaccacttcgatcataatatcagtccgaccattggcgcatcatttatgactaagaccgttccttgcggtaatgaactccataagttcttaatctgggacacggcggggcaggagcggttccatagccttgccccaatgtattataggggaagcgctgccgctgttatcgtgtatgatataacaaagcaggacagtttttatactctgaagaagtgggtaaaggaacttaaagaacatggtcccgaaaacatagtaatggctatcgcagggaataagtgtgatctctcagatatccgggaggtgccattaaaggatgctaaggaatatgccgaatccataggggcaatagtcgttgagacctctgccaaaaatgcgatcaatatagaggagctgtttcagggaatctcgcggcaaattccgcccctcgatcctcacgaaaacgggaataatggtacgatcaaggtcgagaagccaaccatgcaagcctcacggaggtgttgctag

SEQ ID NO: 202295 - DNA, 561 bp, synthetic construct
  misc_feature 1..561: note = Description of Artificial Sequence: Synthetic coding sequence
  source 1..561: mol_type = other DNA
tgcctgctgaacgacaccggcgtgggcaagagcagcatcgtgtgcagatttgtacaggatcatttcgatcataatattagtcctacaatcggagccagtttcatgactaagacagtcccatgcggaaacgagctccataagttcttgatctgggacaccgcaggtcaagagaggttccactccctggcacctatgtattatcggggatccgcggcggccgttattgtgtacgatatcaccaagcaggattccttctatactctgaagaagtgggtgaaagaactgaaagagcacggtcccgagaacatagtgatggccatcgcagggaataaatgtgatctctctgacatccgcgaggttcccctgaaagacgcgaaagagtacgctgagagcatcggagccatcgtggtggaaaccagtgccaaaaacgctatcaatattgaggagttgttccaaggtatttcccgccagatcccccccttggaccctcacgagaacggtaacaatggaaccattaaagttgaaaagccaaccatgcaggcctcgagaaggtgttgttag

SEQ ID NO: 202296 - DNA, 678 bp, synthetic construct
  misc_feature 1..678: note = Description of Artificial Sequence: Synthetic coding sequence
  source 1..678: mol_type = other DNA
atggccggcggcggcgccggcgaccccggcctgggcgccgccgccgctcccgccccagaaacacgagagcatttgttcaaggtactggtaatcggcgaattgggcgtggggaagaccagcattataaaaaggtacgtccatcagctgttcagccagcattaccgggctactataggcgtggattttgctctgaaggtcctaaattgggacagcaggacactggtgagactccagctgtgggatattgcgggccaggagcggtttggcaatatgactagagtgtactacaaggaagcagtgggcgcttttgtggttttcgacatctcacgcagtagcacattcgaagcagtgttaaaatggaagagcgacctggactctaaagtacacctgcccaacggatcaccaatcccggccgttctgctggctaacaagtgtgatcaaaataaggattcctcacagagcccttcccaggtggaccagttttgtaaggagcatggctttgccgggtggtttgagacatcagcgaaggataacataaacatagaggaagctgcccggtttctggtggagaaaattctagtgaatcaccaatctttccccaatgaggaaaacgacgtcgataagatcaagttagaccaggaaactctcagagccgagaacaaatctcagtgctgttag

SEQ ID NO: 202297 - DNA, 714 bp, synthetic construct
  misc_feature 1..714: note = Description of Artificial Sequence: Synthetic coding sequence
  source 1..714: mol_type = other DNA
atggcccagcccatcctgggccacggcagcctgcagcccgccagcgcagccggactcgcctccttggaactggattcttctctggaccagtatgtccagatcagaatctttaagattatcgttatcggggacagtaatgtaggcaaaacgtgtctgacctttcgattttgtggtggaactttccccgacaagaccgaggccacaattggagtagacttcagggagaagactgtagagattgagggagagaagatcaaggtgcaggtttgggacacggctggacaagaacgcttccgtaagtcgatggtggaacactattataggaacgtgcacgccgtggtttttgtttacgacgtgacaaagatgacgtcctttacaaatctgaagatgtggatccaggaatgcaacgggcatgcagtgcctccgctggtcccaaaggtactggtggggaacaagtgcgacttgcgcgaacaaatccaggtcccttctaatctggctctcaagtttgctgacgcgcataacatgctgctcttcgagacctctgcaaaggatcccaaggagagccagaatgtggaatctatcttcatgtgtctggcttgcaggctaaaagcccagaaatctttgctgtacagagatgcagagaggcagcaagggaaagtccagaaattggagttcccgcaggaggccaactcaaagacctcttgtccctgctag

SEQ ID NO: 202298 - DNA, 714 bp, synthetic construct
  misc_feature 1..714: note = Description of Artificial Sequence: Synthetic coding sequence
  source 1..714: mol_type = other DNA
atgaacatcctggcccccgtgcggcgggaccgggtgctggccgagctcccccagtgcttgcgcaaggaagctgctctgcacggtcataaggactttcatccaagagttacctgcgcatgccaggaacacagaactggcacggtaggcttctgcaaggacaccttcgacaagaattacaaagctacaattggggttgattttgagatggagcggttcgaggtgctaggtatcccgttctccttgcagctctgggatactgcaggacaggagagattcaaatgcattgctagcacttattacaggggcgctcaggctataatcattgtgtttaatcttaatgacgtagcatctctggagcacaccaagcagtggctcgcagacgcactcaaagaaaacgaccctagctctgtgttattgtttctggtcgggtcaaaaaaagacttgtccactcccgcccagtacgccttgatggagaaggacgctctgcaagtggctcaagaaatgaaagccgagtattgggcagtgtcatcattaaccggcgagaatgtacgggagtttttcttccgagtggcggcactgacatttgaagcaaacgtgttggcggaactggagaagagtggcgctcggcgcatcggggatgtggtgcgcattaattcagatgacagtaatctatatctgactgcctcaaaaaagaagccaacatgttgtccttag

SEQ ID NO: 202299 - DNA, 780 bp, synthetic construct
  misc_feature 1..780: note = Description of Artificial Sequence: Synthetic coding sequence
  source 1..780: mol_type = other DNA
atgaacatcctggcccccgtgcggcgggaccgggtgctggccgagttgccccaatgcttgcgtaaagaagcagcgcttcacggacataaggacttccacccaagggtgacttgcgcctgccaggagcacaggactggcaccgttggattcaagatcagtaaggtgatagtggttggcgacttatcagtaggcaagacttgcctcatcaaccgcttctgcaaagacacattcgataagaactacaaagcgacaatcggcgtcgactttgagatggaacgcttcgaggtactcgggatccccttttctcttcagctgtgggataccgcaggacaggagagattcaagtgcatcgcctctacatattaccggggagcacaggcaatcatcatcgtcttcaacctaaacgatgttgcatccctagaacacactaaacagtggctggctgatgctctcaaagagaatgacccctcctcagtcctgctcttcctcgtgggaagcaaaaaggacctgagtactcccgcccagtatgccctcatggagaaggatgctttgcaggttgcacaggagatgaaagcagaatactgggctgtctcttccctgaccggggaaaacgtgagggaattttttttcagagtagcagctctgacgtttgaggcgaatgtgctagccgagcttgagaaatctggcgctcgtcgaatcggagacgttgtccggatcaactcagacgactctaacctttatctgactgcgtctaagaaaaagccaacgtgctgtccttag

SEQ ID NO: 202300 - DNA, 636 bp, synthetic construct
  misc_feature 1..636: note = Description of Artificial Sequence: Synthetic coding sequence
  source 1..636: mol_type = other DNA
atgaacatcctggcccccgtgcggcgggaccgggtgctggccgagctgccacagtgtctgcgtaaagaagccgcactccatggccacaaggactttcatccccgcgtcacttgtgcctgccaggaacatcggactggaactgtgggttttaagatttcgaaagtgattgtggtcggggacctctctgtaggtaagacttgcctgattaataggttttgcaaagacacgtttgataagaactataaggctaccattggcgttgacttcgagatggagcgctttgaagttctcgggataccatttagccttcagttatgggacacagctggacaagaacgctttaagtgtatagcctcaacttattatcgtggtgcccaggccattatcatcgtcttcaatcttaacgatgtcgcaagcctagagcataccaaacagtggctggccgacgccttgaaagaaaatgacccctcgagcgtgctcttgttcttggttggcagtaaaaaagatctgagcacccctgcccaatacgccttgatggaaaaagatgccctgcaagtagcccaggaaatgaaagctgagtactgggccgtcagtagccttactggggagaatgtgcgcgagttttttttccgttag

SEQ ID NO: 202301 - DNA, 756 bp, synthetic construct
  misc_feature 1..756: note = Description of Artificial Sequence: Synthetic coding sequence
  source 1..756: mol_type = other DNA
atgaacatcctggcccccgtgcggcgggaccgggtgctggccgagttgccccaatgcctccggaaagaggccgccttgcatggtcacaaggactttcaccctagggtgacttgcgcttgtcaggaacaccgaactgggacagtcggattcaagatctctaaagttatcgtggtgggcgatctgtctgtgggcaaaacatgcctgatcaaccggttttgcaaggataccttcgacaaaaattataaagccaccatcggagtggacttcgaaatggaacggttcgaggtcctgggtatccccttttccttacagttgtgggataccgcaggccaagagcgttttaagtgcatcgcaagcacctattataggggcgcccaggccattatcatcgtgtttaaccttaacgacgtagcctccctagaacatactaaacagtggttggccgacgcccttaaggaaaacgacccctcatcagtgttattattcttaacccctgcccagtatgccctgatggagaaggatgccctgcaggtcgcacaggagatgaaagcagagtactgggccgtgagctcgctgaccggagaaaacgtccgggagttctttttcagggtggcagctctgacgtttgaggccaatgtacttgctgagctggaaaaatctggtgcccgtcggatcggcgacgtcgttcggataaactcggacgattcgaacctgtacttgaccgcttcaaagaagaagcctacgtgctgcccctag

SEQ ID NO: 202302 - DNA, 780 bp, synthetic construct
  misc_feature 1..780: note = Description of Artificial Sequence: Synthetic coding sequence
  source 1..780: mol_type = other DNA
atgaacatcctggcccccgtgcggcgggaccgggtgctggccgagcttcctcagtgtttacgcaaggaagcggccctgcacggccataaagactttcaccctagagtgacatgcgcatgtcaggagcaccgcaccggcaccgtcggtttcaaaatcagcaaggtgatcgttgtgggagatctgtcagttggtaagacctgtcttattaatagattctgcaaggacacctttgacaagaattataaggcgactatcggcgtggatttcgaaatggagagattcgaagttctcggaatccccttttctctccagctgtgggatacggctggacaggagaggtttaagtgcatcgcgtccacatactaccggggcgcacaagccatcatcattgtgttcaatctgaatgacgtagcctcactggaacataccaaacagtggctcgccgacgcgttaaaagagaacgacccttcttctgtgttattattccttgtaggctccaaaaaagacttgtccaccccggcccagtatgccctgatggagaaggatgctctccaggtagcccaggagatgaaagctgagtattgggccgtgagtagtctgaccggcgaaaatgttagggaattcttcttcagagtagcggcactgaccttcgaggcaaatgtgctggccgaacttgagaagtccggagcacggcggatcggggatgtggtacgaattaattcagatgactctaacctgtacctaacagcatctaaaaagaaacctacctgctgcccgtag

SEQ ID NO: 202303 - DNA, 636 bp, synthetic construct
  misc_feature 1..636: note = Description of Artificial Sequence: Synthetic coding sequence
  source 1..636: mol_type = other DNA
atgaacatcctggcccccgtgcggcgggaccgggtgctggccgagctgccacagtgccttcgcaaggaggctgctctccacggtcataaagacttccaccctagagtaacctgcgcatgtcaggagcaccgaaccgggacagtggggtttaagatttcaaaagtgatcgtggtaggggacttgagcgtgggaaagacttgtttgattaatcgcttctgcaaggatacatttgataagaattacaaggcaaccataggtgtggattttgaaatggagaggtttgaggttctgggcatcccttttagcctgcagctgtgggataccgctggccaggagcgctttaaatgtatcgcatctacttattacaggggggcccaggccattatcatcgtgtttaacctgaacgacgtggcaagtctcgagcacacaaagcagtggctagccgacgctctgaaggagaatgacccaagtagcgtgctgttatttcttgtaggatcaaagaaagatctgagtaccccggcacagtatgcgctgatggaaaaggacgccctccaggtcgctcaggaaatgaaggcagaatattgggccgtgagcagtctgacaggagaaaacgtgagggagtttttctttagatag

SEQ ID NO: 202304 - DNA, 696 bp, synthetic construct
  misc_feature 1..696: note = Description of Artificial Sequence: Synthetic coding sequence
  source 1..696: mol_type = other DNA
tgaagcctgcggttccccatcaccaacagcgccggcgccccctgcaaagcagcaggaagaatgaacattttggcacctgtgcgcagggatcgcgtgctcgcagagttaccccaatgcctgcgaaaggaagccgccctgcacgggcacaaagacttccatccacgcgtgacttgcgcatgccaggaacacaggacagggacggtggggcgtttcaaaatcagcaaggttatcgtggttggagacctgagcgtggggaaaacttgtcttatcaacaggttctgcaaagacaccttcgacaaaaactacaaagcaactattggtgtggacttcgaaatggaaagattcgaagtgctgggtataccatttagtcttcagttgtgggatactgcagggcaggaacgttttaagtgtatcgcttctacttactacaggggcgcccaagctattatcatcgtgtttaacctgaacgacgtggcctcactggaacatacgaagcagtggctagccgacgcactgaaggaaaacgacccatcatccgttcttctgttcttggtcgggtctaagaaagatctgtcaacaccagctcagtatgcgctcatggagaaggacgctctccaagtcgctcaagaaatgaagaccgtccagcgtctgccctcaccaagagccctgtgtcatccacattcgtctcgcgcctag

SEQ ID NO: 202305 - DNA, 951 bp, synthetic construct
  misc_feature 1..951: note = Description of Artificial Sequence: Synthetic coding sequence
  source 1..951: mol_type = other DNA
atgagccacctgcccggcctggagctgcggcgggaggccccccccctcctcggccccctgctctccccctttcctcttcccgcagggtcctggcaccgtcagatgctgcgcagctcactgcgctttcccatcaccaattcagcaggtgccccttgtaaggcagcaggacggatgaacatacttgccccagtgcggagggatagggttttagctgagttgcctcaatgtcttcggaaggaagccgctttacatggccacaaagactttcaccccagggttacctgtgcttgccaggagcataggacaggcacggtgggctttaaaatatccaaggtcattgtcgtgggagacctctcagttggtaagacctgcctgatcaaccgcttttgtaaagacacattcgataagaattataaggcaaccattggggtggatttcgagatggaacgcttcgaagtcctggggatccccttttcccttcagctgtgggatacggctggacaggagcgctttaagtgcatcgccagcacctattataggggggctcaagcaatcatcatagtgttcaatcttaacgacgttgcctccttggaacatacaaagcagtggttggcggatgccttgaaggagaacgatcccagctcagtgctgctgttcctggtgggcagcaaaaaagacctcagtacgcctgctcagtatgccctgatggagaaggatgccttgcaggtggcccaggagatgaaagccgaatactgggccgtatccagtctaactggcgagaacgtccgagagttctttttcagagtcgcggcgctgacattcgaagctaacgtcctggccgagctagaaaaatctggggctaggcgtattggcgacgtcgttcggatcaacagtgatgacagtaacctgtatctgaccgcctcaaaaaagaaacccacatgctgtccctag

SEQ ID NO: 202306 - DNA, 825 bp, synthetic construct
  misc_feature 1..825: note = Description of Artificial Sequence: Synthetic coding sequence
  source 1..825: mol_type = other DNA
atgctgcggagcagcctgcggttccccatcaccaacagcgccggcgcgccatgtaaggccgccggccgtatgaacatactcgcacctgtgcgacgcgatagggtgctggccgaattgccacagtgcctcaggaaggaggccgcccttcatgggcataaggacttccaccccagagttacttgcgcgtgccaggaacatcgtactggcacggtcggatttaagatctccaaagtgatcgtggtgggggatctaagtgttggcaaaacctgcctcatcaacagattctgtaaggatacttttgacaagaattataaggccaccataggggtcgattttgaaatggagcgtttcgaggtcctggggatacccttcagcctccagctgtgggatacggctggccaggagcgctttaaatgtatcgcttctacttattatcgtggcgcccaggccataatcatcgtatttaatctaaacgatgtggcgtcactggaacacaccaaacagtggttggcagacgctttaaaggagaatgaccccagcagtgtgctgctcttcttgacacctgcccaatacgccttgatggaaaaggatgctcttcaagtagctcaggagatgaaggctgaatactgggccgtgtcttcattgaccggtgaaaatgtacgggagtttttcttcagagtagctgccctcacatttgaagccaacgtcctggccgagcttgagaaaagtggagcccggaggatcggcgacgtggttaggatcaattctgacgactccaacctgtacctgacagcaagcaaaaagaaacctacgtgctgtccctag

SEQ ID NO: 202307 - DNA, 807 bp, synthetic construct
  misc_feature 1..807: note = Description of Artificial Sequence: Synthetic coding sequence
  source 1..807: mol_type = other DNA
atgagccacctgcccggcctggagctgcggcgggaggccccccccctcctgggtcccctcctgagtcccttccccctgccagccggctcttggcaccggcaaatgctgagatccagtctgcgattcccgattacaaattcagccggtgctccctgcaaggcggccggccgcatgaatatcctggcacccgtgcgccgggaccgcgtacttgccgagctaccccagtgtctgcggaaggaagcagcactccacggccacaaggactttcatccccgcgtgacatgcgcctgccaagaacatcgaacaggaactgtggggcgctttaaaatcagtaaagttatcgtagtgggcgatctgagtgtcggaaagacatgtctaatcaatcgcttctgcaaagacaccttcgacaagaattataaggcaactataggggtcgattttgaaatggaaagatttgaagttctcgggattccatttagcctgcagctttgggatactgctggacaggagaggttcaagtgtatcgcctctacgtactacagaggtgcccaggccattattatagtgtttaaccttaacgatgtggccagtctcgagcacacaaagcagtggttggcagatgccctaaaagaaaacgacccctccagcgtcctgctgtttttggtggggtccaaaaaagatttgtccacgcccgcacagtacgctttgatggaaaaggatgcattacaggtcgcccaggagatgaaaaccgtccagaggttaccctctcccagggccctctgtcatccccacagctcccgcgcctag

SEQ ID NO: 202308 - DNA, 1002 bp, synthetic construct
  misc_feature 1..1002: note = Description of Artificial Sequence: Synthetic coding sequence
  source 1..1002: mol_type = other DNA
atggtgatcgccggcgccagctggatgctgggccgggccgccgccagccctacccaaacaccaccaactacgagcactattagggtcgctaggaggagcagagttgccctcgtggctatggttattgccgctgcagggtcagggggaccaggcagagccgagccacagctgtcccagcctagtctggattgcggacgaatgcggagtagtctcaccccactcgggcctccggtgtcaagagaccgtgtgatcgccagctttccaaagtggtatacaccagaagcctgcttgcaactgcgcgaacatttccatggacaagtctccgctgcctgtcagaggcggaatacgggcactgtcggcttaaagttgtcaaaagtggtcgtcgttggggatctgtacgtgggcaagacttccctcatccataggttctgcaagaacgtcttcgaccgtgactacaaagccaccatcggagtcgacttcgaaattgaacggtttgaaattgccgggatcccctactctctgcagatttgggataccgccgggcaggaaaagttcaagtgcatagctagcgcctactaccggggagcacaggttattatcactgcctttgatctgactgatgtgcagacactggagcacacccgccagtggttggaagatgccctaagggagaatgaagcaggctcctgcttcatttttcttgtgggaacaaagaaggacctgctttccggagctgcttgtgagcaggcagaagccgatgctgtccaccttgcacgagagatgcaggctgaatattggtctgtgagcgctaagacgggtgagaatgtgaaggcgtttttcagtagggtggccgccctcgccttcgagcagtccgtcttgcaggacctggaacgacagtcttctgcgcgactgcaggtcggaaatggtgacttgatacaaatggaaggtagcccccctgaaacccaggaatctaagagacccagttctctgggctgctgctag

SEQ ID NO: 202309 - DNA, 936 bp, synthetic construct
  misc_feature 1..936: note = Description of Artificial Sequence: Synthetic coding sequence
  source 1..936: mol_type = other DNA
atggtgatcgccggcgccagctggatgctgggccgggccgccgccagtcccacgcagacccctcccacaactagcacgatccgggtggcccgacggtcccgtgtggccctggtcgccatggtgatcgcagccgccggctctgggggcccggggcgggccgagccgcagctttcccagccctcattggattgtggccggatgcggagtagcctgaccccacttgggcctcccgtgagccgggatcgggtcattgccagtttcccaaagtggtatacccccgaggcatgcctgcagctgcgcgagcactttcacggtcaagtgagcgcagcctgccagaggaggaatactggcaccgtgggattctgcaagaacgtgtttgatcgggattataaggccaccattggagtagattttgaaatcgagaggttcgagattgccggaatcccttacagcctacagatttgggacacagccgggcaagagaaattcaagtgcattgcctctgcctactatcgcggcgctcaggtgatcataaccgcatttgacttaacagatgtgcaaacattggagcatactcggcagtggttggaagacgcgttgcgggagaatgaggctggctcttgttttattttcctggtaggtacaaagaaggatttgttgtccggggctgcatgcgaacaggctgaagctgacgccgtgcacctggccagggaaatgcaagcagaatattggagcgtgtcagctaagacaggggaaaacgtcaaggccttttttagcagggtggccgccctggcattcgagcagtctgtcctccaagacctggaacgacagtctagcgctagactccaagttggcaatggcgatctgattcaaatggaaggtagcccgccggagacgcaggagtctaagagaccctccagcctgggatgttgttag

SEQ ID NO: 202310 - DNA, 498 bp, synthetic construct
  misc_feature 1..498: note = Description of Artificial Sequence: Synthetic coding sequence
  source 1..498: mol_type = other DNA
atggtgatcgccgccgccggcagcggcggccccggccgggccgagccgcagctctcccagccgtccctcgattgcggacgcatgaggtcctcactcaccccgctcggccctcctgtgagccgtgacagagtcatcgcctccttccctaagtggtacacccccgaggcttgcttgcagcttagagagcatttccatggtcaggtgtctgctgcatgccagcggaggaatactgggactgttggactgaagctgtccaaagtggtagtcgtaggagatctttacgttggtaagacctccttgagtgcacaatatgcccatcctcagggctttctcacagctatgaaccagccacactctccacgccccctaagtccgggctatgcccattccagccacccttctagagcggtcgctagtaggaggtggagagctccctgcagacaaccgagcgatcagtactgtagcccccgagcatggcacacagcggccgccctgtag

SEQ ID NO: 202311 - DNA, 549 bp, synthetic construct
  misc_feature 1..549: note = Description of Artificial Sequence: Synthetic coding sequence
  source 1..549: mol_type = other DNA
atggacctgcagcggcccgacagctaccagggcggcgccggccccgacttcaacgatcatgtgctgcacaaaactattctggtaggagattctggcgtcggaaagacctccctgctcgtgcagttcgatcagggaaaattcatccccgggtctttcagcgctaccgttggtatcggattcactaacaaagtagtgactgttgatggagtcagagtgaagctccaaatatgggacactgccgggcaggagcggttccggtccgtcacacatgcttattatcgggacgcacaggccctgctcctcctgtatgacatcactaacaaaagcagcttcgacaacatcagggcctggctaactgagattcatgaatacgcccagcgtgatgtagtcattatgctgctggggaataaggctgatatgtcctccgaacgggtcatacgcagtgaggatggggagactctggcacgcgagtatggggtcccatttctggagacttctgccaagacggggatgaatgttgagctcgccttccttgccattgcgaaatag

SEQ ID NO: 202312 - DNA, 570 bp, synthetic construct
  misc_feature 1..570: note = Description of Artificial Sequence: Synthetic coding sequence
  source 1..570: mol_type = other DNA
atgaccggcacccccggcgccgtggccacccgggacggcgaggccccggaacggtcccctccctgctcacccagttatgatctcacgggcaaggtgatgctgctcggggataccggggttggcaagacctgcttcctaattcagtttaaagacggggctttcctgtcaggtactttcatcgctacagttggcatagattttagaaacaaagtcgtaacagttgatggcgtgagggtcaagctgcagatctgggataccgctgggcaggaaagattcagaagcgtgacacacgcttactacagggacgcacaagcattgctgctcctgtacgacatcactaacaaaagctccttcgacaacatccgggcctggctcaccgagattcacgaatacgctcaacgcgacgttgttattatgctgctgggaaataaagctgatatgtcaagtgagagagttattaggagcgaagacggcgaaactctggccagggagtatggggtgccgtttctggagacttctgcaaaaacagggatgaatgtggaactagctttcctggcgattgctaagtag

SEQ ID NO: 202313 - DNA, 561 bp, synthetic construct
  misc_feature 1..561: note = Description of Artificial Sequence: Synthetic coding sequence
  source 1..561: mol_type = other DNA
atgaccggcacccccggcgccgtggccacccgggacggcgaggccccggaacgatcgccaccatgttccccatcatacgatctgaccggcaagaacaaggtagtcaccgtcgatggggtgagagtcaagcttcagatttgggacacagccggacaggagcgcttcagatctgtgactcatgcatattaccgcgacgcacaagctctccttctgctgtacgatatcactaacaaatcttcattcgataatattcgcgcctggctcactgaaattcacgaatacgcacaaagggacgtggtcatcatgctgttaggcaacaaggccgacatgagttcagaacgcgtcatccgctctgaagatggtgagactttggccagggagtacggcgtgccctttctggagacaagcgcaaagactggtatgaacgtagaactggccttcttggcaattgcgaaggagctgaagtatagagccggtcatcaggccgacgagccctcgtttcagatacgtgactatgtggagtcccagaagaagcgatcctcctgctgttccttcatgtag

SEQ ID NO: 202314 - DNA, 672 bp, synthetic construct
  misc_feature 1..672: note = Description of Artificial Sequence: Synthetic coding sequence
  source 1..672: mol_type = other DNA
atgaccggcacccccggcgccgtggccacccgggacggcgaggcccccgaaagatctccaccatgtagtccctcatatgacttaaccgggaaggttatgttactcggcgacaccggcgtcggcaagacatgcttcctgatccaattcaaagacggagccttcctgtcaggcacgttcatcgccactgtggggattgatttccgaaataaggtggtgacagtggacggagtgcgcgtaaaacttcagatttgggatactgctgggcaggagaggtttcggagtgtgacacacgcctattatagggacgctcaagctctgctccttctttacgatattacaaacaagtcatctttcgacaatatccgggcctggctgacggagattcatgaatatgcgcaaagagacgtggttataatgctgctcggaaataaagccgatatgagcagcgagcgagtcattcgaagcgaagatggggaaactctggctcgcgaatatggggtgccctttctcgaaaccagcgccaagaccggtatgaacgtggaattggcatttctggcaattgcaaaggaactaaaataccgtgccgggcaccaggcggatgagcctagcttccagatccgagattacgtggagtctcagaagaaaagaagtagctgttgtagcttcatgtag

SEQ ID NO: 202315 - DNA, 687 bp, synthetic construct
  misc_feature 1..687: note = Description of Artificial Sequence: Synthetic coding sequence
  source 1..687: mol_type = other DNA
atgtggctgatgagcgaggcccacggcgccgagcccgtgctgctgagggaggcagcaagaccgtttacccagaccctgcggctttgcgtgcccagcggtaatagtaaggtcatgctgttgggagatactggagtgggcaagacgtgcttccttatacagtttaaagacggggccttcctttccggcactttcatagctactgtcggaatcgactttcgtaacaaagttgtgactgttgacggagtgagggtcaagctgcagatatgggacaccgctggacaggagagatttagatcagtaacccatgcatactacagagatgcccaggcactgctgttactgtatgacatcacaaacaaatcctccttcgacaacatccgggcctggctgacggagatacatgagtacgcgcaacgggacgtagtcatcatgctgctagggaataaggcggacatgtcctctgagagagtgatccggtcggaggacggcgaaacactggccagggaatacggggtgcctttcctcgaaaccagcgcaaagaccggaatgaatgtggagttggccttccttgcaatcgccaaggagcttaagtatagagctggacatcaagccgacgagccctctttccagattcgtgattacgtggaatcacaaaagaaacggagcagttgctgctcatttatgtag

SEQ ID NO: 202316 - DNA, 576 bp, synthetic construct
  misc_feature 1..576: note = Description of Artificial Sequence: Synthetic coding sequence
  source 1..576: mol_type = other DNA
atgtggctgatgagcgaggcccacggcgccgagcccgtgctgctgcgggaggcagcccgaccattcactcagaccctgagactatgcgttcctagtggtaactctaagaacaaggtggtcacggtggacggggtgcgagtaaaattgcagatctgggatactgctgggcaagaacggttccgcagcgtcactcacgcttattaccgagacgcacaggccctgttactcttgtacgatatcacaaacaagtcgtctttcgacaatattcgagcttggctgaccgagatccacgagtacgcccagcgtgatgtggtgattatgcttctgggcaacaaggccgacatgagctccgagcgcgtgattaggagcgaagacggtgaaacactggcgcgagagtacggtgtgccattcctcgagacctccgcgaaaaccgggatgaatgtggagctcgccttcctcgccatcgccaaggagttaaagtaccgcgccgggcatcaagctgacgaaccctcattccagatccgggattatgtagaatctcagaaaaaaagaagctcttgttgctcctttatgtag

SEQ ID NO: 202317 - DNA, 510 bp, synthetic construct
  misc_feature 1..510: note = Description of Artificial Sequence: Synthetic coding sequence
  source 1..510: mol_type = other DNA
atggacctgcagcggcccgacagctaccagggcggcgccggccccgattttaacgatcacgtgctgcacaagaccatcttagtgggcgatagcggtgtgggaaaaaccagccttttagttcagttcgatcaaggaaagttcataccaggctccttctccgctacagtggggataggcttcactaataaagtagttacagtggatggcgtgcgagtcaagcttcaaatttgggatacggccggtcaggagagatttagaagtgtcacacatgcttattaccgagacgctcaagccctgcttctgctgtacgacatcaccaacaagagctctttcgacaacatccgagcctggctgactgaaatacacgagtacgcccagagggacgtggtcataatgctacttggaaataaggtgtctggtagcggagccggaagcgctcaaccgtgcacgtcttccgctcttgcagggcccataactactcaggagcagttaagcagacatcctagctag

SEQ ID NO: 202318 - DNA, 651 bp, synthetic construct
  misc_feature 1..651: note = Description of Artificial Sequence: Synthetic coding sequence
  source 1..651: mol_type = other DNA
atggacctgcagcggcccgacagctaccagggcggcgccggccccgacttcaacgaccacgtcctccacaaaaccatcctcgtgggggactccggtgtggggaaaacatctctgttggtccagtttgatcaaggcaagtttattccaggaagtttttccgccactgttgggattggtttcactaacaaggtcgtgactgttgacggagtgagagtgaagcttcagatctgggacactgccggtcaggagaggttcagaagtgtcacccatgcttattaccgcgacgcccaagctctcctactactctatgacattactaataaatcttccttcgataatatcagggcctggctgactgagatccacgagtacgcccagcgcgacgtcgttattatgctgctggggaacaaggcagacatgagtagtgaacgtgttattaggagcgaggacggagaaacacttgcccgagagtacggcgttccatttctggagacatccgcgaaaaccggaatgaacgtcgaactggccttcctggcaatcgctaaggagctgaaatatagggctggccaccaagcagacgaaccatcttttcagatccgcgattacgtggagtcccaaaaaaagcggtctagctgctgtagctttatgtag

SEQ ID NO: 202319 - DNA, 651 bp, synthetic construct
  misc_feature 1..651: note = Description of Artificial Sequence: Synthetic coding sequence
  source 1..651: mol_type = other DNA
atggacctgcagcggcccgacagctaccagggcggcgccggccccgacttcaacgatcacgttttgcacaaaaccatcttggtgggcgacagtggagttggaaagacatccttactggtgcagttcgaccaaggcaagttcatccccggctctttttctgctacagtcggaatcggctttacaaacaaagtagtcacggtcgacggagttagagtgaaactgcagatatgggacactgccggccaggagagatttcgatcagtgacccacgcctactaccgggatgcgcaagctctgttgttgctgtacgacatcaccaataagtcaagcttcgataatatccgcgcatggctcacggaaattcacgagtatgcacagcgtgacgtagtgatcatgctgttaggcaacaaggccgacatgtcttccgaaagggtcatacggtccgaggacggcgaaacccttgctcgggagtacggcgttccttttttagaaacttccgctaaaaccggaatgaatgtggaattggcatttctggcgatcgctaaggagcttaagtacagagccggccatcaggcagatgagccaagcttccaaattagagactacgtggagtcccagaaaaaacgctctagctgttgttcatttatgtag

SEQ ID NO: 202320 - DNA, 672 bp, synthetic construct
  misc_feature 1..672: note = Description of Artificial Sequence: Synthetic coding sequence
  source 1..672: mol_type = other DNA
atgaccggcacccccggcgccgtggccacccgggacggcgaggcccctgagcggtccccgccatgcagcccttcctatgatctgaccggaaaggtgatgttgttgggggacactggagtgggtaagacttgctttctgattcagttcaaagacggcgcttttctgagtggaacattcattgctaccgtcggcatcgactttcgaaataaagttgtaacagttgacggagttcgggtgaagctacaaatttgggacaccgcagggcaggagaggtttagatcagtgacacacgcctactacagagacgcgcaggctctgctgctcctctatgacatcaccaataagagctcatttgacaatattagagcctggcttaccgaaattcacgaatacgctcagcgcgatgtggtcatcatgctcttgggtaacaaagctgatatgtcttcagaaagagtcattagatcagaggatggtgagaccctggctagagaatacggggtgcctttccttgagacttcggccaaaacaggtatgaacgttgagttggctttcctagctatagcaaaagagttaaaatatcgtgctgggcatcaggcagacgaaccatctttccagatccgggattacgtagagagccagaagaagcgaagctcttgctgttcgtttatgtag

SEQ ID NO: 202321 - DNA, 591 bp, synthetic construct
  misc_feature 1..591: note = Description of Artificial Sequence: Synthetic coding sequence
  source 1..591: mol_type = other DNA
atgtgctgcaaggtgatgctgctgggcgacaccggcgtgggcaagacatgctttctgatccagtttaaagatggcgcctttctaagtggcacctttatcgctaccgtgggcatcgattttcgtaataaagtggtcaccgtggacggcgtccgcgtgaagctgcagatttgggacacggccggtcaagaacgatttcggtccgtcactcacgcctactatcgcgacgctcaagcattgctgctgttgtacgatattacaaacaagagctctttcgacaacatacgagcctggttgaccgaaattcatgaatatgctcagcgggatgtcgtgattatgctgctggggaacaaggccgatatgagcagcgaacgcgtgattcggagtgaggacggggaaacgctcgcccgggagtacggcgtaccatttctcgagacgtctgcaaagacgggtatgaacgtcgaactggcattcctcgctatagccaaagaactaaaatatagagctggacatcaggctgatgaacccagctttcaaatcagagattacgtcgagagccagaagaagcggtcgagctgttgtagttttatgtag

SEQ ID NO: 202322 - DNA, 636 bp, synthetic construct
  misc_feature 1..636: note = Description of Artificial Sequence: Synthetic coding sequence
  source 1..636: mol_type = other DNA
atgcaggccccccacaaggagcacctgtacaagctgctggtgatcggcgatctcggtgtgggaaaaacaagcataatcaaacgctatgtccaccaaaattttagttcacactatagagcaactattggtgtggacttcgccctgaaagtgctgcattgggaccccgagactgtagtcagactccagctgtgggacattgctgggcaggaacggtttggcaacatgactcgcgtctattaccgggaggctatgggggctttcatcgtgtttgatgttactaggcccgcaactttcgaagccgttgccaaatggaaaaacgacttagactcaaagctctccctgccaaacgggaaaccggtcagcgtggtgctacttgctaataaatgtgatcagggcaaggatgtactgatgaacaacggacttaagatggaccagttttgtaaggagcacgggtttgtggggtggtttgagaccagtgcaaaggaaaacattaacatcgacgaggcaagtcgatgcctcgtgaaacacattttggccaacgagtgtgacttgatggagagcatagaaccggatgtcgttaagccgcacctcaccagtaccaaggtcgcatcttgctctggatgcgccaaatcatag

SEQ ID NO: 202323 - DNA, 642 bp, synthetic construct
  misc_feature 1..642: note = Description of Artificial Sequence: Synthetic coding sequence
  source 1..642: mol_type = other DNA
atggaggccatctggctgtaccagttccggctgatcgtgatcggcgacagcaccgtgggaaagagttgcttgattagaagattcacagaaggtaggtttgctcaagtaagcgacccaacagtgggggtcgattttttctctcgtttagtggagatagagccaggcaagcggattaagcttcagatctgggacaccgccggacaggagaggtttaggtcaataacccgcgcatattatagaaacagcgtcggaggcctgcttctcttcgacattacaaatcgtcggagtttccaaaatgtgcacgagtggttagaggaaaccaaggtgcacgtacagccttaccagattgtcttcgttctggttggccacaagtgcgatctcgacacccagcggcaggttaccaggcacgaagccgagaaacttgccgctgcctacggcatgaaatacattgagacctctgcccgggatgcaatcaatgtggagaaggccttcaccgaccttactcgagatatttatgagcttgtaaagcgaggtgagattaccatacaggagggatgggagggagtcaaatctgggtttgtacccaatgtggtgcactcaagtgaggaggtggtgaagtccgagcgccggtgcctttgctag

SEQ ID NO: 202324 - DNA, 2187 bp, synthetic construct
  misc_feature 1..2187: note = Description of Artificial Sequence: Synthetic coding sequence
  source 1..2187: mol_type = other DNA
atggccggccccgagggcttccagtaccgggccctgtaccccttcagaagggagagacctgaggacctggagctgttgcccggagacgtcttagtagtatctcgtgctgcactgcaggctctgggggtggctgaaggcggggagcggtgtcctcagagcgttgggtggatgcctggcctgaacgaacggactcgccagcgcggggactttcctgggacttacgtggagttcctgggcccagtggcactggcaagacccgggccgcgacctaggggcccaaggcccctgcctgcccggccccgggacggagcccctgagccaggtctaacactccccgatctaccagaacagttcagccctcccgacgtggccccaccgctgctcgtaaaactcgtggaggccatcgaacggacaggcctagattctgaatctcactaccggcctgaattaccagcccctagaacggactggtctttatctgatgtggatcagtgggacacagccgctctggccgatggcatcaaatcattcttactggcactaccggcccctctggtgactcccgaagcctctgccgaggcgaggcgagcactccgtgaagcagcaggccccgtgggtcctgctcttgagcccccaactttgcccctgcacagggccctcacattgcgattcctcttacagcatctggggcgcgtcgcatccagggctcctgccctcggacctgcggtgcgggccttaggggcaacattcggtccactcctgctgcgagctcctcctcctcccagttctccgcctcccgggggggcaccagatggttcggaaccctctcctgacttcccagcactcctggtagagaagttactccaggaacacctagaggagcaggaggtggctccgcctgccctgccccctaagcccccaaaagccaagcctgcttccaccgtactggcaaacggtggatctcccccttcgctccaggatgcagagtggtactggggcgatattagcagagaagaggtgaatgaaaaactgcgcgataccccagatggaacatttctggtgcgcgatgcctcttcgaaaatccaaggggaatacacgctgacccttcgaaaggggggcaacaacaagctgataaaggtgttccaccgcgatggccattatggattttctgaaccattgactttctgttccgtggtagacttaattaaccactacagacatgaatccctggcacaatacaatgccaagctggacacgaggttgctttacccagtgtcaaaatatcagcaggaccagatcgtgaaagaggattcagtcgaggcggtaggtgcacagctcaaagtgtatcaccagcaataccaggataaaagccgggagtacgaccaattgtatgaagaatatactagaacaagccaggaactgcaaatgaaacgaaccgcaattgaagcatttaacgaaacaatcaagatcttcgaggagcagggccaaacccaggaaaagtgttccaaagaatatttggagcgattcagaagggaggggaatgaaaaagagatgcagcgaattctgctgaactctgagaggttgaaatccagaatcgccgagatccacgagtcccggactaagctggagcaacagctacgggctcaggcatccgacaacagagagattgacaagcgcatgaactcactcaagcctgatctcatgcagctgagaaaaatcagggaccagtacctagtgtggctcactcagaaaggagcgcgacagaaaaagataaacgagtggctggggattaagaatgagacagaagaccagtatgccttgatggaagatgaggacgacctgccccatcacgaagagcggacttggtacgtcggcaaaattaaccggacccaagcagaggagatgctctctggaaagcgcgatgggacattcctcatccgggaatcctcccagcggggatgttacgcctgtagcgtcgtggttgatggagataccaaacactgcgtgatctacagaaccgccacgggctttggatttgccgaaccctacaacctctacggcagcctgaaagaattagtcctgcactatcagcacgccagcttagtccagcacaatgacgctctgactgtgaccctggctcatcccgtgcgtgctcccgggcccggcccgcccccagctgctcgttag

SEQ ID NO: 202325 - DNA, 660 bp, synthetic construct
  misc_feature 1..660: note = Description of Artificial Sequence: Synthetic coding sequence
  source 1..660: mol_type = other DNA
atggccagcgtgaccgacggcaagaccggcgtgaaggacgccagcgaccagaactttgactatatgttcaagctgcttatcatcggcaattcttctgtcgggaagacatcatttttgttccggtacgcagacgatacttttacgccagcattcgtcagtaccgttggtattgacttcaaagtgaaaacagtttaccgccatgaaaagagagtgaagctacagatctgggacacagccgggcaggagaggtaccgcacaataaccactgcttattacaggggtgccatgggattcatccttatgtatgatatcacaaatgaggaatccttcaacgccgtgcaggattgggcaacccagatcaaaacttattcctgggataatgcccaagtcatcctagtgggcaataagtgtgacatggaggaggagagggtcgttcctaccgaaaaaggccagctcctggcagaacaactgggatttgattttttcgaggcttctgcgaaagagaacattagcgtccgccaggccttcgaaagacttgtggacgccatttgtgataagatgagtgacagccttgataccgacccttctatgcttggttcctctaaaaacacgagactgtcagacactcctcctctcctccaacagaactgctcatgctag

SEQ ID NO: 202326 - DNA, 660 bp, synthetic construct
  misc_feature 1..660: note = Description of Artificial Sequence: Synthetic coding sequence
  source 1..660: mol_type = other DNA
atggccagcgtgaccgacggcaagaccggcgtgaaggacgccagcgatcagaacttcgactacatgttcaagctcctgattatcggtaattcatcggtcggaaagaccagcttcctgttcagatacgccgatgacactttcacgcccgcctttgtctcaaccgttgggatcgattttaaggttaaaactgtgtacaggcacgagaaacgggtcaagcttcagatatgggataccgccggacaggaacgttaccggacgatcacaaccgcttactaccgaggtgcaatgggctttattttgatgtacgatattacgaatgaggaatcgtttaacgcagtccaggattgggctacccaaatcaaaacctattcatgggataatgctcaggtgatcctggtgggtaacaagtgcgatatggaggaagagcgcgtcgtaccgacagagaagggccagctgttagcagagcaactcgggtttgatttttttgaagcttctgctaaggagaacataagtgtgagacaagctttcgagaggcttgtggacgctatctgcgacaagatgtcggacagcctggacactgacccatcaatgctgggatccagcaaaaacacacggttgagtgatacacctccccttttgcagcagaattgctcttgctag

SEQ ID NO: 202327 - DNA, 684 bp, synthetic construct
  misc_feature 1..684: note = Description of Artificial Sequence: Synthetic coding sequence
  source 1..684: mol_type = other DNA
atgcggcacgaggcccccatgcagatggccagcgcccaggacgcccggtacggccaaaaggacagctctgatcagaatttcgattatatgttcaagctcctcataattggtaacagctctgtcggcaaaaccagcttcctatttcgctatgccgatgacagcttcaccagtgccttcgtgtctaccgttggaatcgattttaaagtaaagacagtgtttaagaacgaaaagaggattaaactgcagatctgggacacagctggacaggagcggtaccgcaccataactacagcctattatcgcggcgccatgggcttcattttgatgtacgacattactaatgaagagtcttttaacgccgtgcaagattggagcacacagataaaaacatactcctgggataacgcacaagttattctggtggggaataaatgtgatatggaagacgagcgcgtaattagcaccgagcgtggacaacatctgggcgagcagttaggattcgagtttttcgaaacctctgctaaagacaacatcaatgtcaagcagacctttgagcgtctcgtagacattatttgcgacaaaatgtccgagagtctagagaccgatcctgccatcaccgctgcaaagcaaaacacaaggctcaaagagacaccccctcctccgcagcctaattgtgcttgctag

SEQ ID NO: 202328 - DNA, 783 bp, synthetic construct
  misc_feature 1..783: note = Description of Artificial Sequence: Synthetic coding sequence
  source 1..783: mol_type = other DNA
atggccggcagccccctgctgtggggcccccgggccggcggcgtgggattactggtactcctgctgttgggactgtttcgacccccgccagccctgtgtgccaggccagtaaaagagccccgaggacttagcgccgcatcccctcctctggccgaaacaggggcccctcgaagattccgccggtccgtgcctcgcggcgaagccgccggcgccgttcaggagctggcacgcgccttagctcatttactggaagctgagcgtcaggaacgggctcgagcagaagcgcaagaagccgaagaccagcaagctcgggttctggcccagctcctgcgcgtctggggcgctcctagaaacagtgaccctgcgctcgggttagacgatgatccagatgctcccgccgctcagctcgctcgcgcccttctgcgcgccaggctggatccagctgcacttgccgcgcagctcgtaccggccccagtgcctgcagccgctctacggccaagacctccagtgtatgacgatggtcccgccgggcctgacgctgaggaagctggcgacgaaactccggacgtcgacccagagctactgcgttatctgctgggccgcatcttggccggttctgcggatagcgagggagttgccgctcccagacgactgcggagggcagccgaccacgatgtaggatctgaactgcctccagaaggcgttctcggcgctttactaagggttaagcggctggagacaccagccccacaagtgcctgcccgacgactgctgccaccttag

SEQ ID NO: 202329 - DNA, 657 bp, synthetic construct
  misc_feature 1..657: note = Description of Artificial Sequence: Synthetic coding sequence
  source 1..657: mol_type = other DNA
atgagccagaccgccatgagcgagacctacgacttcctgttcaagtttttggtaatcggcaatgctggtacgggaaagtcctgtctgctgcatcagttcatcgagaaaaagttcaaagacgactctaaccacacgattggcgtggaattcgggtccaaaattataaatgtggggggaaagtacgtgaagctccagatttgggatactgcgggtcaggagagattcaggtctgtgacgcggtcctattaccggggggccgctggtgccttactggtctacgacattacctccagggagacatataacgccctgactaattggttgactgatgccagaatgttagcctcacagaacattgtgattattctgtgtgggaataagaaagatctggacgcagatcgggaagttacctttctcgaggcatctcgttttgctcaggaaaacgaactgatgttcctcgagacttctgccctgaccggcgaaaatgtggaggaggctttcgtccaatgcgccagaaagatattgaataagatcgagagcggcgagctcgatcctgagcggatgggatccggcatacagtacggcgatgcagctttacgccagctgagatcccccaggagggcccaggctcctaatgcgcaggaatgcggatgctag

SEQ ID NO: 202330 - DNA, 648 bp, synthetic construct
  misc_feature 1..648: note = Description of Artificial Sequence: Synthetic coding sequence
  source 1..648: mol_type = other DNA
atggccagccggggcgccacccggcccaacggccccaacaccggcaataaaatttgtcagttcaaactcgtcctacttggggaatcggccgtggggaagtcatctctcgtcctaagattcgtcaaaggccagtttcacgaattccaggagtcaaccatcggcgccgctttcctgacccagaccgtatgcttggatgacacaaccgttaagtttgagatttgggacaccgcgggtcaggagagatatcattcactggcccccatgtattaccgcggagcacaggccgctattgtggtgtatgacatcaccaatgaggaaagcttcgcccgagccaagaattgggtgaaagagctccaacgccaggctagccccaacattgtgattgccctttcgggtaacaaggccgatctggccaacaagcgagcagtggacttccaggaagctcagagctatgctgatgacaactcattgctttttatggagacaagcgccaaaacatctatgaatgttaatgagatttttatggccattgcaaaaaaacttcctaaaaatgagccgcagaacccaggcgctaacagtgcaaggggacgcggggtggaccttacagaacctactcagccgacacgtaatcagtgctgttccaactag

SEQ ID NO: 202331 - DNA, 606 bp, synthetic construct
  misc_feature 1..606: note = Description of Artificial Sequence: Synthetic coding sequence
  source 1..606: mol_type = other DNA
atggccagccggggcgccacccggcccaacggccccaacaccggcaacaagatctgccaattcaaactggttctcctcggtgaatctgctgtcggcaaatcatccctcgtgctgcggtttgtaaagggtcagttccacgaatttcaggaatctaccataggagtcaagtttgagatctgggacaccgctgggcaggagcggtatcacagcttagctcccatgtactatagaggggcccaggcagcaatcgtggtgtatgacatcaccaatgaagagagtttcgcccgggcgaaaaattgggttaaggagttacaacggcaggcctccccaaatatagtcattgccctctccggtaacaaagccgacctcgccaataagcgggctgtggattttcaggaggcccagagctacgctgacgacaactccttgctgtttatggagacatctgccaaaactagtatgaacgttaacgaaatcttcatggcgattgctaagaagctcccgaaaaacgaaccacagaatcctggtgccaacagtgccaggggtaggggtgtggatctgactgaacctacacagccgacacggaaccagtgctgttccaattag

SEQ ID NO: 202332 - DNA, 48 bp, synthetic construct
  misc_feature 1..48: note = Description of Artificial Sequence: Synthetic coding sequence
  source 1..48: mol_type = other DNA
atggccagccggggcgccacccggcccaacggccccaacaccggctag

SEQ ID NO: 202333 - DNA, 648 bp, synthetic construct
  misc_feature 1..648: note = Description of Artificial Sequence: Synthetic coding sequence
  source 1..648: mol_type = other DNA
atgaccagccggagcaccgcccggcccaacggccagccccaggcctccaagatctgtcagttcaaactggttctgctgggcgagtcagcagtgggtaaaagcagcctggtgctgcgctttgtaaagggtcagttccatgaataccaggagagtacgattggagcagccttcctgacacaaagcgtgtgcctggatgataccacagtcaagtttgagatatgggacacagccggtcaggaacgctaccacagcctggctcccatgtactatcggggcgcccaggccgcaatcgtcgtctacgacattaccaatcaggaaacatttgcccgggccaagacctgggtgaaggagctccaaagacaggccagcccgagtatcgtgatcgcattagcaggcaataaagccgacttagccaataaaagaatggtggagtacgaagaggcacaggcctacgctgatgataacagtctgcttttcatggaaacgtcggccaagacagccatgaatgtgaacgacttatttctggccatcgctaagaagctgccaaagagtgagcctcagaacctcgggggagcagccggtcggtcccgaggagtagacctgcacgaacaatcgcaacagaacaaaagccagtgttgctctaattag

SEQ ID NO: 202334 - DNA, 525 bp, synthetic construct
  misc_feature 1..525: note = Description of Artificial Sequence: Synthetic coding sequence
  source 1..525: mol_type = other DNA
atgaccagccggagcaccgcccggcccaacggccagccccaggccagtaaaatttgccagtttaagctggtgctgctcggggagtctgccgtgggtaaaagcagcctggtgcttagatttgtgaaaggccagtttcatgagtatcaggaatctaccataggagccgccttcctcacccagagcgtttgtctagacgacactacggtgaaattcgaaatctgggataccgcgggtcaggagagataccattccctggccccaatgtactacagaggagcccaagcggcaatcgtagtgtatgatataaccaaccaggaggcacaagcatatgccgacgataattcactgctatttatggaaacttccgccaagaccgccatgaatgtgaatgatctgtttctggcaatcgccaaaaaactgcccaagagcgaaccccagaatctgggaggtgcagcaggccgcagtaggggtgtcgaccttcacgagcagtcacagcaaaacaaatcccagtgctgttcgaactag

SEQ ID NO: 202335 - DNA, 348 bp, synthetic construct
  misc_feature 1..348: note = Description of Artificial Sequence: Synthetic coding sequence
  source 1..348: mol_type = other DNA
atgaccagccggagcaccgcccggcccaacggccagccccaggcctctaaaatttgtcagtttaagctggttttgctgggagaaagcgctgtggggaagagttccctggtgctgcggttcgtgaagggtcagtttcacgaatatcaggaatccaccattggtgccgccttcctcacgcagagtgtgtgcctcgatgataccacggtgaaattcgagatttgggataccgcagggcaggagaggtaccacagtttggctccgatgtattaccggggtgcccaagctgccatcgtggtctatgatattactaaccaggagacctttgccagggccaagacatgggtgtag

SEQ ID NO: 202336 - DNA, 303 bp, synthetic construct
  misc_feature 1..303: note = Description of Artificial Sequence: Synthetic coding sequence
  source 1..303: mol_type = other DNA
atgaccagccggagcaccgcccggcccaacggccagccccaggccagcaaaatctgccagtttaagctcgttctgttaggtgaatccgcggttgggaagtcctctttagtgctgcgcttcgtgaaaggacagttccatgagtatcaagagtcaacaatcggcgctgcgttcctcacgcaatccgtgtgtttagatgacactacagttaagtttgagatctgggataccgcaggacaggagcggtaccattcacttgcacctatgtactaccgcggggcccaggcagctattgtcgtctactag

SEQ ID NO: 202337 - DNA, 648 bp, synthetic construct
  misc_feature 1..648: note = Description of Artificial Sequence: Synthetic coding sequence
  source 1..648: mol_type = other DNA
atgaccagccggagcaccgcccggcccaacggccagccccaggccagcaaaatctgtcagttcaaactggtgctgctgggagaatctgcagtggggaaaagctccctcgtcctgaggttcgtgaaaggccagttccatgagtatcaggaatcaaccataggagccgcattccttacccagtcggtttgcctggacgatactacagttaagttcgaaatctgggacactgcaggtcaggagaggtaccattctctggcacctatgtattacaggggggcacaggccgcaattgttgtgtatgacatcacaaaccaggaaacctttgcacgcgcaaagacatgggtgaaagaactacaacgccaggcttctcctagcatagtgatcgcactggctggaaataaggctgaccttgctaataaacgaatggtggagtatgaggaagcgcaggcatatgccgacgataacagtctccttttcatggaaacatcagccaagaccgccatgaacgtaaacgacctcttcctggccattgccaagaaacttccaaaatcggagcctcaaaatcttggaggcgccgctgggcggtctcggggcgtggatctgcacgaacagtcacagcagaataaaagccagtgctgctccaactag

SEQ ID NO: 202338 - DNA, 651 bp, synthetic construct
  misc_feature 1..651: note = Description of Artificial Sequence: Synthetic coding sequence
  source 1..651: mol_type = other DNA
atggccggccggggcggcgccgcccggcccaacggccccgccgccggcaataagatctgtcagtttaagttggtcctgctgggcgaatcggcagtggggaaatcctctcttgttttaagattcgtgaaggggcaattccatgagtatcaggagagcactattggtgccgcattcttgacccagaccgtttgcctagatgatactaccgtgaaattcgaaatttgggataccgctggtcaggagcgataccattctctggctcctatgtactatcggggagctcaggctgccattgtggtctatgacattactaatacagataccttcgcccgcgcaaaaaactgggtgaaggaactacaaaggcaggccagtcctaacattgtgatagctctggccggcaataaggctgatctggcatcaaaacgggctgtggaatttcaggaggcccaggcatatgctgacgataatagcctgctgttcatggagacgagcgctaaaacggcgatgaacgtcaacgaaatatttatggccatcgcaaaaaagttgccaaagaacgagccccagaacgctactggtgctcccggcagaaacagaggcgtcgatctccaggagaataatcctgctagtaggtctcagtgctgctccaactag

SEQ ID NO: 202339 - DNA, 651 bp, synthetic construct
  misc_feature 1..651: note = Description of Artificial Sequence: Synthetic coding sequence
  source 1..651: mol_type = other DNA
atggccggccggggcggcgccgcccggcccaacggccccgccgccggcaacaaaatctgccagttcaagttggtgctgctcggtgagtctgctgtgggcaaatcgtcgctggtattgcgctttgtgaaagggcagtttcatgaatatcaggagagtactattggggccgcctttctaacgcagacagtgtgcctggacgatacgacagtgaagtttgagatctgggatacagccgggcaggaaaggtatcatagcctggcacccatgtactaccgcggcgctcaggcagccatcgtggtttacgatattacaaataccgataccttcgcccgtgccaaaaattgggttaaggaactgcagcgacaggccagcccgaatattgtcatcgcccttgctggcaataaggcagacttggccagcaaacgggccgtagagtttcaagaagcacaggcttacgctgacgacaattcactacttttcatggaaacatcagcaaaaactgccatgaacgtcaatgagatctttatggcaattgcaaagaaactgccaaaaaatgagccccagaatgccactggggcccccgggcgtaataggggagtggatctgcaagagaataaccctgcatcgagatcacagtgttgttctaactag

SEQ ID NO: 202340 - DNA, 750 bp, synthetic construct
  misc_feature 1..750: note = Description of Artificial Sequence: Synthetic coding sequence
  source 1..750: mol_type = other DNA
atggagctgagctggcggagccccagccccctgagcgccagcctgcacagcactagccctcatccacacgccctgtggactactaccgcaggtcgggcaatggcgggccgaggaggggcggccagacctaatggaccagctgccgggaacaagatttgtcaattcaagctcgtgctcctgggtgagagtgcagtcggcaagtctagtctggtcctgcggttcgttaagggccaatttcatgagtaccaggagtcaaccatcggtgccgcattccttacccagacagtctgcttagacgacacaaccgttaagtttgagatttgggacacagcaggacaggagcgataccacagccttgcacctatgtactacagaggagctcaggcagcaattgtagtgtacgatatcactaatactgacactttcgccagggcaaagaactgggtcaaggagctgcaaagacaggcttcccccaacatcgtgattgccctcgccggcaacaaagctgatttggcatcaaaacgggcggtagaatttcaggaagcacaggcatacgctgatgacaattcactactcttcatggagacatcagccaaaacagcaatgaatgtgaatgaaatctttatggctatcgctaaaaagttaccaaaaaacgagccacagaatgccaccggcgcacccggccggaaccggggggtggacctccaggaaaacaaccccgcctcccggtcccagtgttgcagcaactag

SEQ ID NO: 202341 - DNA, 225 bp, synthetic construct
  misc_feature 1..225: note = Description of Artificial Sequence: Synthetic coding sequence
  source 1..225: mol_type = other DNA
atggccggccggggcggcgccgcccggcccaacggccccgccgccggcaacaaaatctgtcagttcaaacttgtgctgctcggcgagtccgctgtcggaaaaagctcattggttcttaggttcgtcaaaggccaattccacgagtatcaagaatcaaccatcggcgctgcattcctgacccagacagtctgtctggatgacacgaccgttaagtttgaaatctag

SEQ ID NO: 202342 - DNA, 279 bp, synthetic construct
  misc_feature 1..279: note = Description of Artificial Sequence: Synthetic coding sequence
  source 1..279: mol_type = other DNA
atggccggccggggcggcgccgcccggcccaacggccccgccgccggaaacaagatctgccagttcaaactcgtgctcttaggggaaagcgccgttggtaaaagctccctggttttgaggtttgttaaaggacagtttcatgaataccaagagagtactatcggcgccgcctttcttacacaaacagtgtgtctggacgacaccacagtcaagttcgagatttgggatactgctggccaagagagatatcattcccttgctcctatgtattatcgctag

SEQ ID NO: 202343 - DNA, 375 bp, synthetic construct
  misc_feature 1..375: note = Description of Artificial Sequence: Synthetic coding sequence
  source 1..375: mol_type = other DNA
atggccggccggggcggcgccgcccggcccaacggccccgccgccggaaataaaatttgtcaatttaagttggtcctgctaggagagtctgccgtgggaaaaagctccctcgtcctacgctttgtgaaaggtcagtttcatgagtaccaggagagcacgattggcgcagcctttctaactcagaccgtgtgcctggatgacactacagtcaagttcgagatctgggacactgctggacaagagagataccatagtctcgctccaatgtactaccggggcgcacaagccgcgattgtggtgtatgacattacaaacactgacacatttgctcgagccaagaattgggtgaaagaactgcagaggcaggcgagctag

SEQ ID NO: 202344 - DNA, 627 bp, synthetic construct
  misc_feature 1..627: note = Description of Artificial Sequence: Synthetic coding sequence
  source 1..627: mol_type = other DNA
atgagcaccggcggcgacttcggcaaccccctgcggaagttcaagctcgtgtttcttggcgagcagagcgtgggaaagacctctctgattactcgctttatgtacgatagtttcgataatacctaccaagctaccattggcatcgactttctatccaagaccatgtacctggaggaccggaccatcaggctgcaactgtgggataccgccggccaggagagatttcggagcctgatcccaagttacatccgcgattccgccgccgccgttgtcgtctatgacataacgaacgtgaattcctttcagcagacaactaagtggatcgatgatgtgcgcacagagcgggggtccgacgttattatcatgctcgtaggaaacaagacggatctggcagataagcgccaagtgagtatcgaggaaggtgagaggaaggccaaggagctcaacgtcatgtttatcgagacaagtgccaaggccggatataacgttaagcagctgttcaggcgggtagctgctgcactcccagggatggaatctacccaggaccgtagccgggaggacatgattgacatcaagttggagaagccccaggagcagcccgtatctgaaggtgggtgtagctgctag

SEQ ID NO: 202345 - DNA, 627 bp, synthetic construct
  misc_feature 1..627: note = Description of Artificial Sequence: Synthetic coding sequence
  source 1..627: mol_type = other DNA
atgagcaccggcggcgacttcggcaaccccctgcggaagttcaagctggtcttcctgggcgaacagagtgtcgggaaaacttcgctaatcactcgattcatgtacgactccttcgataacacataccaggcgaccattggtatcgattttttgagcaaaacaatgtatcttgaagatcgaacagtgcgactccagctgtgggatacagcagggcaggaacggtttcgtagtctgattccatcttacatccgcgattccaccgtagctgtcgttgtgtatgacattactaacgtgaattcgtttcagcaaaccacaaagtggatcgacgacgtgaggactgagcggggtagcgacgtcatcataatgctggtgggcaataaaaccgatcttgccgacaagagacaggtgtctattgaggagggcgaacggaaagcaaaggagttgaatgtgatgtttattgagacctcagcaaaagccggttataacgtcaagcagctgtttcgaagagtagctgcagcactgccgggaatggagtccacccaggaccggtcccgggaagacatgatagacattaagcttgagaagcctcaggagcaacctgtcagtgagggcggatgttcttgttag

SEQ ID NO: 202346 - DNA, 627 bp, synthetic construct
  misc_feature 1..627: note = Description of Artificial Sequence: Synthetic coding sequence
  source 1..627: mol_type = other DNA
atgagcaccggcggcgacttcggcaaccccctgcggaagttcaagcttgtgttcctgggggagcagagtgtgggaaagacatcactgatcaccagatttatgtacgactcgttcgataatacataccaggctactatcggaattgacttcctgtctaaaactatgtacctcgaggatcggaccatccgactgcagctctgggatactgccggccaggagcgtttcaggagtctgatccctagctacatccgggactccgcggccgcagtggtagtttacgacataaccaacgtgaatagctttcaacagactactaagtggattgacgatgtgagaacagagcgcgggagcgacgtcatcattatgcttgtgggcaataagactgaccttgcggacaaacgccaggtgtctatcgaagagggagagcgcaaggccaaagagctgaacgtgatgtttatagaaacatccgccaaagcgggctataatgtgaagcagctcttcagacgggtggctgccgctctgccaggaatggaaagtacccaggaccgcagccgggaagatatgattgacattaaactcgaaaagccccaggaacagccagtctccgagggaggttgcagttgttag

SEQ ID NO: 202347 - DNA, 525 bp, synthetic construct
  misc_feature 1..525: note = Description of Artificial Sequence: Synthetic coding sequence
  source 1..525: mol_type = other DNA
tgacccctgcggaagttcaagctggtgttcctgggcgagcagagcgtcggcaagacttcattgataacaagattcatgtacgattccttcgacaatacgtatcaggctactattggaattgatttccttagcaagaccatgtaccttgaggaccgaaccgtacgactccagctttgggacacggcaggccaggagcggtttcgaagtcttatccctagctatatcagggactccaccgtcgcagtagtggtgtacgacataactaatgtcaactcttttcagcagaccacgaagtggattgacgatgtgcgaaccgaaagggggtctgatgtgatcattatgttggtcggaaataagactgatttggccgataagaggcaagtatctatcgaggagggagagagaaaggccaaagaactgaatgtgatgttcattgagacttccgcaaaagccggatacaacgtgaagcaaaggataggttcatgccatgtggcccaggccagcttggagctgctcgattcatag

SEQ ID NO: 202348 - DNA, 225 bp, synthetic construct
  misc_feature 1..225: note = Description of Artificial Sequence: Synthetic coding sequence
  source 1..225: mol_type = other DNA
atgagcaccggcggcgacttcggcaaccccctgcggaagttcaagctggtctttctgggcgagcagagtgtcggtaagacatcgctcataaccagatttatgtacgatagcttcgacaatacatatcaagccacaatagggatcgactttctcagtaaaaccatgtatttggaagaccggacagtgaggctgcagttatgggacaccgctggacaggaaaggtag

SEQ ID NO: 202349 - DNA, 528 bp, synthetic construct
  misc_feature 1..528: note = Description of Artificial Sequence: Synthetic coding sequence
  source 1..528: mol_type = other DNA
atgtacgacagcttcgacaacacctaccaggccaccatcggcatcgacttcttgagcaaaaccatgtatttggaagaccgcacgattcgcctgcagctttgggacacagctggtcaggaacggtttcgctcactcatcccatcctatatccgagattcagccgcggccgtcgtcgtgtacgatatcaccaacgttaattctttccagcagactaccaagtggatagacgacgttcgtaccgagagaggctctgacgtcatcatcatgctcgttgggaataagaccgatttagcagataagcgacaggtgtctattgaagaaggcgagcgcaaggcaaaggaactcaacgtgatgttcatcgaaacttccgctaaagcaggctacaatgtgaaacagttatttcgtagggtggctgccgctctgccaggtatggagagcacacaggacaggtcccgcgaagatatgattgacattaagctggaaaagccccaggaacaacccgtgtccgagggtggctgctcgtgctag

SEQ ID NO: 202350 - DNA, 429 bp, synthetic construct
  misc_feature 1..429: note = Description of Artificial Sequence: Synthetic coding sequence
  source 1..429: mol_type = other DNA
atgagcaccggcggcgacttcggcaaccccctgcggaagttcaagttggtctttctgggtgagcagagcgtgggtaagaccagtcttattaccagattcatgtatgattcattcgacaacacctatcaggctaccatcggcatagattttttgtctaaaacaatgtacttagaagatagaacgatccggctgcagctgtgggacactgctggtcaggaaaggtttcgatccctgattcctagttatatacgggacagcgctgcagctgtcgttgtatatgacattactaacgtgaactccttccagcagaccaccaagtggatagacgacgtgaggaccgaacggggaagcgatgtgatcatcatgctggtgggaaataaaaccgaccttgctgacaaaagacaagtgagtatagaagaaggtgagtag

SEQ ID NO: 202351 - DNA, 315 bp, synthetic construct
  misc_feature 1..315: note = Description of Artificial Sequence: Synthetic coding sequence
  source 1..315: mol_type = other DNA
atgagcaccggcggcgacttcggcaaccccctgcggaagttcaagctggtttttcttggtgagcagagcgttgggaaaacttctttaatcactagattcatgtatgacagcttcgacaacacgtaccaggccaccatagggatagactttttgagcaaaaccatgtacctggaggatagaactctgtttcggagggtggccgctgccctccccggcatggaaagcacacaggatcgctctcgcgaggatatgattgacatcaagttggagaagccccaggagcagccggtgtccgagggaggttgcagctgttag

SEQ ID NO: 202352 - DNA, 606 bp, synthetic construct
  misc_feature 1..606: note = Description of Artificial Sequence: Synthetic coding sequence
  source 1..606: mol_type = other DNA
tgagtgttcccccggggcctggccctgcggagcgccgacgtggtggaagtgggcaagacttcactcatcactcggtttatgtacgatagttttgacaacacctaccaggccacaattggaatcgactttctgtctaagacaatgtatctggaggatcgcactattagactgcaactgtgggacacggccgggcaggagcgatttcgcagcttaattccaagctatattagggacagcgccgccgccgtagtagtgtacgacataaccaacgtcaatagtttccagcagacgacgaaatggatagacgatgtgagaacagaacgtggatcagatgtaatcattatgctggttggcaataagacggacctggctgataaaagacaagtgtccatagaagaaggggaacgcaaggccaaagagctgaatgttatgtttatcgagacttccgccaaggcaggctataatgtgaaacagttgttcagaagagtggctgcagctttgcccggtatggaaagcacccaggaccggtcccgcgaagacatgattgacatcaagttggagaaaccacaggagcaacctgtctcggagggcgggtgttcatgttag

SEQ ID NO: 202353 - DNA, 144 bp, synthetic construct
  misc_feature 1..144: note = Description of Artificial Sequence: Synthetic coding sequence
  source 1..144: mol_type = other DNA
atgagcaccggcggcgacttcggcaaccccctgcggaagttcaagctagtgttccttggagagcagagtgtcgggaaaacaagccttatcacaagatttatgtatgactccttcgataacacctaccaggcaacaattggctag

SEQ ID NO: 202354 - DNA, 765 bp, synthetic construct
  misc_feature 1..765: note = Description of Artificial Sequence: Synthetic coding sequence
  source 1..765: mol_type = other DNA
atgagcgccggcggcgacttcggcaaccccctgcggaagttcaagctggtgttccttggagaacagtcagtggcaaaaacttctctgattacaaggttccgatacgattcatttgacaatacatatcaggcaataatcggaattgactttctatctaagacgatgtacttagaggacggaactatcggtttgcgcctctgggacacggccggccaggagcggctccgttcactgatccccagatacatccgggatagcgctgccgccgtcgtggtgtatgatattacgaatgtgaattcctttcaacagacgaccaagtggatcgatgacgtcaggacagagagaggctctgatgtcattatcactctagtagggaatagaacggacctggccgataaacggcaggtatctgtcgaggaaggcgaacggaaagctaaaggtttgaatgtgaccttcatagaaacccgggcaaaggccggatataatgtgaaacagctgtttagacgcgtggccgcggcccttcccggtatggagagtacccaggatgggagtagagaggacatgtctgatatcaagttggaaaaaccacaggaacaaacggtgagcgaagggggctgtagttgctactctcctatgtcgtcctctaccctaccacagaagcctccttactcctttattgattgctcagtgaacattgggctcaacctgttcccttccctcataacattctgcaactcatccctcctgccagtcagctggcgctag

SEQ ID NO: 202355 - DNA, 612 bp, synthetic construct
  misc_feature 1..612: note = Description of Artificial Sequence: Synthetic coding sequence
  source 1..612: mol_type = other DNA
atgggcagccgggaccacctgttcaaggtgctggtggtgggcgacgctgccgttggcaaaacgtctctcgtgcagagatacagccaggactcgttctcaaaacattacaaaagcactgtgggcgtggactttgcactcaaagtactgcaatggtccgattatgagatcgtcaggttacaactttgggacatagccggccaggaaagatttacgagtatgacacggctctattaccgggacgccagcgcttgtgtcataatgtttgatgtgacaaacgccactaccttcagcaattcccaacggtggaaacaggacctggatagcaagctcactctgccaaacggcgagcctgtgccatgtttgcttctggccaataaatgtgacctgtctccttgggccgtatcaagagaccaaattgacagatttagcaaagaaaatggctttacagggtggactgaaaccagcgtgaaagaaaataagaacatcaacgaggccatgcgggtcctgattgaaaagatgatgagaaattctaccgaagatatcatgagcctctccacccagggagattatataaacctacagacaaaatcatcctcttggagctgctgttag

SEQ ID NO: 202356 - DNA, 612 bp, synthetic construct
  misc_feature 1..612: note = Description of Artificial Sequence: Synthetic coding sequence
  source 1..612: mol_type = other DNA
atgggcagccgggaccacctgttcaaggtgctggtggtgggcgacgctgcagtgggcaaaaccagcttggtccagcgatactcccaggactccttctccaagcactacaagtccactgtcggtgtggacttcgctctcaaagtactccagtggtccgattacgaaatcgtaaggctccagctatgggatatcgccgggcaggaacgcttcacctccatgactcgtctttactaccgagacgccagcgcctgtgtgatcatgtttgacgttaccaacgccacaacatttagcaactcccagcggtggaagcaggacctggatagcaagctgactttacccaacggagaaccagtgccgtgtctgctgttggccaacaagtgcgatctttccccatgggccgtgtccagagaccagatcgaccgattttctaaggagaacggattcaccggttggacggagacctccgtgaaagagaataaaaatataaacgaggcaatgcgtgttttgatcgagaagatgatgagaaattccaccgaagatattatgtccctgtcgactcaaggcgactatataaaccttcagacaaagtcctcatcatggtcctgttgttag

SEQ ID NO: 202357 - DNA, 612 bp, synthetic construct
  misc_feature 1..612: note = Description of Artificial Sequence: Synthetic coding sequence
  source 1..612: mol_type = other DNA
atgggcagccgggaccacctgttcaaggtgctggtggtgggcgacgccgccgttggcaagacctccctggtgcagagatatagccaggacagcttctcaaagcactataagagcacagtgggcgtggatttcgcactcaaggtgctgcagtggtccgattacgagatcgtgcgcctgcagctctgggatattgccggacaagaaagattcacatcaatgaccaggctgtactatcgcgatgccagcgcttgtgtaattatgtttgacgtgacaaacgccacaactttctctaactcacagcgctggaaacaggacctcgactcgaaattaactttgccgaacggtgagcctgtcccatgcctgctgctagccaacaagtgcgacttatcaccgtgggcagtgtctagagatcagattgaccggttcagtaaggagaacggttttactggttggaccgaaacatccgtcaaagagaacaagaatataaatgaggccatgagagtattgatcgagaaaatgatgagaaactccaccgaggatatcatgtccctgtccacacaaggggactatatcaacttgcaaacaaagagtagctcctggagttgctgctag

SEQ ID NO: 202358 - DNA, 396 bp, synthetic construct
  misc_feature 1..396: note = Description of Artificial Sequence: Synthetic coding sequence
  source 1..396: mol_type = other DNA
atgacccggctgtactaccgggacgccagcgcctgcgtgatcatgttcgatgtgacaaatgctacgactttcagcaactcccagcgatggaagcaggatctggactccaagctgactctccctaacggggagcccgtcccatgtttacttttagcaaacaaatgcgatctaagtccctgggccgtgagccgtgaccagattgatcggttcagcaaggaaaacgggtttacgggttggaccgagactagcgtcaaggaaaacaaaaacataaacgaagccatgcgagttctgattgagaagatgatgagaaactctacagaagacattatgtcattgtctacacagggcgactacatcaacctgcagacaaagtcgtccagttggagttgctgctag

SEQ ID NO: 202359 - DNA, 540 bp, synthetic construct
  misc_feature 1..540: note = Description of Artificial Sequence: Synthetic coding sequence
  source 1..540: mol_type = other DNA
atgggcagccgggaccacctgttcaaggtgctggtggtgggcgacgccgccgtgggaaagactagcctggtccagcgctatagccaggattccttctccaaacattacaagtccactgtgggaggacaggaacggttcacctccatgactaggctgtactaccgagacgcttccgcttgtgttatcatgtttgatgttaccaatgcaaccactttcagtaattcacagagatggaaacaagacctggacagtaaacttactctaccaaatggggaacccgtcccttgcctcttgctcgccaacaagtgtgatctgtcaccctgggctgtcagcagagatcagatagatcgcttcagtaaagaaaacgggttcactggatggacagagaccagtgtgaaagaaaataaaaatatcaatgaagccatgcgcgtgctgattgagaagatgatgagaaattctactgaagatatcatgtctttgagtacgcagggtgactatataaacctacaaacaaagagcagtagttggtcttgctgctag

SEQ ID NO: 202360 - DNA, 624 bp, synthetic construct
  misc_feature 1..624: note = Description of Artificial Sequence: Synthetic coding sequence
  source 1..624: mol_type = other DNA
atggccaagacctacgactacctgttcaagctgctgctgatcggcgacagcggtgtgggcaagacatgtgttctgttcaggtttagtgaggatgcctttaattctaccttcatttccacaatagggatcgacttcaaaatccgcaccatcgagctcgatgggaaacgtatcaagctgcaaatttgggacaccgctggccaggagaggtttagaaccatcaccaccgcatactaccggggagctatgggcattatgttggtttacgatatcacaaacgagaagagttttgataatattagaaattggatcagaaacattgaagaacatgccagtgccgacgtggagaagatgattctggggaataaatgcgatgtgaatgataagcgtcaggtcagcaaggagagaggcgagaagttggccctggactacggaatcaagttcatggaaacctccgcaaaagctaacatcaacgttgagaacgcattctttaccctcgccagagacataaaagctaaaatggataagaaactggagggtaattcacctcagggaagcaatcagggggtgaaaataactcccgatcagcaaaaacggtcaagtttttttcggtgtgtcttgttgtag

SEQ ID NO: 202361 - DNA, 606 bp, synthetic construct
  misc_feature 1..606: note = Description of Artificial Sequence: Synthetic coding sequence
  source 1..606: mol_type = other DNA
atgagcggcaagagcctgctgctgaaggtgatcctgctgggcgacggcggcgtggggaaatcctccctgatgaatagatatgtaacaaataagtttgattcgcaggcattccacacaataggggtggaattcctcaacagagacttggaggtggatggcagattcgttacactgcagatttgggacaccgcgggacaggagcggttcaaaagtcttcgaacaccgttctaccggggcgccgactgctgcctgttgaccttctctgttgacgaccggcaaagtttcgagaatttaggtaactggcagaaagagtttatctattacgctgacgttaaagaccctgagcactttccatttgttgtacttggcaacaaggttgataaagaagaccgccaggtgaccaccgaggaggcccagacctggtgtatggagaatggtgactacccctacctcgaaaccagcgccaaagacgatacgaacgtaaccgtggcgttcgaagaggctgtgcggcaggtcctcgctgtggaggaacaactggagcactgtatgcttgggcacacgatcgaccttaactcaggttcaaaggccggcagctcttgttgctag

SEQ ID NO: 202362 - DNA, 2589 bp, synthetic construct
  misc_feature 1..2589: note = Description of Artificial Sequence: Synthetic coding sequence
  source 1..2589: mol_type = other DNA
atggcccagcccggccccgccagccagcccgacgtgagcctgcagcagcgtgtcgcagaactggagaagattaatgcggagttcctgagagctcagcaacagttggagcaggaatttaaccagaaaagggctaagtttaaagaactttatctcgctaaggaggaagacctcaaacggcagaacgctgttctccaggccgcccaggatgatctcggccacttgagaactcagctctgggaagcccaggccgagatggaaaatatcaaagccatcgccactgtctctgaaaatactaagcaggaggcaatagacgaagtcaaacggcagtggagggaggaggtcgcctcgctccaagccgtgatgaaggagacagtcagagattacgagcaccagtttcatctaaggttagaacaagagcggacacagtgggcacagtacagagaatctgctgaaagagaaatcgcagacctacgacggcgactatccgagggccaggaggaggagaacctggaaaacgaaatgaaaaaggcacaggaggatgctgaaaagctacgaagcgtcgtaatgccaatggagaaggagattgctgctctcaaggataaactgacggaagcggaggataaaatcaaggagctggaggcaagtaaggtgaaagagctgaatcactaccttgaggccgagaagtcttgccgcaccgaccttgaaatgtatgttgcggtgctgaacacccaaaagtctgttctacaggaagatgccgagaaacttcggaaggaactccacgaggtctgtcacttgctcgagcaggaaagacaacagcacaaccagcttaagcacacctggcagaaggccaacgatcagttcctagagagtcaaaggcttttgatgcgagacatgcagcggatggagatcgtgctgacgagcgagcaactcaggcaagtggaggaactaaagaagaaagatcaggaggacgacgaacagcagcgactgaataaacggaaggaccataaaaaggccgatgttgaggaagagatcaaaatcccggtggtatgcgcactgacccaggaagaatcctctgcacaactgtcaaatgaagaagagcacttggacagcacccggggctcagtgcacagcctcgatgcaggcctccttttgccatccggagatcctttttctaaaagtgataacgatatgttcaaagacggactgcggagggcacagagcactgacagcctggggaccagcgggtccctgcagagtaaggctttaggatacaactacaaagcaaaatcggctggaaatctcgatgagtcagacttcggcccactggtcggagcagattcagtctcagagaacttcgacacggcgtcgctggggtccttgcagatgccctccggtttcatgctcaccaaagatcaggaaagagctatcaaggctatgacaccagagcaggaggagactgcaagtctactatcctcagtgacccagggaatggaatcagcgtatgtctcacctagtgggtataggctggttagcgaaaccgagtggaatctgctccagaaggaggtgcacaatgcggggaacaagctgggccgcagatgcgatatgtgttctaactatgagaagcaactccagggcatccaaatccaagaggcagaaacccgcgaccaggtgaaaaaactgcagctcatgctgcgccaagccaacgaccaactggagaagacgatgaaggataagcaggagctcgaggacttcatcaaacagagcagtgaggattcctcacaccagatttctgctttagtgctgcgggcccaggcctctgagatcctgttggaggagttacagcaaggactgtcgcaagccaaacgcgacgtccaggagcaaatggcggttcttatgcagagcagagagcaggtctcagaggagctggttcggctccagaaggacaatgactcacttcaggggaagcattccttacacgtgtccctccagcaggcagaggacttcattctgcccgataccaccgaggcccttcgggaactggtgcttaagtaccgagaggacattataaacgtgagaaccgctgctgatcacgtggaggagaagctgaaagccgaaattctcttcctgaaagaacagattcaagccgagcaatgtctcaaggaaaacttagaggagactctacagcttgaaatcgaaaattgcaaggaagagattgcatctatctcgagcctcaaagccgagttagagaggattaaagtggagaagggccaactcgagagtaccctgcgggaaaagagccagcagttagaatctctgcaggaaattaaaatctccctggaggagcagcttaagaaggaaactgccgcaaaggcaacagtggaacagctgatgttcgaggaaaaaaacaaggcgcaaaggctacagacagagttagacgtttctgagcaagtccagagagacttcgtgaagctttctcagacgctgcaggttcaattggaacgaatacggcaggctgatagcctggagcgcatcagggccattctgaatgacacaaaactgactgacattaaccaactcccggaaacctag

SEQ ID NO: 202363 - DNA, 2490 bp, synthetic construct
  misc_feature 1..2490: note = Description of Artificial Sequence: Synthetic coding sequence
  source 1..2490: mol_type = other DNA
atggcccagcccggccccgccagccagcccgacgtgagcctgcagcaacgagtcgctgaactggaaaagatcaacgccgagttcctccgcgctcaacaacagctcgaacaggagttcaaccagaagcgggccaaattcaaagagctgtatctggccaaagaagaggatctgaagcgccagaacgctgtgcttcaggccgcccaagacgatctagggcatctcaggacacagctgtgggaggcccaggcagagatggagaatatcaaagccatcgcaacggtgagcgaaaatactaagcaagaggccattgatgaagtgaagagacagtggagagaggaggtcgcttcgttgcaggcagtgatgaaggagaccgtgcgcgattatgagcaccaatttcaccttagactcgaacaggagcgaacacagtgggctcagtatagagaatcggctgagcgagaaatagcggatcttaggagacggttgagcgaaggacaggaggaggagaatctagagaatgagatgaaaaaggcccaggaggacgccgaaaaactcaggtctgtcgtaatgcccatggagaaggagatcgctgccctcaaggacaaactgacggaagccgaggacaaaattaaagagttggaggcatctaaggtcaaggaactcaaccactatctagaagccgaaaaaagctgtcgcacagacctagaaatgtatgttgctgtgctgaatacacagaagtctgtgctgcaggaggacgctgagaagttgaggaaggagctgcacgaggtgtgccatctgttagagcaggagcgccaacagcacaatcagctaaaacatacctggcagaaggcaaatgatcagttcttggagagtcagagactgttaatgagggatatgcagcgaatggaaatcgtgctgaccagcgagcaactgaggcaagtggaggaattgaaaaaaaaggatcaggaagatgatgaacagcaaagattgaataagaggaaggaccataagaaggcagatgtggaggaagaaatcaagatccctgtggtatgtgccctgacccaggaagagtcgtcagcacagctgagcaacgaagaagaacacctggactctactcgaggaagcgtacactccctggacgctggactacttttgcccagcggcgacccattttccaaaagcgataatgacatgttcaaggacggcctgagacgtgcacagtcaacggactcacttggcactagtggctccctacaatccaaggccctgggctacaactacaaggcgaaaagcgcgggaaacctggacgagtccgattttggtccactggtaggcgcagactccgtttccgagaactttgacactgccagccttggcagcctgcaaatgccctccggatttatgctgaccaaggaccaggagagagctatcaaggccatgaccccggagcaggaagagactgcctccctgctgtcttctgtgacccaggggatggagtcagcctacgtgtctccttctgggtacaggctggtgtcagagacagagtggaacctcctccagaaggaagttcacaacgctggaaataagctgggccgccgctgcgatatgtgttccaattatgagaaacaactgcaggggatacagattcaggaggccgagactcgcgatcaggtcaaaaaactgcagctcatgttgaggcaggcgaacgaccagctggagaaaaccatgaaggataaacaggagctagaagattttataaaacagagtagtgaagactcaagccatcaaatttcagcgctagttctacgcgctcaggcttctgagattctgctggaggagctgcaacagggactgagccaggccaaacgcgatgttcaagagcaaatggccgttctgatgcagtccagagagcaagtgagcgaggaactcgtgcggcttcagaaagacaatgactctctacagggaaaacactcacttcatgtgagtctgcagcaggccgaagactttatcttgcctgacacaaccgaagccttgcgcgagcttgtgttgaagtatcgggaggacattattaacgtgcgaacagccgctgatcacgtggaagaaaagctgaaggcggagatactatttttgaaggaacagattcaggcagaacaatgtctgaaggaaaatctggaagaaacacttcagttggaaatcgaaaactgtaaggaggagattgcatccatttcctctctcaaggcagagctcgagcgtattaaggtggaaaaaggacaagcaactgtagagcagctgatgtttgaagagaaaaataaggcacagaggcttcagacagaactggacgtgtctgaacaggtgcagagggacttcgtcaaactttctcagaccctccaggtccagctggaaagaattagacaggctgactccctcgaacgcataagggcaattttaaatgacactaaactgaccgatatcaaccagctaccagaaacatag

SEQ ID NO: 202364 - DNA, 2490 bp, synthetic construct
  misc_feature 1..2490: note = Description of Artificial Sequence: Synthetic coding sequence
  source 1..2490: mol_type = other DNA
atggcccagcccggccccgccagccagcccgacgtgagcctgcagcagagagtagcagaacttgagaaaatcaacgccgaatttctgcgggcacagcagcagctcgagcaggagtttaaccaaaaaagagctaaatttaaggagctttatcttgccaaggaagaggatctgaaacgccagaacgcagtgttgcaggctgctcaggatgatctgggacatctacgcactcagctgtgggaggcccaagccgagatggagaatatcaaagctatcgctactgtgtcagaaaacacaaaacaggaggccattgacgaagtgaaaagacagtggcgagaggaggtcgccagcctacaggctgtgatgaaagaaacagtcagggactacgagcatcagttccaccttcggctggaacaggaacggactcaatgggctcagtaccgagaatccgcagaaagggaaatcgctgaccttcgacggaggctgagtgaagggcaagaagaagaaaacctggaaaatgagatgaagaaagcccaggaagatgcggaaaaacttagaagcgtggtaatgccaatggagaaagagatcgctgccctgaaagacaaactgaccgaagctgaggacaaaatcaaggagttggaggccagtaaggtaaaggaactcaatcactaccttgaggccgagaagagctgcagaaccgacttggagatgtacgtggctgtgctgaacacgcagaaatctgtgctgcaggaggacgctgagaagttgagaaaagagcttcatgaagtgtgccacttattggagcaagagcggcaacagcataatcaactgaaacacacttggcagaaagcgaacgaccagttcctggaatctcagaggcttcttatgagggatatgcagaggatggagatcgtcctgacttcggagcagctgcgccaagtggaagaactgaaaaagaaagaccaagaggacgatgaacaacaacgactgaacaagaggaaagatcacaaaaaagccgatgttgaggaagagattaaaataccggttgtgtgcgcgctcacgcaggaggaatcatcggctcagctctccaatgaggaggaacacttagactcaactcggggatcagtccactcccttgatgccggcctcctccttcccagcggcgaccctttcagcaagagcgacaacgacatgtttaaggacggcctaaggcgagcccagtctaccgacagcctcggcacttccggtagcctccagtcaaaggctctgggctacaactacaaagccaaatctgccggaaatcttgatgaatctgacttcggacccctagtgggtgccgactctgtctcggagaattttgacactgcttctcttggatccctgcagatgcccagcgggtttatgctgactaaagaccaggagagagctatcaaggccatgaccccggagcaagaggagacagccagcctcctgtccagcgtcacccagggaatggaaagcgcatatgtttctcccagtggctaccgcctggtcagtgagaccgagtggaatttacttcagaaagaagtgcacaatgcaggcaacaagctgggtagacgatgtgatatgtgctccaattatgaaaagcagctccaagggattcagatccaggaggccgaaactcgggatcaggtcaaaaagctgcaactgatgttgcgccaggcgaacgatcagctagagaaaacaatgaaagataagcaagagcttgaagattttataaaacagtcgtctgaagatagctcacatcaaatcagcgccctagtcttaagggctcaggcaagcgagatcctgctggaagagcttcagcaaggactatcccaggctaaacgagatgtgcaagagcaaatggctgtcctgatgcagagcagagagcaggtgtccgaggaactggttagactccagaaggataatgattctctccaggggaagcactccctgcacgtctcccttcagcaggctgaggatttcattctacccgacaccacagaagcccttcgtgaattagtcctgaaatatcgcgaggatatcatcaatgttcgcacggcagctgatcatgtggaagagaaactgaaggcagaaattctcttcctgaaggaacagattcaggctgaacagtgcctgaaagagaatctggaggagacgctgcagctcgaaatcgagaactgtaaggaagagatcgcctcaatctcctctcttaaggcggagctggaaagaattaaggtggaaaagggacaggcaactgtggagcagctgatgtttgaggaaaaaaataaggcgcagagattgcagacagagctcgacgtatcagagcaagtacagcgagacttcgtgaagctgtctcaaaccctgcaggtccagctcgagaggatacgccaggccgattcactggagagaatccgagcaatcttgaatgatactaaactgacagatatcaaccaattgccagagacttag

SEQ ID NO: 202365 - DNA, 2460 bp, synthetic construct
  misc_feature 1..2460: note = Description of Artificial Sequence: Synthetic coding sequence
  source 1..2460: mol_type = other DNA
atggcccagcccggccccgccagccagcccgacgaggacctgaagcggcagaacgccgttctgcaagctgcacaggacgacttgggtcacttgagaacacaactttgggaggctcaggccgagatggagaatattaaagcaattgccacagtcagtgaaaacacaaaacaggaggcaatcgacgaggtgaaacgccagtggagggaggaagtcgcctcgctgcaggctgtcatgaaggagaccgttcgagactatgagcaccagttccatttgcggctggaacaagagagaacacagtgggcccagtatcgcgaaagcgctgagagggaaatcgccgaccttagaagaagactgagtgagggacaagaagaggagaatctagagaacgagatgaaaaaggcgcaagaggacgccgagaagctgcgctccgtggtgatgcctatggagaaggaaattgctgccctgaaagataaactgacagaagcagaagacaagattaaagagctcgaggcaagcaaggtcaaagagctaaatcactatctggaggccgagaagagctgtcggacagacctagaaatgtacgtggccgttttgaacacacagaaaagtgtcttgcaggaagatgccgagaaactcagaaaggagcttcatgaggtgtgtcatttacttgagcaggagcggcaacagcacaatcaattgaaacatacctggcaaaaagccaacgatcagtttctggaatctcagcggctcctcatgcgggatatgcagagaatggagattgttctgacatcagaacaactcagacaggtggaagaactgaaaaagaaagaccaggaggacgacgagcagcaaagattgaacaagcggaaagaccacaagaaggcagacgtggaggaggagataaagattcctgttgtctgcgctctgacccaggaggagtcctcagcgcaactgagtaacgaggaggaacaccttgatagcacacgggggtcggttcacagcctggacgctgggctcctgctcccatctggagatcccttctctaaatccgataacgacatgttcaaagacggcctcaggagggcacaatccactgactccttggggacatccgggtccttacagtctaaggccctggggtataattataaggcaaaatccgctgggaatctcgatgaaagcgacttcggacccctggttggcgctgactccgtgtcagagaattttgataccgctagcttaggaagtcttcagatgccttccggcttcatgctcacgaaggaccaggagagagccatcaaggccatgactcccgaacaagaagaaacggcttctttgctatctagtgtgacacaggggatggagtccgcctacgtcagcccctcaggttatcggttggttagtgagaccgagtggaacctgcttcagaaggaggttcacaatgccgggaataagctgggacgccgctgtgacatgtgttctaattacgaaaagcagctgcaggggatccagatccaggaagctgagacccgcgaccaggttaaaaagctgcagctgatgctcaggcaggccaatgaccagctggaaaagacgatgaaggataagcaggaactggaggactttattaaacagagtagtgaggactcaagccatcaaatttcagccctcgtactccgagctcaggcatctgagatactgctagaagagcttcaacaaggtttaagccaggcgaagcgcgacgtccaggagcaaatggccgtgttgatgcagtctcgggagcaggttagcgaggagcttgtccgtcttcagaaggacaacgattcattacaggggaagcactcattacatgttagtctgcagcaggccgaggactttatcctacctgacacaacagaggcccttagagaactggtcctaaagtacagagaagatattataaatgtccggaccgccgcagatcatgttgaggagaagttgaaagctgagatcctcttcctcaaagaacagatacaggccgagcagtgcctgaaggagaacctggaagaaactctgcaactggaaattgaaaattgcaaggaggaaatagcttctatcagtagcttgaaggctgagctagagcgcatcaaagtggagaaaggacaactggaatcaacactgagagaaaagagccagcagctggagagtctacaggaaatcaagatttcactggaggagcagctgaaaaaggagaccgctgctaaggccactgttgaacagctgatgttcgaggagaaaaacaaagcccaacgcttgcagacggaacttgatgtgtccgagcaagttcagcgagacttcgtgaagcttagtcagactttgcaggtgcagctggaacgcatccgccaggccgactctctggagcgtattagagctatattaaatgatactaaattaaccgacatcaaccaattgccggagacatag

SEQ ID NO: 202366 - DNA, 2151 bp, synthetic construct
  misc_feature 1..2151: note = Description of Artificial Sequence: Synthetic coding sequence
  source 1..2151: mol_type = other DNA
atggcccagcccggccccgccagccagcccgacgtgagcctgcagcagagagtagctgagttggaaaagatcaacgctgaattcctccgggctcaacagcagctcgagcaggagtttaatcaaaagagggcaaagttcaaggaactatatctcgctaaagaagaggatctgaagagacaaaatgcagttctgcaggccgcccaggacgatttaggccacttacgcacccagctgtgggaggcccaagccgaaatggaaaatattaaggctatcgccaccgtttctgaaaacaccaagcaagaagctattgacgaggtcaaaaggcagtggagggaagaagtggctagtttgcaggccgtgatgaaggagaccgtcagagattacgagcaccagttccacctgcgcctggagcaggagcgcactcagtgggctcagtaccgggagagcgcagagagggagattgctgatctgcggcggaggctcagtgaaggtcaggaagaggaaaatctcgaaaacgagatgaagaaggcgcaggaggacgcggaaaaactgagatctgtggtgatgcccatggaaaaggagattgctgctcttaaagacaagcttacagaggcggaggacaagatcaaggaactggaggcttcgaaggttaaagagctgaaccactaccttgaagcagaaaagagctgcagaactgacctggaaatgtacgtggccgtattgaatactcagaaatctgttctccaggaagacgccgagaagctgcgcaaggagctccaccaggaacgccaacaacacaaccagcttaagcacacctggcagaaagcgaatgaccagtttctcgaaagtcaacgcctcctgatgagggacatgcagcgcatggaaatcgtgctgactagtgaacaactccgtcaggtagaggaacttaaaaagaaagatcaggaagatgatgaacaacagaggcttaataagcggaaggatcataaaaaagcggacgtggaagaggaaattaaaattccggtggtgtgtgccttaacacaagaggagtcaagtgcacaattatccaacgaagaagagcacttggattccactagaggttcagtgcatagcttggatgccgggcttctcctaccttctggtgatccgtttagcaagagtgacaatgacatgttcaaggatggactcaggagagctcagagtacagatagcctcgggacaagcggcagcctgcaatcaaaagccctcgggtataattataaggctaagtcagccggtaatctggatgaatccgattttggtcccctggtaggcgccgatagcgtgtcagagaatttcgataccgcaagcctgggttcgctccagatgccctcaggtttcatgcttaccaaagaccaggagagggcaattaaggccatgacaccggagcaggaagaaaccgcaagcctgcttagcagcgtgacccagggaatggagagcgcctatgtcagcccttctggttaccgactagtgagcgagactgagtggaatctcctgcagaaagaagtgcacaatgccggtaacaaattgggaaggcgttgtgacatgtgtagcaactacgaaaaacagttacagggcatccagattcaggaggcggaaactcgcgaccaggtgaagaaattgcagctcatgctccgccaggccaacgaccagcttgagaagactatgaaggacaagcaggaacttgaagactttatcaagcagagctcggaggacagcagccaccaaattagtgctctggtcttgcgcgcacaggcctccgaaatcctgttggaagagcttcagcaggggctgagtcaggccaagcgtgacgtgcaggagcagatggccgttcttatgcagtcccgggagcaggtgagtgaggaattagttcgacttcagaaggataacgactccttgcagggaaagcacagtctgcacgtctctctccagcaggccgaagacttcattctgccagataccacggaagctcttcgagagctcgtgctgaagtaccgtgaggatatcattaacgtcaggaccgccgcagaccatgttgaagagaagttaaaggctgagattttgttcctcaaagaacagatccaagctgagcaatgtctgaagaaaaagaaatag

SEQ ID NO: 202367 - DNA, 2589 bp, synthetic construct
  misc_feature 1..2589: note = Description of Artificial Sequence: Synthetic coding sequence
  source 1..2589: mol_type = other DNA
atggcccagcccggccccgccagccagcccgacgtgagcctgcagcaaagggtggcggagcttgagaagatcaacgcagagtttctaagagctcagcagcagctcgagcaagagttcaatcagaagagggccaagttcaaggaactttacctcgcgaaagaggaggatctgaaaagacaaaacgctgttttgcaggccgcccaggatgacctgggacatttaagaacccaactttgggaggctcaggctgagatggagaacattaaagctattgctactgtgtccgagaacacaaagcaggaggctatcgatgaggtgaagaggcagtggagggaggaagtcgctagcttgcaggccgttatgaaggagaccgtgcgcgactatgaacatcagttccatctcagactggagcaggagagaacacagtgggcccagtatcgggaatccgcagaacgtgagattgctgacctacgccgtagactgagcgaaggccaggaagaggagaatcttgagaacgagatgaagaaggctcaggaagatgccgagaagctcagaagtgtggtaatgcccatggagaaggagatcgctgcactgaaggacaaactgaccgaagccgaagacaaaatcaaggagctggaagcctccaaagtgaaggagcttaatcactacctggaggctgagaagagctgcagaactgaccttgagatgtacgtggctgtcctgaatacacagaagagcgtcttgcaggaggacgcggaaaaattacgcaaggaacttcacgaagtttgtcacctgctggagcaggagcgccagcaacacaatcagttgaaacacacctggcagaaagccaatgatcagtttctggagtctcagcgactgttgatgcgggatatgcagagaatggaaatagtcctgacttctgagcagttacggcaggtggaggagctgaagaagaaggatcaggaagacgatgagcagcagcgccttaacaagcgcaaggaccataagaaggctgatgtggaggaggaaatcaaaattccagttgtgtgtgccctcacacaggaagaatcatcagctcagctctctaatgaggaagaacatttagactctacacgggggtcggtccactcgctggacgcagggttgctccttcctagtggcgaccctttcagcaagtccgacaatgacatgtttaaggatggactacgccgagctcagagtaccgacagcttagggactagtggctctctgcagtctaaggcactgggctacaattacaaagccaaatctgccgggaacttggacgagagcgacttcggacccttggtcggagcggactctgtcagtgagaattttgacacagccagccttggcagcttgcagatgccaagtgggtttatgttaacaaaggatcaggaacgtgcaatcaaggctatgactcctgagcaggaggagacagcatctcttctgtcatcagtgactcagggcatggaaagcgcctacgtctcaccatccggttaccggttggtctcagagacggagtggaacctgttacaaaaggaggtgcacaacgcgggaaataagctgggaagacgctgcgacatgtgtagcaattatgaaaagcagctccagggaatccagattcaggaagccgaaactcgcgaccaggtcaaaaagttacagctgatgctgaggcaggcaaacgaccagctagaaaaaactatgaaggataagcaggaactcgaagactttattaaacaatcttccgaggattcaagccaccaaattagcgccttagtcctgcgcgctcaggccagtgaaatactgctagaggaactacagcagggattgtctcaggctaaacgcgatgttcaagaacagatggcagtgctcatgcagtcccgtgagcaggtcagtgaagaactggtaagactgcagaaagataatgactctttgcaggggaaacacagcttacatgtcagcttgcagcaagccgaggacttcatcctgcccgatacaaccgaggctttgcgcgagctcgtcctaaaataccgtgaagacattattaacgtgaggactgcagcagatcatgtagaagaaaaactgaaggctgagattttattcctgaaagagcaaatccaggccgagcagtgtctgaaagaaaatcttgaagaaacattgcagcttgagatcgagaattgcaaggaggagatcgcctcaatctcttcattgaaggctgaacttgagcgtatcaaggtcgagaagggacagctggagagcacgttgagggaaaagtcacaacagctggagagcctccaggaaatcaagataagtttggaggagcaattgaagaaagagactgcagcaaaagccacagttgagcagctgatgtttgaagagaagaacaaagcgcagagactgcagacagagctggacgtgagcgagcaggtgcaaagagatttcgtcaagctttctcagaccttgcaggttcaactcgagcgcatcagacaagctgattccctcgagagaatacgggctatactgaacgacaccaaacttaccgatatcaaccagttgccagagacatag

SEQ ID NO: 202368 - DNA, 1602 bp, synthetic construct
  misc_feature 1..1602: note = Description of Artificial Sequence: Synthetic coding sequence
  source 1..1602: mol_type = other DNA
atggccgccgccgcccccgtggccgccgacgacgacgagcggcggcgtaggcctggggcagctttagaagactctcgctctcaagaaggcgccaatggggaggctgagtccggagagctttcaaggttgcgagcagaactggccggcgccctggctgagatggaaaccatgaaggcagtggcggaggtctccgagtctaccaaggcagaagccgtcgctgcagtgcagcggcagtgccaggaggaggttgcgtcccttcaggccatcctgaaggacagcatcagctcatacgaagcacagataactgctctgaaacaggagaggcaacagcagcagcaggactgcgaggagaaagaaagggagctcggccgtcttaagcagctgttatccagagcctatcctctcgattccctggagaaacagatggaaaaagctcatgaggattcggagaaactgagagagattgtgctgccgatggagaaagaaatcgaagagctaaaggcaaaactattacgagccgaagaactgatccaggaaatccaacgccgcccgaggcatgcccctagcttgcacggctccactgagctgctgcctcttagtagagacccatctccccctctggagccccttgaagagctcagcggcgatggcggcccggctgccgaggcgttcgcccataattgtgatgattccgcttcaatctcctctttctcgctgggcggcggcgtggggtcatcatcttccctgccccaaagcagacagggactttcccccgagcaagaagagactgcctccctcgtttccaccggcaccctcgtccccgagggaatctacctgccaccacctgggtaccagttggtcccagacacacaatgggaacagttacagaccgagatgcaggttctcctggcacaggtccagaactctgagcaacttctgcggacacttcaggggacagtgagccaggcccaggagcgggtgcaactgcagatggctgagctggtcaccacacacaagtgcctgcaccacgaagtcaagaggttaaacgaggagaaccaagggctcagggctgagcagctcccgtcaagtgctccgcagggttcccaacaggaacagggagaagaagaaagtctgccctccagtgttcctgagctccaacaattgttgtgctgtacccgccaggaggctagagctcgcctgcaggcacaggaacacggcgccgaacggttaaggatcgagatcgtgacactgcgtgaggccctggaggaagagaccgtggcccgcgccagccttgaaggccagcttcgggttcaacgagaggagaccgcttctttgtgttccctgaggacagagatggagagagttcagcaagagcaatctaaggcccagctcccagatctgctcagcgagcagagagctaaggtcctgaggctgcaggcagagctcgaaacctcagagcaagttcagagagactttgtgaggctgtcacaggcacttcaagtgagactggaaaggatccgacaagctgaaaccctggagcaggtaagatctatcatggacgaggcccccctgactgatgtgagagacatcaaagatacgtag

SEQ ID NO: 202369 - DNA, 1710 bp, synthetic construct
  misc_feature 1..1710: note = Description of Artificial Sequence: Synthetic coding sequence
  source 1..1710: mol_type = other DNA
atggccgccgccgcccccgtggccgccgacgacgacgagcggcggcggaggcctggggcagcacttgaagattctagaagccaggagggagcaaatggcgaggctgagtccggggagctctctcgcttgcgagcagagctggctggggcactagctgagatggagacaatgaaggcggtggccgaggtgtccgagagcaccaaagctgaggccgtggccgccgtacagaggcaatgtcaggaggaagtggcaagcctccaggctatcttaaaggactctatttccagctacgaagcacagatcactgccttgaagcaggaaagacagcaacagcagcaagactgtgaagagaaagaacgcgagcttggacgcctgaagcaactgttatctcgcgcgtatcccttggatagtctggaaaagcagatggagaaggcccatgaggactcagaaaaactgcgggagattgtgctccccatggaaaaagaaatcgaagagctgaaagccaagctgctcagggcggaggagctcatacaggaaattcaacgcagaccaaggcatgctccaagcctgcacgggtccactgagctgctgcctctgagccgcgatccttctcctccgttggagccactcgaagaactttctggggacggaggacccgcagctgaggccttcgcccataactgcgacgacagtgcatccatcagctcctttagcctggggggcggtgtagggtcctcttctagcctgcctcaatcacgccagggtctgagccccgaacaggaagaaacagcttcattagtgtccaccggcaccctggtccccgagggcatttatcttcctccccctggctaccagttagtgcccgacactcagtgggagcagctgcagacagaaggaaggcaactgcagaaggacctggaaagcgtatctcgcgaacgggatgagctacaggagggattacgcagatcaaacgaagactgcgccaagcagatgcaagtgttgcttgcccaggtgcagaattcagaacagctgctcagaaccctacaggggacggtgtctcaggcacaggagcgtgttcaactgcaaatggcagagttggtgacgacccacaagtgtcttcaccacgaggttaagcggttgaacgaagaaaatcaaggccttagagcagagcagctaccctcatccgccccgcaggggagccagcaggaacagggcgaggaggaaagcctaccatccagcgtaccagagttgcagcagctgttgtgctgcacaagacaggaagctcgggccaggctgcaagcccaagaacacggagctgagaggctgcgaatcgagatcgttacattacgcgaagcattagaggaggagaccgtcgcaagagcctcacttgagggccagctccgggtccaacgagaagagaccgaggtgctggaagcctcattgtgctctctccggacagaaatggagcgagttcagcaggaacaaagcaaggcccagctaccggacctattgtcagagcagcgcgccaaggtgcttcgcctgcaagccgaactagagacttcagaacaggtgcagagagatttcgtgcggctatcccaggccctgcaagtgaggctggaacggatccgacaggcggaaactctggagcaggtacgtagcatcatggacgaagcaccactgactgacgtccgtgatattaaggatacctag

SEQ ID NO: 202370 - DNA, 1497 bp, synthetic construct
  misc_feature 1..1497: note = Description of Artificial Sequence: Synthetic coding sequence
  source 1..1497: mol_type = other DNA
atggccgccgccgcccccgtggccgccgacgacgacgagcggcggcgcagacctggggctgattcgatttctagttacgaagcccagatcacagcccttaaacaggagagacagcaacaacagcaggactgcgaagagaaggaacgtgaactcgggcggctgaagcagctgctgtcacgggcatatccgttggattcccttgaaaagcagatggagaaggctcatgaggattcagaaaaactgagagagattgtgttacctatggagaaagagattgaagaactgaaagctaagctgctccgcgccgaggaactgattcaggagatccagagaagacctagacacgcaccaagcctacatgggtcaaccgagctcctccccctgtctagagacccgagcccaccgttggagcccctggaagagttgagcggagacgggggacctgctgccgaagcatttgcacacaactgtgatgactctgcctccatttcctccttctcacttggtggtggggtgggaagctcctctagcctacctcagtcgaggcagggcttatcaccagaacaggaggaaactgcctctctcgtcagcaccgggactctggtcccagaggggatatatctaccaccgcctggataccagttggttcccgatacacagtgggagcaattacagacagaagggaggcaattgcagaaggatctggagtcagtgtcccgcgaaagggacgagcttcaggagggtctccggagatctaatgaggattgcgctaaacaaatgcaggttttgctggcccaggtgcagaacagtgaacagctgttacgtacacttcagggcactgtcagccaggcacaggagcgcgtgcagctccagatggccgaactagtcaccacccacaaatgtttgcaccacgaagtgaagagactaaacgaggagaatcaaggcctccgggcggagcaactgccctcatccgcacctcaggggtctcagcaggagcagggtgaggaagaatcattaccgtcatctgttccagagcttcagcaactgctctgttgcacaaggcaggaggctcgggcgcgcttacaggcacaagaacatggcgctgagagactacggatcgaaattgtgacactcagagaggcccttgaggaggagaccgtggccagggctagcttggagggccagctcagggttcagcgcgaggagacggaggttttagaagcttccttgtgcagcctcagaacggaaatggagagggtccaacaagaacagtcgaaggcacagttgcctgatctgctcagcgagcagcgcgcaaaggtcctccggctgcaggcagagttggagacaagtgaacaggtacagcgcgatttcgtgagactttctcaggctctccaagtgcgcctagaaagaatacggcaggctgagaccctggagcaggtcaggtcgatcatggacgaagctcctctgaccgatgtgcgtgatattaaggacacctag

SEQ ID NO: 202371 - DNA, 2085 bp, synthetic construct
  misc_feature 1..2085: note = Description of Artificial Sequence: Synthetic coding sequence
  source 1..2085: mol_type = other DNA
atgaccgacaccgtgttcagcaacagcagcaaccggtggatgtaccctagcgataggccactacaaagcaatgacaaagaacagctacaggctgggtggtcagtgcatcccggtggtcaacctgatcggcaacgaaagcaggaagaactgacagatgaggagaaggaaatcatcaacagagtgatcgcacgggctgagaagatggaagaaatggaacaggagcgcatcggccggttggtggatcgacttgagaatatgcggaaaaatgtcgccggcgacggtgtaaaccgctgtattctctgtggtgaacagttgggaatgttagggagtgcatgcgtggtatgcgaagattgcaagaaaaacgtctgcaccaagtgtggcgttgaaaccaataacaggcttcacagcgtctggctgtgtaagatttgtatcgagcagcgagaggtatggaagaggagcggcgcatggttctttaagggcttccctaaacaagtgcttccccaacctatgccaattaagaagactaagcctcagcagccagtctcagaaccagcggccccggagcaacccgcccccgagcctaaacaccctgcccgtgcacctgcacggggcgacagtgaggatagacgagggcccggtcagaaaacaggacccgacccagcttcagcgcccggacgcggaaattatggtccacccgtcagaagagccagtgaggctcggatgtcaagctctagtcgcgacagtgagtcctgggaccactcaggcggagccggcgattccagcagatctcccgctggactgcgaagagccaacagcgtccaggcctcccgaccagctcctgggagtgtccagagtcccgccccaccccagccaggtcagccagggactcccgggggctcacgccctggaccaggccccgcaggaagatttcccgaccaaaaacctgaggttgcgccctccgacccgggtacaacagctcctcctagggaagagcgaacaggcggagtgggcggctaccctgcagtgggcgcaagagaagacaggatgtcacacccatccggaccatactctcaagcctcggcggctgctccgcagccggcggctgccaggcagccccctccacccgaggaggaggaggaggaggccaacagctacgatagcgatgaggccaccacactgggcgctttagagttttcactcctctatgatcaggacaatagtagccttcagtgtacgattatcaaagctaagggccttaagcccatggactccaatggcctcgccgatccatacgtcaagcttcaccttctgccgggcgccagtaagtccaacaaactcaggactaaaacattacgcaatactcgaaacccaatatggaacgagactctagtctatcacggcatcacagacgaggacatgcagcgcaagaccctgcgcatctctgtctgcgacgaagacaagttcggccataacgaatttatcggcgaaactaggttctccctgaaaaagctaaagcccaaccagcggaagaacttcaatatctgtctggagcgggtgatccctatgaaacgggccggtacaactgggtctgcccggggtatggctttatacgaggaagaacaggtggagcgagtgggtgatatagaagagcggggcaagatcctggtctcacttatgtattccacccagcagggagggctgatagtcggcattattaggtgcgtgcatctcgccgccatggacgctaacggctacagcgacccattcgtgaaactgtggctgaagcctgacatggggaagaaggctaagcataagacacagatcaagaagaagactcttaacccggaattcaacgaagagttcttctatgacataaaacattccgacctggcgaaaaaatcacttgacatcagtgtatgggattacgatattggtaaaagcaacgattacatcggcgggtgtcaattggggattagcgccaagggtgagcgactgaagcattggtatgagtgtctcaagaataaggataagaagatcgaaagatggcatcaacttcagaacgagaatcatgtaagttcagattag

SEQ ID NO: 202372 - DNA, 2085 bp, synthetic construct
  misc_feature 1..2085: note = Description of Artificial Sequence: Synthetic coding sequence
  source 1..2085: mol_type = other DNA
atgaccgacaccgtgttcagcaacagcagcaaccggtggatgtaccctagcgatcggccactgcagagcaacgacaaggagcaactgcaagctggctggtccgtacacccgggcggccagcctgatcgtcaaaggaaacaggaggagctgaccgacgaggagaaggaaataattaaccgggttatcgccagggccgaaaagatggaagagatggaacaagaacggatagggcgcctggtcgatcggctggaaaacatgcgcaagaacgtggccggagatggcgtgaataggtgtatcttgtgcggagaacagttagggatgctggggagtgcttgtgtcgtgtgcgaggattgtaagaagaatgtatgcacaaagtgcggtgtggagacaaataatcggttgcactcggtctggctgtgtaaaatctgcattgagcagagggaggtgtggaaaagatctggcgcttggttcttcaaaggttttcccaagcaggtgctgcctcagcccatgccgattaagaagacaaaaccacaacaaccagttagtgagcccgccgcgcctgagcaacctgcacctgagcccaagcatcccgcccgagctccagccagaggggattcagaggaccgacgcgggcccgggcaaaagacaggtccagaccctgcgagtgcccccggcagaggcaattacggacccccagtgcgccgggcaagcgaggctcgcatgtcctcaagctcaagggacagcgagtcatgggaccactcggggggtgctggtgatagttcccgctcccctgccgggctcaggcgagccaacagcgtgcaggcatccagacccgcccccggttcagtccagtctcccgcccccccccagcctgggcagccagggacgcccggaggctccaggcccggcccaggacccgccgggcgttttccagaccagaagccagaagttgcaccatcggatcctggtaccactgccccaccgcgggaagagcgaacgggtggcgtcggcggctaccccgctgtcggggctcgcgaagatcggatgagccatccaagtggcccatatagccaagcttcagctgccgccccacagcctgccgcagcccgccagccacctccaccagaagaggaagaagaggaggccaatagttatgactccgacgaggctactacacttggcgcactcgaattctccctgttgtatgaccaagacaacagtagcctgcagtgtacgatcattaaagccaaggggctcaaacctatggactctaatgggctggctgacccctacgtgaaactgcaccttcttccaggcgcatccaaatcgaacaagcttagaaccaaaaccttgaggaacacccggaaccctatctggaatgagaccttggtatatcacggaattaccgacgaggatatgcaaagaaagacattgagaataagtgtatgcgatgaggataaatttggtcacaacgaattcatcggcgaaacccggttctccctgaagaaactcaaaccaaatcagcgcaaaaactttaacatctgtttggagcgagtaatccctatgaagcgagctggcactaccggcagcgcaagaggcatggctctgtacgaggaggagcaagtggagagagtcggtgacatcgaggaacggggcaagattctggtttcactgatgtactctacgcagcagggtggcttaatcgtgggaattattagatgtgtccatctagccgccatggatgcgaatggctatagtgatcccttcgtgaaactgtggctgaagccagacatggggaaaaaggccaagcacaaaacacaaattaagaaaaagaccctaaacccagaattcaacgaagagttcttctacgacattaagcattcggatctggcgaagaaatcgttggatatcagcgtgtgggactatgatataggcaagagtaatgattacatcggcggttgccagttgggtatcagcgccaagggcgagaggttaaagcactggtacgagtgtctcaagaataaagacaagaaaatcgaaaggtggcaccaactgcagaacgaaaatcatgtcagttcagactag

SEQ ID NO: 202373 - DNA, 2085 bp, synthetic construct
  misc_feature 1..2085: note = Description of Artificial Sequence: Synthetic coding sequence
  source 1..2085: mol_type = other DNA
atgaccgacaccgtgttcagcaacagcagcaaccggtggatgtacccctccgaccggcccctgcagagtaatgataaggagcagttacaggccgggtggagcgtgcaccctggggggcagccagaccggcagcggaaacaagaagaactgacagacgaggaaaaggaaattatcaaccgcgtgattgcgcgtgcagagaagatggaggagatggagcaggagagaatcggtaggctggtcgacagactagagaatatgcggaaaaacgtggcgggagatggggtgaatcgctgcatcctgtgcggcgagcagctcggcatgttgggaagcgcctgtgtggtttgtgaggactgcaagaagaatgtgtgcactaagtgcggcgttgagacgaacaacagactccatagtgtatggctgtgcaaaatctgtattgagcagcgcgaagtatggaagaggagcggcgcctggttcttcaaaggatttccaaagcaagtactccctcaacctatgccaattaagaagacaaagcctcaacaaccagtgtcagagccagccgcccctgagcagcctgctccagaacctaagcatcctgctagggcaccagctaggggagacagtgaagataggcgcggacctggtcagaaaaccggccccgatcctgcctcggcacccggccggggcaactatgggcctcctgtacgccgtgcctcagaagctaggatgtcctcgtcatcccgtgatagtgagtcttgggaccattcaggcggagcgggcgattccagtaggtctccagccgggctgcgcagggctaattccgttcaggcgagcaggccagcgcctggctcagtccagtcccctgcaccccctcagcctggccagcctggcaccccaggaggttcgaggccgggccctgggccagctggacgttttcctgatcagaaacctgaggtggctccatccgaccccggcaccacagcacctccccgggaagaaagaactgggggcgtgggggggtacccggccgtgggcgcccgtgaggaccgcatgagccacccctcaggcccctactcccaggccagtgctgctgccccccagcctgccgccgctcgccagccacccccccccgaagaagaggaggaggaggctaacagttatgacagcgacgaggctaccaccttgggtgccttggagttttcacttctctatgatcaggacaattcgagcttacaatgcactatcatcaaggctaaaggactcaaacccatggacagcaacggactggcagacccatatgtcaagctccacttgctgcccggggcgagcaagtccaataagctgcggaccaagactctgcgcaatactcggaatcctatttggaatgagacattggtctaccacggcattacagatgaggatatgcagcgcaagactctccggatctcagtgtgtgatgaggacaaattcggtcacaacgaattcatcggagagactagatttagcctgaagaaactcaagcctaaccaaagaaaaaatttcaatatctgcctcgaacgggtgattcctatgaagagggccggaacaactggatccgctagaggtatggccctttatgaggaagaacaggtagagagagttggggacatagaggaaagggggaagatcctggtttctttaatgtactctacccagcaaggaggcctaatcgtgggaatcatacgatgcgtccacctggcagctatggacgctaacgggtacagcgaccccttcgttaagctgtggctgaagcccgacatggggaagaaagccaaacacaagacacagataaagaagaaaaccttaaaccctgagttcaatgaggagtttttttacgacataaaacattctgatctggctaagaaaagcttggatatcagtgtttgggattatgacatcggaaaatcgaatgactacattggcggatgtcaactgggtattagcgctaagggtgaaagactgaagcactggtatgagtgccttaagaacaaagataaaaaaattgagcgatggcatcagcttcagaatgagaaccacgtttcctccgattag

SEQ ID NO: 202374 - DNA, 1938 bp, synthetic construct
  misc_feature 1..1938: note = Description of Artificial Sequence: Synthetic coding sequence
  source 1..1938: mol_type = other DNA
atgaccgacaccgtgttcagcaacagcagcaaccggtggatgtacccaagcgaccgccctctgcaaagcaagctaaaggaccggcggttggtggaccgattggaaaatatgcggaagaacgtcgcaggtgatggagtgaatcgttgtatcctctgcggcgagcagctaggaatgctggggagcgcttgcgtggtctgtgaggattgtaagaagaacgtgtgtacaaagtgcggagtggagaccaacaacagactgcactcggtttggctctgtaagatttgcattgaacagcgggaagtctggaagaggagcggagcgtggttcttcaaaggctttcctaagcaagtactacctcagcctatgcctataaaaaagacaaaaccccagcagcccgtctctgagcctgctgcccctgagcagcctgctccagaaccgaaacatccagcccgagctccagcccgcggcgactcagaggaccgccgcggacctggtcagaagactggccccgatcctgctagtgccccaggtcgcgggaactacggcccacctgtccgacgcgcaagcgaggcccgtatgagttccagcagtagggattccgagtcatgggatcatagcggcggagctggggatagctccagaagtccagcgggactcagacgagcaaatagtgttcaagcctcacgcccagcacctggctcagtgcagtccccggcaccccctcagcctggccagcccggcactcccgggggatcccgccccggtccaggccctgctggccgcttcccagatcagaaaccagaggtggccccctctgacccaggtacaaccgctccccctagagaagagcgaactggaggcgtcggggggtaccctgccgtgggcgcacgggaggacaggatgagtcacccatccggaccctattcacaggcttcggccgccgcgccgcagcctgccgctgcaagacagccgccacctcccgaggaggaggaggaagaagctaattcctacgattctgacgaggccactactctaggcgcgctggagttctctttactttacgaccaagacaactccagcttacagtgtactattataaaggccaaaggtctaaagcctatggatagtaatggccttgcagacccttatgtgaagctccatctgctgcccggagcaagcaaaagtaataaactccgcacaaagactcttaggaacacccgcaatcctatttggaatgagacactggtgtaccacggaattaccgacgaagacatgcagaggaaaaccctgcggatcagtgtctgcgacgaagacaagttcggccacaacgagttcatcggagagacgaggttctcgctcaagaaactcaaaccgaaccagagaaaaaattttaatatatgtctggagagggtcatccctatgaaacgcgccggaactactggatccgccagggggatggcactctatgaggaggaacaggtggaacgtgtgggcgatatcgaggagaggggcaaaatccttgttagcctcatgtatagcactcagcaagggggattaatcgtgggaattatcagatgcgtgcacctcgcggcaatggacgccaacggatactctgacccctttgtaaagctttggttgaagccggacatgggtaagaaagcaaaacacaagactcaaatcaaaaaaaagacattgaatccagaatttaatgaggagtttttctatgatattaaacattccgacctagccaagaagagtctggacattagtgtctgggattacgacatcgggaagagcaacgactatataggggggtgccaactggggatctcagctaagggtgagagacttaagcattggtacgagtgcttgaagaacaaagacaagaaaattgagcggtggcaccaactgcagaacgagaatcacgtgagcagtgactag

SEQ ID NO: 202375 - DNA, 2085 bp, synthetic construct
  misc_feature 1..2085: note = Description of Artificial Sequence: Synthetic coding sequence
  source 1..2085: mol_type = other DNA
atgaccgacaccgtgttcagcaacagcagcaaccggtggatgtacccctcagaccggccactccagtctaacgataaagagcaactccaggccggttggagtgtgcaccccggcggacagccggatcggcagcgaaagcaagaagagcttacagacgaggaaaaagaaattatcaacagagtgatcgctcgggccgagaagatggaagagatggagcaagagaggatcggcagactcgtcgaccgtctggagaacatgaggaagaacgtggcaggtgatggtgtgaatcgctgcatcctctgcggagaacagttgggtatgctgggcagtgcctgcgtagtgtgtgaagactgcaagaaaaatgtctgtaccaaatgtggagtggaaacaaataataggctccattcagtgtggctctgcaaaatctgtattgaacagcgggaagtatggaaaagaagtggcgcctggttttttaaaggctttcccaagcaggttctacctcagcctatgcccattaaaaagaccaagccccaacagcctgtttccgaacccgctgcgccagaacaacccgcccccgaacctaaacatcctgctcgggccccagcccgaggtgactccgaagaccggagagggccaggtcagaaaactggaccagacccagcctctgcccccggtagggggaattatggtccccccgtaaggagggcatcagaagctcgcatgtccagttcatctagagattctgagtcttgggaccattcgggaggtgccggtgatagctcaaggagccctgcgggcctgagacgtgcaaactccgttcaagcctctaggccagctccaggatcggtgcagtccccagcacccccgcaacctggccaaccagggacgccgggtggatctaggcccgggcctggacctgccgggagatttcccgatcagaagccggaagtggcgccttcagatcccgggactaccgccccgccgcgggaggagaggactggcggcgtgggggggtaccctgcggtgggggcccgggaagataggatgtctcacccatcgggaccgtacagccaggcaagcgccgccgccccccaaccggcagctgctcgacagcccccaccacctgaagaagaggaggaggaggcaaattcgtacgatagtgatgaggctactaccctgggcgctttggagttctctctgttgtacgaccaagacaattcgagtctccagtgcacaattatcaaagcaaaagggttgaagcctatggactctaatggactggcagacccctatgtgaaattacatttgttgcccggcgcctctaaatctaataaactccggacaaaaactttgcgcaacacccgcaaccctatctggaacgaaaccctcgtgtatcatggcattaccgacgaagacatgcagaggaagacacttagaatctcagtttgtgacgaggataaatttggacacaacgaattcatcggtgagacgcgcttctccctgaaaaagttaaaacccaaccaaaggaaaaacttcaatatctgcttagaacgcgtgatcccaatgaagagggcaggcacaaccgggtccgccagaggtatggccctttatgaagaagagcaagtggagcgcgtcggtgacattgaggagaggggtaagatccttgtttctcttatgtactcaacacagcagggtgggctgatcgttgggataattagatgcgtgcacttggcagccatggatgccaatggttactctgacccctttgtcaaactatggctgaagccagatatgggtaagaaggccaagcacaagacacagattaaaaaaaaaacattgaatccagaattcaacgaggaattcttctatgatataaagcactccgatctggcaaaaaaatcgctcgacatatcggtctgggattatgatattggcaagtccaacgattacattggcggctgccaattgggcatatccgcaaaaggtgagaggctgaagcattggtatgagtgtttgaagaacaaagacaaaaagattgagcggtggcatcaactacaaaacgagaaccacgtgtccagcgactag

SEQ ID NO: 202376 - DNA, 39 bp, synthetic construct
  misc_feature 1..39: note = Description of Artificial Sequence: Synthetic coding sequence
  source 1..39: mol_type = other DNA
atgaccgacaccgtgttcagcaacagcagcaaccggtag

SEQ ID NO: 202377 - DNA, 252 bp, synthetic construct
  misc_feature 1..252: note = Description of Artificial Sequence: Synthetic coding sequence
  source 1..252: mol_type = other DNA
atgaccgacaccgtgttcagcaacagcagcaaccggtggatgtacccctcagacaggcctctgcagtctaatgacaaagagcaactgcaggctggctggtccgtccaccctgggggccagcctgataggcagcgtaaacaggaggagctgacggacgaggagaaagaaatcattaaccgcgtaatcgcaagggctgaaaagatggaagagatggagcaagagagaattggaagactcgtggaccgcttgtag

SEQ ID NO: 202378 - DNA, 285 bp, synthetic construct
  misc_feature 1..285: note = Description of Artificial Sequence: Synthetic coding sequence
  source 1..285: mol_type = other DNA
atgaccgacaccgtgttcagcaacagcagcaaccggtggatgtacccttcagaccggcccctgcagtcaaatgacaaggagcagctccaagccggttggagtgtccatcccggagggcaacctgaccgccagcgcaagcaagaagagctgaccgacgaagaaaaggagatcatcaacagagtgattgctcgggcggaaaagatggaagaaatggagcaggaacgtataggcaggcttgttgatcgcctggagaacatgcgaaagaatgtcgccggggacggttag

SEQ ID NO: 202379 - DNA, 492 bp, synthetic construct
  misc_feature 1..492: note = Description of Artificial Sequence: Synthetic coding sequence
  source 1..492: mol_type = other DNA
atgaccgacaccgtgttcagcaacagcagcaaccggtggatgtaccccagcgataggcctctccagagtaacgataaagagcagctccaagctggatggtcagtgcatccaggcggtcaaccagacaggcagcggaaacaggaggagttgactgacgaagaaaaagagatcatcaacagagtgattgcgcgggccgagaagatggaagagatggaacaggagagaatcggacgtctggttgatcggctggagaacatgcgaaagaacgttgctggtgacggagtgaatcgctgcatactctgtggcgagcaattaggcatgcttgggtctgcttgcgtcgtgtgtgaggattgcaagaaaaatgtgtgcactaaatgcggtgtggaaacgaacaatcgccttcatagtgtctggctgtgtaagatctgtattgaacagcgcgaggtgtggaagaggtcgggcgcctggttcttcaagggcttccctaagtag

SEQ ID NO: 202380 - DNA, 384 bp, synthetic construct
  misc_feature 1..384: note = Description of Artificial Sequence: Synthetic coding sequence
  source 1..384: mol_type = other DNA
atgaccgacaccgtgttcagcaacagcagcaaccggtggatgtacccttccgaccggcctctacaatcaaacgacaaagaacaactgcaggctggatggtcagttcacccaggaggccagcccgaccgacagcgaaaacaggaagagctgactgacgaagagaaggagatcatcaatcgtgtgattgcacgcgctgaaaaaatggaagagatggagcaggagcgcataggccgactagtggatcgactggagaacatgaggaagaacgttgctggcgatggagtgaaccgatgcatcctgtgcggcgaacagctgggtatgctgggcagcgcctgtgtcgtatgtgaagactgcaaaaaaaacgtctgcacgaaatgtgggtag

SEQ ID NO: 202381 - DNA, 315 bp, synthetic construct
  misc_feature 1..315: note = Description of Artificial Sequence: Synthetic coding sequence
  source 1..315: mol_type = other DNA
atgaccgacaccgtgttcagcaacagcagcaaccggtggatgtacccatccgaccggccactgcagagtaatgacaaagagcagctacaggccggctggtcagttcacccaggcggacagcctgaccgacagcggaagcaagaggaactcacagacgaggagaaggaaatcattaatcgcgtgatcgccagggctgagaaaatggaggagatggaacaagagagaatcgggcggctcgtcgatagactagaaaatatgaggaagaacgtggccggagacggcgtcaacagatgcattctgtgcggggagcaatag

SEQ ID NO: 202382 - DNA, 120 bp, synthetic construct
  misc_feature 1..120: note = Description of Artificial Sequence: Synthetic coding sequence
  source 1..120: mol_type = other DNA
atgaccgacaccgtgttcagcaacagcagcaaccggtggatgtacccatcagatcgccccctgcagtcaaatgataaggaacagttacaggccgggtggagtgtgcaccctggcgggtag

SEQ ID NO: 202383 - DNA, 348 bp, synthetic construct
  misc_feature 1..348: note = Description of Artificial Sequence: Synthetic coding sequence
  source 1..348: mol_type = other DNA
atgaccgacaccgtgttcagcaacagcagcaaccggtggatgtacccctcagatcggccactgcaatctaatgataaggaacagctacaggccggctggtccgtgcatccaggcggccaacctgatcgccagcgcaaacaggaggagctcaccgatgaagaaaaagaaatcataaatcgagtgatcgccagggctgagaagatggaggaaatggagcaagagcgaatcgggcgcctggtggatcggctcgaaaatatgcggaagaacgtcgcgggagatggggttaaccgctgcattctgtgtggggagcaattgggtatgctcggatctgcctgcgtggtctgttag

SEQ ID NO: 202384 - DNA, 2073 bp, synthetic construct
  misc_feature 1..2073: note = Description of Artificial Sequence: Synthetic coding sequence
  source 1..2073: mol_type = other DNA
atgaccgacaccgtgttcagcaacagcagcaaccggtggatgtacccgtccgacagaccactccagtcgaaactgcaggcgggttggagtgttcatccaggcgggcagccagaccggcagcgtaaacaggaggaactcactgacgaggagaaggagattattaacagggtgattgcccgcgcagagaagatggaagaaatggagcaggaacgaattggacggttagtggatcggctggaaaatatgcgaaaaaatgttgccggagacggggtaaatcgttgtatactgtgcggcgagcaactgggtatgctcgggagcgcttgcgtggtatgtgaggactgtaagaaaaatgtgtgtacaaagtgtggcgtcgagacaaataacaggctccattctgtttggctctgtaagatttgcatcgagcagagagaggtgtggaagaggagtggagcatggttctttaagggattcccaaagcaagtgctgccacagcccatgcccatcaaaaaaacgaaaccccagcagcctgtgtcagaacctgctgccccagagcagccagctccggagccaaaacacccagcaagagcccctgccaggggggattctgaggaccgtcggggacctggacagaagacgggtcctgatccagcaagcgctcccggaagggggaattacggcccccctgtgcgtagggcttcagaggctcggatgagcagctcatcacgcgatagcgagtcttgggatcactctggcggggctggtgatagtagtcgctctcctgcggggttgcgaagagcgaactccgtacaggccagcagaccggctccaggctcagtgcagagccccgcaccacctcaaccagggcagccaggaacccccggaggcagccgccccggacccggaccagccggacgattccccgatcaaaagcctgaggtcgccccgtctgatcctgggactaccgcaccccctagggaggagagaacaggaggagtcggggggtaccccgcggttggcgcaagagaagaccgcatgagccacccttctgggccctactcgcaggcctcagccgctgccccccagcctgctgctgcacgccaaccgcctccgcccgaggaggaggaagaagaggcgaactcatatgactcagatgaggcaaccaccctgggagcactggaattttccctactctacgatcaagataattcttcactgcagtgcaccattatcaaagccaagggattgaaacccatggactccaacggtctggccgacccctatgtcaaacttcatctgctccccggtgcgagcaaatcaaataaattgcgcaccaaaacgctccggaataccagaaatccaatatggaacgaaaccctcgtctaccacggtataactgacgaagacatgcaacgtaaaactctgagaatctcagtgtgtgatgaagataagtttggccacaatgagttcattggggaaacacgcttttcccttaaaaaactcaagccgaatcagagaaagaatttcaatatttgcctagagcgcgtaattccgatgaagcgagctggcacaactggtagcgcccggggcatggccctttacgaggaggagcaggtggaaagggtgggcgatatcgaggagaggggcaaaatcttagtctcactgatgtattcaacacagcagggaggtctcatcgttggtattattaggtgcgttcatctagcggcaatggacgctaacggatatagtgatccctttgtcaaactctggttaaaacccgatatgggaaagaaggcaaaacataagacccagatcaaaaagaaaacgctgaatccggagtttaatgaagagtttttttacgacatcaagcacagcgatctggccaaaaaatcactggacatatccgtatgggactacgacatagggaaaagtaatgactatattggcggctgtcagttaggtatatccgctaaaggtgagcgcctgaaacattggtatgagtgtttgaaaaataaagacaagaagatcgagagatggcaccaactgcaaaacgagaatcacgtgagctcagactag

SEQ ID NO: 202385 - DNA, 378 bp, synthetic construct
  misc_feature 1..378: note = Description of Artificial Sequence: Synthetic coding sequence
  source 1..378: mol_type = other DNA
atgaccgacaccgtgttcagcaacagcagcaaccggtggatgtacccctcggatagacccctacagagcaacgataaggaacagctgcaggcggggtggagtgtgcaccccggtggacagcctgatcgacagagaaaacaggaagagctcacagacgaagagaaggaaattataaatcgtgtaatcgcgagggcagaaaagatggaggagatggagcaagaacggattggcagactcgtagaccgcttggagaacatgcgcaagaatgtcgccggagacggcgttaatagatgtattctctgtggagagcagcttggaatgcttggatccgcatgtgtcgtctgtgaagattgtaagaagaatgtctgtactaagtag

SEQ ID NO: 202386 - DNA, 546 bp, synthetic construct
  misc_feature 1..546: note = Description of Artificial Sequence: Synthetic coding sequence
  source 1..546: mol_type = other DNA
atgaccgacaccgtgttcagcaacagcagcaaccggtggatgtacccctctgatcggcctctgcagagtaacgataaggagcaacttcaggcgggctggtccgtgcatcccggcgggcagcccgatcgacagcgcaaacaggaagaactgaccgatgaggaaaaggagataattaaccgtgttattgctcgcgctgagaagatggaagagatggaacaggaacgtatcgggaggctggttgacaggctggagaacatgcgcaagaacgtcgcaggtgacggggtgaatcggtgcatcctttgtggggagcaattgggaatgttgggcagcgcatgtgttgtgtgtgaagactgcaagaagaacgtctgtactaaatgtggtgtggaaactaacaatcggctccactctgtgtggctgtgcaaaatctgtattgagcagcgggaggtttggaaaagatctggcgcatggttctttaaagggttccccaagcaggttctgccacagcctatgcccatcaagaaaaccaagcctcaacagcccgtttag

SEQ ID NO: 202387 - DNA, 285 bp, synthetic construct
  misc_feature 1..285: note = Description of Artificial Sequence: Synthetic coding sequence
  source 1..285: mol_type = other DNA
atgaccgacaccgtgttcagcaacagcagcaaccggtggatgtacccgtccgacagaccgcttcagtcaaatgacaaagagcagttgcaggccgggtggtccgtgcatccagggggccagccggatagacagagaaagcaggaagagctgacagacgaggaaaaggagataattaacagggtcatcgcaagagcagagaaaatggaggaaatggaacaggaaaggattgggcgactggtagaccgacttgaaaatatgaggaaaaacgtggccggtgacgggtag

SEQ ID NO: 202388 - DNA, 363 bp, synthetic construct
  misc_feature 1..363: note = Description of Artificial Sequence: Synthetic coding sequence
  source 1..363: mol_type = other DNA
atgaccgacaccgtgttcagcaacagcagcaaccggtggatgtacccatcagatagacccttgcagtctaatgacaaggagcagctacaggccgggtggtctgtgcaccctggggggcagcccgataggcaaagaaagcaggaagaactcacagatgaggaaaaagagattattaaccgggtcattgcgagagctgagaagatggaggagatggagcaggaacggattggcaggttagtggaccgactggaaaacatgagaaagaacgtggcaggagatggggtgaatcgttgtatcctgtgcggagaacaactcgggatgctgggttccgcgtgcgtggtctgcgaggattgtaagaaatag

SEQ ID NO: 202389 - DNA, 405 bp, synthetic construct
  misc_feature 1..405: note = Description of Artificial Sequence: Synthetic coding sequence
  source 1..405: mol_type = other DNA
atgaccgacaccgtgttcagcaacagcagcaaccggtggatgtaccctagtgacagaccccttcagagcaacgacaaggaacagctacaggccggttggagtgtgcatccaggagggcaacctgaccgtcagcgaaagcaggaggagctcactgatgaggagaaagagatcataaacagagtgatagctagagcagaaaagatggaggaaatggagcaggaacgaatcggacggctggtggatcggctcgagaatatgcgaaagaacgttgcaggagacggcgtgaatcgatgtattctctgcggcgagcagttaggcatgcttggaagcgcctgtgtcgtgtgcgaggactgtaagaaaaatgtttgcacaaagtgtggcgtggaaacgaataatcgactgtag

SEQ ID NO: 202390 - DNA, 948 bp, synthetic construct
  misc_feature 1..948: note = Description of Artificial Sequence: Synthetic coding sequence
  source 1..948: mol_type = other DNA
atggccgacaccatcttcggcagcggcaacgaccagtgggtgtgccccaatgataggcagctagccctccgggccaaactgcagactggatggtcagtgcacacctaccagactgaaaaacagagacgaaagcagcacctttcccctgcggaagtggaagccattcttcaggtgattcagagggcagaacgcctggacgtcctcgaacagcagcggatcggcaggttggtggagcggctggagaccatgcggcgcaacgttatgggcaatggactctcgcagtgtttattgtgtggtgaagttcttggcttcctgggaagcagctcagtcttctgcaaggactgtaggaagaaggtctgcaccaaatgtggaatcgaggcttcccctggccagaaacgacccctatggctgtgcaaaatctgcagtgagcaacgcgaggtatggaagagaagcggcgcctggttttacaagggcctccctaagtacatcttgccactcaaaaccccaggacgtgccgatgatcctcacttccgtccgctcccaacagagccggcggagagggaacctaggagctccgaaacttctcggatatatacatgggcaaggggaagggtcgtctcatcggatagcgattctgactccgacctttccagctcctcattggaagacagattaccgtcgaccggggtgcgcgacagaaaaggcgataagccctggaaggagagcggcggatcggtcgaggcccctagaatgggatttactcatccacccggccacctgtccggatgccagtcttccctggccagcggagagacaggcacaggctcggccgaccccccaggggggccccggccaggtttgaccaggcgagccccggtaaaggacacccccggtcgagccccagctgccgacgccgcgcccgctgggcctagctcttgtctaggctag

SEQ ID NO: 202391 - DNA, 861 bp, synthetic construct
  misc_feature 1..861: note = Description of Artificial Sequence: Synthetic coding sequence
  source 1..861: mol_type = other DNA
atggccgacaccatcttcggcagcggcaacgaccagtgggtgtgccctaacgatcgacagttggccctcagggcgaaattgcagactgggtggagcgtgcatacctatcagactgagaagcagaggagaaagcagcatttgtctcctgcagaagtagaggcaatattgcaggtaatacagagagcagaaagactcgatgtgctagaacagcagaggatcggcagactggtcgaacgattggagacaatgcgaaggaatgtgatgggcaatggcctgtcacaatgtcttctgtgtggagaggtcttgggcttccttggctcatcaagcgttttctgcaaagattgtcgcaaagtatggaagcgtagcggggcctggttctataaaggtctccccaagtatattctgcctctgaagactcccgggagggcagatgacccccatttccgacctctgcctactgagcctgccgaacgggagcctaggagcagtgagacatccagaatctatacatgggcaagaggtagggtcgtgtccagtgacagtgactcggacagtgatttgtcgagtagctcactggaggatcggctgccaagcaccggtgtgcgggacaggaaaggggacaaaccttggaaagaaagtggcgggtctgttgaagcgcctagaatggggtttacacatccaccaggacacctttccggttgccagagctccctggcctcgggagagaccggaaccggttccgctgaccctccagggggaccaagacctggcctgacgcggcgtgcaccagtcaaagacaccccaggtagagcgccagcagccgatgcagctccagcaggaccttcttcttgccttggatag

SEQ ID NO: 202392 - DNA, 861 bp, synthetic construct
  misc_feature 1..861: note = Description of Artificial Sequence: Synthetic coding sequence
  source 1..861: mol_type = other DNA
atggccgacaccatcttcggcagcggcaacgaccagtgggtgtgccccaatgaccggcagttggccctaagagcgaagctccagaccggctggagcgtgcacacataccagaccgaaaaacagcgccgcaagcagcacctatctccagccgaggtggaggcaatcctgcaggtaattcagcgggcagaaagactagatgtcctggagcagcagcgcattggcaggcttgtcgagaggctcgaaaccatgaggaggaacgtgatgggaaacggcctgagccagtgcctgctctgtggggaggtcctcgggtttctgggcagttcgagcgtcttctgcaaagactgtcggaaagtgtggaaacgaagcggcgcttggttttacaagggcctccccaaatatatactccctctgaagactcccggccgggccgacgaccctcacttccgccccctgcccactgagcccgccgagcgagagcccaggagtagtgaaacttcccgaatctacacttgggccagagggcgggtggtctcgtcagatagcgattcggatagcgacctgtctagttcttctttggaggaccgccttccctctaccggggtacgggatcgcaaaggggacaaaccatggaaggagtccggcggcagcgtggaggctccacggatgggcttcacacaccctcctggacatctctcgggttgccagagttcactcgcgagcggggagacggggacggggtcagccgacccacccggcggcccccgccctggactgaccagaagggctccagtgaaagatactcctggcagagccccggctgctgacgccgcgcctgcagggccctcatcttgtctcggttag

SEQ ID NO: 202393 - DNA, 2331 bp, synthetic construct
  misc_feature 1..2331: note = Description of Artificial Sequence: Synthetic coding sequence
  source 1..2331: mol_type = other DNA
atgaaccccgaggagcagatcgtgacctggctgatcagcctgggcgttctcgagagccccaagaagactatttgcgatcccgaagagtttctcaagtcctctctgaaaaatggtgtcgtcctgtgcaaactgataaatcgcctgatgcctggctccgttgagaagttctgcttagaccctcagacggaggccgactgtatcaacaacataaacgattttctcaaaggttgcgccacactgcaagtagagattttcgatccagacgacctgtatagcggtgttaacttcagtaaggtgctaagtacattactcgcggtgaacaaggccaccgaggatcagctgtccgagaggccctgcggacgctcgtcttccctgagcgctgctaacactagccagaccaacccccagggagctgtgtcttccaccgtctccgggcttcagaggcagagcaagaccgttgaaatgaccgagaacggctctcaccagctcatcgtcaaagcaaggttcaacttcaagcaaactaacgaggacgagcttagcgtgtgtaagggagacatcatctatgtaacccgagtggaggaagggggctggtgggagggtacgttaaatgggaggacgggttggttcccaagcaattacgtgagagagataaagtccagcgagcgtcccctgtctcccaaggcagtcaaagggtttgagacagctccactcacaaagaactactatacagtggtgctccagaacattctggacactgaaaaggagtatgcaaaggaattacaatcattactagtgacgtacttgcggccattgcagtccaataacaatctgtcaaccgtggaagtgacctctctcctggggaatttcgaggaagtttgcacctttcagcaaacactgtgccaggcattggaagagtgctcgaaatttcccgaaaatcagcacaaagtgggcggatgtcttctgtcgctcatgcctcacttcaagtctatgtatctcgcatactgtgccaatcatccctctgctgtgaacgttctgactcagcacagcgatgagctggagcagtttatggaaaaccaaggcgcctcctcccctggcatcctgattctgaccaccaatctctcaaagccctttatgagactggagaaatacgttaccttgctccaggagttggaacgccatatggaagatacacaccccgaccatcaggatatactgaaagctatagtggcatttaagacgctaatgggtcaatgccaggacctgcggaagaggaagcagttggagctgcagattttaagcgagccaatccaagcgtgggagggtgaagatatcaaaaaccttggcaacgtgatcttcatgagtcaagtcatggtccaatacggtgcatgtgaggaaaaagaggagcggtacctgatgttatttagcaatgtgttgatcatgctgtccgccagtccaaggatgagcgggttcatttaccagggcaaaattccaatcgccggcactgttgtgacacgcttggacgaaatcgagggtaacgattgtacattcgagattaccggcaacaccgtggagcgcatcgtcgtccactgcaacaacaaccaggatttccaggagtggttagagcaactcaaccggctgatcagaggcccggctagctgctcttcgttaagtaagacaagtagcagtagctgttccgcccacagctctttctctagcaccggacaacctcggggcccactggaaccacctcaaatcatcaagccatggtccctgagctgtctgaggcctgctcccccactgaggccgtcagcagctttgggctataaggaacgcatgtcctacatcctaaaagagtcaagcaagtcccccaaaacaatgaagaaattcctccacaagagaaaaacggaacgtaagccctctgaggaagaatacgtgattaggaaaagcaccgccgccttggaggaggacgcccagatactgaaagtaatagaggcttactgtacctccgccaattttcagcagggccatgggagttcaacaaggaaagatagcatcccacaagtgcttctgccagaggaggagaagctgataattgaggagacccggtccaatggccagacgatcatggaggaaaagtccctggtagatacagtttatgctttgaaagacgaggtgagagagctgaagcaggaaaacaagagaatgaagcaatgcctggaggaagaactgaaaagtaggcgggatctggagaaactcgtacgccgcctgctaaagcaaacagatgagtgtatcaggggggagagctcctctaagacttccatcctcccctag

SEQ ID NO: 202394 - DNA, 1869 bp, synthetic construct
  misc_feature 1..1869: note = Description of Artificial Sequence: Synthetic coding sequence
  source 1..1869: mol_type = other DNA
atgaccgagaacggcagccaccagctgatcgtgaaggcccggttcaattttaagcagaccaacgaagacgagctttctgtttgcaagggcgacatcatctacgtaaccagggtggaagagggaggatggtgggagggaactctcaacggcagaactggttggttcccctccaactacgtaagggagattaagagttctgaacgaccactctcccctaaagcagtgaaagggttcgagacggctcctctcactaagaactactatacagttgtcctgcagaatatacttgacactgagaaggaatacgcaaaggaacttcagtctcttctggtcacatacctgcggcccttgcagtctaataacaacctctcaacggtggaggttacctctcttcttggcaattttgaggaggtgtgcacattccagcagacactgtgtcaggcacttgaagaatgttccaaattccctgaaaatcagcacaaggtaggaggctgcttgctttcactgatgccgcatttcaaatccatgtacttagcatactgcgctaaccatccgagtgcagtaaacgtcctcacccaacattctgatgagctggagcagtttatggagaatcagggtgctagcagccccggaatcttgattctcaccacaaatctttctaagcccttcatgcgccttgagaagtacgtgactctgctgcaggagttggaaaggcatatggaggatacccatccagatcaccaggacatcctcaaggctattgtggccttcaagaccctgatgggacaatgtcaggatttacgcaagagaaaacagcttgaactgcagatcttatcagagccaatccaggcctgggaaggtgaggacattaaaaacctgggtaatgtgatcttcatgagccaagtgatggtccagtacggcgcctgcgaggaaaaggaggaaaggtacctgatgctattctcaaatgtgctcatcatgcttagtgctagccccagaatgagtggatttatataccaggggaaaattcctatcgccggaaccgtcgttacacgtctggatgagattgaagggaatgactgtacatttgagatcactgggaacacagttgaacggatcgtcgtacactgcaacaataaccaggattttcaagagtggctggaacagctcaataggcttatccgggggccagccagctgttcatctttgagtaaaacaagttcttcatcctgctctgcacacagctcctttagcagtacgggccagccacgggggccactggagccccctcaaataattaagccgtggagtttgagttgtctgcgtccggcccccccactacgcccatccgctgcgcttggatataaggaaagaatgagctatattctgaaagaatccagcaagtcccccaagactatgaagaagttcctccacaaacgtaaaacagaacggaagcctagtgaagaagaatatgttattcgaaagtcgaccgctgccctcgaggaggacgctcagattctgaaggtgatagaagcctattgcaccagtgccaatttccagcaaggccacgggagctctactaggaaggattcgataccacaagtgctcttgccagaggaggagaagctgattattgaggagacaagaagtaatgggcagaccattatggaggagaagtctttggtggacacggtctacgccctgaaggatgaagttcgggagctgaaacaagaaaataaacgaatgaaacaatgcctggaagaagagctcaagagtcgcagggatttggaaaaactggttcgaagattacttaagcagaccgacgagtgcatacggggcgagtcgtcctcgaagacatccatcttaccttag

SEQ ID NO: 202395 - DNA, 1869 bp, synthetic construct
  misc_feature 1..1869: note = Description of Artificial Sequence: Synthetic coding sequence
  source 1..1869: mol_type = other DNA
atgaccgagaacggcagccaccagctgatcgtgaaggcccggttcaatttcaaacaaacaaatgaagatgaactgagcgtatgcaaaggggacattatttatgtgacaagggtcgaggaaggtgggtggtgggaagggaccctaaatgggagaacagggtggtttcccagcaactatgtgagagaaatcaaaagctccgagagaccgctgagtccaaaggccgtaaaaggttttgaaactgcaccactgacaaagaactattacaccgttgttttgcagaatatcttagatactgagaaggaatacgccaaggagttacagtctctccttgtgacctatctgaggcccctacaatccaataataacctgtcaacagttgaagtcacctccttattgggtaatttcgaggaggtgtgcacctttcaacagaccctgtgtcaggctcttgaggaatgctcaaagttccctgaaaaccagcacaaggttggaggctgtctgctctccctgatgcctcacttcaagagcatgtacttggcttattgcgcaaaccacccaagcgccgtgaatgtgctcacccagcattctgacgagctcgaacaatttatggaaaaccagggggcgagctcacccggaattctaatactgactacaaatctgtccaagccgttcatgagactggagaagtatgtgacactgctacaggaacttgaaagacacatggaggatacccaccctgaccatcaggatatcttaaaggctattgttgcctttaaaaccctgatgggacaatgccaggacctccgtaagcgcaaacagcttgagctgcaaatcctgagcgaacccattcaagcatgggaaggcgaagacataaagaacttaggcaatgtcattttcatgagtcaggttatggttcaatatggggcttgtgaagagaaggaggagcgctacttgatgctcttctccaacgtcctgatcatgctctctgcctcaccccgcatgagtgggtttatttaccaggggaagatcccgatagccggaaccgtcgtgacccggttggatgaaattgagggtaacgactgtacctttgagatcactggcaatacagtggaacgcatcgtagtgcactgtaataacaaccaagatttccaggagtggttggaacagcttaaccgactgattcgtggccctgctagttgtagctccctgtcaaaaacgagctcttcctcctgctcggctcattccagcttctcatcaaccggacagcccaggggacctctcgaaccgccacagatcattaagccctggagtctcagctgcttaaggccggccccacccctccgaccttccgccgctttaggctacaaggagcgcatgagctacatcctcaaagaaagcagcaagagcccaaagactatgaagaaatttcttcataagaggaagacagagagaaaaccctctgaagaggagtatgtcatcagaaaatctacggcagctttggaagaggacgcccaaattctaaaggtcatagaggcctactgcacatctgctaatttccaacagggacacggatcctccacacgcaaggattctattccacaggtgctgctgcccgaggaggaaaaattgattatcgaggaaaccagatcaaacggacaaaccattatggaagagaagagcctggtcgataccgtgtatgcccttaaagatgaagtgcgggagcttaaacaggaaaataagcgcatgaaacagtgcctggaagaagaactgaagtcacgaagggatctggaaaaactcgtaaggagactcctaaagcaaactgacgaatgtatccgtggtgagtcatcctcaaagacctctatcttaccctag

SEQ ID NO: 202396 - DNA, 1950 bp, synthetic construct
  misc_feature 1..1950: note = Description of Artificial Sequence: Synthetic coding sequence
  source 1..1950: mol_type = other DNA
atgaccgagaacggcagccaccagctgatcgtgaaggcccggttcaacttcaaacagaccaatgaagacgagttgagcgtctgtaaaggcgatattatttatgtgacacgggttgaggaaggaggctggtgggaagggaccctgaatggcagaacggggtggttcccgagtaattatgtgcgggagataaagtccagcgacggagtgtcgttgctccttcctgggctggaatgcaatggggcaatctcagctcaccataacttgtgtctccctgggagcaagcgcccgctctctccgaaggccgtaaaaggattcgaaacagccccactcacaaagaattattataccgtggttctgcagaatatcttagacaccgaaaaggaatatgcaaaggaactgcagtctctccttgtgacgtacctgcgccccctgcagtccaataataatctatccactgtagaagttacgtcactgttaggtaatttcgaagaggtgtgcacttttcaacaaactctgtgtcaggcactggaggaatgctcaaaattcccagagaaccagcacaaagtgggcggttgcttgctttccctgatgcctcattttaagagcatgtatctcgcctattgcgctaaccatccgtcagccgtcaacgtcttgactcagcacagcgacgaattagagcaattcatggagaatcaaggggcatccagtccaggcatactgatcctcacaactaacctttcaaaaccttttatgcgcctagaaaaatacgtgacgctacttcaggaattggaaagacacatggaagacacccacccagatcaccaggatatcctgaaagccatagtggcattcaaaacgttgatggggcagtgtcaggatttacgcaagcgaaagcagttagagctgcagatcctttcagagcctattcaggcctgggaaggcgaggacatcaaaaatcttgggaatgtgatatttatgtcgcaagtaatggttcagtacggcgcgtgcgaagagaaggaagaacgctacctgatgctcttctctaatgtccttattatgctgtccgcatctcctagaatgtctggatttatctatcagggcaagatcccgattgctggtactgtagtgacacgacttgacgaaatcgaaggtaatgactgtacctttgagataactggcaacacggtggagcgcatcgtagtgcattgcaacaataatcaggacttccaggagtggctggagcaattaaacagactgatcagaggccctgcgtcatgctcctcactgagcaaaactagctctagcagctgtagcgctcacagttcgttcagcagcacaggacagccacgcggtcctctggaacccccacagatcatcaaaccttggtcgttatcttgtctgaggcccgcacccccattgagaccgagcgcagccctaggatataaggaacggatgtcatatatcctgaaggagagttctaaaagcccgaaaactatgaaaaaatttttacacaaacggaaaactgaacgtaagccctccgaagaagagtatgtgataaggaaaagtacagctgcacttgaggaagatgcccaaatcctgaaggtgatcgaggcctactgtacgtccgctaactttcaacaggggcacggtagctccacgcggaaagattctattccgcaggtgctactgcccgaggaagagaaattgattatcgaggaaacccgctctaatgggcaaacaattatggaggagaaatcactagttgataccgtgtacgcccttaaagacgaggttcgtgagctcaaacaagaaaataaacgcatgaagcaatgcctggaggaagagctgaaaagcaggagagacctggaaaaactggttcggagactgctcaaacaaaccgatgagtgtatacggggtgagagttctagcaagacctccatccttccctag

SEQ ID NO: 202397 - DNA, 1869 bp, synthetic construct
  misc_feature 1..1869: note = Description of Artificial Sequence: Synthetic coding sequence
  source 1..1869: mol_type = other DNA
atgaccgagaacggcagccaccagctgatcgtgaaggcccggttcaacttcaaacagactaacgaggatgagctatcagtgtgtaaaggagatatcatttatgtcacccgagtggaagaagggggttggtgggaagggaccttgaacggaagaactgggtggttcccctctaactatgttcgcgagatcaagtcttccgagcgtccactctcccctaaggccgtgaaaggctttgagactgcccctcttacaaagaactactatactgtggtgctgcagaatattctggacacggagaaagaatacgccaaggagctccaatccctacttgtgacttacctcagacctcttcagtcaaacaataacctgtctaccgtggaggtgacgtccctactgggaaacttcgaggaagtttgtacctttcagcagacgttgtgccaggccctggaggagtgcagtaagtttcccgagaatcagcacaaggtcggggggtgtttgctgagtctgatgccccactttaaaagcatgtacctggcatattgtgccaatcatcctagcgcggtaaatgtcctaacccagcattccgatgaactcgagcagttcatggaaaatcagggtgcctcttctccggggattctcatccttactaccaaccttagcaagccgtttatgaggttggaaaagtatgtgaccctgttgcaggaactagaacgacatatggaggatacccacccagatcatcaagatattctcaaggctatcgttgccttcaaaaccctgatgggtcagtgccaggacttaaggaagaggaaacagctggaattgcaaatccttagcgagccaattcaggcatgggagggtgaggacatcaaaaacctgggaaacgtaatctttatgtctcaggtaatggtccagtacggagcctgtgaagaaaaggaggagcgatatttaatgctcttctctaacgttctcatcatgctttccgcgagtccccgcatgagtggatttatttaccagggaaagatccccattgccggcaccgtggtgacacgcctggatgagatcgagggtaacgactgcacatttgaaataacaggaaacaccgtggaaagaatagttgtgcattgcaacaataaccaggattttcaggagtggctcgagcaactcaaccgattaatacgcggtccggcctcttgtagctccctttccaaaacctctagctcaagctgctcagcccattcttccttctcttctacaggacagccacgaggccccctggagccaccccagatcatcaaaccatggagcctcagctgtctccgacctgcccctcctctacgccccagcgctgctctaggttataaagaagcttttacctttgtatttgaggagagctctaagtcgccaaagaccatgaaaaagttcctgcataagcggaaaactgaaaggaagccctctgaagaagagtacgtgattcgtaagtctactgctgcgctagaggaagatgctcagatcttgaaggtcatcgaggcctactgtacatctgcaaacttccaacagggccacggcagcagcacaagaaaggattctattcctcaagtgcttttgcccgaggaagagaaattaatcatcgaggagaccaggagtaacggacagacaatcatggaagagaagagcctcgtcgacacagtatatgccttaaaggatgaagtgagggagctgaaacaagaaaataagcgtatgaaacaatgcctggaagaagagctaaaaagccggcgtgatctggagaaactggttcgcaggcttctcaagcagactgacgaatgtataaggggagagtcctccagcaaaacctccattctcccatag

SEQ ID NO: 202398 - DNA, 1896 bp, synthetic construct
  misc_feature 1..1896: note = Description of Artificial Sequence: Synthetic coding sequence
  source 1..1896: mol_type = other DNA
atgttctacgcccacttcgtgctgagcaagcggggccccctggccaaaatttggctcgcagctcactgggataagaagctgacgaaggcacatgtgtttgagtgtaacctcgaatcctcagttgaatccattattagtccaaaggtaaagatggccctacggacaagcggacatctgctgctgggcgtcgtgcggatctaccatcgcaaggcaaaatacttgctggctgactgtaatgaggccttcataaagattaagatggctttccgtccaggagttgtggatctcccggaggaaaaccgagaggcagcgtacaatgccattacactgccagaggagttccacgatttcgaccagcctctcccagacctggacgacattgacgtggcgcaacagttctcactgaaccaatcccgcgtagaagaaatcactatgagagaagaagtcgggaatataagtattcttcaggagaacgacttcggagattttggcatggatgatcgcgagatcatgagagaaggatcagccttcgaagacgatgacatgctcgtgagcacgacaacctcaaacctgctgttggaatcagagcagtccacctctaatctgaacgagaaaatcaaccacctggagtacgaagaccaatataaagacgataacttcggagaaggcaatgatggaggaatcctggatgataagctcatctctaataacgacgggggaatcttcgacgatccccccgctttaagcgaagccggcgttatgctacccgagcagcccgcacacgacgatatggacgaggatgataacgtcagcatgggtggcccggattcgccagattcagtggatccagttgagcccatgcccacgatgacggatcaaacaacgttagtgcctaacgaagaagaggcattcgccttggaaccaatcgatatcaccgtgaaagaaacgaaggcgaaacggaaaagaaagctgattgtagacagcgtgaaagaactagatagcaaaacaatccgcgcacaattatcagattactctgacattgtcactaccctggacctggcgccaccaaccaagaagctaatgatgtggaaagagactggcggtgtggagaagctcttctcgctccccgcacagcctctgtggaacaacagactcctgaagttatttacaaggtgcctgacgcccctggtgcctgaagacttacgcaaaagaagaaagggcggtgaggccgacaacctggacgagtttctcaaggaattcgaaaatccggaagtgccgcgcgaggatcagcagcagcagcaccagcagcgcgatgttatagacgaaccaattatcgaggaaccaagccgcctgcaggagagcgtgatggaggcaagcaggacgaatatcgacgagagcgctatgccaccaccaccgccacagggcgtcaagaggaaagccgggcaaattgaccctgaaccagtgatgccacctcagcaggttgaacaaatggagatccctcccgtggaactcccaccggaggagcctcctaatatatgccagctgatccccgaactggaactcttgcccgagaaggagaaagagaaggagaaagagaaggaggacgacgaagaggaggaagacgaagatgcatcaggcggcgaccaggaccaggaagaacggaggtggaacaagcggacacaacagatgttgcacgggctccagcgagctcttgccaagaccggggctgaatccattagcctgttagagctctgtaggaatacaaatcgtaaacaggcagcagccaaattttacagtttccttgtgttgaagaagcagcaggctatcgagctcactcaggaagaaccctattccgacatcattgccactccaggtccccgattccacattatttag

SEQ ID NO: 202399 - DNA, 501 bp, synthetic construct
  misc_feature 1..501: note = Description of Artificial Sequence: Synthetic coding sequence
  source 1..501: mol_type = other DNA
atggcccccaagaaggccaagaagcgggccggcggcgccaacagcaacgtgttctccatgttcgagcagactcagatacaagagtttaaagaggcctttactattatggaccagaatagggacggctttattgacaagaacgacctgcgggacacctttgctgccttagggagagtgaatgttaaaaatgaggagattgacgagatgattaaggaggcgcctggtcccataaactttacagtgtttctcacaatgtttggcgagaaactgaaaggggccgaccctgaggagacgattctcaacgcatttaaggtgtttgaccctgaaggcaagggcgtgttgaaagcagactacgtaagggaaatgctgacaacccaggctgaaagattctcaaaagaagaagtggaccagatgttcgccgcctttcctcctgatgtcacaggaaacctggattataaaaatctcgtccacattattactcacggagaagaaaaagactag

SEQ ID NO: 202400 - DNA, 909 bp, synthetic construct
  misc_feature 1..909: note = Description of Artificial Sequence: Synthetic coding sequence
  source 1..909: mol_type = other DNA
atggtgcggcccgtgcggcacaagaagcccgtgaactacagccagttcgaccacagcgactccgatgatgactttgtgagcgccaccgtacctctgaacaaaaagagccgcactgcccccaaagaactgaaacaggacaaacccaagccgaacttgaacaacctcagaaaggaagagattccggtacaggaaaagacacctaagaagcggctcccggagggcacgttctctattcccgcttcagctgtgccgtgcacaaaaatggcacttgacgataaactgtatcaaagagatctcgaggtggctctggcgctcagcgttaaagagctcccgaccgtgacaactaatgtccagaatagccaagacaaatccattgaaaagcatggttcttctaaaatcgagaccatgaacaaaagcccccacatctcaaactgcagcgtagcctctgattatctcgatctcgacaaaatcacagtcgaagatgatgtcgggggggtgcagggaaagaggaaagcggcatccaaagccgctgcccagcagcgcaagatcttgctggaaggctctgacggtgatagcgctaatgatactgagcccgactttgcaccgggcgaagactccgaagatgactccgatttttgcgagagtgaggataatgacgaagacttcagcatgcgtaaaagcaaggttaaagagataaaaaaaaaagaggtgaaggtcaagagtcctgtggaaaagaaagagaaaaagagcaaatcaaaatgcaacgcgctggccgccagcggcggcagtcggtcctctagttctcccttggtggtagtgtcggtcaaaagtccaaaccagtctcttcgcctgggtctgagcaggctagcacgtgtgaagccactccatcctaatgccacatcaacttag

SEQ ID NO: 202401 - DNA, 1008 bp, synthetic construct
  misc_feature 1..1008: note = Description of Artificial Sequence: Synthetic coding sequence
  source 1..1008: mol_type = other DNA
atggtgcggcccgtgcggcacaagaagcccgtgaactacagccagtttgatcactccgacagcgacgatgatttcgtatcagctacggtgccgctgaataagaaatcccgcacagcccccaaagagctgaaacaggacaaaccaaagcccaatctcaacaaccttaggaaggaggagatacctgtccaggaaaagacccccaagaaaagaatggcactggatgataagctctaccaacgtgatctggaggtcgcattggcactttctgttaaggagttgcctaccgtgacaaccaatgtacagaactcccaggataaaagtatagagaaacacggatcgtccaaaatcgagactatgaataaatctcctcatatatctaactgtagtgtggccagcgactatctggacttagacaaaattactgttgaggacgatgtgggcggagtgcagggcaaacgcaaagctgcaagcaaggcggccgcccaacagcggaaaattctcctcgaaggctcagacggtgattcagccaatgacaccgagcccgactttgctcccggagaggacagcgaggatgactctgatttctgcgagtccgaggacaatgacgaagacttctctatgcggaaaagcaaagtgaaagagattaagaagaaagaggtgaaggtgaagtcgccggtggagaagaaagagaagaagtcaaaatccaaatgtaacgcactggtgacctcagtagattctgctccggcagccgtgaagtcggagtcccagagtctccccaaaaaggtgtccctgtctagtgataccacgcggaagcctctggagattcggtccccatcagctgaaagtaagaagccaaagtgggtgccacccgctgcatcggggggctccagaagtagctcatcgcccctggtcgttgtgtctgtgaaatcccccaatcagagtctgaggttggggcttagtagactggcccgcgtaaagccgcttcatcctaatgcaacctctacctag

SEQ ID NO: 202402 - DNA, 702 bp, synthetic construct
  misc_feature 1..702: note = Description of Artificial Sequence: Synthetic coding sequence
  source 1..702: mol_type = other DNA
atgaacaagagcccccacatcagcaactgcagcgtggccagcgactacttagacctggacaagatcaccgtggaagatgatgtcggtggcgttcaagggaagagaaaggcggcttctaaggccgccgcacagcagcgaaagatcctcttagagggaagcgacggcgactctgccaacgacaccgagcccgattttgcacccggggaggactcagaggatgacagcgatttctgcgagagtgaagataatgatgaggacttcagcatgcgcaaaagcaaggtaaaagaaattaagaaaaaggaagtcaaggtgaaaagccccgtcgaaaaaaaggagaagaagagcaaaagcaaatgtaacgctctggtcactagcgtcgatagcgcaccagcagccgtgaagagcgaatcccagagtctccctaagaaggtgtccctctcctcagacactacgcgcaaacctttagagattcgcagccctagtgccgaatccaaaaaacctaaatgggtccccccaggaatggcctatttgtcctccagaacgggtgcatggaagattataaccgcagccagcggcggctcaagatctagttcatctcctctagttgtcgtgtccgtgaagtctcccaatcagagcctgcgtctaggcctttccaggctggcccgagttaagccgttacacccgaacgctacttctacttag

SEQ ID NO: 202403 - DNA, 408 bp, synthetic construct
  misc_feature 1..408: note = Description of Artificial Sequence: Synthetic coding sequence
  source 1..408: mol_type = other DNA
atgcggggcaagaccttccggttcgagatgcagcgggacctggtgtctttccctttgtcacccgcagtgagggttaaattagtgtctgcagggttccagaccgctgaggagctcttggaagtgaaaccaagcgagttgagtaaggaagtcggtatttccaaggctgaggcacttgagacccttcagatcatacggagagaatgcttgaccaataagcccaggtacgccggaactagcgagtctcacaagaagtgtactgctctggagctgctcgaacaagagcatactcagggcttcattattacattttgcagcgctctcgatgatatactcggcggtggcgtgcccctcatgaaaaccacggaaatatgtggcgccccaggtgtgggcaaaacccagttatggtag

SEQ ID NO: 202404 - DNA, 855 bp, synthetic construct
  misc_feature 1..855: note = Description of Artificial Sequence: Synthetic coding sequence
  source 1..855: mol_type = other DNA
atggccgagctggtgcccttcgccgtgcccatcgagagcgacaagactctcttggtctgggagttgtcaagcgggccgaccgccgaagctctccaccattccctgttcactgctttctcccaatttggactgctttacagtgtccgagtgttccctaatgctgcagttgcccatccgggcttctatgcagttataaagttctactccgcccgcgcggcgcatagggctcagaaggcctgtgataggaagcaactattccagaagagtccagtcaaagttagactgggtacccggcataaagccgtccagcaccaggccctggccctcaactcgagtaaatgccaggaactcgccaattattacttcggttttaacggatgctcgaagagaattatcaaactccaggaactatcagacttggaagaacgtgaaaacgaagacagtatggtgcctctgccaaagcaatccctcaagttcttctgcgccctggaagtggttctccccagttgcgattgtcgcagcccaggaattggactggtagaggaacccatggataaggtggaagagggccccctctccttcctcatgaagcggaaaacggcacaaaagctggcaattcaaaaggccctctccgacgccttccagaagcttctcatcgtggtgctggagtcaggcaagattgcagtggaatacaggcccagtgaagatatcgtaggggtccggtgcgaggaagagctgcacggattaatacaagtgccctgttctccctggaagcagtatggacaggaggaagaaggatatctttctgatttctccctcgaggaggaggagtttagactgccggaactcgactag

SEQ ID NO: 202405 - DNA, 351 bp, synthetic construct
  misc_feature 1..351: note = Description of Artificial Sequence: Synthetic coding sequence
  source 1..351: mol_type = other DNA
atgcacctgctggtgccccccccccagcacagcctgttcaccgccttcagccagttcgggttactgtactccgtgagagtgtttccaaatgccgcagtggcccatccaggcttttatgccgtcataaagttttattcagcgcgtgcagcccacagagctcagaaggcttgcgatagaaaacagctgtttcagaaatcccctgtcaaagtgcggctgggaacacgacacaaggccgttcaacatcaggccttggcacttaattcatctaagtgccaggagctggccaattactattttggatttaatggctgcagcaagagaataatcaaggaccactatcacagcctctag

SEQ ID NO: 202406 - DNA, 711 bp, synthetic construct
  misc_feature 1..711: note = Description of Artificial Sequence: Synthetic coding sequence
  source 1..711: mol_type = other DNA
atggccgagctggtgcccttcgccgtgcccatcgagagcgacaagactctcctggtgtgggaactctctagcggaccaaccgctgaggcactgcatcactctctgttcacagcgttttcacaattcggcctgctatattccgtgcgggtatttcctaacgccgcagtggcgcacccaggcttctatgccgtgatcaaattttacagtgcacgggccgcccatcgggcacagaaggcttgtgatcggaagcagctgttccagaagtctcctgtgaaagtgcgtctgggaactcgtcacaaagccgtgcaacaccaagccctggcactgaactcatccaagtgtcaggaattggcgaactactattttgggtttaacgggtgtagtaagcgtatcattaaacttcaagagttgagtgatctggaagaacgagaaaacgaggactctatggtgccccttccaaaacagagtttgaagtttttctgtgcattggaagtggtgctgccttcttgtgactgcagatcccctggaattggcttagtagaggaaccaatggacaaagtcgaagaagggcccttgagtttcctgatgaaaaggaaaaccgcacagaaactggccatccagaaggcgctgagtgacgcctttcaaaagttgctgatagtagttctaggaaagaccgtgctgattattcttgaggttctgcagttccagtag

SEQ ID NO: 202407 - DNA, 786 bp, synthetic construct
  misc_feature 1..786: note = Description of Artificial Sequence: Synthetic coding sequence
  source 1..786: mol_type = other DNA
atgcacctgctggtgccccccccccagcacagcctgttcaccgccttctcccagttcggactgctgtatagtgtacgagtgtttcccaacgctgcggtggcacaccccggtttctacgccgtcataaaattctactctgcccgggctgctcacagggcacagaaagcatgtgaccgcaaacagctgttccagaagagtccagtgaaggtccgactgggaacgcgtcacaaagccgtgcagcaccaggcactcgcactgaactcttccaagtgccaggaactcgctaattattattttggctttaatgggtgcagcaagaggatcatcaaactgcaggagctcagcgaccttgaggaacgagagaatgaggactctatggtgcccctgcctaagcagagtcttaaattcttttgcgcactggaggtggtgctgcccagttgcgattgcagatcacctggaataggattggttgaagagcctatggataaagtggaagaaggccctctctccttcctgatgaagcggaagaccgcccaaaagctggcaatccagaaggctctgtcagatgcctttcagaagctccttatcgtcgtgttagaatctggcaagatcgctgtggaataccgtccttccgaagatatcgtgggggtgcggtgcgaagaggaattgcacgggttaattcaggtcccttgtagcccatggaagcagtacggccaggaggaggagggttacctgtccgacttcagcctggaggaagaggaattccggctgcccgaactcgattag

SEQ ID NO: 202408 - DNA, 393 bp, synthetic construct
  misc_feature 1..393: note = Description of Artificial Sequence: Synthetic coding sequence
  source 1..393: mol_type = other DNA
ttcggcttcaacggctgcagcaagcggatcatcaagctgcaggagctgagcgatcttgaggagcgtgaaaacgaagacagtatggtgcctctcccgaagcagtccctcaagttcttttgcgcactggaagtggtcctaccttcctgcgattgtaggtctcccgggatcggcttggttgaggagcctatggacaaagtcgaagaggagtcaggcaaaatcgccgtggagtatcggcccagcgaagatattgtgggcgtaagatgcgaagaagaattacatggcctgatccaggtcccttgttccccctggaagcagtacggacaggaagaagaaggctatctgagtgacttttctttggaggaggaggaattccgcctgcccgagctggactag

SEQ ID NO: 202409 - DNA, 501 bp, synthetic construct
  misc_feature 1..501: note = Description of Artificial Sequence: Synthetic coding sequence
  source 1..501: mol_type = other DNA
atggccgagctggtgcccttcgccgtgcccatcgagagcgacaagaccctcctggtgtgggagctttccagcggccccactgccgaggcactgcatcattcactgttcacagcgttctcccagtttggcctactgtactccgtgcgggtttttcctaacgcggccgtcgcccatcccggattctatgcggttatcaagttctatagcgcacgagcagcgcaccgggctcagaaggcctgcgatcgaaagcagttgttccagaagtcgcctgttaaagttaggctgggcacccgccacaaggcggtgcagcatcaggcactggccttaaattctagtaagtgccaagaattggccaattattacttcgggtttaacgggtgctccaagagaattattaaagtgccatgcagtccgtggaagcagtacggtcaggaggaggaagggtatctttctgatttcagcttggaggaggaagaattccgactgccagagctggattag

SEQ ID NO: 202410 - DNA, 642 bp, synthetic construct
  misc_feature 1..642: note = Description of Artificial Sequence: Synthetic coding sequence
  source 1..642: mol_type = other DNA
atgcacctgctggtgccccccccccagcacagcctgttcaccgcctttagccagttcggcttactgtacagtgtgagggtcttccctaacgccgccgtggcccaccccggattctacgctgttattaaattctattcagcacgtgccgctcacagggctcaaaaagcttgtgaccggaaacaactgtttcaaaaaagccccgtaaaagttagactcggtacacgacataaggccgttcagcatcaggcactggccctgaatagctctaagtgtcaggagcttgccaactattactttggcttcaatggatgttctaagcgaataattaagttgcaggaattgtcggacctggaagaaagagagaatgaagattccatggtgcctctgcctaaacagagcctgaaatttttctgcgccttagaagtggtactgccatcttgcgactgcaggagccccggcatcggcttggtagaagagcctatggacaaagtagaggagggcccactctctttcctgatgaaaagaaaaactgcccaaaaattagcaatccaaaaggccctgtccgacgccttccagaaacttctaatcgtggtcctggggaaaacagtgctgattattctggaggtactgcaattccagtag

SEQ ID NO: 202411 - DNA, 756 bp, synthetic construct
  misc_feature 1..756: note = Description of Artificial Sequence: Synthetic coding sequence
  source 1..756: mol_type = other DNA
atggccgagctggtgcccttcgccgtgcccatcgagagcgacaagacccttctggtttgggagctcagttcaggccctacagcagaggccctgcatcactctttatttaccgcattctcccagttcgggctgctgtacagtgtgagagtattccccaacgctgccgtggcccatcctggcttctacgctgtgattaaattctactccgccagagccgcacacagggcccagaaagcctgcgatcggaagcagttatttcaaaaaagccccgtgaaggtacgactgggcaccaggcataaagctgtgcagcatcaggctctcgcccttaactcctcaaagtgtcaagagctggctaactactactttgggtttaatggctgctctaaaaggatcataaagcttcaggagctgagcgaccttgaggaaagggaaaacgaggatagtatggtgcccctgccgaagcaatctctgaagtttttctgtgccctggaagtggttctaccttcttgcgactgcagaagccctggtatcggtcttgtcgaagagcccatggataaggtggaggaagaatccgggaagatcgccgtggagtaccgaccaagcgaggacatagtgggtgtccgatgcgaagaagagctgcatggcctcatccaagtgccgtgttctccctggaagcagtacggacaggaggaggaaggatatttgagtgacttttctctggaagaagaagagttccggctgccagaactggactag

SEQ ID NO: 202412 - DNA, 420 bp, synthetic construct
  misc_feature 1..420: note = Description of Artificial Sequence: Synthetic coding sequence
  source 1..420: mol_type = other DNA
atggccgagctggtgcccttcgccgtgcccatcgagagcgacaagacactgctggtctgggagctgtccagcggaccgaccgcagaagctctccatcatagtttatttacagcattttctcaatttggacttctgtatagcgtgagagtttttcctaacgctgcagtagcccatcctgggttttatgccgttattaagttctacagcgcccgcgctgcgcatcgcgcccaaaaagcttgcgacagaaagcagctgtttcagaagagtcccgtgaaagttcggctgggcacaaggcataaggccgtccaacaccaggccctggcattgaacagcagtaaatgccaggagctagcaaattattattttgggtttaacggctgttcgaaaagaatcattaaagatcactatcacagcctctag

SEQ ID NO: 202413 - DNA, 432 bp, synthetic construct
  misc_feature 1..432: note = Description of Artificial Sequence: Synthetic coding sequence
  source 1..432: mol_type = other DNA
atgcacctgctggtgccccccccccagcacagcctgttcaccgcctttagtcagtttggcctcctgtactctgtgagagtgttccccaatgcagccgtggctcatcccgggttctatgcggtgatcaagttttactccgcgagggcggctcatcgggcgcaaaaagcatgcgaccggaagcagctgttccagaagagcccagtaaaagtgcgtctgggcacacgtcacaaggcagtgcaacatcaagccctcgctctgaactcctcaaagtgccaggagcttgcgaattattacttcgggttcaatggatgcagtaaaaggattattaaggtgccctgttctccctggaagcaatacggacaggaggaagaaggctatctttctgatttcagtcttgaggaagaggagtttcgccttccggaactcgactag

SEQ ID NO: 202414 - DNA, 2733 bp, synthetic construct
  misc_feature 1..2733: note = Description of Artificial Sequence: Synthetic coding sequence
  source 1..2733: mol_type = other DNA
atgcggcggagcgccgcccccagccagctgcagggcaacagcttcaaaaagcctaagtttatccctccgggccgaagcaaccctggcttgaatgaagagatcaccaaacttaatcctgacattaaactgttcgaaggcgtggcaataaacaatacctttctgccctcccagaatgacctgaggatttgctctctgaacctgcccagtgaagaaagtactcgtgagattaataatcgtgataactgcagcggaaaatactgtttcgaagccccgacccttgccacactggaccccccccacacagtgcattctgcgccaaaggaggtagcagtcagcaaggagcaggaggaaaagtccgattccctcgtaaaatatttctcagtggtctggtgcaaaccttcgaaaaagaagcataaaaaatgggagggagatgctgttctgattgtaaagggaaagtcattcattctgaagaatttggagggcaaagacattggaaggggaattggctacaaattcaaggaactcgaaaaaatcgaggaaggccagacactaatgatctgtggcaaggagatcgaggtaatgggtgtgatttcacccgatgatttctcatctgggcggtgttttcagctgggagggggcagcaccgccatcagtcattcaagccaggtagctcgcaaatgtttctcaaaccctttcaagtcggtttgcaaaccttctagcaaagaaaaccgccaaaatgacttccagaattgcaagccccggcacgatccttatactccaaactcgctcgtgatgccccggcctgacaaaaaccaccagtgggtttttaataagaactgcttccctctggtcgacgtggtgatcgatccctatctcgtttatcatttaaggccccaccaaaaggagggaataatcttcctttatgaatgcgtgatgggaatgcggatgaatgggagatgcggggccatcttagctgatgagatgggattaggcaagacgctgcagtgcatctctttgatatggacactgcaatgccaaggaccatatggcggcaagcctgtcattaaaaagaccttgattgtgacgcctggctccctagtcaacaattggaagaaggaattccaaaagtggcttggctcggagagaataaagatatttacggttgatcaggatcacaaagtggaggagttcatcaaatctatcttttattctgtgcttatcatctcctatgagatgctgttgcggtcactcgatcagatcaagaacataaagtttgatcttctgatatgtgacgaaggtcaccggcttaaaaacagcgctataaaaactacgacagcgttaatctccctgagttgtgagaagcgtattattctgaccgggaccccaattcagaacgacctgcaggaattttttgccttaattgactttgtgaatcccggcatactggggtcgctgtcttcgtaccgtaagatctacgaggagcctattatcctcagccgtgagccgtccgctagtgaagaagaaaaggagctcggcgaacgaagggctgccgaactcacttgtctgaccgggctgttcatactaagacgcacacaggaaatcattaataaatacctgccccctaagattgagaacgtagtcttttgcaggccaggcgcactacagatcgagctgtacagaaagctgctcaattcacaggtggttagattttgcctccaggggttgctggagaattctcctcacctgatttgcataggagcccttaaaaaattatgtaatcatccatgcctcctgtttaacagtatcaaagagaaggagtgttcttcaacttgcgataaaaacgaggagaagagtctgtataagggtcttttgtcagtgttcccggcggactacaaccctctgctgttcaccgaaaaagaatccggtaagctccaagtactgtctaagctgttggcggttatacatgaactgcgccctacagaaaaggtggtcctcgtctcaaactacactcagactctgaatatcctgcaggaggtttgtaagcgccacggctatgcctacacaaggctcgatggacaaactcctatcagccagcgccagcagattgtggatggttttaactcacagcatagttccttttttatcttcctgttgagctctaaggctggcggagtaggcctgaatcttatcgggggaagccacttaattctgtacgatatcgattggaatcccgctaccgacatccaggccatgagtcgggtttggcgcgacggacagaagtacccagtgcatatttatcgattgctaacaactggcaccattgaggagaagatttatcagagacagattagcaaacaaggactgtgcggtgcggtcgttgatctgaccaaaacttccgaacacatccagttctcagtggaggagctgaagaatttgtttactttacacgagtcgtcggattgcgtcacccacgatctcttggattgtgaatgtacgggagaagaagtgcataccggggacagcttggaaaagtttattgtgtctagagactgccagctcggaccccatcaccagaagtcaaacagtcttaagccgttgagcatgtcccagctgaagcaatggaaacacttctccggtgatcacctgaaccttaccgatccgtttctagagcgcatcacagagaacgtctctttcatattccagaacatcactacacaggcgaccgggacgtag

SEQ ID NO: 202415 - DNA, 900 bp, synthetic construct
  misc_feature 1..900: note = Description of Artificial Sequence: Synthetic coding sequence
  source 1..900: mol_type = other DNA
atggtgggcaaggcccggagcagcaacttcaccctgagcgagaagctggatctgctcaaattggtcaaaccatacgtgaagatcctcgaggagcacacaaataagcacagcgtgatcgtcgaaaaaaatcgctgctgggacattatcgctgtgaattacaatgctataggggtggatcggccccccagaacagctcaagggctacggacgctatacaagaggctcaaagagtacgccaagcaagaactgctgcagcagaaagagacccagtctgatttcaaaagtaacatcagtgaaccaactaagaaggtgatggagatgattccacagataagctctttctgcctggtgagggacaggaaccacatccagagcgctaatctggatgaggaggcacaggcgggtaccagctcgctccaagtaatgctggaccatcatcccgtcgcgatcaccgtagaggtgaagcaggaagaagacataaagcctcccccccctctggttctcaacagccagcagtccgacaccctggaacagcgtgaggaacacgagctcgtacatgtcatggaaagatcccttagcccatcacttagctcagttgacatgagaatgactagcagcccgagtagcattccgaggagagatgacttctttcgtcatgagtctggagagcacttccggagcctgctgggctatgatcctcagattctgcagatgctcaaagaagaacaccagataatcctggagaaccagaagaatttcggtctatatgtgcaggaaaagcgcgacggactgaagcggagacagcaattagaagaggaactgctgagggcaaaaattgaagtggagaagttgaaggctataagacttaggcacgatctgccggaatacaattcattgtag

SEQ ID NO: 202416 - DNA, 378 bp, synthetic construct
  misc_feature 1..378: note = Description of Artificial Sequence: Synthetic coding sequence
  source 1..378: mol_type = other DNA
atgcggcggagcgccgcccccagccagctgcagggcaacagcttcaagaaaccgaaatttatacctccagggcgctcaaatcccggactcaacgaagagatcaccaagctgaatcccgacattaagctctttgagggggtggccatcaataatacattcttgccttcccagaacgatttgcggatctgctccttaaatctgccctctgaggaaagcacgcgggaaatcaataaccgtgataattgcagtggaaaatattgcttcgaagccccaacactcgccactctggaccccccacatacagtgcactctgcccccaaggaggtggctgtgtctaaggaacaagaggagaagtcagacagcttagtcaagtattag

SEQ ID NO: 202417 - DNA, 354 bp, synthetic construct
  misc_feature 1..354: note = Description of Artificial Sequence: Synthetic coding sequence
  source 1..354: mol_type = other DNA
atgcggcggagcgccgcccccagccagctgcagggcaacagcttcaagaaaccaaagttcataccccctggcaggtcaaatcccggtcttaatgaagagataacaaagttgaatcctgatattaagctctttgaaggagtcgccattaataacacttttctcccatcacagaatgatctgagaatctgtagccttaacctgccatccgaagagagcacacgggagattaataacagagacaactgctcggggaagtactgtttcgaggctccaacgttggctactttggatccacctcacacagtacagacctggatgcgccgtcacaggctggtccctgtccactatcgctag

SEQ ID NO: 202418 - DNA, 477 bp, synthetic construct
  misc_feature 1..477: note = Description of Artificial Sequence: Synthetic coding sequence
  source 1..477: mol_type = other DNA
atgctggaccaccaccccgtggccatcaccgtggaggtgaagcaggaagaggatatcaagccaccaccccccttggtgcttaacagccagcagagtgacacactggaacaacgagaggagcatgaactggtgcacgtgatggaacggagtctaagcccaagtttgtcaagcgtggatatgcggatgacatcatcccctagttccattccccgccgcgacgatttcttccgacatgagtccggggagcacttccgcagcctgcttggctacgatccccagatcctgcagatgttgaaggaagaacaccagattattttagaaaaccaaaagaacttcggcttatatgtgcaggagaaacgagacggactcaagcgtcgacaacagctggaagaggaactgttaagagccaaaattgaggtggagaaattaaaagctattcgcctcaggcatgatctcccagaatataactccctatag

SEQ ID NO: 202419 - DNA, 1749 bp, synthetic construct
  misc_feature 1..1749: note = Description of Artificial Sequence: Synthetic coding sequence
  source 1..1749: mol_type = other DNA
atgggcctgggcaagaccctgcagtgcatcagcctgatctggaccctgcagtgtcagggaccctacggggggaaaccagtcatcaagaagacccttatcgtgacacccggttcgttagtcaacaattggaagaaggagtttcaaaagtggctggggtcggaacgaataaagatcttcacagtagatcaggatcacaaagtggaggaattcattaaatcaatcttctatagtgttctgattatttcatacgaaatgctgcttcgcagcctggatcagatcaagaatataaagttcgatttgttgatctgcgatgaaggccatcgattgaagaatagcgccatcaaaaccacaacagcacttatctcactatcatgcgagaagcggatcatccttaccggaacccctatccagaacgacctgcaggaattcttcgccctcatcgactttgtaaatcctggcatcctcggcagtctgtcttcctataggaagatttacgaagagcctattatattgagcagagagccatcagcttctgaagaagaaaaagagcttggggagagggagcaactgaatctgctggcctccctggatagcctcctgcggcggacccaagagattatcaacaagtatctgcctccaaagattgaaaacgtcgtgttttgtaggcccggcgcactgcagattgaattgtataggaaactcttaaatagtcaagtggtgagattctgtctgcaaggattgctcgagaactctccccacctgatctgtatcggtgcacttaaaaaattgtgtaatcacccttgtcttctattcaatagcataaaagagaaggagtgcagtagtacttgcgacaaaaatgaagagaagagcctgtataaaggccttctgtctgtctttccagcagattacaatccactgttgttcaccgaaaaagagagcggaaaactacaggtgctgtctaagctcctcgccgttattcacgagctgaggcccaccgagaaagtggttcttgtatccaattatacacagacgctgaacatcctgcaggaggtgtgcaagaggcatggctacgcttacacaaggctggacgggcagacccccatcagtcagagacagcagatcgtcgatggattcaacagccagcactcctctttttttatcttcctgctgagctcaaaagctgggggtgtgggactgaaccttattggcggatcgcatttaatcctgtatgacatcgattggaatcctgctacagacattcaagccatgtccagggtttggcgcgatggacagaagtatcctgtgcatatttataggctgctgaccacaggcacgatcgaggagaaaatataccagagacaaatttccaaacagggcctgtgtggagccgtggtggatctcacaaaaacaagtgaacacatccagttcagcgtcgaagagctgaagaatctgttcacacttcacgagtcgagcgattgcgtcacgcacgaccttctggattgcgagtgtactggcgaggaggtgcataccggggattctctcgaaaagtttattgttagccgggattgtcagctgggcccccatcatcaaaaatctaacagccttaagcctctaagcatgtcgcagctgaaacagtggaagcatttctctggggatcatttgaacctgaccgacccctttctggaaaggattacggaaaacgtgtccttcatcttccaaaacatcacaactcaggccacaggcacatag

SEQ ID NO: 202420 - DNA, 1290 bp, synthetic construct
  misc_feature 1..1290: note = Description of Artificial Sequence: Synthetic coding sequence
  source 1..1290: mol_type = other DNA
atggccgccatgctgaagtgcgtgatgagcggcagccaggtgaaggtttttggaaaagctgtgcaggctctgagtcgcatctccgatgagttctggctcgaccccagcaagaagggtcttgcattgaggtgcgtcaactccagccgatccgcctatggatgcgtgttattctcacccgtcttctttcagcactatcagtggtctgctctcgtgaagatgtctgagaatgaacttgatacaaccctccacttgaagtgcaagcttggcatgaagtctatcctgccgatctttcgatgcttgaattccctcgagaggaacattgagaagtgtagaatctttacaagatcagacaaatgcaaggtggtgatccagtttttctataggcacgggatcaagaggacacataatatctgtttccaggagagtcagcccctgcaggtaatctttgacaaaaacgtttgtacgaacactttgatgatccagccgcgactcttggcagatgccatcgtcttgttcacatcctcccaagaggaggttactttggccgttactcccctgaatttttgcctgaaatccagtaatgaagagtctatggacttgtccaatgccgttcattccgagatgttcgtgggaagcgacgagttcgattttttccagattggaatggacaccgagatcactttttgcttcaaggaactgaaaggcatactgacgttctctgaagccactcacgctccaatcagcatttattttgactttccaggaaagcccttggcactttctatcgatgatatgttggtcgaggcaaactttatccttgccaccttggcagacgagcagtcacgtgcgtcctcgccacaatccctctgcctgtcacagaagcgcaagcgatcagacctgattgagaaaaaagctggtaagaatgttactggtcaagcccttgaatgtatttccaagaaggctgcaccgcggaggctgtacccaaaggagaccctgaccaacatttccgccctagagaactgtggaagtcccgctatgaaaagagtggacggcgatgtctccgaagtctcagaaagctccgtctccaacacggaagaggtgccgggtagcctgtgccttcggaagttcagctgtatgtttttcggagctgtgtcgagcgaccagcaggagcacttcaatcacccattcgactctctggcaagggctagcgactctgaggaggatatgaataacgtctgttgcaggaaggaatttaacggaagtgacgcaaagtatttctgcataatctag

SEQ ID NO: 202421 - DNA, 1038 bp, synthetic construct
  misc_feature 1..1038: note = Description of Artificial Sequence: Synthetic coding sequence
  source 1..1038: mol_type = other DNA
atgagcgagaacgagctggacaccaccctgcacctgaagtgcaagctaggtatgaaatcaatcttgccgatctttcgatgccttaattcacttgaaaggaacattgaaaagtgcagaatattcacaagatccgataagtgcaaagtggtcatccaattcttttacaggcacggcattaagaggacacacaatatctgttttcaggagagtcagccactgcaggtcatcttcgacaagaatgtttgcactaatacgctgatgatccagccaaggctcctcgccgacgccatcgtactttttacatcttcccaggaggaagtaactcttgccgtcactccgctgaatttttgccttaagagttcaaatgaagaaagcatggatttaagcaatgccgtgcacagcgagatgtttgtcggcagcgacgagtttgacttcttccagataggcatggatacagaaatcacgttttgcttcaaggagctgaagggaatactaacgttcagcgaagcgacgcacgccccaatcagcatctactttgattttcccgggaagcctctagctctctccattgacgacatgcttgtcgaggctaactttatcctggcaaccttagcggacgagcagagccgcgctagcagtccacagtccttgtgcctgagccagaaacgcaagaggtctgatctaatcgagaagaaggccggcaagaatgtcaccgggcaggccctggaatgtataagtaaaaaggccgccccacggaggctttacccaaaagagacattgaccaatatatctgccctggaaaattgcggcagtcctgcaatgaaacgcgtggatggtgatgtctctgaggtttctgagtcttcagtcagcaacacagaggaagttcccggatcgttgtgtctccgtaagttctcttgtatgttctttggggcagtgagcagcgaccagcaagaacactttaaccacccttttgattctctcgcaagagccagcgacagcgaagaagatatgaataacggatccttttccatcttttag

SEQ ID NO: 202422 - DNA, 1038 bp, synthetic construct
  misc_feature 1..1038: note = Description of Artificial Sequence: Synthetic coding sequence
  source 1..1038: mol_type = other DNA
atgagcgagaacgagctggacaccaccctgcacctgaagtgcaagctggggatgaagagcatcctgccgattttcaggtgtttaaactccctggaaaggaacatcgagaagtgccgtatatttacaaggtctgataagtgcaaggtcgtgatccagtttttctacaggcatggaataaagcgaactcataatatttgtttccaagaatcccagcctctgcaggtgatattcgataaaaacgtatgcacaaatactctgatgattcagccgagactgctggctgatgctatcgttctctttacctcgtcccaggaagaggttacattggctgtgactccactgaatttttgcttgaaatccagtaacgaagaaagcatggacctgtcaaacgccgttcactcagagatgttcgtcggttctgatgagttcgacttcttccagatcggcatggacactgagatcactttctgctttaaggagctgaagggaattctgaccttttccgaagcaactcacgcacccattagcatctattttgatttccccggtaagccgctcgccctctccatagatgacatgcttgtcgaagcgaatttcatcctggccacactggcagatgagcagtcccgcgcttcctcaccacaatccttatgcctctcacagaagcgcaagcgatccgacttgatcgagaaaaaagccgggaaaaatgtgaccggccaggccctggaatgcatatctaagaaagccgctccaagaaggctttatcctaaggagactttgaccaatatctctgcactcgaaaattgcggaagtcccgccatgaaacgagtagatggcgacgtcagcgaagtgagcgagtcctcagtgtccaatactgaagaggttcccggctccctttgcctgagaaaatttagttgtatgttttttggggccgtgagtagcgaccagcaggagcacttcaatcatccttttgatagccttgcacgggcttctgactccgaagaggacatgaataatggctcattcagcatattttag

SEQ ID NO: 202423 - DNA, 1449 bp, synthetic construct
  misc_feature 1..1449: note = Description of Artificial Sequence: Synthetic coding sequence
  source 1..1449: mol_type = other DNA
atgggctgcgtgcagtgcaaggacaaggaggccaccaagctgaccgaggagcgtgacggttctttaaatcaatccagcggctataggtacgggaccgaccccactccccagcactatcccagctttggcgtcacatctatcccgaattacaacaattttcacgcagccgggggccagggcctgacagtgttcgggggggttaactcgagttcccacaccggaaccctaagaactcgagggggcactggcgtgacccttttcgtcgccttatatgactacgaggcacggaccgaggatgatttaagctttcataaaggtgagaaatttcaaatcctgaactcgtcggaaggggattggtgggaggccaggagcctcacaaccggtgaaacggggtatatccccagcaattacgttgcccctgtcgactccatccaggctgaagagtggtactttggcaagctcgggcgcaaggacgccgaaaggcagttgttgtcttttggtaacccacgcggaacattcctgattagagagtcagaaacgacaaaaggagcatacagcctgtccatccgtgattgggatgacatgaaaggtgaccatgtgaagcattacaagatcagaaagctggacaacggcggctattatattacaaccagggcccagtttgaaacgctgcagcaactggtgcaacattactccggcacatggaatggaaacacaaaagtggctatcaaaaccttgaaacccggcacgatgagccctgagtcctttcttgaagaagctcaaatcatgaaaaaacttaaacacgacaaactggtccagctgtatgctgtcgtttcggaagaacctatctatatcgtgacggaatatatgaacaagggatccctgctcgatttcttgaaggatggagaagggcgcgccctcaagctgccaaatctcgtggacatggctgcacaggttgccgccggaatggcgtacatcgagcgtatgaactacatacaccgcgatctgcggagtgcaaatatactagttgggaatggactaatttgtaaaattgccgatttcggactggcccggctgatagaagacaacgaatacacagccagacaaggagccaaatttccgatcaaatggacagcacctgaggcggcactctacggcagattcactattaaatctgatgtgtggagcttcgggattttgttgactgaactggttaccaaaggacgggtgccctaccccggaatgaataatcgcgaggtcttagagcaggtggagagaggatatcggatgccttgtcctcaggactgtcctatctcccttcatgaactgatgattcactgctggaaaaaagatccagaggagagacccaccttcgagtacctgcagtcattcctggaggattactttactgccacggaaccccaataccaaccaggggaaaacctgtag

SEQ ID NO: 202424 - DNA, 1410 bp, synthetic construct
  misc_feature 1..1410: note = Description of Artificial Sequence: Synthetic coding sequence
  source 1..1410: mol_type = other DNA
atggaggacagcaccagccccaagcaggagaaggagaaccaggaggagttgggggagacacggcgcccttgggaggggaaaactgccgcttccccacagtattctgagcccgaaagtagtgagcccttggaagctaaacagggaccagagactgggagacaatccagaagttcccgaccctggagcccccagagcagagccaaaacccccctcggcgggcccgcaggaccggagacctcttcccccgcaccagtgagtccaagggagcctagttcatctcccagccccctggcccccgcgcgccaggacctcgcagcacccccccaaagcgacagaactacctctgtcattccggaagccggcactccctaccctgatccactggaacagtcctcagacaaaagggagtccacaccccaccatacctctcagagcgaggggaacacgtttcagcagtctcaacagcctaaacctcacctgtgtgggcggcgggatgtaagctacaacaatgccaagcagaaggagcttcgctttgacgtatttcaagaggaggactcaaacagtgactatgacctccagcagccagctccaggtggatccgaggtggccccatctatgctggaaatcaccatccagaacgctaaagcttacctgctcaaaacctcctcaaactctggcttcaatctgtatgatcacctgtccaatatgctgactaagatactgaacgagcgacccgagaacgcggtggacatcttcgagaatattagtcaggacgtaaaaatggctcatttttcaaaaaaatttgatgccctacagaacgaaaacgagctcctaccaacttacgagatagcggagaagcagaaagcattgtttctgcaggggcatctcgaaggagttgaccaggagcttgaagatgaaattggtaggtgcaattggttcaattcgatccagaagaacgaggaggaagaggaagaggaggacgaggagaaggatgattctgactatatcgaacaggaggtcggcttacccctgctgactccaatctccgaggatctggaaattcagaatatcccaccatggacaacaaggctgtctagcaacctcattccccagtacgctatcgctgtgctacagtcgaacctgtggcccggtgcttacgcctttagtaatggtaagaagttcgagaatttctacatcggatggggtcacaagtacagccccgacaattacaccccacccgtgccgccgccagtctaccaagagtatccaagcggaccagagattacggaaatggatgatccatcagtggaggaggaacaagccttccgtgccgcccaggaggccgttctcttagcagctgagaatgaagagtccgaagaggatgaggatgaggaagacgattacgattag

SEQ ID NO: 202425 - DNA, 1803 bp, synthetic construct
  misc_feature 1..1803: note = Description of Artificial Sequence: Synthetic coding sequence
  source 1..1803: mol_type = other DNA
atggaggacagcaccagccccaagcaggagaaggagaaccaggaggagctgggcgagacccgccgcccctgggagggtaaaacggccgcctcaccccagtatagcgaacccgagagcagtgagccgcttgaggcaaagcaagggcccgaaacaggtcgccagtcccgaagttccaggccatggagcccccagtcccgagccaagactccactgggtggacccgcggggcccgagacaagttctcccgctcctgtttctcctagggagccttcttcatcgccttcacctcttgctcctgccagacaagacttggctgctcctccccagagtgaccgaacaacgtcagtaataccagaggcgggtacgccatatccagatcctttagagcagagttctgacaaaagagagagtaccccacatcacacaagccagtccgaaggaaatacctttcagcaatcacagcaacccaagccacacctttgcggcaggcgtgatgtgagctataacaacgctaaacaaaaggaactccggttcgatgtgtttcaggaggaagatagcaactccgactacgacctgcaacagccggccccaggtggaagcgaggtggctccatcaatgctggaaatcacaatccaaaatgccaaagcttacctgctcaagacaagtagcaacagtggattcaacctgtacgatcatctgtccaacatgctgacaaaaatccttaatgaacgccccgagaatgctgtggacattttcgagaatatctcgcaggacgtcaaaatggctcatttctctaagaagttcgacgcccttcagaatgagaacgaattactcccgacttatgaaatcgcagagaagcagaaggcactctttcttcagggccatttagagggggtcgaccaagaactcgaagacgaaatcgcggagaacgcactccctaacgtgatggaatcagctttctacttcgagcaagcgggcgtcggcctgggtactgacgagacctatcggatctttctggcactgaaacaactcacagatacccacccaatacagcgttgccgattctggggcaaaatcttgggtctggaaatgaactatatagttgcagaagtggaatttagagagggggaagatgaggaggaagttgaggaagaagatgtggccgaagaacgagataacggcgaatccgaagcccacgaggacgaggaagacgagttaccaaaatccttttacaaggcaccccaggccatcccaaaggaggagtcacgaactggggccaataaatacgtgtatttcgtgtgtaacgaacccggacggccctgggtgaagctgccacctgtgatccctgcccagatcgtgattgcaagaaagataaaaaagttctttaccggcaggctcgacgcacccatcattagttatcctcccttccccgggaacgagtccaattacctgcgggcccaaatcgctcggatttctgcaggcactcacgtatccccattgggtttctaccagtttggggaggaagaaggagaagaagaggaagaggccgaagggggtcgcaactcctttgaggagaaccctgacttcgaagggatccaggtgattgacctggttgagagcctgtccaactgggtccaccacgtacagcacatcctatctcagcggttccgtatatacccacctgggcagcacggctatcctcagatctcattccataacatgctgttgcagagttttaatcctacatttggcctcgagcatatgcctagtccaatggctaagagccttaagattagcacttag

SEQ ID NO: 202426 - DNA, 1536 bp, synthetic construct
  misc_feature 1..1536: note = Description of Artificial Sequence: Synthetic coding sequence
  source 1..1536: mol_type = other DNA
atgctggagatcaccatccagaacgccaaggcctacctgctgaagaccagctccaactccggattcaacctgtacgatcacttgtccaacatgttgacgaagatactcaacgagcggcctgaaaacgccgtggatatatttgagaacatttcccaggacgtgaaaatggctcactttagcaagaaatttgacgctttgcagaatgagaatgagctcctcccaacatacgaaatcgctgaaaaacaaaaggccttgtttctccagggtcatctcgaaggagtggaccaggagctggaggacgagattgccgagaatgcacttcccaatgtaatggagtcagctttttacttcgagcaggctggggtcgggctggggaccgatgagacctatcgcatattcctcgcgctgaaacaactcaccgacactcacccaatccagaggtgcaggttctggggtaaaatattaggacttgagatgaattacattgtcgcggaggtagaattccgcgagggagaggatgaagaagaggtcgaagaggaggatgtcgctgaagaacgcgacaacggggagtcagaggctcatgaagacgaggaagatgagcttccaaaatcgttctataaggctccccaggctataccgaaggaagagtcaaggactggcgcaaataaatatgtgtacttcgtttgcaacgaacccggtcggccatgggtgaagctcccgccagtgatcccggctcagatcgttatagctcggaagattaagaaatttttcacaggacggttggacgcccctattattagctatccacccttcccaggaaacgaaagcaattacctgagggcgcaaattgccaggatcagcgctggcactcatgtgtcgcccttaggcttctaccagttcggagaagaggagggcgaggaagaagaagaggccgaaggtgggaggaacagctttgaggagaaccctgatttcgagggaattcaggtgatagacctggtagagtcactaagcaattgggtacaccacgtacagcatatcctgagccagggccgctgcaactggttcaattctatccagaaaaacgaggaggaggaagaagaggaggatgaggaaaaagacgatagtgactatatcgagcaggaagtaggcctgcctctgctcacgcccatttcagaagacctggaaattcaaaatatccctccttggaccactaggctgagttcaaacctcatacctcagtacgcgattgccgttcttcagagcaacctatggcccggggcctatgccttctctaacgggaaaaagtttgagaatttctatattggctggggccacaaatacagtcctgataactacacaccacctgtacctcctcccgtgtaccaggagtacccatccggacccgaaatcacagagatggacgacccttctgttgaagaggagcaggcctttagagccgctcaggaggctgttttattagccgccgaaaatgaagagtctgaggaggatgaggatgaggaggatgattacgattag

SEQ ID NO: 202427 - DNA, 531 bp, synthetic construct
  misc_feature 1..531: note = Description of Artificial Sequence: Synthetic coding sequence
  source 1..531: mol_type = other DNA
atgctggtgaagcgggactaccggtacgaccgggtgctgttctgggggcgtatcctcgggttagtggccgattactatatagcacaaggactgtctgaggaccagttggcacctagaaaaacattatactctttgaattgcacagagtggtccctacttcctcctgccacagaagagatggtcgcacagagctccgtcgttaagggcagatttatgggtgatccaagctacgagtatgaacacactgagctgcagaaggtgaatgagggcgagaaagtgtttgaagaagagatcgttgttcagattaaggaggagacaaggctagtatccgttatcgaccaaattgataaggctgtcgcgatcatccctagaggagctctgtttaaaactccttttggtcctacgcatgtcaaccggacattcgagggctactataactggtacaaaacccccgctccacacccgacctgtgatgggaatcaaggggtccgggctcggggaagaagcccatccctcggcagattcctatag

SEQ ID NO: 202428 - DNA, 831 bp, synthetic construct
  misc_feature 1..831: note = Description of Artificial Sequence: Synthetic coding sequence
  source 1..831: mol_type = other DNA
atggacgccgacagcctgctgctgagcctggagctggccagcggcagcgggcagggtttgagccctgacagaagagcatcccttctgacaagcctcatgctggtgaagagagactacagatacgaccgggtgttgttctggggccgcattttgggcctggtggccgactattacattgcccaggggctgagcgaggaccagctggcaccccgcaaaacgctctacagcctgaattgcacagagtggtcgctcctgcctccagcaacggaagaaatggtggctcaatcatccgtcgtgaaaggaaggtttatgggcgatccatcctacgagtatgaacatactgaattacagaaggtcaacgagggggagaaggtgttcgaagaagaaatagttgttcaaattaaagaggaaactaggttggtctctgtgattgaccagatcgacaaggctgtagctataattcctaggggagctttgtttaaaacaccatttggcccaactcacgtgaacaggacctttgaaggactcagcctgagcgaggctaagaaactaagcagctactttcatttccgtgagcccgtggagctcaaaaataagactctcctagaaaaagcagacctggatccttctcttgactttatggattctctggaacatgacatacctaaggggagctggagcatccagatggagcggggcaatgctctggtggtgcttagaagtttactttggcccggactaaccttctatcacgcccctcggacaaaaaactacgggtatgtgtacgtgggtaccggcgaaaaaaacatggatttgccctttatgctgtag

SEQ ID NO: 202429 - DNA, 921 bp, synthetic construct
  misc_feature 1..921: note = Description of Artificial Sequence: Synthetic coding sequence
  source 1..921: mol_type = other DNA
atggacgccgacagcctgctgctgagcctggagctggccagcggctcggggcaggggctgtccccggacagaagggcctccctactaaccagtctgatgctggtcaaacgtgactatcgctacgaccgcgtcttgttctgggggcgcattctgggcctcgttgccgactactacattgctcagggattatccgaggaccagttggccccacgcaaaacactgtatagcctgaactgtactgaatggtcactgctaccccccgctacggaggaaatggtggcccaatccagcgtggttaagggacgctttatgggggatccctcttatgagtatgaacatacggaactgcagaaggtgaacgagggggagaaggtctttgaggaggagatcgtaatcgataaggcggttgccattattcccaggggcgccctgtttaagacaccatttggccccacccacgtcaacagaaccttcgaggggctgtcactgtccgaagccaaaaagctctcatcctacttccacttccgagagcccgttgaactaaaaaataagacactgctggagaaagctgatctcgacccatcactcgacttcatggactcgctggagcatgatatacctaagggctccgaagctgttgtacaaggcgatttcacttggctgctaagtcgctgcgggtttggatggccttgcagttgggactcatgctcagtatcaatgagggtgctcgaacatccggatggggaaggacaatgccctggcggggccgcccagccggccctggccggccctcatctgctaccctgcagcccacaccaggagttatggctgcggctgcgtggacactggcgagaggaacacgggctggcactccatgccattgagtgggaaccggcttggatgttcctgaatcgtgtctag

SEQ ID NO: 202430 - DNA, 402 bp, synthetic construct
  misc_feature 1..402: note = Description of Artificial Sequence: Synthetic coding sequence
  source 1..402: mol_type = other DNA
tgactgaactgcaccgagtggagcctgctgccccccgccaccgaggagatggtagcccagtccagcgtggttaagggacgcttcatgggggacccctcctatgaatacgagcatacggaactccagaaagttaatgagggagaaaaggtgttcgaagaggagatagtagtccagatcaaagaggaaacccggttggtgagcgtgattgaccagattgataaagctgtggctatcatcccccggggtgccctctttaaaacaccatttggtcccacgcatgtcaacaggaccttcgaaggatattacaattggtacaagacacctgcccctcacccaacttgcgacgggaaccagggggtaagagcacgcggcaggtccccttcattggggcggttcctatag

SEQ ID NO: 202431 - DNA, 1086 bp, synthetic construct
  misc_feature 1..1086: note = Description of Artificial Sequence: Synthetic coding sequence
  source 1..1086: mol_type = other DNA
atgtgggtgctgacccccgccgccttcgccggcaagctgctgagcgtgttccgccagccattgtcgtctttatggaggtcacttgtccccctattttgttggcttagggcaactttttggctgctggcaacgaagcgaagaaaacagcagctggttctgcgcggacctgatgagacaaaggaggaggaggaagacccccccctacccacaaccccaacatctgtgaactatcatttcacgcggcagtgtaactataagtgtggcttttgttttcacacagccaagactagcttcgtgctgccactcgaagaagctaagagaggtttgctgctcctgaaagaagctggtatggaaaagatcaacttcagtggcggcgaacctttcctacaggacaggggcgagtatctgggaaaactagtgcgattctgtaaagtggagctccgattgcctagcgtctctatcgtcagcaatgggtcactcatccgcgagcgatggttccagaactacggtgaataccttgacatactggcgattagctgcgattctttcgatgaggaggttaacgtgctcattggacgaggtcaaggaaagaagaatcacgtggaaaacctgcagaaactgcgccgttggtgtagagattaccgcgtggccttcaaaatcaatagcgtgatcaatcgcttcaacgtagaagaggatatgacggagcaaataaaagcactgaatcctgtccgctggaaggtttttcagtgcttgctgattgagggagagaactgcggagaggacgcactgcgagaggctgaaagattcgtaatcggagacgaagagttcgagagattcctggagagacacaaggaagtgtcttgcttagtgcctgagtccaatcagaaaatgaaggacagttacctaattctcgacgagtacatgcgctttctgaactgtagaaagggtcgaaaagatccatcaaagagcatactagacgtcggggtagaagaggctatcaagttctcaggattcgacgagaagatgttcctgaaacgtggaggcaagtacatttggtctaaggccgacctgaaactggactggtag

SEQ ID NO: 202432 - DNA, 765 bp, synthetic construct
  misc_feature 1..765: note = Description of Artificial Sequence: Synthetic coding sequence
  source 1..765: mol_type = other DNA
atgctgcacagcagccactaccccggcatggagaagatcaacttctctggtggagaaccctttctgcaagacaggggggaatatctgggtaagctggtacggttctgcaaagttgagttaagactccccagtgttagcatcgtatcaaacgggtccctgatcagagaaaggtggttccagaactacggggaatatctggatatcttggccatttcgtgtgacagctttgacgaagaggtcaatgttcttattggccgcggacagggcaagaaaaatcacgtggaaaatctgcagaagcttcgcagatggtgtagagactatcgagtggcctttaaaattaactcagtgatcaatagattcaacgtagaagaggatatgacagagcagattaaggccctgaatcccgtcagatggaaagttttccaatgtttgctgatagaaggagaaaactgcggcgaagacgccctgagagaggcagagagattcgtgattggggatgaggagtttgaacgatttttagagagacacaaggaagttagctgtctggtgcctgaatcaaatcagaaaatgaaggattcctatctgattctggacgagtacatgcgcttcctaaactgtagaaagggacgcaaggacccatctaaatcaatccttgatgtgggagtggaggaggccatcaaattctccgggttcgacgagaagatgttcctgaagcgggggggcaagtatatttggagcaaggctgacctaaagctggattggtag

SEQ ID NO: 202433 - DNA, 1674 bp, synthetic construct
  misc_feature 1..1674: note = Description of Artificial Sequence: Synthetic coding sequence
  source 1..1674: mol_type = other DNA
atgtacaagcggaacggcctgatggccagcgtgctggtgaccagcgctaccccgcagggtagtagttctagtgattcattggaaggacagagttgcgattatgcgtctaaatcctatgacgcagtggtgtttgacgtcttaaaagtcacccccgaggagtttgcatcgcagatcaccctcatggatattcccgtgtttaaagctattcaacctgaggaactggcatcatgtggttggtctaagaaggagaagcactctctggctccgaacgtagtagcctttacacggcgatttaatcaggtgagcttctgggtggttcgggaaatcctcacagcccagacattgaagatacgggccgaaatcctcagccactttgttaagattgctaaaaagctcctagaactgaataacctgcattctctcatgtctgttgtgtctgcgctgcagagtgcccccatcttccgcttgactaagacatgggctctgctgaataggaaagataaaacaacgtttgaaaagcttgactacctgatgtcaaaggaagacaattacaaacgcacccgggaatatattagatccctcaaaatggtcccctccattccttacctgggaatatacttgctcgatctcatctacattgattcagcctaccccgctagtggcagcattatggaaaatgaacagcgtagtaatcagatgaacaacatcctccgaattattgcagatctgcaggttagttgctcctacgaccatctaactaccctcccccacgtgcaaaagtacctcaaatcagtgcggtacatcgaagaactgcagaagttcgtcgaagacgacaattacaaactttctctgcgcatcgagcccggttcctcctcccctcgtctggttagctccaaggaggatctggccggcccatctgctgggtctggttcagctcgattcagtaggcgacctacgtgccctgacaccagcgtggcgggaagcttgccaactcctccagtccctagacatcgcaagtctcactccctcggtaacaacatgatgtgtcaactctccgtggtggaaagtaagtcagcaactttcccctcagagaaagccaggcatctcctcgatgactccgtgctcgagagccgctccccgcggcgagggctcgctctcacttcttcctccgctgttaccaatggactctctcttggatcgagcgagagtagcgagttcagcgaagagatgagctctgggctggaatccccaacagggccctgtatttgctctctgggtaattctgccgcagtccctactatggagggaccacttcggaggaagaccctgctcaaagagggccgaaagcccgccctgtcgtcgtggactcggtactgggtgatactctccggaagcaccctgctgtattacggagctaaaagtttgcgggggactgaccgaaaacattataaatcaacacccggaaaaaaggtttctatcgtgggctggatggttcagctgcccgacgatcctgaacatccggacatattccagctcaataatcccgacaagggcaacgtctataagtttcagacagggtcaagatttcatgcaatcctctggcacaaacaccttgacgatgcctgcaagtccaataggcctcaggtacctgctaatttaatgtcattcgaatag

SEQ ID NO: 202434 - DNA, 522 bp, synthetic construct
  misc_feature 1..522: note = Description of Artificial Sequence: Synthetic coding sequence
  source 1..522: mol_type = other DNA
atgtacaagcggaacggcctgatggccagcgtgctggtgaccagcgccacccctcagggcagctcctcaagcgactccttggaggggcagtcgtgcgactatgcatcaaaatcatatgacgcggtggtctttgatgtcctgaaggtgactcccgaagagttcgccagccaaattaccctgatggatattcctgtgttcaaagccatacagccagaagagctggctagctgcggatggtcaaagaaagaaaagcatagtctcgctccaaacgtggtagcattcacaagacgttttaaccagaaactgcttgagttgaataacctgcactctctgatgtctgtggtgtcagccctgcagagcgctcctatttttaggctgaccaagacctgggccctcctgaaccgtaaggataagactacgttcgagaagttggactacctgatgagcaaggaggacaattacaagagaaccagggagtatatccgctcccttaaaatggtaccaagcattccctacctgtag

SEQ ID NO: 202435 - DNA, 1590 bp, synthetic construct
  misc_feature 1..1590: note = Description of Artificial Sequence: Synthetic coding sequence
  source 1..1590: mol_type = other DNA
atgtacaagcggaacggcctgatggccagcgtgctggtgaccagcgccacgccgcagggctcaagcagctcagattctcttgaagggcagagctgcgattacgcctcaaagtcctatgacgccgtggtgtttgatgtgctaaaggtgacaccagaagaattcgcatctcagattactctcatggatattccggtgttcaaagcaatacagccagaggaactcgcgagctgcggctggtcaaaaaaggaaaagcattctcttgcccctaacgtggtagcctttactaggcgcttcaatcaagtctctttttgggtggtccgcgagattcttaccgctcaaacactgaaaattagggcagagatcctttcccacttcgttaagatcgctaagaaactccttgaacttaacaatttacactccttgatgtccgttgtgtctgctttgcagtcagcacccatttttcggctgaccaagacctgggcattgctgaatcgaaaggacaaaacgaccttcgaaaaattggactacttgatgagtaaggaagataattataagcggacccgtgagtatataagatccctaaagatggtaccctcaatcccgtacctgggaatctatctcctggatctcatctatattgacagtgcataccctgctagcgggagtataatggaaaacgagcagagaagcaatcagatgaataatatcctccgcattatcgctgacctgcaggtcagctgttcctacgaccacctgacgacattacctcatgttcagaagtaccttaagtcagtccgttatatcgaggaactccagaagtttgttgaggacgacaattacaagctgtctctcaggatcgaacccgggtccagctccccaaggctggtctcttcgaaggaggacctcgctggcccatcagccggcagcggttcagccagattttcacgacggcccacatgcccagacacatcggtcgccggatcgttgccgactccgcctgtaccaaggcaccggaagagtcattcgttaggcaacaaccgaggccgcctctacgcaacgttggggccgaattggcgcgttcctgtccgaaacagccctaggacacgatcatgtgtgtactcccctaccgggccctgcatttgttctttgggcaatagtgccgctgtgccaactatggagggcccactgcgccgtaagactcttctcaaggagggccgaaagcccgcactgtcaagttggacgcgctactgggtgatcctgagtggttcaaccctgctgtactacggtgctaagtcattgcgcgggactgaccggaaacacgtcagcatagtgggatggatggtgcagttgcctgacgacccggagcaccctgatatcttccaacttaacaatcccgataagggcaacgtgtacaagttccaaactggatcaagattccacgctatactgtggcacaagcacctggacgatgcatgtaagagcaatcgtccgcaggaggctggcgctgcccccgggccaactggtactgatagtcatgaggtggatcatctggagggcggagctgggaaagaggccgggccatgcgcctag

SEQ ID NO: 202436 - DNA, 918 bp, synthetic construct
  misc_feature 1..918: note = Description of Artificial Sequence: Synthetic coding sequence
  source 1..918: mol_type = other DNA
atgtacaagcggaacggcctgatggccagcgtgctggtgaccagcgccactccccagggatcatcgagtagcgactctttggaaggacaatcatgcgactatgctagcaaatcttacgatgcagtcgtgttcgatgtcctcaaggtgaccccggaggagtttgcttcccagatcaccctcatggacatcccagtgtttaaggccatccagccggaggaactggccagttgcggttggtccaagaaagagaagcattctctggcaccaaatgtagtagccttcacaagaagattcaaccaggtttccttttgggttgtgcgggagatcctgacggcgcaaacgttgaagattcgggctgagatcctctcacatttcgttaaaatagccaaaaaactgttagaactgaacaacctccactccctaatgagcgtggtgagcgctctccagagtgcgccaatttttagattaacaaagacgtgggctctgctaaatcggaaggacaagacaacattcgagaagcttgattacctgatgagtaaggaagacaattataagcgtactcgggagtatattagatccctgaagatggtgccgagcatcccctacttgggcatataccttttggaccttatatatattgattcggcgtaccctgctagtggctcgatcatggagaatgagcagcgaagtaaccagatgaataatatcctccgtattatcgcagacctgcaggtgtcgtgctcttatgaccatttgaccactctaccacacgttcagaagtacctgaaatctgtgcgttatatcgaggaactacagaagttcgtagaagacgacaattacaagctcagcctacgcatcgagccaggctcaagcagtcctcggttggtgtcttcaaaggaggatttggccgcaatgtag

SEQ ID NO: 202437 - DNA, 642 bp, synthetic construct
  misc_feature 1..642: note = Description of Artificial Sequence: Synthetic coding sequence
  source 1..642: mol_type = other DNA
atgtacaagcggaacggcctgatggccagcgtgctggtgaccagcgccaccccccaggggtcatcaagttcagactccctggagggacagagttgcgactatgcaagcaagtcatatgatgcggtcgtgttcgacgttctaaaagtgaccccggaagagttcgcgtcacagatcacattaatggacatccctgtgttcaaagccattcagcccgaagagctagcttcctgtggatggtccaaaaaggagaagcattcactcgctcccaacgtcgtggcattcacgcgaagatttaatcaggtgtccttctgggttgtcagggagattctcaccgctcaaactctgaaaattcgagccgagattctatcacacttcgtcaaaatcgccaagaagctcctagagcttaataatttgcactcattgatgagtgtggtgtcagcgctgcagtctgccccaattttccgcctcaccaagacatgggcgctgctcaatcgtaaagataagacgacgtttgaaaagctcgactacctcatgagcaaggaggacaattataaaagaactcgggaatacatacgctccctcaagatggttccctccatcccttaccttggtcggagcctcaactggctgatctttttctag

SEQ ID NO: 202438 - DNA, 327 bp, synthetic construct
  misc_feature 1..327: note = Description of Artificial Sequence: Synthetic coding sequence
  source 1..327: mol_type = other DNA
atgtacaagcggaacggcctgatggccagcgtgctggtgaccagcgctacaccccaaggaagttcttcaagcgactcgcttgaaggccagagttgcgattatgcctcaaagagctacgatgcggtagttttcgacgtcctgaaggtcaccccagaagagtttgcctcccagatcacccttatggatatccccgtcttcaaggccatccagccagagaagggctggcccgcaaggatggaggactctcttcaaaagtctaccgtgtcatccaggcctcatgacactctgcagttccgcaaaaccctccccgtaggcccagggacctag

SEQ ID NO: 202439 - DNA, 1155 bp, synthetic construct
  misc_feature 1..1155: note = Description of Artificial Sequence: Synthetic coding sequence
  source 1..1155: mol_type = other DNA
atgtacaagcggaacggcctgatggccagcgtgctggtgaccagcgctaccccccaggggtctagttccagcgattcgttggagggccaatcgtgcgactacgcatctaagagctacgatgccgtagtttttgacgtgcttaaggtcacacctgaggaatttgcctcccaaatcaccctgatggacattcctgtttttaaggcaatacaacccgaggaactggcatcctgcggctggtcaaagaaggagaagcattctctcgcccccaacgtggtggccttcactcggaggttcaaccaggtgtctttctgggtcgtacgcgaaattctcacagcccagaccttgaagatacgagcagagatcttatcccactttgttaagatcgcgaaaaagctattagaactcaacaatctccattccctgatgagcgtggtatctgccctgcagagcgcgcctatattcaggctcacaaagacatgggcgctgcttaacagaaaggacaagactacattcgagaagttggattacctcatgagcaaggaagacaactataaacgcacccgtgaatacatcagaagtttgaaaatggtcccttctattccctatctcgggatttacctgctggatttgatttacattgattctgcgtacccagcttctggcagcatcatggaaaacgagcaacgctccaaccagatgaacaacattctgcgcatcatagcggacttgcaggtttcatgctcatatgatcatctgaccaccctgccccatgtgcagaagtaccttaagtcggtgagatatattgaggagttacagaagtttgtagaggatgataactataaactgtccttgagaatcgagccgggcagctcaagtccaagactggtgtccagcaaggaggacttagccgttagccacctgagtagcctgtctcaccaagggcaagccgaggaagcgcggctgaaaccaacaagtgggcagcaccccgcatggatgtggccttcttcaagcagggtgcctgcagctccgccagcatctgccgccccccgaagtccgtggccccgcaacctgcggaatgaccagggccagcccggagcagtggccttgacttgcaatcctagtaccctcggttcaagaagccgtaggatcacttag

SEQ ID NO: 202440 - DNA, 1614 bp, synthetic construct
  misc_feature 1..1614: note = Description of Artificial Sequence: Synthetic coding sequence
  source 1..1614: mol_type = other DNA
atgtacaagcggaacggcctgatggccagcgtgctggtgaccagcgccactccacagggatcctcctccagtgattcattggaaggtcagtcgtgtgactacgccagcaaatcctatgatgccgtcgtgttcgatgtccttaaggtgactcccgaagaatttgcaagccagattaccctcatggacattcccgtttttaaggccattcagccagaggaactggccagctgtggttggtccaaaaaggagaaacattccctcgcacccaacgtggtagctttcacaagaagattcaaccaagtgagcttttgggtagttagggaaatcttgacagcgcagactcttaagatcagggccgagattctctctcacttcgtgaaaatcgctaagaagctgctggagctcaataatttgcattcgctgatgtctgtcgtaagcgccctgcagagtgccccaatcttcagactgacgaagacctgggccctcctgaataggaaagacaaaacgacctttgagaagcttgattatctcatgtcaaaggaggacaactacaaaaggacccgcgagtacatacggagtctcaaaatggtcccctccatcccttatctgggcatctatcttctagatcttatctacatcgattctgcatatcccgcttctggttccatcatggaaaacgagcagagaagcaatcagatgaacaatatcctgagaattatcgccgatctgcaggtgtcatgcagctatgatcatttaacaacacttccccatgtccagaaatacttgaagtcggtccgctatatagaagaattacagaaattcgttgaggatgataattataagctgtccctgcgtatcgaacctggaagttccagcccgagattggtttcctccaaagaggatctggccggcccctcagccggttccggttctgcaaggttctctcgacgtccgacatgtcccgatacgtccgtggcgggttcactgcccacaccgcctgttcctcgacatcggaaatcacactcccttggcaataatcgggggaggttgtatgccactctggggccaaattggcgcgtacctgtacgcaacagtccgcgcacccgaagttgcgtgtactcacccaccggcccctgcatctgtagcctgggcaactctgcagcggtgcctaccatggaaggtccgctccgacgcaagacactactgaaggagggtcgaaaacccgcattgagctcttggacccgctattgggtaattctgtctggcagcacacttctgtactacggggcgaaatctctccgcggaaccgatcggaaacattacaagtccacccctggcaagaaagtaagtattgtgggctggatggtccagcttcctgacgacccggagcaccctgacatcttccagctgaacaaccccgataaagggaacgtgtacaagtttcagaccggatctcgcttccacgctatactgtggcacaagcatctggatgacgcctgtaagagtaaccgcccccaagaggccggtgccgcacctggtcccacagggactgactcgcatgaagtggatcacctagagggcggggcaggaaaggaagccgggccttgcgcatag

SEQ ID NO: 202441 - DNA, 462 bp, synthetic construct
  misc_feature 1..462: note = Description of Artificial Sequence: Synthetic coding sequence
  source 1..462: mol_type = other DNA
tgaaacagcccccggacccggagctgcgtgtacagccccaccggcccttgcatttgttccctcgggaatagcgcggccgtgcccacaatggaggggccattgcgacggaagacactgctcaaggaggggcgcaaaccagcgttatcctcatggacgagatactgggtgatcctcagtgggagtaccctactttactacggcgccaagtcgctcagggggacggatcgaaaacactataagtcaacccccggaaagaaagtgtccattgttggctggatggtgcagctcccagatgaccctgaacaccccgatattttccagcttaacaaccccgacaagggcaatgtttataagtttcaaactggctctcggtttcatgctatactgtggcacaaacatctggatgacgcttgtaagtccaaccggccgcaagtgcccgctaatctcatgtcatttgagtag

SEQ ID NO: 202442 - DNA, 6252 bp, synthetic construct
  misc_feature 1..6252: note = Description of Artificial Sequence: Synthetic coding sequence
  source 1..6252: mol_type = other DNA
atgttcagcaagaagccccacggcgacgtgaagaagagcacccagaaggtcctggacacaaagaaggacgccctgacacgtttaaagcacctccggatagtgattgagaacgcagagagcatcgatcttaagcaattttttgatcaacacttttcacatatttactatgtttttttcgagaacttcgttacaattgaggctagcctgaaacagaaaggccataaatcacaaagagaagaactcgacgccatcctgtttattttcgaaaaaattctccagctattgcccgaaaggatccaccagagatggcaattccattctatagggctgatccttaaaaagctattgcatacaggaaattccctcaagattcgccgcgagggggtgcggctgtttctgctgtggctacaagctttgcagaataattgttctaaggaacagttatggatgttttcatgtctgatacccggcttctcagcacctcagagtgagcatgggcctcgtaccctggacaatctcatcaaccctcccctgaacctccaagagacacaggtgaccatcgaggagatcacaccattggtgccaccccaaagcggtgacaagggacaggaagatctgacaagttatttcctcgaggcgttgcttaagtacattgtgattcaagttaaatcactggaatggaagaataaagagaatcaggagcgcggcttctcctttctgttcagtcattttaagaagtactatctgccttacatctttcccaatatatgcaaggaaaacagtctgtaccaccccatcctcgacatccctcaaatgcgccccaagccacactacgttgtcattaagaaggatgccgagactaacgaagccatctattgtacgaaagaacctttcatcaaagccagagtcattgttattcgctggctggttagcttctggttggaaccaaagcctcatacggggcctcacatccccggaatggaaggagaggtcctgcccaagaatatccagcgtgccgctgcctcgctggtgagccgcgaagagagcaagaatgacaatgccgataagaccgataggaccactgagcctgaacagagtcattctaacaccagcacgctcactgagcgagaaccgtcctcatcctccctgtgttccattgacgaggagcacttgactgacattgagatcgtgcgaagggttttttctagcaaacgcagcaacgtgaacttcgtcaccgagatctttaggcaagccttcctacttcctatctgcgaagctgccgccatgagaaaggtagtcaaggtgtatcaggagtggattcaacaggaagagaagcccctcttcatgcaggaacccgaggagatcgtcatcacgtccagcgatctgccctgtatcgagaatgtgaccgaccacgacataagcatggaggaaggggagaaacgggaagaagagaatggcacgaatacagcagaccatgtaaggaacagctcctgggcaaaaaacggcagctatcagggcgccctccataacgcatccgaagaggccaccgaacaaaacattagagccggaacacaggccgtgttgcaggtgttcattattaattcaagcaacatttttcttctcgagcctgccaatgaaattaagaacctcctggacgagcacacagatatgtgcaaacgaatcctcaatatctatagatacatggtcgtgcaagtgtccatggacaagaagacctgggaacagatgcttttagtcttactacgggtgactgaaagcgtgctgaagatgccaagccaagcgttcctccaatttcagggaaaaaaaaacatgacactcgccgggcgtctggctggaccactgttccagaccctcattgtcgcttggattaaggcaaatctgaatgtgtacatttctcgtgaactctgggacgacctgcttagcgtgctttctagtctgacttactgggaggagcttgccaccgaatggagtctcacaatggaaactctcaccaaggtgcttgcacgcaatttatacagtttggatcttagcgaccttcccctagacaaactgtccgaacagaaacagaagaaacacaagggcaaaggcgtgggtcacgaatttcaaaaagtgagcgtggataaatcattttccaggggttggagtagagaccagccaggacaagcccccatgagacagaggtctgcgaccaccaccggttctccgggtactgagaaagcgaggtcaatcgtccggcagaaaacggtcgccatgagatcaaggtctattggggagtgcgcactccccagtgcttacatccgaagcgccaaaagcgccccagtgctgatacatactagcaaacctttcctccccgatatcgtgctgacccctcttagcgacgagctcagcgacattgatgatgcccaaatcctcccacggtccacccgtgtgagacatttctcccaatccgaggaaactgggaacgaagtgtttggagccctgaatgaagaacaacccctcccccgatccagctctacatcagacatactcgagccttttacagttgagagggctaaggtcaataaggaggatatgagccagaagctgcccccattaaacagcgatatcggcggcagcagcgcaaacgtgcccgacttgatggatgaattcatcgcggagaggttgcgctccggaaatgcctcgacaatgacaaggcgcggctctagtcctggcagtctagaaatccctaaagatttgccagatatccttaataaacaaaaccagatgagacccattgacgatccaggagtgcccagtgagtggacaagcccggcttcagcgggctcctctgacctgatatcatccgatagccattccgacagtttttccgcctttcagtacgacggtcgtaaattcgacaactttgggttcggaaccgatacaggggtaacctccagtgcggatgtggattcaggctccggtcaccaccaaagcgcggaggaacaggaagtagcatctttaacaacgctgcacatcgactcagagacctcttctctcaaccaacaagcttttagcgccgaggtcgccacaataacaggaagcgaatcagcatctccagtgcacagcccattaggcagccggtctcaaacacctagcccttccacactaaacatcgaccatatggaacagaaggacctgcagctggatgaaaaattacaccactcagtgctccagacacccgacgacctcgaaatttccgagtttccatccgaatgctgctcagtgatggcaggaggtaccttgaccggctggcatgctgatgtggctacagtgatgtggaggcggatgctaggcattttgggggatgtgaacagcataatggaccccgaaattcatgctcaggtgtttgattacctgtgtgagctatggcagaacctggcaaagatacgtgacaacttagggatctccactgataatctgacaagtccctccccaccggtgttaattccacccctgaggatcctgaccccttggctgttcaaggcaaccatgctgactgataagtataagcagggcaaactacacgcctataagctgatctgcaataccatgaagaggcggcaagacgtaagcccaaatagagactttctgactcacttctataacatcatgcattgtggcctattgcatatcgaccaggacatcgttaatactataattaagcactgttcacctcagttcttttcgctggggctgccgggggcaaccatgctgatcatggatttcatcgtagcagcgggccgcgttgcctcttcagccttcctgaatgctccacgggtggaagctcaggtcctcttaggctctctggtttgtttccccaatctctactgcgaactgccatccctccaccctaatattccggatgtcgccgtgtcccagtttacagacgtgaaggagcttatcattaagaccgtactatcctcagccagggacgagcctagcgggccagccagatgcgtggccttgtgctctttggggatttggatctgtgaggagctagtgcacgagagccaccacccacagatcaaggaggctctgaatgtaatttgcgtgtccctgaagtttactaataaaacagtggcccatgtcgcatgcaatatgttacacatgctcgtgcactatgtgccacgcctccaaatataccagcctgattcccctctgaagattattcagattctcatcgcaactataacccatttgctccccagcactgaggctagttcttacgagatggacaaaaggctcgtggtatctttactgctgtgcctgcttgattggattatggcactgccacttaagacattactgcagccgttccacgctacgggagctgagagcgataaaaccgagaaaagcgttctgaactgcatctataaagtcctgcatgggtgtgtctacggggcacagtgcttctccaatcccagatactttcccatgtccctcagtgacctggctagtgtggattatgaccccttcatgcacttggaatccttgaaggagccagagcctcttcacagcccagacagtgagcgcagttccaagctgcagcccgtgaccgaggtcaaaacacagatgcaacacggcctgatttccatcgccgcccggacagtcattacccatcttgtgaaccacctcggtcattaccctatgtctggcggacctgctatgctgacgagtcaggtgtgtgaaaatcacgataaccactactcagagagcacagagctgagtcctgaactcttcgaaagtccaaatattcagttcttcgtactcaataacactacactagtgagctgcatacagattcgctcagaagaaaatatgcccggcggtggactgagcgcagggctagccagcgccaactccaacgtgcgaataattgttcgcgacctgtcagggaagtattcatgggacagcgcgattctttatggcccccctccagtcagtggactgtcagaaccaacgagtttcatgctcagtctcagccaccaggaaaagcccgaggagccgccaacaagcaatgagtgcctggaggatatcacggtgaaggatgggcttagtcttcaattcaagaggttccgcgaaaccgtgccaacctgggatacaatccgggacgaggaggacgtgttagacgaactccttcagtacctcggagtgacatctcctgagtgtctccagaggaccggaatatctttgaacatacccgccccacagcctgtttgtatatctgagaagcaggaaaatgacgttatcaacgccatcttgaaacagcacactgaggagaaggaattcgtagagaaacacttcaatgacctgaacatgaaggctgtagagcaggatgagcctatcccacagaaaccacagtcagccttctattactgtcgcttgctcttaagtattctgggcatgaacagttgggacaagcggcggtccttccatctgctcaagaagaacgaaaaactcctgcgcgagcttagaaacctggatagtcgccagtgcagagaaacacataagattgcagtgttttatgtggctgaaggccaggaggacaagcactcaatcctaacaaacacaggtggatcccaggcttacgaagactttgtcgctggcctgggctgggaggtcaacttgaccaatcattgcggttttatgggcggtctgcaaaagaacaagtccactgggctgactaccccttattttgccacctcgaccgtcgaggtaatcttccatgtgtccacccgcatgccgtccgacagtgacgatagtttaacaaaaaaactcaggcacttgggcaatgatgaggtccacattgtgtggagtgaacataccagagattaccgccgcggtatcattccaacagaattcggagatgtgctaatcgtcatttaccccatgaaaaaccacatgttctccatccaaatcatgaagaagcccgaggtgccgttttttggacccttatttgacggcgctatcgtcaatgggaaggttctgccaataatggtgagggccactgcgataaacgctagcagggcactgaagtccctgattcccctgtaccagaacttctacgaagagcgggcccgttacctccagaccatagtgcagcaccacctcgagcctacaacattcgaagactttgctgcccaggtgttctcacctgctccttaccaccaccttccttctgacgcggaccactag

SEQ ID NO: 202443 - DNA, 6252 bp, synthetic construct
  misc_feature 1..6252: note = Description of Artificial Sequence: Synthetic coding sequence
  source 1..6252: mol_type = other DNA
atgttcagcaagaagccccacggcgacgtgaagaagagcacccagaaagtcctggataccaagaaggatgcactcacacgcctgaaacacctgcgcattgtcatcgagaatgcggaatccatcgatctgaagcagttttttgaccagcatttttcgcatatctattacgtattctttgagaacttcgttactatcgaagcctccctgaagcagaagggacataagagccaaagggaggagctagacgccatactctttatttttgagaagattcttcagctcctgcccgagagaatacaccagcggtggcagttccactcaatcgggctgatcctcaagaagctcctgcataccggaaacagcttgaagataaggcgcgagggcgtacggttgtttcttctgtggctgcaggcattacaaaacaattgttcaaaagagcagctgtggatgttctcctgcctgatccccggcttctcagcaccacagagcgaacacggaccacgcaccctggataatctaatcaaccctccactcaatctgcaagagacacaggtgactatagaggagatcactcctctggttccaccacaaagtggcgataaaggtcaggaggatctcacaagctactttctcgaggccctgcttaagtacatagttattcaggtgaaatcccttgagtggaagaataaagaaaaccaggagagggggttctcttttctatttagccactttaagaagtactacctcccctacatctttcccaatatttgcaaggagaattctctgtaccatcccatcctggacatcccccagatgcggcctaaaccccactacgtcgtcattaagaaagatgcggaaacaaacgaggcgatttattgcactaaggaacccttcatcaaggcacgcgtcatcgttattcgctggctggtgtctttttggctcgagcccaagccccacaccggaccccatatccctggaatggagggagaagttctaccgaagaatatacagcgagctgccgcttcacttgtctccagggaagaaagtaagaacgataatgctgacaagaccgatcggaccaccgaacctgaacaatcacactcgaacaccagcactcttacagagagggaaccctctagctcttccctctgcagtattgatgaggagcacctaactgatattgagatcgttaggcgggtgttctcctccaaaagatcaaacgtaaactttgtcacagaaatcttccgacaggccttcctgctgcctatctgcgaagcagcagccatgcgtaaagtggtgaaagtgtatcaggaatggatccaacaagaagaaaaaccgctgtttatgcaggagcccgaggagattgtaatcacgtcttctgatttgccctgtattgagaacgtcacggaccacgatatttcaatggaggaaggggaaaagcgagaagaggagaacggtaccaacactgctgatcatgtgcgaaactcttcctgggccaaaaatggcagctatcaaggggcgttacacaacgcttctgaggaagccacggaacagaatattagggccgggactcaagccgttctgcaggttttcattattaactcctccaacatcttcctgctggagccagcaaatgagatcaaaaacctgctcgacgaacataccgatatgtgtaagagaattttgaatatatataggtacatggtggttcaagtatcaatggacaagaagacttgggagcagatgctgctggtcctgctcagagtgacagagtcggtcctgaaaatgccatcccaggcttttctccaattccagggcaaaaagaatatgactctggccgggaggttagctggcccacttttccagaccctgatcgtggcctggatcaaagccaacctgaacgtctatatctctcgggaactctgggacgaccttctaagcgtcctgagctccctaacatactgggaggaactggcaacggaatggagtctgacaatggagaccctgaccaaggtcttagctaggaatctgtattctctcgatctgtccgacctaccccttgacaaactgtccgaacaaaaacagaagaagcacaagggcaagggtgtgggccacgagttccaaaaggtaagcgtggataagtcattcagcagaggatggtcacgcgaccagcccgggcaggcgccaatgcgccaaagatccgctactacaactgggtctcctgggaccgagaaggcccggtctatagtgcgccagaagaccgtggacatcgacgatgcccaaatccttcctcgatccacacgtgtgcgacacttctcccagtctgaagagacagggaacgaggtatttggcgcacttaatgaggagcagcctttaccaaggagcagttccacttctgacatcctggaaccctttaccgtggagcgggccaaggttaacaaggaagatatgtcccagaaactccctccgctgaactctgatattggtgggagctctgccaatgtcccagacctgatggacgagttcattgcggagcgtttacgatcaggtaacgcctccacaatgactcgcagagggtcatctcctggcagcctcgagatcccgaaggacctgccggatattctcaataagcaaaaccagatgcggccaatcgacgacccaggcgtgccatctgagtggacgtcacccgcgagcgccggaagcagtgatctgatctcatcagacagccactctgacagcttcagcgcgtttcagtacgatgggcgaaagttcgacaacttcgggtttggcaccgacacaggcgttacctccagtgcagatgtcgactccggcagcggacatcatcagtcagctgaggaacaggaggtggcttcattgactactctgcatatcgactccgaaacatcctctctaaatcagcaggccttctccgcggaagtagcgacaattacggggtccgagtcggcatctcccgttcattccccactgggcagcaggtctcaaacgcctagccccagcaccttgaacattgaccacatggagcagaaagacctgcagcttgacgagaagttacaccactctgtccttcagacccccgacgatctggagattagtgaattcccctcggaatgctgcagcgttatggccggtggcaccttgacggggtggcacgctgacgtggccaccgtaatgtggcgcagaatgctgggtatattaggagacgtgaattccataatggatccagagatccacgcccaggtgttcgattatctctgcgagttgtggcagaatctggccaagattcgcgataacctgggtatatccacagacaaccttacatcgccatccccacctgtgctgattcctcctctgaggatcctgaccccctggctcttcaaggcgacaatgttgaccgataagtataagcagggaaaattgcacgcatacaagctcatttgcaacactatgaaaagaagacaggacgttagtcctaaccgggatttcctgacgcatttttacaacatcatgcattgtggtttactgcacattgatcaggacatcgtcaacacgataatcaagcactgtagtccccagttctttagtcttggcctgccaggtgcgactatgctgattatggactttattgtggccgcgggtagggttgctagctcagccttcctcaacgcccccagagtagaagcacaagtcctcttgggaagcctagtttgcttcccaaacttatattgcgagctgccctcgctccaccccaatattcctgatgtggctgtgtctcagttcaccgacgtcaaagaactcatcatcaaaaccgtgctgtcgagcgccagagacgagccttcaggccccgctaggtgcgtggcgttgtgttctttggggatttggatctgtgaggagttggtgcacgaaagccatcatcctcagattaaagaggcactgaacgttatctgcgtgtctcttaagtttacgaataaaactgtggctcacgtggcttgcaacatgttgcacatgttagtccactatgtaccacggcttcagatctaccagcccgatagtcccttgaagattattcaaatccttatagctaccattacacacctcctcccttccaccgaggcgagttcttatgaaatggacaagcgcctggttgtaagtctactgctgtgtctgttggattggatcatggcactgcctctgaaaacactgttgcagccatttcacgctacgggggcagagtccgataagactgagaaaagcgttctgaactgcatctataaggtgctgcacggttgtgtctatggggcacaatgcttttcaaacccaagatacttccctatgtctctatccgatttagcctcagtcgattacgatcctttcatgcatctggaatctttaaaggagccagagcccttgcattctcccgatagcgaaaggtcctctaagctgcagcctgtcaccgaagtcaagactcagatgcagcatggactgatcagcattgcggctaggactgtcatcacgcatctcgtcaaccaccttggacactaccctatgtctggcggccccgctatgttaacgtcgcaggtctgtgagaaccacgataatcactacagcgaatctactgagctctcacccgaactttttgaatcgcccaacattcagtttttcgttcttaataatacgacgttggtgagttgcatccagatcagatccgaggaaaatatgcccggcggcgggctctctgccggcttggcatccgccaactccaacgtgcgcattatagtgagggacttgagcgggaagtacagctgggacagtgccatcctctacggacctcctcccgtgagcgggctgtcagagcccacatcattcatgctcagcctgtcacatcaggagaagccagaggaacccccaacgtccaacgagtgtctggaagatatcactgttaaggacggactgagcttacaatttaagagattccgggaaactgtgcctacttgggataccatccgggatgaggaggatgtactggatgaattattgcaatatctcggcgtaacttcccccgagtgcttgcagaggacaggcatctctcttaacatccccgcgccccagccagtctgcatttctgaaaagcaggagaatgacgtgataaatgccattctgaagcaacacactgaagagaaggagtttgtggagaagcatttcaacgatttgaacatgaaagctgtcgagcaggatgagcccattcctcagaagccacagagcgctttttactactgcaggcttctgctctctattctcggcatgaactcttgggacaaaaggaggtcattccatctgctgaaaaaaaacgaaaaacttctcagagagcttagaaatcttgattcccgccaatgccgagaaacgcataaaatcgcggtgttctatgtcgctgaaggacaggaagacaaacacagcattctgactaatacaggagggtcccaagcctacgaagacttcgtagcaggtctgggctgggaggttaacctcaccaatcactgcgggtttatgggcgggctgcaaaagaataagtctacagggctgacaactccctacttcgccacaagtacagtggaggtgatttttcacgtgtccaccagaatgcccagcgatagcgatgattcactgactaagaagctgagacatctcggcaacgatgaagtgcatattgtctggtctgagcacactcgggactacaggaggggaatcatccctaccgagttcggcgacgtcttgatcgtcatttacccaatgaaaaaccacatgttctctatccagattatgaagaaaccagaggttccattctttgggcccctgttcgacggcgccatcgttaatggaaaagtcctgccaatcatggtcagggctactgctatcaatgctagtcgagctctcaaaagtcttattccactgtaccagaatttttacgaagagagggctcggtacctccagacaatcgtgcagcaccacctcgaaccaaccacctttgaagacttcgcagcacaagtgtttagccctgcaccgtaccatcatctgccctctgacgccggctcgtacccggaaattctgcctagcgagactcccaccgccacccaggtagacggagcggacctggcgtcccctatgagccctcggacttctaaatcccgaatgagcatgaagctgcggcgcagctctggctctgcaaacaagagttag

SEQ ID NO: 202444 - DNA, 6222 bp, synthetic construct
  misc_feature 1..6222: note = Description of Artificial Sequence: Synthetic coding sequence
  source 1..6222: mol_type = other DNA
atgttcagcaagaagccccacggcgacgtgaagaagagcacccagaaggtgctagataccaaaaaggatgctcttacccggctaaagcacttgcgtatagtgatcgaaaatgcggagagcatcgacctgaagcagtttttcgaccagcacttttcacacatttattatgttttcttcgaaaatttcgtgactatcgaagcctcactgaagcaaaaggggcataaatcacagagagaagaactggacgcgattctcttcatatttgaaaagatccttcagctgcttcccgagcggatccaccaacgctggcagtttcactcaatcggactcatactaaaaaaactgctccacactgggaattctctgaagatccgacgcgagggtgtgcgactgtttctgctttggctgcaggccctccagaataactgttcaaaagagcaactctggatgttcagctgtctaattcctggtttcagtgcaccgcaatccgaacatggcccacgcaccctcgacaatctgataaatcccccgctgaatctccaggaaactcaggtcactatagaggagatcaccccccttgttccacctcagtctggggacaaggggcaggaggacttaacctcttactttcttgaggcgttgctcaaatatatcgtgatccaagttaaaagccttgaatggaaaaataaagagaatcaagagcggggtttctcatttttatttagccactttaagaagtattacttgccatacatcttccctaatatatgcaaggaaaactccctataccatccgattctggacatccctcagatgcggcccaaaccgcattatgtagtaataaagaaggacgccgagaccaacgaggccatctattgtaccaaggagccatttattaaggctagagtgatagtcattagatggctagtgagcttctggctggaaccaaagcctcacactgggccccatatccccggtatggagggcgaagtgctgcctaagaatatacaaagagctgctgccagcctggtgtcacgcgaggaaagtaagaatgataatgccgacaaaacagatcgaaccaccgagcccgagcagtcacattctaatacttctactttgacggagagggagccttccagttcaagcctatgcagcatcgatgaagaacatttgaccgacattgagatagtgcgacgtgttttttcctctaagcggagcaatgtgaatttcgtcaccgagatttttcgccaagcatttttgcttccgatctgtgaggctgctgccatgcgtaaggttgtaaaagtctaccaagagtggatccaacaggaagagaagccgctgttcatgcaagaacccgaagaaatcgtgataacatcctcggacctaccatgcatagagaacgtgactgatcacgacattagcatggaggaaggagaaaagcgtgaagaggaaaacggcaccaatacggccgaccatgtgagaaactctagttgggcaaagaatggaagctaccaaggcgcgttacataacgcgtccgaagaagccaccgagcagaacataagagcaggcacacaggccgtgctgcaggtgttcattattaattcttcgaacatattcctgctcgaacccgctaatgagataaagaatttgctcgacgagcatacagatatgtgcaaacgcattctgaacatataccgatacatggtggtacaagtaagcatggataaaaagacttgggaacagatgcttcttgtcctgttacgagttacagagagtgtgcttaaaatgccttctcaggcctttctgcagttccagggcaagaagaacatgactctcgccgggcggctcgctggtccgctctttcagacactgattgtcgcctggatcaaagccaatctcaacgtgtacatcagtcgcgagctgtgggatgacctgctctcagtgctgagttctctcacatactgggaagagcttgctactgagtggtctctgacaatggagaccctcactaaagttttggctcggaatctctatagcctcgatctcagcgatttacccttggacaaactgtccgagcagaaacagaaaaagcataaaggtaaaggggtggggcatgagttccaaaaggtgtctgttgacaagtctttttctcggggctggtctagagatcagcccggacaggcaccaatgcggcagcgctcagctaccaccacaggaagccctgggactgaaaaggcacgatcaatcgtcaggcagaagacggtcgacattgacgacgcccagatactgccacgaagtactcgcgtgcggcatttttcccagtctgaggagactggtaacgaggtgttcggagcactcaacgaagagcagccgttgcctagaagttcttcaaccagtgatatactggagcccttcactgtagagcgggccaaagtgaataaagaggatatgagtcaaaagctccctccactaaactcagatattggtggttcatctgcaaacgtgcccgatctcatggacgagttcattgctgaacgtctgagaagcggaaacgccagcactatgacaagacgcgggtcaagccccggcagcttagaaattcctaaagatttgcctgatatcttaaataagcagaatcaaatgagaccaatcgatgaccctggggttccaagtgagtggacaagtcctgcatccgccggttcgtccgatttaatttcaagcgactctcacagcgactcattcagtgcttttcagtacgacggtcgcaaatttgacaacttcgggtttgggacggatactggcgttaccagcagcgcggacgtggattcgggctccggccaccatcagtcagcagaggagcaagaagtggcctcactaacgaccctccatatcgatagcgagacctccagtctcaaccaacaggcatttagtgcagaagttgcgaccattacaggaagtgaatccgctagtcccgtccatagtccactcgggagcagaagtcagactcctagccccagtacactgaacatagatcacatggagcagaaagatctgcagttagatgaaaaactgcaccactcagtcctgcagacgcctgacgatctagagatcagtgagttcccctccgaatgttgctccgtgatggccggaggaacattaacaggctggcatgcagacgtggccacggtgatgtggaggcgcatgctgggcattctgggagatgtaaactctatcatggacccggagatccacgcccaagttttcgattacctttgtgagctgtggcagaaccttgccaagatcagagacaacctcgggatctccaccgacaacttgacctccccctcacccccagtgctgattcctccgcttcgaatccttactccttggctgttcaaagcaactatgttaaccgacaagtacaaacagggcaaactgcacgcttacaaacttatctgtaatactatgaagcggcgacaggacgtttcgcctaacagggactttctgactcacttctataacatcatgcattgtggactcctgcacatcgatcaggatatcgtgaatacaattattaaacattgttccccccagtttttttctctaggtctccccggagcgaccatgctgatcatggatttcatcgtagcggctgggagggtcgcctcctctgcctttttgaacgctcctcgggtcgaagcccaggttctgttaggaagtttggtttgttttcctaatctgtactgtgaactccctagcctgcatcccaacatccctgatgttgcggtttcccagttcacagatgtcaaagagcttatcattaaaaccgtgctgagcagcgccagggatgaaccttctggcccagccaggtgtgtcgccctgtgttcacttggtatttggatttgtgaagaacttgtccatgaaagccatcaccctcaaattaaagaggcactaaacgtgatatgcgtctcacttaagtttaccaacaaaacagtggcccacgtggcctgcaatatgcttcacatgctggtacattatgtcccccggctccaaatctatcagccagactcacctctcaagatcatacaaatattaattgccaccattacgcacttactaccaagcacagaggctagtagctacgaaatggacaaaagactcgtggtcagcttacttctgtgcctattagactggatcatggcattgcctctgaagacgcttttacagccctttcacgccactggagcagagtcggataagaccgaaaagtctgtgctgaactgtatttacaaggtgctccatgggtgcgtgtacggggcccagtgtttttctaacccccgatatttccccatgtctttaagcgacttggcaagcgtggactacgatccgtttatgcacttagaatccctgaaggaaccagagcctctgcactcgcccgacagtgaaagatcgtccaagttgcagcccgtgaccgaagtgaagactcagatgcagcacggattaataagcattgcagctaggactgttattacacaccttgtgaatcacctgggacactaccctatgagtggtggccctgccatgctgacttcgcaggtctgtgagaaccacgacaaccactacagtgaaagtactgaactatctcccgagttgtttgagtcacccaatattcaattcttcgtgctgaataacactaccctagtgtcatgcatccagattcgtagtgaggaaaacatgcctggcggagggcttagtgcaggcctggccagtgccaatagcaatgttcgaataattgtccgagatctgtccgggaagtacagctgggactccgcgattttatacggccctcctccggtctcaggattgtctgagcctacctcatttatgctgagtttgagccaccaggagaaaccagaagagcctcctacgtcgaacgagtgcctggaggacatcacagtcaaagacggcctatccctccagttcaaaaggtttcgtgaaacagttccgacctgggacactatcagggacgaggaggacgtcctcgacgagctcttgcagtacctcggagttacatcgcccgagtgcctgcagagaacaggcatctccttaaatatcccagccccccaacccgtttgtatttctgagaagcaggaaaatgatgttatcaacgctatcctgaaacagcatacggaggagaaagagttcgtggagaaacattttaatgacttaaatatgaaggctgttgaacaggatgaacctataccacagaaacctcaatccgcgttctattattgtcgattgctcctgagtattctggggatgaacagctgggacaagaggcgcagcttccacttgcttaaaaaaaatgagaagctgctgcgtgaactccgaaatcttgactccaggcagtgccgagaaacacacaagatcgccgtgttttatgttgccgaaggacaggaggacaagcatagcattctgactaacaccgggggatctcaggcatatgaagactttgttgctggccttggttgggaggtcaacctgactaatcattgtgggttcatggggggactgcagaagaataagagtacgggattgaccacgccatattttgccactagcacagtagaagttatctttcacgtcagtactagaatgccttcagattcagacgactcactgacaaaaaaactgcgtcacctcgggaacgatgaagtccatatcgtctggtctgaacatacacgggactatcgacggggaataatcccaactgagttcggggatgtgctgatagtcatctatcccatgaagaaccacatgttctctatccagataatgaagaagccagaggtgccgttctttggccccctcttcgacggcgcgatcgttaatggaaaggtgctgcctattatggtaagagcaactgcgataaatgcttctagagccctgaaatcgctgattcctctgtaccagaatttttatgaagagcgcgcccggtacctgcagaccatagtgcagcaccaccttgagccaactactttcgaagactttgccgctcaggtcttttcccctgccccctaccaccatctaccatccgatgccgaagagagaaacgccgttatagtcctctttctgcccaagccccctttggagaatatcggccacttaaaggcccccacacagaggttttatcctgtgaaactacctcaacagagaaggtag

SEQ ID NO: 202445 - DNA, 6150 bp, synthetic construct
  misc_feature 1..6150: note = Description of Artificial Sequence: Synthetic coding sequence
  source 1..6150: mol_type = other DNA
atgttcagcaagaagccccacggcgacgtgaagaagagcacccagaaggttctggatactaaaaaagatgccctgacgcgcctcaaacatctgcggatcgtgatcgagaatgccgaatccatcgatctgaagcagtttttcgatcagcacttcagccacatatactacgtgttttttgagaatttcgtgactatcgaggcttcactaaagcagaagggccacaagagtcaacgcgaagagcttgatgccatactgttcattttcgagaaaatcttacaattgttgccagagcgtatccatcaaaggtggcagtttcactctattggtcttattctgaagaaactcctccataccggcaatagcctgaaaatccgtagagagggggtgagactgtttctgctctggttgcaagccctgcagaacaattgttctaaagagcagttgtggatgtttagctgtttaatccccggattcagtgcaccccagtctgagcacggccctcgtactctcgacaacctcattaatccaccattaaacttgcaggaaacgcaagtcacaattgaagagatcactccattggttccaccacagtcaggggataaaggacaggaggatctcacgagctactttttagaagcacttctaaagtatatcgtgatccaagtcaagtcactggaatggaaaaacaaagagaatcaggagcgagggttctcttttttgttttcgcattttaaaaaatattatcttccgtatatttttcctaatatctgcaaagagaattctttgtaccatcctatattggacatccctcaaatgcggcctaagccacactacgtggttattaagaaagacgccgagacaaacgaggctatctattgtactaaggagccatttattaaggcacgggtcatagtcatccgctggctggtgtctttctggctggagcctaagccgcataccggtccccatatacccgggatggaaggagaagtactgcccaaaaatatacagcgggccgcagccagtcttgtatcccgggaggagtcaaagaacgataatgccgacaaaacggataggacgacagagcccgaacagtctcacagcaacaccagcaccctgacggagcgggaaccatcctcatcgagcttatgcagtattgacgaagagcacttgacagacatagagatcgtgcgacgggtattctccagtaaaagaagtaacgttaacttcgtgacggagatcttccggcaggctttccttcttcctatttgtgaagctgccgccatgcggaaggtagttaaagtataccaggaatggattcaacaagaggagaaaccgctattcatgcaggagcctgaggagatcgtgatcacaagttctgatttgccatgtatagagaacgtcacagaccatgatattagcatggaggagggcgaaaaacgcgaggaggagaatggtacaaacaccgcagatcatgtgaggaacagctcttgggccaagaacgggagctaccaaggtgccctgcataacgcatcagaggaagcaactgagcagaacatccgtgccggtacacaggcagtgctccaggtttttatcatcaactcttctaacatcttcctgctcgaacccgcaaacgagattaagaatctcctagatgagcataccgatatgtgcaagagaatactgaacatctacaggtacatggtggtacaagtttcaatggacaagaaaacttgggagcagatgctgttagtactgttgagggtcacagagtctgtgctgaaaatgccctctcaggcctttctgcagtttcaggggaagaaaaatatgacccttgccgggcgcctcgccggtccgctcttccaaaccctaattgtggcctggatcaaggcaaatctcaacgtttacatcagtagagaactatgggacgacttgctctccgtcctgtctagcttgacgtattgggaagaattggcaactgagtggtcgctgaccatggaaaccctgaccaaggtactggcccgcaacctttacagcctcgacctttctgaccttccactggacaaacttagtgagcagaaacagaaaaagcataaaggaaaaggtgtcggtcacgaattccagaaggtcagtgtggacaagtctttctcccgcgggtggtcaagggatcagccgggccaggcgcctatgcgtcagaggagtgccacaaccacagggtctccagggaccgagaaggcgcggagtatagtgagacagaagacagtggatatcgatgacgctcagatattgcctcgatccacacgcgtacgccacttttcccagtcggaagaaactggcaatgaggtgtttggcgctctgaatgaagagcagcccttacccagatcatccagcacctccgatattttagagccttttactgtcgagcgggccaaggaggccgagcagaacgcaacacgaggaagtacagaggggtccgtacaaagctgtaacgggcttttttggaaagagagctgttcagacataggggggtcctcggcaaacgtgcctgacctgatggacgaattcatcgccgagcgtttgagaagcggcaatgcaagtacgatgaccaggcgcgggtctagcccgggctccctggaaattccaaaagacctgccagatatcctgaataagcagaatcagatgcggcctatagacgacccaggggtgccatccgaatggaccagccccgctagtgctggctcaagcgatctgattagttctgattcccacagcgactccttctctgctttccagtacgatgggcggaagtttgataattttgggttcggtactgacacaggggttacttctagtgcggacgtcgactctggatccggacatcaccaaagtgccgaagaacaggaggttgcttcgctgactaccctccacattgacagtgagacctcatctctgaaccagcaggcattctccgcagaagttgccactattaccggcagcgaatccgcctctcctgtgcattctcccttaggatctagaagtcagaccccctcaccctccaccctcaacatagaccatatggaacagaaagacctacagctggatgagaagctccatcacagcgttttacagactccagacgacctcgagatcagcgagttcccctccgagtgctgctcagtgatggctggaggcacactgactggctggcacgcagatgtagccactgtgatgtggaggcggatgctgggtatcctcggcgacgtaaactcaattatggatccggagattcacgcccaggtgttcgactacctgtgcgagctgtggcagaatcttgccaagatccgggacaacttgggcatttccacagacaaccttactagccccagcccaccagtgcttattccaccactccggattttgacaccctggttattcaaggccacgatgctgaccgacaaatataaacagggtaaacttcacgcatacaaactcatttgcaacacgatgaaacgcaggcaggacgtgtcacccaacagagatttcttgacgcatttttataacatcatgcattgcggcttgctgcacattgatcaggatatcgtcaacacaattattaaacattgttccccccagtttttcagtctcggcctgcctggcgcaactatgctgataatggacttcatagtggctgctggccgtgtggcctcaagcgcctttctgaatgcccctcgcgtggaagcccaagtactactcgggtccctggtgtgcttcccaaacctgtattgtgagctcccttccctccaccctaacattcccgatgtggcagtgtcccagtttactgacgtaaaagaactcatcatcaaaaccgtcctgagctccgcccgagacgagccttccggacccgctaggtgcgttgccctatgctctctaggaatatggatttgtgaggaactggtgcacgagagccaccaccctcagatcaaggaggccctgaatgtgatttgtgtcagccttaaatttactaacaagaccgtcgcccatgtggcatgtaacatgctgcacatgctggtacattacgttccacggcttcagatctatcagcctgatagcccactgaagatcatccaaatcctgatcgctacaattacccacttgttaccatctactgaagccagcagctatgagatggataagcgactggttgtgagcttgctcctatgtctgctcgattggatcatggcgctgcccttgaaaactctcctccagcctttccacgcaacaggcgccgaatcagataaaaccgaaaagagcgtgcttaattgcatctataaagtgcttcatggatgtgtgtatggtgctcagtgcttctccaacccccggtatttccctatgtctctgagtgacctggcttccgtagattatgatccttttatgcatctggagagcctgaaggagcccgagcccctccatagtcctgactcagaaagatctagtaagctacagcctgtgacagaagttaaaacccagatgcagcacgggctcatctcgattgctgcccgcaccgtgatcacccatctggtgaaccatctggggcactaccccatgtccggcggtcctgccatgttgaccagccaggtgtgtgagaaccatgacaatcactattctgaaagcacagaactcagccccgagctattcgagtctccaaatatacaatttttcgtgctgaacaataccacacttgtgtcatgtatacagattcggagcgaggaaaacatgcccggcggaggtctatcagccggcctagcgtccgccaattcaaacgttcggatcattgtgagagatctgtccgggaaatactcctgggacagcgccattctatatggccccccccctgtgagcggtctctctgaaccaacatcttttatgctgtccctgagtcaccaggagaaacctgaggagcctccaacgtccaatgaatgtttggaagatataaccgtgaaggatgggctgtcccttcagttcaaacggttccgcgagactgtcccaacgtgggatactattagagacgaggaggacgttctcgatgagctgctccagtatctgggtgtgacatctccggagtgtcttcagagaacgggcattagcttgaacattcctgcaccacagccagtctgcatcagtgaaaagcaggagaatgatgtaattaatgctatcttaaaacagcacacagaggagaaggaatttgttgagaaacactttaatgacctcaacatgaaggccgtcgagcaagacgagcctatcccccagaagccccagtctgccttctactattgccgactgctgctttctatcctcggcatgaacagctgggataagcgtagaagttttcacctcctcaagaagaacgagaaactgctgcgggaactgcgcaacctggatagcagacagtgtagggaaacccataaaattgccgtgttttacgtggccgaagggcaggaggacaaacacagcatcttgaccaatacaggggggtcacaggcttacgaggactttgtagcaggcttaggatgggaggtgaacctcacaaaccattgcggcttcatggggggtctgcagaaaaacaagagcacaggtcttactaccccatattttgcaacaagtaccgtggaggtgatctttcacgtctccactcggatgccatccgacagtgatgactctctgactaagaaactccggcaccttggaaacgatgaggtgcatattgtgtggtccgagcacacaagagattataggcgcggcatcatcccaaccgagttcggggatgtattgattgtgatctaccccatgaagaaccacatgttcagcatccagataatgaagaagcccgaggtccccttttttggcccccttttcgatggcgctatagtgaatggaaaggttctacctatcatggtgagagcaaccgccatcaacgcttccagggctctgaagtctctgatccccctgtatcagaacttctatgaggagagggcgcggtatctgcagactatcgtgcagcaccacttagagccaaccacgttcgaggattttgctgcgcaagttttctctcctgccccgtatcaccatctcccctcagatgccgatcattag

SEQ ID NO: 202446 - DNA, 6111 bp, synthetic construct
  misc_feature 1..6111: note = Description of Artificial Sequence: Synthetic coding sequence
  source 1..6111: mol_type = other DNA
atgttcagcaagaagccccacggcgacgtgaagaagagcacccagaaagtcctagacacgaaaaaggacgccctaacccgacttaagcacctgaggatcgtaatcgagaatgccgagtccatcgacctaaaacagttttttgaccagcatttctcacacatatactatgtgttcttcgagaatttcgtgactatcgaggcctcgctgaagcaaaagggacacaagagtcagcgggaggagctcgatgcgatattgttcatctttgagaagatcctgcaattgttgcctgagcggattcaccaacgatggcagtttcacagtataggccttattttaaaaaaactgctgcacaccggcaattctctgaaaatacgaagagaaggggtgcgactctttctcctgtggcttcaagcccttcagaacaattgctccaaggaacaattgtggatgttttcttgcctcatccctggctttagcgctccacagagtgagcatggaccccgaacattagacaatctgatcaatccaccactgaaccttcaggaaacccaggtaacaatcgaggagattacaccgctggtccccccccagtctggtgataagggtcaggaggaccttacaagctatttcctcgaggcccttttaaagtacattgtgattcaggtgaagagccttgagtggaagaacaaagagaaccaagagcggggcttcagcttcctgttcagccattttaaaaagtattacttgccttacattttccctaacatttgcaaagaaaatagcctgtaccatccgattctagacattcctcagatgcggccaaagccccactacgtcgttataaagaaggacgcggaaacaaacgaggcaatttattgcactaaggaaccattcatcaaggcccgcgttatcgtgattagatggctcgtgagcttttggctggagcctaagccacatactgggcctcacattcccggcatggagggagaggttcttccaaagaacatccagcgcgccgcagccagcctggtgtcccgagaagagagcaagaatgataacgctgataagactgatcggacaacagagcctgagcaatcacactccaacacatccacgttaacagagagggagccatccagttcctcactctgtagtatagacgaagagcacctgactgacattgagatagtcaggagagttttctctagcaagcgcagcaacgttaacttcgttacagagatatttaggcaagcctttctgttgcctatctgcgaggcagcagccatgagaaaggtggtcaaagtttaccaggagtggattcagcaggaggagaagccactctttatgcaggagccagaagaaatcgtcatcacaagttcagatctgccttgcatcgaaaacgtgacagaccatgatattagcatggaggagggggaaaagcgggaagaagaaaacggcacgaataccgctgaccatgtcaggaattccagctgggccaaaaacggatcctaccaaggagccctgcacaacgcctcagaagaggcgactgagcagaatatcagagctgggactcaggccgtcctccaggtgttcatcatcaatagcagcaacatcttcctgctagagcccgccaacgagattaagaatctcttggacgagcatacggatatgtgcaagagaattctcaatatttatcgttacatggtggttcaagtgagcatggataagaagacatgggagcaaatgttgctcgtcctcctgcgggtcaccgagtccgtgctgaaaatgccttcacaggccttcctgcagttccaggggaagaagaacatgacgctcgctggcagactggctgggcctctgtttcaaaccttaattgtggcttggattaaggccaatctgaacgtgtacatttcacgggagctgtgggacgacctgctcagtgtgttgagttccttaacatactgggaggagctggccaccgagtggtcattgactatggagacgttaaccaaggtgctggccaggaatctgtatagtctggacttgtcggatcttccactggacaaattgtcagaacagaagcagaagaaacataaaggaaaaggcgtcgggcacgagtttcaaaaagtgtccgtagacaagtccttttcgcgcggatggagtcgggatcaacctggccaagcccctatgagacaaagatctgccacaactacaggatcacccggcacggaaaaggcacgctctattgtgcgccaaaaaactgtggatattgatgacgctcagatcctgccccgctccacaagggtaaggcacttctctcagtcagaagagaccggaaacgaagtcttcggcgcgctgaatgaagagcagcctctcccaaggtcaagttctacctcagatatcctcgagcccttcaccgtcgaacgcgcgaaagtgaacaaagaagacatgagtcagaagcttccaccactcaactcagacatcggaggatcaagcgcgaacgtccctgatctcatggatgagtttatcgccgagcggctgcgatccggaaacgcaagcaccatgacacgcagaggcagttcaccaggaagcctggaaattcccaaagacctgcctgatattctgaataagcagaatcagatgaggcctatcgacgacccgggcgtcccctccgagtggacttctcctgcaagcgccgggagcagcgacctgatctcatcggattcgcactccgacagtttctccgctttccagtacgatggacggaaattcgacaatttcggctttgggactgacaccggagtaacgagtagtgccgacgtcgactctggatccggacaccaccaatccgccgaggaacaggaggtggcaagtttgaccaccctccatatagattcagagactagcagcttgaatcaacaggccttcagtgcggaagtggccaccatcacaggatccgaaagtgcatcgccagtgcactccccactgggctcacggtcccagaccccaagtccaagcaccctgaatatagaccatatggagcagaaggacttacagctggacgaaaaactgcaccacagcgtcctgcagacgcccgacgacctggagattagcgaatttccatccgagtgctgttcggtaatggccggcggaaccttaactgggtggcacgctgacgtggccaccgtcatgtggcggagaatgctcggcatactcggagacgtaaattcaatcatggatccagagattcacgctcaggtgtttgactatttgtgcgagttatggcagaacctggccaaaatacgggacaacctcggcatctctactgacaatctcacatccccctcccctccagtccttattcctcctttgagaatcctaaccccctggctgtttaaggcaaccatgcttacagataaatacaagcaaggcaaacttcatgcctacaagctaatttgcaacacgatgaagcgccgccaggatgtctctcctaacagagacttcctcacacacttctataacattatgcattgcggcctgctacacatcgatcaggacattgtgaatactataataaagcattgcagtcctcagtttttctccctgggactgccgggggcgactatgctgataatggatttcattgtggctgccgggcgagtagcttcgtccgccttcctgaatgctccgcgcgtcgaagcgcaggtgctgctgggctccctggtctgctttcccaatctttactgtgagcttccgtcactccaccccaacatcccagacgttgctgtttcccaattcactgacgtgaaagaactgattatcaaaacagttctgtcctccgcacgcgacgaaccttccggacctgcccgctgtgtggccctttgcagtctgggaatttggatctgtgaggaacttgtccacgagtcgcaccatccacaaatcaaggaggccctgaatgttatctgtgtcagcctgaagtttacaaataagactgtagcacacgtggcctgcaacatgctgcatatgctggtccactatgtacctaggctgcagatctaccagcctgactctcctttaaagataatacagattcttatcgcaacaattacacacttgttacccagcaccgaggcgagctcctacgaaatggataaacgtctcgtcgtgagcctgctgctgtgcctattagattggattatggctctgcccctaaaaactctcctacagcccttccacgcgaccggagccgagagcgataagactgagaagtctgtgctgaactgtatctacaaggtcctgcacggatgtgtgtacggggctcagtgcttcagcaatccccgctattttccaatgtcactgagcgaccttgccagcgtggactacgatccttttatgcatctggagtcactcaaggaacccgaaccattacattcccctgatagtgaaaggtcatccaagctgcaaccggtcactgaagtaaagactcaaatgcagcacggactgatctccatcgcagcccggaccgtcatcactcatctcgtcaatcacctgggccattaccccatgagtggtggcccagccatgttaacatcccaggtctgcgaaaatcatgataatcactactcagagagcacagaactgtcaccagagttgttcgaatcaccaaatatccagtttttcgtgctcaacaacacaacactggtttcatgcattcagatcaggtcagaggagaatatgccgggtggcgggctcagcgcaggcctggctagcgccaactcgaatgtgagaattatcgtacgggatctgtctggcaagtactcatgggattctgccatcttgtatgggccccctccagtcagcggactcagtgagcctactagtttcatgctgtctctgtctcatcaggaaaagccggaagagcccccaacttccaacgaatgtctggaggacattactgttaaagatggactgtcattacagtttaagcgttttagagaaaccgtccccacgtgggatactatccgggatgaagaagacgttctcgacgaactattacagtatctcggagtgaccagccctgaatgcctccagcggaccggtatctctctgaacattccagcacctcaacctgtctgtattagcgagaagcaagagaatgatgtgatcaatgccatcctcaagcaacacacagaggagaaggagtttgtcgaaaaacacttcaacgatctgaacatgaaagccgtggaacaggacgaacccattccccagaaacctcagtctgcattctactattgcagattgttgctgagtattctgggaatgaacagttgggacaaacgacggagcttccacctcctcaaaaaaaatgaaaaactgcttcgcgaactcaggaacctggatagccgccagtgcagggaaactcacaaaatagccgttttctacgtagccgagggccaagaggataaacatagcattctcactaacaccggcggaagccaagcctacgaagacttcgtggctggtctcggttgggaggtgaacctgaccaaccactgcggcttcatggggggacttcaaaagaacaagtcaaccggactgaccaccccttatttcgcgacttcaactgtcgaagtgatcttccatgtaagtacaaggatgccctctgatagtgacgattcccttaccaaaaaattgaggcatctgggtaatgacgaggtgcatattgtgtggtccgagcatacaagagactacagaagaggcataattccgactgaatttggcgacgtgctgatcgtgatttatcctatgaagaatcatatgttcagtatccagattatgaaaaaacccgaggtcccttttttcgggccccttttcgatggggcaatagttaacgggaaggtgctccccatcatggtccgagccaccgccattaacgcttcccgggccctgaagtctctcatacctctgtatcaaaatttttatgaggagcgcgctcgttacctgcaaacgatcgtgcagcaccatctggaacccaccacttttgaggacttcgccgcccaggttttctcaccagctccataccaccatctaccctctgatgccgatcactag

SEQ ID NO: 202447 - DNA, 6252 bp, synthetic construct
  misc_feature 1..6252: note = Description of Artificial Sequence: Synthetic coding sequence
  source 1..6252: mol_type = other DNA
atgttcagcaagaagccccacggcgacgtgaagaagagcacccagaaagtgctggacacaaaaaaagatgcgttgactcgtttgaagcacctgcgaattgtgattgagaacgccgagtctatagacctgaagcaattcttcgaccagcatttctctcatatctattacgtctttttcgagaactttgtcaccatagaggctagtctcaaacagaaaggacacaagtctcagagggaggagcttgatgctattctgtttatttttgaaaaaatactgcaactactgcccgaaaggatccaccagagatggcaatttcacagtataggactcatcttgaaaaagctcttgcataccggtaactcattgaagattcggcgagaaggggttcgactcttcctgctgtggctacaagcattacaaaacaactgtagcaaggagcagttatggatgttcagttgcttgatacctggctttagtgctccgcagtccgagcatggaccacgcaccctggataacctaatcaaccccccattaaacctacaggaaacccaggtgaccatagaggaaataacacctttagtccccccccaatcaggcgataagggacaagaagacctgacttcctacttcctcgaggctctgcttaaatatattgtgattcaggttaagagcctggagtggaagaacaaggaaaatcaagaacgcggtttctcatttctcttctcccatttcaagaagtattatctcccttatatattcccaaacatctgtaaggagaactcactttatcaccctattttggatattccgcagatgcgcccaaagccacactacgtcgtcatcaaaaaggacgcagaaaccaacgaagctatttactgcaccaaagagccattcatcaaggcgcgagtgatcgtgattcgatggctggtgtccttctggctggaacccaagcctcatactggaccacacatccccggcatggagggtgaggttcttcccaaaaatattcagcgagcggccgcatccctggtgagtcgcgaagaatccaagaatgataatgccgataagactgaccggaccaccgaacccgaacagagtcactccaacaccagtactctgaccgaacgcgaaccatcgtcatcttccctctgttccatagacgaagagcacctcacggacattgagattgtgcgccgggtgttctcctcgaagcggagcaacgtgaacttcgtgactgaaattttcagacaggcattcttgctgcctatttgcgaagccgcagccatgcgtaaagttgtgaaggtctatcaggaatggatccagcaggaggagaagcctctctttatgcaggagcctgaggagattgtgattacgtcctccgatctgccttgtatcgaaaacgtaactgatcatgatatttcaatggaggagggagagaaacgggaggaagagaatggcactaacaccgccgatcatgtgcgaaactcgagttgggccaagaacggctcatatcagggcgccttacataacgcgtccgaggaggcaacagaacagaacattagagctggcacacaggctgtcctccaggtgttcatcattaacagctcaaacatttttttgctggagccggccaatgagattaagaacctcctggacgaacacaccgatatgtgcaaaagaatcctgaacatttatcgctacatggtggtacaggtgagcatggacaaaaaaacctgggagcagatgctgttagttttgctccgcgttaccgagtccgtgctaaagatgccttcccaggcattcctgcagttccaggggaagaaaaatatgaccttagccggcaggctcgccggtcccctgtttcaaacactaattgtggcttggataaaagccaacctgaatgtctacatcagccgcgagctgtgggatgacctgttgagcgtactgagttctctgacctattgggaggaactggccactgaatggtccctcaccatggagaccctgactaaggtgctagcccgtaacttatactcactcgacctgtccgacctccccctcgacaagctaagcgagcagaagcagaaaaaacataaaggtaaaggggtggggcatgagttccagaaggtgtccgtggacaagtctttcagtcgagggtggtctcgggatcaacccggccaggcccctatgcggcagcgcagtgcgaccacgactggatctccagggaccgagaaggcgaggtccatagtgaggcaaaaaacggtggccatgcgcagtaggagtatcggggaatgtgcgctgcctagcgcatatatcaggtccgccaaatcagcccctgtccttattcacacttcaaaaccttttctgccggacatcgtgttaacccccctctctgacgagttgtcagacatagatgatgcccagattctgcccagaagtactagggtgcggcacttttcccaatccgaggaaaccggcaacgaagtcttcggagccttaaacgaggagcaacccctcccgcgtagctcaagtacgtcggatatacttgaacccttcactgtggagcgggctaaggtgaataaagaagacatgtctcagaaactgccacctctgaactctgatattgggggcagttccgctaatgtgcccgacctcatggacgaattcattgccgagcggctacgttccgggaacgcctctacaatgacgagacggggcagcagcccagggtcactcgagatccccaaagacctacccgacatcctaaataagcaaaaccaaatgaggcccattgatgatcccggtgtgccctctgagtggaccagccccgcatccgcaggttcctcagacttgatttcgagtgacagtcattctgactcttttagtgccttccagtacgacggacgtaaattcgataactttggcttcggtacggataccggggtgacttcgtccgctgacgtggacagcggctcgggacaccaccagtcggctgaggaacaggaagtggcctccctgactaccttgcacatagactcggaaaccagcagtttgaatcagcaagccttctccgctgaggtcgccactataactgggtctgagagcgcttcacccgtccatagtccgcttggcagccggtctcaaacccccagcccctcaacactgaatatcgatcatatggagcagaaggatctccaacttgacgaaaaactgcaccacagtgtactccagactcctgacgacctggaaatatcagaattcccttcagagtgctgctctgtgatggcaggggggactctcaccggatggcatgccgatgtggctaccgtgatgtggaggaggatgcttggcatactcggggatgttaatagcattatggatcccgagattcacgcccaggtgtttgattacctgtgcgagttgtggcagaacctggccaagatcagggataacctggggattagcactgataatttgacatcaccttccccaccagtgttaattcccccattgagaatcctgacgccttggctctttaaagccacaatgctgacagataagtataagcagggaaagttgcacgcctacaaactgatttgcaacacaatgaaaaggagacaggatgtgtctccaaatcgggatttcctgacacatttttataatatcatgcactgcggtctactgcacatagatcaagacattgttaacactatcatcaaacattgttccccgcagttttttagtctgggactcccgggggccacaatgcttattatggatttcattgttgccgctgggagggtggcctcttccgctttcctgaatgcacctcgcgtggaggcccaggtgctcctcggttcactagtgtgttttcccaacctctactgtgaactcccctctctccaccctaatattccggacgtcgccgtgtctcaattcaccgacgttaaagagctgattatcaagactgtgttgtcctcagcacgggacgagccgtccgggccggcccgctgcgttgccctatgttcactcggtatctggatctgcgaggagttggttcatgaatcccatcatcctcaaatcaaagaagctctcaacgtgatttgcgtttccctgaaattcacaaataagacagttgcacacgtggcttgcaacatgctccatatgctggttcattacgttccaaggttgcagatctaccagcccgactctccactcaagatcatacagatccttatagctactatcacgcatctgctgccttcaactgaggcctcttcctacgagatggataaacggcttgtggtttctctgctgctatgcttgctggattggatcatggcattgccactcaaaactctcctgcaacccttccacgcgaccggcgcagagagtgacaagacagagaagagtgtcctgaactgtatctacaaggtgctccacggctgcgtatatggcgcgcaatgctttagtaaccccaggtactttcccatgtcgctgagcgatctggcctcggtggactacgatcctttcatgcatctggagtccttaaaggagcccgagcctcttcactctccagacagcgaacggagctccaaacttcagcctgttacggaggtcaagactcagatgcagcacggcttgattagcattgccgccaggactgttatcacccatttagtgaaccatctgggccactaccctatgagcgggggccctgcaatgttaacatcccaggtatgtgagaatcacgataaccattattctgagtctaccgagctcagtcccgaactgttcgagagtccaaacattcagttcttcgtgctgaacaatacaaccctcgtcagttgcatacaaatacggagcgaggagaatatgcccgggggcggcttatctgctggcttagctagcgcaaactctaacgtacggattattgtccgtgacctcagtggaaagtattcatgggatagcgctatcttgtatggacccccacctgtcagtggcctgtcagagcccaccagctttatgctctctctgtctcaccaggagaagcccgaagagccacctacgtctaatgagtgcctggaggatattacagttaaagatgggctctcgttgcaatttaagcggttcagggaaactgtacctacgtgggacacaatcagggatgaggaggatgtgctggacgagctgctacaatatctgggcgtcacttcgcctgagtgtctgcagcgcaccggaattagccttaacatcccagccccacaacccgtgtgtatttcagaaaaacaggaaaacgatgtaattaacgcaatcctgaaacagcatacagaggagaaggagttcgtcgagaaacacttcaatgacttaaacatgaaggctgtcgaacaggacgaacctattccgcaaaagccccagagtgctttttactactgtcggctgctcctcagtatcctcggaatgaattcttgggacaagaggaggtctttccatcttctcaagaaaaacgaaaagctgctgcgcgagctacggaatctggattcccgccagtgcagagagacccacaaaatagccgtgttttacgttgctgaaggccaggaggataagcactcaattctgacgaacacgggcggttctcaagcctatgaagactttgtggcaggcttgggttgggaggtcaacttaacaaaccactgtggctttatgggcgggctccagaagaacaagtcaactggattgacaactccatatttcgcaactagcacagttgaagtaattttccatgtttcgacacgcatgccaagcgactccgatgatagcttgactaaaaagctgcggcaccttggaaacgatgaggtacacatagtttggtcagaacatacacgtgactaccggcggggtatcattcccactgagttcggagatgtgctgatcgttatatacccaatgaagaatcacatgttttctattcagatcatgaagaagccagaggttccattctttggaccactgttcgacggcgcaatagtgaacggcaaagtacttccaattatggtcagagctaccgctatcaatgcaagtcgagccttaaagtcccttatccctctttaccagaatttctatgaagaacgcgctcggtatctgcagactattgtccagcatcacttggagcctacaacatttgaggattttgcagcccaggtcttcagtcccgccccctaccaccacctgccgtcagatgctgaccattag

SEQ ID NO: 202448 - DNA, 2169 bp, synthetic construct
  misc_feature 1..2169: note = Description of Artificial Sequence: Synthetic coding sequence
  source 1..2169: mol_type = other DNA
cagatcctgatcgccaccatcacccacctgctgcccagcaccgaggcatcgtcctacgagatggacaaacggctggtggtctctctattactatgcttgctcgactggatcatggctctgcctctgaagaccttgctccagccgttccatgcaacaggggcagaatcagacaagacagaaaagagcgttttaaattgtatttataaggttctacacggctgcgtgtatggagctcagtgcttttcgaatcctcgctactttccgatgagcttgagtgatctggcaagcgtggactatgatcccttcatgcaccttgagtccttgaaggaaccagagcctctacactcacctgacagcgagagatcctctaagcttcaaccggtgacagaggtgaagacccaaatgcagcacggactcatatccatcgccgcccggaccgtaatcacccatttggtaaaccacttaggacactaccccatgtctggtgggcccgctatgttgacctctcaggtctgtgagaaccacgataaccactactctgagagtacagagctgagccctgaactctttgaaagtcccaatatccaattctttgtcttgaataacacaaccctggtctcctgtattcaaatccggtcagaggagaacatgcccggcggcggcctttctgccgggttggcctcagccaacagcaacgtacgtatcatcgtccgagacctctctggtaaatactcctgggactcagccatcctgtatggcccgccacccgtttccgggctctcagagcctacctcttttatgcttagcctgtcacaccaggagaagccggaagaaccgccaacaagtaatgaatgtctggaagacatcacggtaaaggacggactgtccctccaatttaaaagatttagagaaacagttcccacctgggacactatccgcgacgaggaagacgtgcttgacgagctgctccagtatctgggtgtgacgtctccggagtgtttgcaaagaacaggaatctccttaaacatccctgcaccccagcccgtgtgcatatccgagaagcaagaaaatgacgtgatcaacgctatccttaagcagcatactgaggaaaaggaatttgtcgaaaagcattttaacgatctgaatatgaaagcagtggaacaggatgagccaataccccaaaagccacaaagcgccttctactattgcaggttgctcttgagcattttaggcatgaacagctgggataaacggagaagctttcacttactcaagaagaatgaaaagctactgcgggaactgcgaaatctggatagccgccaatgccgtgaaacgcacaaaattgcggttttctatgtagcagagggccaggaagataaacactcaattctgaccaataccggtggttctcaggcatatgaagactttgtggcagggctgggttgggaagttaatctcaccaatcattgtggtttcatgggcggattacagaagaacaaatctacaggcctgaccacaccctacttcgcaacgtcgacagtggaggtgatctttcatgtgagcactagaatgccatctgatagcgacgattctctgaccaagaaactgaggcaccttggcaacgacgaggtccacatcgtgtggtcagaacacacccgggactaccgccgcggcatcattccaacggagttcggagacgttttaatagtgatttatcccatgaagaatcacatgtttagcatccaaatcatgaaaaagccagaggtgccctttttcgggccactcttcgatggcgctattgtcaacggcaaggttctgccaattatggtgcgtgcaaccgctatcaatgctagccgggctctcaagagtctgattcccctctaccagaacttttacgaggagagagcaaggtacctgcagaccattgtccaacaccaccttgagcctaccacattcgaggattttgcggctcaggtcttttcccctgccccatatcatcatctgccctccgacgctgttggatcctaccccgagattcttccttcagagacccccaccgccacacaggtggatggagcagatctggcatctccaatgtccccccgcacttctaagtctcggatgtccatgaaactgcgacgttcgagcggcagcgcgaacaagtcctag

SEQ ID NO: 202449 - DNA, 2709 bp, synthetic construct
  misc_feature 1..2709: note = Description of Artificial Sequence: Synthetic coding sequence
  source 1..2709: mol_type = other DNA
atggtgcagcggatgtgggccgaggccgccggccccgccggcggcgcagaaccgctcttcccaggttcccgaaggagtagatccgtttgggatgcggtgcgccttgaagtcggtgtgccggattcttgtcctgtggtcctgcactcatttacacagctggatcccgatctgccaagacccgaatcgtctactcaagaaattggagaagaattgataaacggggtgatctactccataagcctacgaaaggtgcaactccatcatggcggcaacaaaggtcagcgatggctcggatacgagaatgagagtgccctgaacctgtatgagacctgcaaggtccggaccgtgaaggcgggaacacttgaaaaactggtcgagcacctagttcccgcatttcaaggctccgacctgagttacgtgactatctttctgtgtacctatagagctttcaccaccactcagcaggtgctcgaccttctctttaaacgatatggatgcattctcccttactcagatgaagacggaggtcctcaggaccagcttaaaaacgcaattagtagcatcctgggcacctggctagatcaatacagtgaggacttctgccagccacccgactttccatgtctaaagcaactggttgcctacgtccagctaaatatgccaggaagtgatttggagagaagggcacacctcctgctggcccagctggaacactccgaaccaattgaggccgagccagaggcactcagtcccgtaccagccctcaagcctactccggagctggagctggcactgacacccgctagagctccttccccagtccctgcgcccgctcctgagcccgaaccggcacctacccccgcaccaggctctgaattggaggtcgcgccggccccagcgccagagctgcagcaagcaccagagccggcagtgggtttagagagcgcaccggcccctgctctcgaactagagcccgcccccgagcaggatcccgccccttcccaaactttagaactagagccagccccagccccagtcccctctttgcagccctcctggccatctcccgtggtagcggagaacgggctgtccgaggagaagcctcatctgctcgtgttccccccagacttggtagccgagcagttcaccctgatggacgcagaactttttaaaaaggttgtgccctaccattgccttggatccatatggtcccaacgtgacaaaaaaggcaaggagcacctagccccaactattcgagcaacggtgacacagtttaacagtgttgccaattgtgtaattacgacctgcctaggcaacagatctaccaaggcacccgaccgcgcgcgagtggtggaacattggattgaggtggctcgggaatgtcggatcttgaagaatttctcctccctctacgccatcttgtctgctctgcagtctaatagcatccatcgccttaaaaaaacatgggaagacgtctcacgggactcttttaggattttccagaaattaagtgaaattttttccgacgaaaataattactccctgtccagggagctgctcattaaagaaggcacctccaagttcgccacgttagaaatgaacccaaaaagggcacagaagagaccaaaagagacaggtatcatccagggaactgtgccttatctggggacatttctgactgatctggttatgctggacaccgctatgaaagactatctttacggaagacttatcaatttcgaaaaaaggagaaaggaatttgaagtcatcgcccaaatcaaactgctccagtccgcttgtaataactacagcatcgcacccgacgagcaatttggagcttggtttagggccgtggaaagactgtccgagactgaatcctataacttatcttgcgaactagagcctccaagtgagagtgccagcaacacactccgtactaagaagaacactgccattgtgaagcgctggtccgataggcaggcacctagcactgaactctctaccagcggctcctcgcacagcaaaagttgcgaccagcttaggtgcggaccatatctgagctccggcgacatagccgacgcgctttccgtgcatagcgctggcagttctagttccgacgtggaggagatcaacatcagcttcgtgcctgagtcccccgatggccaggagaagaagttctgggagtctgcttctcagtctagtcccgagacatccggtatcagcagcgcatcttcttctaccagttccagtagcgcaagcactactccagttgctgcaaccagaacccacaagagatctgtgagcgggctatgcaattcttccagcgccctgccgctttataaccaacaggttggcgattgttgcataattcgcgtctctcttgatgtagataatggcaatatgtacaaatccattctggtcaccagccaagataaagcaccagccgttatcagaaaggcaatggataagcacaacctcgaggaggaggaacctgaggactatgagctcctccagatcctcagcgacgacagaaagctgaagattcccgagaatgctaacgtcttctatgcgatgaactctacagccaattacgactttgtgctcaaaaagcgtaccttcacaaagggtgttaaggtgaaacatggcgcttccagcacattacctaggatgaaacagaagggcctgaagatcgcgaagggtatcttctag

SEQ ID NO: 202450 - DNA, 2745 bp, synthetic construct
  misc_feature 1..2745: note = Description of Artificial Sequence: Synthetic coding sequence
  source 1..2745: mol_type = other DNA
atggtgcagcggatgtgggccgaggccgccggccccgccggcggcgcagaacctctgtttcctggaagtcgacggtcacgatctgtgtgggatgccgtccgcctggaggtgggcgtgcctgattcctgcccagtggtgttacactccttcacacagctggaccctgatctgccgaggcctgaaagcagcactcaggagattggagaagaactaataaacggcgtgatatacagtatctcactgcgaaaggtgcagctccaccacggcggaaataaaggtcagcgctggctcgggtatgagaacgagagtgccctgaacctttacgagacgtgtaaggtgcggactgtcaaagcaggtacactcgagaagttggtggaacatcttgtcccggccttccagggttccgatctgagctacgttacgatatttttgtgtacgtatagagcctttacgacgacgcagcaggtcctagacttgctgttcaaacggtatggaaggtgcgatgcacttaccgcctcctccagatatggctgtattctgccctatagcgacgaagacggcgggcctcaagatcagttaaaaaacgcgatatcaagcatactggggacctggcttgaccaatattccgaggatttttgtcagccccccgatttcccttgccttaaacaactagtcgcttacgttcagttgaacatgccagggtctgacctggaaaggcgcgcgcatctcctgttggcacaactggagcatagcgaaccaattgaagccgaacctgaggccctgtctcccgtgcccgccctaaaacctacccctgaactcgagttagctcttacacctgctagagcgccaagtcctgtcccagcccccgcccccgaacccgaacctgcgcccactcctgcgcctggtagcgaactggaagtcgccccagcaccagcccccgagctccagcaggcacctgaaccggccgttggcttagagtccgccccagcccccgcgctggagttagaacccgcgcccgagcaggacccggcacccagccagactttggagctggagcccgctccggcgcccgtccctagtctgcaaccttcctggccctctcctgtggtcgccgagaatgggttgtccgaagaaaagccacatctgttagtgttcccccccgatctcgttgccgagcaattcaccctaatggacgcggagctgtttaagaaggtagtcccgtaccactgtctgggctcaatctggtcccagagggataagaagggtaaagagcatctagcccctacgatcagagccacagttacccaattcaattctgtcgccaactgcgtcattactacttgcttagggaaccgcagtaccaaagctccagatcgggctcgcgtagttgaacattggatcgaagtcgccagagaatgccggatcctcaaaaattttagttccctatatgccatcctgtccgctctccagtccaacagcatccataggttgaagaagacatgggaggatgtctcccgtgattcattcagaatttttcagaaactttctgagattttcagcgacgagaacaattactcactctctcgggagctgctgattaaggaagggaccagtaaatttgctacgctggagatgaatcccaaacgcgcacagaagagaccgaaagaaacagggattatacagggcaccgttccttatctggggactttcctgaccgatctggtcatgctggacaccgccatgaaggattatctctatggacgcctgatcaatttcgaaaaacggcgtaaggagtttgaagtcattgcacaaattaagctgctgcaatctgcctgcaacaattactccatagcgccggatgagcaattcggtgcctggttccgcgctgtcgaacggctttcagaaaccgaatcttacaacctcagctgtgagttggagcccccgtccgagagtgcatcgaatactctccgtacaaaaaagaatactgccattgtgaagcgatggtccgaccgccaggcaccctccacagaacttagcaccagcgggtccagtcatagcaaaagctgtgaccaactgcgctgcggaccctaccttagcagcggcgatatcgccgatgccctatctgtccattccgccggatcctcgtcaagcgacgtggaggagatcaacatctcattcgtgccggaaagccctgacggccaggaaaaaaagttttgggaatcggcctctcaatctagccccgaaactagcggtatctctagcgcatcctcttcaacttcctcttcctctgcttcaactacacccgtcgccgccacacgaacccacaaacgatccgtgtcaggattatgtaactcttctagtgcattacccttatacaatcagcaggtgggcgactgttgtatcatccgtgtcagcctggacgtggataacgggaatatgtataagagcattctcgtgacgtctcaggataaggcgcctgcagtcatacgcaaggctatggacaagcataatctcgaagaagaggagcctgaagattatgagctcctgcagatcctgtcagatgacaggaaactgaaaatccctgagaacgctaatgtgttctacgcgatgaatagcacagccaattatgattttgtgttgaagaaacgtaccttcactaaaggagtcaaagtgaaacacggagcctctagtaccctgccccggatgaagcagaaaggactcaagatcgcaaagggcattttctag

SEQ ID NO: 202451 - DNA, 1341 bp, synthetic construct
  misc_feature 1..1341: note = Description of Artificial Sequence: Synthetic coding sequence
  source 1..1341: mol_type = other DNA
atgcccggcagcgacctggagcggcgggcccacctgctgctggcccagttagagcactccgagccgatcgaagccgaacccgaagcactgagtcctgtccctgccctgaagcctactcctgagcttgagttggcgctcaccccagctagagccccaagcccagttcccgcccctgccccagagcccgaaccagcacccactccggcacctggttctgaactagaagttgcacccgcccccgctcctgagctgcaacaagcccccgaaccagcggtcggtcttgaatcagcacctgcaccggccctggaattagaacctgctcctgagcaagaccccgccccttcccaaaccctcgagctggagcctgctcccgctcccgtgccaagtttgcaaccctcttggcccagtcctgttgttgccgaaaacggactgagcgaggagaagccgcatctgctagtgtttcctcccgacttagtggccgagcagttcacacttatggacgcagaatgtcggatcttaaaaaatttctccagcctgtacgctatcttgagcgcactccagtccaacagtattcacaggctgaagaagacctgggaagatgtctcacgcgactcttttaggatttttcagaagctgtccgagatcttttctgacgaaaacaattattctctgagccgggagctgctgatcaaggagggcacatcaaagtttgcgaccctggagatgaacccaaagcgtgcccagaagaggcccaaggaaaccggcattatccagggaaccgtaccttatctgggcacctttctgacagatctagtgatgctggacacagccatgaaggactacctgtacgggaggctaattaattttgagaagcggcggaaggaattcgaggtgattgcccaaataaagctgctgcaatctgcttgtaacaactacagcatcgctcccgatgaacagtttggagcatggtttcgggccgtcgaacgcttgtccgagactgagtcgtataatctgagttgcgaattagaacctccctctgaatccgcgagtaacacattgaggacgaagaagaatacagccatcgttaaacgctggagcgacaggcaagctccctctacagagctgagcacctcaggttccagccacagcaaatcatgcgaccaactgcggtgcggtccatacctctcatcaggggacattgcggatgccttaagcgtccactcagctggctcctcttcctccgatgtggaagagatcaacatctcctttgtcccagagtccccagacggacaggagaaaaagttctgggaaagcgcttcacagtcgtcccctgagacatag

SEQ ID NO: 202452 - DNA, 2658 bp, synthetic construct
  misc_feature 1..2658: note = Description of Artificial Sequence: Synthetic coding sequence
  source 1..2658: mol_type = other DNA
atgtgcctgtggggccacagcaccgcccccgcccacaccctgagcagcccccctctcctcttctgtagtttaccctgtgccctgcatctgcagcccggtactggccacccacctggacaggttcctcggaagtcatccacgcaggaaatcggcgaagagctaattaacggcgtcatttactccatttccctacgtaaggtgcagctccatcatggcggcaacaagggccagcggtggctgggctacgagaacgaatctgcactgaacctctacgaaacatgcaaagtgaggaccgttaaggcaggcacgctggagaagctggtggagcatttggttcccgcttttcagggaagcgatttgagctacgttacaatttttctgtgtacctacagggctttcaccaccactcagcaggtgctagatctgctgttcaagagatatggctgcatactgccatatagcgacgaagatggaggccctcaagatcagttaaagaacgccattagcagtattctgggcacctggctcgaccagtactccgaggacttttgtcagccccctgattttccttgcctgaagcagctggtagcctacgttcagttaaatatgcctggctccgatcttgagagaagagcccatctcctgctggctcagctggaacacagcgagcctatagaggcagagcctgaggctctatccccagtcccggccttgaagccaacccccgaactcgagctagctttgacccccgccagggcaccgagtcccgtgccggcccctgcacctgagccggaaccggcgcccacaccagcacccggtagtgagttggaagttgcccctgcacccgcacctgagctccagcaagcaccagaacctgcagtaggcctggaaagcgcccctgctcccgcactggagctggaacccgcaccggaacaagatccggccccctctcagacactagagctggaacccgccccagctcctgtaccatctctccagccctcatggcccagtccagtcgtcgccgaaaacggcctctccgaggagaagccccacctgctcgtgttcccgccagatctggttgccgagcagttcaccctcatggacgctgagcttttcaaaaaggtggtaccataccactgcctggggagtatttggagccagcgcgataagaaagggaaggagcacttggccccaacaataagggctactgttacccagtttaacagcgtggctaactgtgtcattacaacctgtcttggcaaccgatcaaccaaggcgcccgacagagcacgtgttgtagagcactggattgaggttgctcgtgaatgcagaattcttaaaaatttctctagtctgtacgcaatcctctccgccctgcagtccaatagtatacacagacttaagaagacatgggaggacgtgagccgggatagctttagaatattccaaaaactcagcgagatattctcagacgagaacaactacagtctgtcccgcgagttgctgatcaaggaggggacttcaaaatttgctaccctggaaatgaatcctaaaagggctcagaagcgacccaaggaaacggggatcatacaggggacagtgccttaccttgggacgttcctcaccgatttggtgatgttggatactgcaatgaaagactatctgtatggccgattaatcaatttcgaaaagcgccgcaaagagtttgaagtgatcgcgcagattaagctgttacagtctgcctgcaacaactattccatagctcccgatgaacagttcggggcgtggttccgtgccgtggaaaggctgtccgagacggagagctataatctctcatgcgaactggaacctccttccgagagtgcttcaaacactctgaggaccaagaagaatactgctattgttaagagatggtccgatcgccaggcacccagtacagagctgtccacctctggaagcagccactccaagagttgtgatcagctgaggtgcggtccttacttgtcttcgggtgacatcgctgacgccctgagcgtacattctgcgggcagtagcagctcagacgtagaggaaataaacatcagctttgtccctgagagtccagatggtcaggagaaaaagttctgggaatcagcttcccaatcttcccctgagactagcggcatttcgtccgctagtagctccactagctcaagttccgcgtctacaaccccagtggctgcaactcgaacccataagcgatcagtgtcggggctctgtaattcttctagcgcactgccattatacaaccaacaggtcggggactgctgtatcattcgcgtgagtctcgacgtggataacggtaatatgtataaaagcattttggtcacatcacaggataaggccccggccgtgattcggaaagccatggacaagcacaacctggaggaggaggaacccgaggactacgaattgttacagattctgtccgacgaccggaagctgaagatcccagagaatgctaatgtattttacgctatgaactcaaccgcaaactatgatttcgtgttaaaaaagaggaccttcaccaagggtgtcaaggtgaagcacggtgccagcagcacgttaccccgcatgaaacagaagggcctgaagatcgctaaaggtattttctag

SEQ ID NO: 202453 - DNA, 2742 bp, synthetic construct
  misc_feature 1..2742: note = Description of Artificial Sequence: Synthetic coding sequence
  source 1..2742: mol_type = other DNA
atggcccgggaggccggccaggtgtgcgcccggcccgccgtgccccggggacgcaaagggtctgttttcttcgcttgtgtgtccgtagtgactgcccggcggagggccgtggctcgccgcgctgccctgcagagcccaaccccctggctggccccgcttccggcccctgccacgacggagtcttctacccaggaaattggagaggaactgattaatggagtcatttactccatttcactgcgtaaggttcagcttcatcatggcgggaataaaggccagcggtggctggggtacgaaaacgaaagcgccctaaacttatacgagacctgtaaagttaggacagttaaagctgggactttggagaaattagttgagcacttagtccccgcctttcaggggagtgacctgtcctacgtgacgattttcctgtgtacctatcgtgcgttcaccacaacacagcaggtgctggatctcctatttaaacgctacgggcgatgtgatgcactgaccgcctctagccgttatgggtgtattctgccatattcggatgaggacgggggtcctcaggaccagttaaagaacgctatcagcagcattcttggtacatggctggatcagtattccgaagatttctgccagccgcctgacttcccctgtctcaagcagcttgttgcttatgtacagcttaacatgcccgggtctgatctggagcggcgagcacacttactgcttgcacagttggaacatagcgagccaatcgaagctgagccagaagctctctccccagtgcccgctctgaaacctacccctgaactggagttagctctgacccccgctagggcaccttctcccgtgccagcacccgcccctgaacccgaacccgccccgacaccagctcccgggtccgagctggaggtggcaccagcgccagcgcccgagctacaacaagctccggagcctgctgtgggactcgaatctgcccccgcacccgccctggagctcgaaccagcgcctgaacaagacccagccccgagtcagaccctcgagctggagcccgcgcccgccccagtcccgagcctgcaaccaagttggccttcaccagtggtggcagagaatgggttaagcgaagaaaagccccacctgctcgtctttccccctgacctggttgcagagcagttcaccctcatggacgcggaactttttaaaaaggtggtcccctatcactgtctgggttcaatctggtctcagagagataaaaagggcaaagaacacctcgccccaacaatccgagcgaccgtgactcaatttaacagcgtcgctaattgtgtgattacaacatgtctcggaaacagaagcacaaaagcgcctgaccgtgctcgggtcgtcgagcattggatcgaggttgctcgcgagtgtcgaatcctgaaaaatttttcctctctgtatgcgatcctgagtgctctccagagcaactcgatccataggctcaagaagacgtgggaagacgtgtcacgagatagctttcgcatcttccaaaagctgagcgagatctttagcgacgaaaataactatagcctttctcgagaactcttaataaaagaggggaccagtaaattcgcgacactggagatgaacccaaagcgagcacaaaagcggccaaaggaaaccggtataattcaaggcacggtgccgtacctggggacatttttgaccgaccttgttatgctggacaccgcaatgaaggactacctctatgggaggctgatcaacttcgaaaagcgcaggaaggagtttgaagtaatagcccagattaaactgctccagagcgcttgcaacaactattcgatcgccccagatgaacaatttggggcttggtttagggcagtagagagactgtccgagacggagtcatacaatctgtcttgcgaacttgaacccccttcagaatccgcgagcaataccctgagaaccaaaaaaaatactgctatcgttaagaggtggtcagataggcaggccccgtccaccgagctctcaacatcagggtcttcgcattcaaagtcatgcgaccagttaaggtgtgggccctacttaagcagtggggacatcgccgatgcattgagcgtgcacagcgcaggttcaagctcttcagacgttgaggaaattaatattagctttgtccccgagtctcccgatggtcaggaaaaaaagttttgggaatctgcgtcccaatcaagtcccgagactagtggtatatcatccgcttcatccagcacgagcagctctagcgcctctaccacgcctgtggcagcaactcgaacacacaaacggagcgtgtccggcctgtgcaattccagttccgcactgccactttacaatcaacaagtgggcgattgctgtatcatacgggtctccttggatgtggacaatggaaatatgtacaaatctatcctcgtaacctcccaggataaagctcccgccgtgatcagaaaggcaatggacaagcacaaccttgaggaggaagagcccgaagactatgagctcttacagatcctgtctgacgatcgtaaactgaagatccctgaaaatgcaaatgtgttttatgccatgaatagcactgccaattacgatttcgtgctgaagaaaaggacatttactaagggtgttaaggtgaagcacggagctagctcaacactcccgcggatgaagcagaagggcctgaagattgctaaaggaatattctag

SEQ ID NO: 202454 - DNA, 2580 bp, synthetic construct
  misc_feature 1..2580: note = Description of Artificial Sequence: Synthetic coding sequence
  source 1..2580: mol_type = other DNA
atgatggtggactgccagagcagcacccaggagatcggcgaggagctcattaacggagtgatctactccatctccctgcgcaaggtgcagcttcaccacgggggtaataaggggcagcggtggctgggttacgaaaatgagtccgcgctcaatctctatgagacttgtaaagtgagaaccgtcaaggctggtaccctggaaaagctggtggaacacctcgtgccagctttccaaggctccgacctgtcttacgtcaccatcttcctgtgcacctatcgggcatttacaactactcaacaggtcctcgacctgctgtttaagcggtatgggaggtgtgacgccctcaccgcctcaagcaggtatgggtgtatcctcccatatagcgatgaggacggaggaccccaagaccagctcaaaaacgccatttcctctatcctggggacctggcttgatcaatactcagaggatttttgtcagccccctgactttccctgcctcaagcagctcgtcgcttatgttcaattaaatatgcctgggtctgacctcgaaaggcgagcgcacttactcttggcgcagctggagcactctgaacccatagaagccgagcccgaggctctgtcgcctgtgcctgcattgaaaccaacccccgagctggagttggctctcactcccgccagagcaccgtcccccgtccccgctcccgccccagaacctgagcctgccccaacgccagcacctggcagcgagctcgaagtagcacccgccccggcaccggaactccagcaggcaccggagccagccgttggtctcgagagtgcaccagcccccgccctggagttggaacctgcccctgagcaggatcccgcaccatcccagacacttgagctggaacctgcccccgctccggttcctagcttgcagccatcatggccatcccccgttgtcgccgaaaacggactcagcgaagaaaaacctcacctgctcgtgtttcccccggacttagtcgctgagcagttcacattgatggatgccgaactgttcaagaaagtggtcccttaccactgtctcgggtccatctggtctcaaagagataagaaaggaaaggagcacctcgctccaaccatacgagccactgtgactcagtttaatagcgttgccaattgtgttattacgacatgcctgggtaaccggtcgaccaaggccccagatagggcaagagtcgttgagcactggattgaggtcgcacgggagtgccggattctcaagaactttagctctctgtacgccattctgtcagccctacagtcaaatagtattcaccgactcaaaaagacatgggaagatgtgtcaagagactcctttcggatattccaaaagttgtccgagattttcagcgatgagaataattattccctgtctagagaactgctgattaaggaggggactagcaagttcgccaccctagaaatgaaccccaagagggcccagaaacgccctaaagaaaccggaatcatccagggaacagttccctacctgggcacattcttaacagatctggttatgttagacacggccatgaaagactatttatacggacgactgataaactttgagaaaaggcgaaaagaattcgaagtcattgcccagatcaagctgttgcaaagtgcttgcaataactactcgatcgccccagatgagcagttcggcgcttggtttcgggctgtggagaggttatccgagaccgaaagttataatctgagttgcgaactcgagccaccttcggagtctgctagtaacacgcttcgcactaagaagaacactgccattgtaaagcgctggtcagataggcaggcacccagcactgagctgtcgacctccggatcctcccatagcaaaagctgtgaccagttacggtgtggaccgtatctatcaagcggggatattgcggatgcactctctgtccactctgccggttcatcgtcctctgatgtggaggagatcaacatttcatttgttccagaatccccagatggacaagaaaagaagttctgggagtcagcttcccagtcctcacctgagaccagtggcatcagtagcgctagctcttcgacgtcctcatcatcagcgagcaccacgccagtggctgccacacgcactcacaagcgatccgtgtcagggctctgtaactcatcctctgctctccctctgtataaccagcaggtaggggactgctgcataatccgagtgagtctcgacgtcgacaatgggaatatgtacaaatctatcctggttacctctcaggacaaggccccagccgtcattaggaaagccatggataaacacaatctggaggaggaagagcccgaggactacgaattgttacagattttgtccgacgacaggaagctaaagattcctgaaaacgcgaacgtgttttatgccatgaacagtacagccaactacgatttcgtgctgaaaaaacgcacatttactaagggagttaaagttaagcacggggcctccagcactctgccaagaatgaagcaaaagggtctgaaaattgctaaggggattttctag

SEQ ID NO: 202455 - DNA, 930 bp, synthetic construct
  misc_feature 1..930: note = Description of Artificial Sequence: Synthetic coding sequence
  source 1..930: mol_type = other DNA
gtggtggccgagaacggcctgagcgaggagaagccccacctgctggtgtttcccccagatctcgtcgctgagcagtttacactcatggatgccgaatgtagaatcctcaagaatttttcgagtctgtacgccatattgagcgccctgcagagtaacagcatccacaggctcaagaagacctgggaggacgtatctcgtgactcctttaggatctttcagaagctgtctgaaatattttccgacgagaataattacagcctttcgagggagcttttgatcaaggagggcacatcgaaattcgctacactcgaaatgaatccaaaaagagcacagaagagaccgaaagagactggaatcatccagggaacggtaccctacttagggacctttttgactgacctggtcatgctggacacggcaatgaaagactacctttacggtcggctgatcaacttcgaaaagagacggaaagagttcgaggtcatagcacagattaagctgctccaaagcgcctgtaataattatagcattgcccctgatgagcagttcggtgcctggtttcgggccgtggaacgcctgtccgagaccgaatcctacaaccttagctgtgaactggagcctccatccgaaagtgccagtaatacactcagaacaaaaaagaacaccgctatagtgaaaaggtggtcagacaggcaagcccccagtacggagctgtctacctcagggtcctcacactcgaaaagttgtgatcagctgaggtgcggaccctatctgtcctccggagacatcgctgatgcattgagcgtacattccgcggggagctcttcaagcgacgttgaagagattaacatcagctttgttccagagtccccagatgggcaagagaagaagttctgggaatccgcctcacagagtagccccgagacttag

SEQ ID NO: 202456 - DNA, 2958 bp, synthetic construct
  misc_feature 1..2958: note = Description of Artificial Sequence: Synthetic coding sequence
  source 1..2958: mol_type = other DNA
atgcaccggcggcggctggccctgggcctgggcttctgcctgctggctggaacatccctgtctgtgttgtgggtctatcttgaaaactggctccctgtgagctatgtcccttattatctgccatgcccagagattctgccaatgatgatggcattgtcgtgcctgtgtcaccagcagcatgaagcagccctgcaagagggggaggccacccctgcacgggggatggtgacagtgcccagcgcacaggcagccggtgctcaagcacatactgctgccgatacccacacgctggtaggcgcacaccgcctgaggggtaacttacagcctagggcatcagccgcacacctgcctgcaaccgaacccgatcattggggacatggggtatgtcgaggcgagagcagtacacaggaaattggtgaggagctaattaacggcgtcatatattcaatcagtctcaggaaggtacagctgcatcacggcggcaacaaggggcagcgatggctgggatatgaaaatgaaagcgccttaaacctctacgagacctgtaaggtaagaactgtgaaagcaggcacactggagaagctggtagagcacttggttcctgctttccagggaagcgacttaagttatgtcactatctttctgtgcacttacagggccttcacgactactcagcaggttctagatcttctgttcaagcgctacggacggtgtgacgctctgaccgccagcagtcggtatggctgcatcctgccctacagcgatgaagatggtggacctcaggaccagctgaaaaatgcaatctcatcaatcctgggcacctggttagatcaatacagcgaggatttttgtcagcccccggactttccatgtttgaaacagttagttgcttacgtgcagctgaatatgcctggtagtgaccttgaaaggagggcacatctactgttggcccaactcgaacacagcgagccaatagaagccgaacccgaagccctgtcgcccgtgccggctcttaaacctacgcctgagctcgagttagcattgacgcctgcaagggccccaagcccagtgcccgcccccgctcccgaacccgagcctgcacctacaccagcccccgggtccgaacttgaagtcgccccagccccagcccccgaactgcagcaggccccagagccagcagtggggttggagtccgctcctgcaccagctctcgagcttgagcctgccccagaacaggacccagccccttcccaaacacttgagctggagcccgcacccgcccccgtcccgtcccttcagccttcttggcctagcccagttgtcgccgaaaacggtttgtccgaagaaaagccgcatttgttagtgtttcctccggacttggtggctgagcagttcaccttgatggacgccgagcttttcaaaaaggtggtgccatatcattgcctaggaagcatttggtcacagagagacaagaaaggcaaagaacacctagctcctacaatccgcgctaccgtaacccagtttaacagtgtggcaaactgtgtcatcaccacctgtctcggtaatcgcagcacaaaagccccagatcgcgctcgggtcgtagaacattggatcgaagtggcgcgagagtgccggatactaaaaaacttttccagcctctacgcaattctgtcggctctacaaagtaacagtattcataggctgaaaaagacgtgggaagacgtgagtagagatagcttccgaatcttccagaagctttctgagatttttagcgacgaaaataactatagcctcagccgggagcttctgataaaagaaggcacaagcaagtttgccaccctcgagatgaaccctaaacgcgcccagaagaggcccaaagagaccggcattatccagggaaccgtgccttatctcggcacgttcctaaccgacctggttatgctcgacaccgccatgaaagattacctgtatggaagactgatcaatttcgagaagagaagaaaagagttcgaagtgattgcacagataaaactgttacagtccgcatgcaacaactattctatcgcaccagacgaacagtttggcgcgtggtttcgggccgtcgagcggctatccgaaacagaatcctacaatctctcatgcgagttagagccaccatccgaatcggcttctaataccctgcgtaccaaaaagaatacagcaattgtcaagcgatggagcgatcgtcaggccccctccactgagctgtctacatccggttcatctcattccaaatcatgtgaccagctgagatgtgggccctacttgtcttctggagacattgcagacgcactcagcgtgcactctgccgggagctcatcaagtgacgtcgaggagatcaacatttcgttcgttcccgaaagccctgatgggcaagagaagaaattctgggagtcggcatcacagagctcaccagagacatctggcatctcttctgctagttccagcacatctagcagttccgcctctacaaccccggtggcagctacaaggacacacaagaggtctgtgagtggtctgtgtaattcctcatccgctcttcctctttataaccaacaggttggtgattgctgcatcatacgggtctccctcgatgtggacaacggcaatatgtacaagtccatccttgtaaccagccaggataaagctcccgctgtgatcaggaaggcaatggataagcataatcttgaagaagaggaaccggaagattacgaattgttacagatcctctctgatgaccgaaagctcaaaatcccagagaacgctaatgtcttctacgctatgaacagcaccgctaactatgacttcgtgcttaaaaaaagaacttttactaagggagtcaaggtcaaacacggagcctccagtacactgcctagaatgaagcagaagggcttgaagatcgccaaaggtattttttag

SEQ ID NO: 202457 - DNA, 2412 bp, synthetic construct
  misc_feature 1..2412: note = Description of Artificial Sequence: Synthetic coding sequence
  source 1..2412: mol_type = other DNA
atggaggtgaagcccgtgggcgagcccacccaggaggtgagcaagtttaagctttccacaaaagtagagagcacgggccactggctcgtggaggatcacgtccggatttgggaggtcttgaaaactgaggagtcaagcattcaggattggggggaggaggtcgaggaaggggcagtgtatcatgtgactctgaagcgtgtgcagattcagcaggccgcgaataagggcgctcgatggctcggtgtggagggagaccagctgccccccggccacactgtcagccagtacgagacttgcaagataaggactattaaggctggtacattagaaaaattagtggagaacctgctgaccgcttttggagataatgatttcacttatatatcaatattcctgtctacctatcgcggcttcgcatcaactaaggaagtgctagaactgcttctagatcgttacggcaatctcacttccccgaactgcgaggaggatggaagccagagctccagcgagtcgaaaatggtgattcgcaatgcgattgcatccattcttagggcatggttggatcagtgtgcagaggactttcgcgaacctccccatttcccttgcctacaaaaactgctagactatttgactcgcatgatgccaggcagcgaccccgaacggcgggcccagaatttattggaacagtttcagaaacaagaggtggagaccgacaatggtttacccaacaccatctcattctccttagaagaggaggaggaattggaaggcggcgagagcgctgagttcacttgtttttcagaagatctcgtcgctgagcaactgacttatatggatgcgcagctgttcaagaaagttgtccctcaccactgcctgggatgcatctggagccgacgcgataagaaagagaacaagcacttggctcctaccatccgggcaacaatatctcaatttaatacactaactaagtgtgttgtgtccacaatcctcgggggcaaagagctgaagacacagcagcgggctaagatcatcgaaaagtggattaacattgcgcatgagtgtcgccttctgaagaatttctcctccctgcgcgccatcgtgagtgccctgcagtccaactccatctatcgtctcaaaaagacatgggcagctgtccctagggaccggatgcttatgtttgaggagctctctgacattttcagtgaccacaacaaccatctcaccagcagagaattgctgatgaaagaagggacttcgaagtttgctaacctcgacagctccgtgaaggagaaccagaagcgcacccagagacgcttgcagctccagaaggacatgggcgtcatgcagggcaccgtcccctacctggggacctttctgacagatctgaccatgctggacactgcacttcaggactacatagagggaggtctgattaatttcgagaagcggagacgcgaatttgaggttatagcccaaatcaaattgttgcagtccgcttgcaactcttactgcatgactcccgatcagaaatttatacagtggtttcagcgacagcaactgctgaccgaagaggaaagttatgctctgagctgcgaaatcgaggccgcagcagacgctagcactacgagtcccaagcctcggaaatccatggtgaagcgcctgtctctgctattcctagggtccgacatgattaccagtcctactccaacgaaagaacagcccaagtctaccgcgtctgggtcatctggcgaaagcatggacagcgtttccgtgtcatcctgcgagtccaaccactccgaagctgaagaggggtctattactccaatggacacacccgacgagccccaaaaaaagcttagcgaatcgtcaagtagctgtagttctatccattcaatggacacaaactcctctggtatgtcctccctcattaaccctctgtcatctccaccaagttgtaacaacaacccgaaaattcacaagaggtccgtgtctgtaacctcaattacaagcaccgtcctccccccggtgtacaaccagcagaacgaagacacatgtatcattcggataagcgtcgaagataacaacgggaacatgtataaatcaatcatgttaactagtcaggacaagactcctgctgtgatccagagagcaatgttgaaacacaacttggattcagatccagcggaagagtatgagctcgtgcaggtgattagcgaagataaggagctggtaatccctgattcagcaaacgtgttctacgccatgaactcacaagtgaatttcgacttcatcctcagaaaaaaaaattccatggaagaacaggtaaagctgagatcccgcacaagtttaacactgcccagaactgccaagcgcggctgctggtctaatcgacactcaaagatcacattatag

SEQ ID NO: 202458 - DNA, 2307 bp, synthetic construct
  misc_feature 1..2307: note = Description of Artificial Sequence: Synthetic coding sequence
  source 1..2307: mol_type = other DNA
atgaagctgctgtggcaggccaagatgagcagcatccaggactggggagaagaggtcgaagagggggcggtgtatcatgtgacactaaaaagagtgcagatccagcaggccgccaataaaggagcaagatggctcggggtcgagggcgaccagctcccacccggccacaccgtaagccagtatgagacatgcaaaatccgcaccattaaggcaggaaccctggagaaactagtggagaatctgctgaccgctttcggcgacaatgattttacttacattagcatattcttatccacgtaccgcggattcgcatccacaaaagaggtcctcgaattgcttctggataggtacggcaacctgacgtcacctaactgtgaggaagatgggtctcagtcaagctccgaaagcaagatggtaattaggaacgcgatcgcatctatactcagagcctggcttgatcagtgcgccgaggatttccgtgaaccgccccatttcccgtgcttgcaaaaacttctggattatctgacacgtatgatgcccggatccgaccctgagcggcgtgcccagaacttgttggaacagttccaaaagcaggaagtggagaccgataatggtctccctaacactattagcttctctttggaggaggaggaggagctcgaggggggggaatctgccgagttcacctgtttttctgaagatcttgtagcggagcagctgacatatatggatgcgcaacttttcaaaaaagttgtgcctcatcattgcttgggctgtatctggagccggagggacaaaaaggaaaacaagcacctcgcacccaccatcagagcgacaatcagccagttcaatactctgaccaaatgcgtagtaagcaccatccttggcggtaaagagctgaaaacacagcagcgggctaagatcattgagaaatggattaatatcgcgcacgagtgccgactccttaaaaacttcagcagtctgagggctattgtgtccgctcttcaaagcaactccatatatcggttgaagaaaacgtgggctgccgtaccacgcgaccggatgctcatgttcgaagagctgagtgatatattcagtgaccataacaaccacctgacatctcgggagttgctgatgaaagagggtactagtaaatttgccaacctggattcttcagtgaaagagaaccagaagagaacgcaacggcgcttgcagctgcagaaagacatgggagtgatgcaggggaccgtgccatacctgggcacctttctgaccgatcttaccatgcttgatacagctctgcaagactacattgaagggggcctcataaattttgagaagcgtcgacgcgagttcgaagtgatcgcacagattaagttgctgcagagcgcctgtaacagttactgcatgacacccgatcagaagtttatccagtggttccagcgacaacaactgcttaccgaagaagagagctatgcactgagctgtgaaatagaggcggctgctgacgctagcacaactagtcctaaaccaaggaagagtatggtgaaaaggctcagccttctgttcctcggcagtgatatgattacctcccctacccctactaaggagcaaccaaaatccactgccagtggatcctcgggtgagtctatggattccgtctccgtgtctagttgcgagagcaaccactcagaagctgaggagggctcaatcacacctatggatacacctgacgagccgcagaagaagcttagtgaatcatcgtcttcatgttcctctatccattccatggacaccaacagcagcggcatgagttcactcatcaacccgttgagctcccctccctcctgtaacaataacccgaaaatccacaagcgatccgtgtctgttacaagcataacatctacggtgctgcctcctgtttacaaccagcaaaatgaagatacatgtatcatccggataagtgttgaagataacaacgggaatatgtataaatctattatgcttacatcacaggacaaaacacccgcagttattcagcgtgccatgcttaaacataacctggactcagaccccgccgaagagtacgaattggttcaggtgatctccgaagacaaagagctggtgatacctgacagcgccaacgtgttctacgcgatgaattcccaagtgaacttcgacttcatccttaggaaaaaaaacagcatggaggagcaagttaagctgagatcgaggaccagcctgaccctgcccagaacggcgaagagaggttgttggagtaacaggcattctaaaattaccctttag

SEQ ID NO: 202459 - DNA, 2412 bp, synthetic construct
  misc_feature 1..2412: note = Description of Artificial Sequence: Synthetic coding sequence
  source 1..2412: mol_type = other DNA
atggaggtgaagcccgtgggcgagcccacccaggaggtgagcaagtttaaactatccacaaaagtagagtctactggacactggctggtggaggatcacgtacggatttgggaggtattgaaaaccgaagaatcctcaatccaggactggggtgaggaagtggaagagggagcagtatatcatgtcacattgaaaagagtccagattcaacaagccgccaacaaaggcgctcgatggctaggtgtcgagggggatcagctccctcccgggcacacagtctcacagtatgagacctgcaaaataagaacgattaaagcggggaccctggaaaagctggtggaaaatctgctcacagcatttggggacaacgactttacatatattagcatctttttgtccacatatcggggcttcgctagtaccaaggaagtcctggaattactcttggatagatatgggaatctgactagccctaactgcgaggaagacggaagccagagctcctcggagagtaagatggtgatacgaaatgcgatcgcgtcaatattgcgggcatggttggatcagtgcgccgaggacttccgggagccccctcattttccttgcctgcagaaactgctggactatctgacaagaatgatgcccggtagcgatccagaaagaagagctcaaaacctccttgagcagtttcagaaacaggaagtggagacagataacgggctgcctaataccatttccttctcactcgaagaagaagaggagttggaaggtggggagtccgccgaattcacatgtttttcggaagatcttgttgcagagcaactgacatatatggatgcacagctgttcaagaaagttgtgccgcaccactgcttgggctgcatttggagcaggcgagacaaaaaagagaacaagcacctcgctccaacaattagagcaactatctcccaatttaataccctgactaagtgtgttgtgagcactatcttaggcggcaaagaactgaagacccagcaaagagccaaaataatagagaagtggatcaatatagcacatgaatgtcgattgcttaaaaacttttcgagtttgcgcgcaatcgtgagtgcactgcagagtaatagcatctacaggctaaaaaagacatgggccgctgtcccacgtgatcgaatgctaatgtttgaagagctcagtgatatctttagtgaccataataatcacttgacaagcagagaacttctgatgaaagagggcacctctaagttcgcgaacttggattcttctgtcaaagagaaccagaagcgcactcagcgacgcctccagttgcagaaggacatgggggtcatgcagggaaccgtgccctatctgggtactttcctcaccgacttgaccatgctggacactgcgctgcaggactatatcgagggggggttaatcaacttcgaaaaacgaaggagagagttcgaagtgatcgctcaaattaaactgctgcagtcggcttgtaattcctactgcatgactcctgatcagaagtttatacaatggttccagcgacaacagttgctaacagaggaagaatcctatgcgctcagctgcgagatagaagccgctgccgatgcttctactaccagtcccaaaccacgtaaaagtatggtgaaacgtctgtccctgttattcctgggttccgacatgatcacatcccctaccccaacaaaggagcaaccgaagagcaccgcttccggatcgtcaggggagagcatggatagcgtctcagtgtcttcttgcgagtcaaaccactcagaggccgaggaaggttccatcactcccatggatacgcctgacgagcctcagaaaaaactctcggaatcctcctcgagttgctcgagcatccattctatggacaccaattcatccggcatgtcctccctgatcaatcctctctccagccccccgtcctgcaataacaatcccaaaatccataaaaggtccgtgtctgtcacgagcatcacttcgactgtgctaccgccagtgtataatcagcagaatgaggacacttgcatcataaggatttccgtggaagataataatggtaatatgtataagtccatcatgctgaccagccaggacaaaactccggctgtgattcaaagagcaatgctcaaacataatttagattccgatcccgctgaagaatacgagctggtacaggtgattagtgaggacaaagaactggtgattcccgactcggcaaatgtgttctacgctatgaacagtcaggttaactttgacttcatcttgaggaaaaaaaatagcatggaagagcaagtgaagctacgctctaggaccagccttacgttgccacggaccgctaagagggggtgttggtcgaaccgacattctaaaattaccttgtag

SEQ ID NO: 202460 - DNA, 2301 bp, synthetic construct
  misc_feature 1..2301: note = Description of Artificial Sequence: Synthetic coding sequence
  source 1..2301: mol_type = other DNA
atggaggtgaagcccgtgggcgagcccacccaggaggtgagcaagtttaagctctcaacgaaggtggagtcaacaggccactggctggtcgaagaccatgtgcgaatctgggaggtattgaagaccgaggaggtggaaggtgatcagctaccaccagggcacactgtttcgcagtacgaaacttgcaaaattcgcaccattaaagccggcactctggagaagctggtggagaacctgctcaccgcctttggcgacaatgacttcacttacatctctatattcttgtccacttacaggggtttcgcatcaactaaagaggtgctggaattacttctcgatagatatggtaacttaacctccccgaattgtgaggaagatggatcacagtcttccagcgagagcaagatggtaatccgtaatgctattgcttccatcctccgggcgtggctagatcagtgtgccgaagacttccgagagcctccacatttcccctgcctgcagaagctcctggattatttaacaaggatgatgcctggctcggacccagaacgacgagcccagaacctcctcgagcagttccagaaacaggaagtggagactgataatggactgcccaatactataagtttcagccttgaggaggaagaagagttggaagggggtgaaagtgcggagttcacatgcttctcggaagacctggtagccgagcagctgacttacatggacgcccagctgtttaagaaggtggttcctcaccactgcctcggttgcatctggtcaaggcgggacaagaaagagaacaagcatctggcaccgacaatcagggccactatcagtcagtttaatactctcacaaagtgcgtagtgtctacaattctcggtggtaaagaactgaagacccaacagagagccaaaattattgaaaaatggattaatattgcccacgagtgccggcttcttaagaacttttcatcattaagggccatagtgtcagccttgcagtctaattctatctataggctcaagaaaacctgggccgccgtgccccgggatagaatgctcatgtttgaggagctgagtgatatattctctgatcataataaccacctcacatctagggaactgcttatgaaggagggtacttcaaaattcgccaacttggacagcagcgtgaaggagaaccagaaaagaacccagcgccgactccagctccagaaggacatgggcgtgatgcagggcactgtgccctatctaggcacgttcctcaccgatctgacaatgctggacactgcactccaggactacattgaggggggattaattaactttgagaagcgccggagggaatttgaagttattgctcagataaagttgctacaatctgcctgtaatagctactgtatgacgccagatcagaaatttattcagtggtttcagagacaacaactgctaactgaggaagagtcatatgccctgagctgcgaaatcgaggcagctgctgacgcctcgacgacatcccccaagccaaggaagtccatggtgaagagactctccctgttgtttttaggcagcgatatgatcacctcacctactcccacaaaagagcagccaaagtctacagcttctggatcttccggggaatctatggacagcgtgagcgtgagttcgtgcgagtccaatcactcagaggcagaagaaggctcgatcacacctatggacacgccagatgagcctcagaagaagctgtcagagagttcttcctcttgctcttctattcacagcatggacaccaacagctcaggaatgagctcacttatcaacccattgtctagccccccttcctgcaacaataaccctaaaattcacaagaggtccgttagcgtgacctctattacttcaactgtgctgcccccggtgtataaccagcagaatgaggatacctgtattattagaatatcagtggaagataataatggaaatatgtacaagagcattatgcttacatcccaagacaagacgccagctgttatccagcgcgctatgcttaagcacaacctcgactctgaccctgccgaggagtacgagctcgtgcaggtcattagcgaggacaaggagctggtaattcctgattccgctaatgtgttctacgcgatgaattcccaggtgaatttcgatttcatcctcaggaaaaagaacagtatggaagagcaggtaaaactgcgctccagaaccagcttgacactcccaagaacggccaagcgtgggtgctggagcaacagacattcaaaaatcactctttag

SEQ ID NO: 202461 - DNA, 2220 bp, synthetic construct
  misc_feature 1..2220: note = Description of Artificial Sequence: Synthetic coding sequence
  source 1..2220: mol_type = other DNA
atgaagctgctgtggcaggccaagatgagcagcatccaggactggggagaagaggtggaggaaggtgctgtgtaccacgttacactgaagcgtgtgcagatccaacaggccgcaaataagggggctaggtggctgggggtcgagggtgatcagctcccacctggacatacagtgtcacagtacgagacatgcaagattaggactataaaggctggcaccctggaaaaacttgttgaaaatcttctgactgcattcggggacaacgattttacgtacatcagcatcttcctgtcaacatatcggggattcgctagcactaaggaggtcctcgagctgttgctggataggtacggcaacttgacttctcccaactgtgaggaggatggaagtcagagctcatccgagagcaagatggtgatcaggaacgcgatagccagcatacttagggcatggctggatcagtgcgccgaggacttcagggagccacctcacttcccttgtctccaaaaacttttggactatttaactagaatgatgcccggtagcgacccagagaggcgcgcccagaaccttctggagcaatttcagaagcaggaggtcgagacggataatgggttaccaaacactatctctttctccctcgaagaagaggaagaactcgaaggaggtgagtcggccgagtttacttgcttttctgaggatctcgtggcggagcagctcacttatatggatgcccagctcttcaagaaggtggtcccccaccactgccttggttgcatctggagtcggcgagacaaaaaagagaacaaacacttagcccccactatcagggccacgatcagccaatttaacactttaactaagtgtgtggtttcgacaatcctcggagggaaagaactgaagactcaacaaagagccaaaattatcgaaaagtggataaacatcgcgcacgagtgtcgccttctcaaaaactttagcagcctaagagctatcgtgtccgccttacaaagtaactcaatctaccggctcaaaaagacctgggctgctgtcccacgggatcgaatgctgatgtttgaggaactctccgatatcttttcagatcataacaaccacctgacttccagggaactgctgatgaaggagggcacatctaagttcgccaacttggatagctccgtcaaggaaaaccaaaagaggacacagaggcgcctgcagctccagaaggatatgggaggattgatcaacttcgaaaagaggcgtcgtgaattcgaagttatcgcgcaaatcaaacttctgcagagcgcttgcaacagctactgcatgacccccgaccagaaatttatccagtggtttcaacgccaacagctgttaactgaagaggagagctacgctctgtcctgtgaaatcgaggccgctgctgatgcctctaccacatcccctaagccacgcaaatccatggtaaagcgtctatcactgctgtttttgggctccgacatgatcacctcccccacccccaccaaggagcagcccaaaagcactgcgagcggatcctcgggagagtctatggacagcgtgagcgtttcaagctgcgagagcaaccattctgaggctgaggagggatctataacccctatggatacccccgatgagccccagaaaaaactgtccgaaagcagtagctcttgtagttctatacacagcatggatactaatagctctggtatgtcaagcctcataaatcctttgtctagtcctccctcatgtaacaacaaccccaagatacacaagcgcagtgtctccgtgacgtctatcacctccacagtgcttccacctgtgtacaaccagcagaacgaagacacgtgcataattcgaataagcgtggaggataataatgggaacatgtacaagtccattatgctgacaagccaagacaaaacaccagccgtgatccagcgggcaatgttaaagcacaatctagactccgaccctgccgaagaatacgagcttgtgcaagtcatctcggaggacaaggagctagtgattcccgattccgctaatgtgttttatgctatgaacagccaggttaacttcgattttatcctgcggaagaagaattccatggaagagcaggttaaactgaggtccagaacctctctgacccttccacggactgccaagagaggctgctggtccaatagacactcaaaaatcacactctag

SEQ ID NO: 202462 - DNA, 1173 bp, synthetic construct
  misc_feature 1..1173: note = Description of Artificial Sequence: Synthetic coding sequence
  source 1..1173: mol_type = other DNA
atgggcagcttcaaggaccggggcgacggcctgcccaacaccatcagtttttccctggaggaggaggaagaactggagggaggagagtctgctgagttcacatgtttttctgaagacttggtcgcagagcaactcacatatatggacgcccagctattcaagaaggtggtgccccaccactgcttgggatgtatttggtcacgaagagacaagaaagagaataaacatctggcacccactatccgtgccacgatcagccaattcaacacgctgactaaatgcgtagtgtctactattttgggtggaaaggagctgaaaactcagcagcgtgctaagattatcgagaaatggattaatatcgcccacgagtgccgcttgttgaagaacttcagctccctgagggccatcgtttctgcactgcagagtaacagcatctacagactgaaaaagacgtgggcagcggtgccccgtgatcgcatgctgatgttcgaagagctgtcagacattttctcggatcataacaatcatctgacctcccgcgaactcctgatgaaagaaggcacttcaaagtttgctaatctcgacagctcagtcaaggagaatcagaagcgcacacaacgcagactgcagctccagaaggacatgggtgtaatgcaggggacagtgccctatctcggcaccttcctgacagacctaactatgttggatacagcactccaggactacatcgaaggcggtctgatcaattttgagaaaagaagacgagaattcgaagttattgcccagataaagttgttacagagcgcatgtaactcctactgcatgacacccgaccagaagttcatccagtggtttcagaggcagcagctcctgaccgaggaggaatcttacgccctctcctgcgaaattgaggctgccgctgacgcgagcactacgtcccccaagccacgcaagtccatggtcaagcgcctgtccctactgttcctgggatcggatatgatcacaagccccacccctacaaaagagcagcccaaaagcactgccagcggctcctctggcgaatccatggattccgtcagcgtgtcatcttgtgagagcaaccacagtgaggctgaagaggggtcaataacacccatggacacccctgatgagcctcaaaagaaggcgttgtag

SEQ ID NO: 202463 - DNA, 1422 bp, synthetic construct
  misc_feature 1..1422: note = Description of Artificial Sequence: Synthetic coding sequence
  source 1..1422: mol_type = other DNA
atgcggaagctgctgaccaacctgcccgccgccgccgtgctgagcgcacaagtatacagcgccgttcttcaggggctctgggaggagaatgtgtgcggaacacctggacgcacccgcgtctgtacagctctactatacggacaggtttgcccatttcaggatagcacggatggccttcggaccatcactagcatcctctttaattggccccctgaaaatacttcagtctactaccaaccaccccaaaggagctcattccggattaagttggcatttcgcaacctgtcctggcctgggttaggcctggaagaccaccaagaaatagtgcttggccagttagtgcttcccgagcccaacgaggctaagcccgatgatcccgctccacgccccggccagcacgctctgaccatgcccgccctagaaccagcgccccccctgctggccgacctgggacctgcactcgaacctgaatctcccgccgctctgggaccacccggctacctgcactccgctccaggacccgcccctgctcctggggagggtcctccgccaggcactgtcctggagcctcagtccgctcctgaatcgtcatgtccatgtagaggtagcgtgaagaatcagcccagtgaagaactcccagatatgactaccttccctccaagactgctggccgagcaactcacattgatggacgctgagctcttcaaaaaggtagtcctccatgaatgcttggggtgtatttggggacaaggccatcttaaaggcaacgagcatatggcccccaccgttcgcgccacgattgcccacttcaaccggctgactaactgtataaccacatcatgtctgggagaccactctatgcgagcacgcgatcgtgccagggtcgtagagcactggatcaaagtggcacgcgagtgcttgtcattaaataacttcagctccgtgcacgttattgtgagtgcactctgttctaaccccatcggccagctgcacaaaacttgggcaggcgtatcctcaaaaagtatgaaggaactgaaagagctgtgcaaaaaggacacagccgtcaaacgagatttactcatcaaagcgggcagcttcaaagttgccactcaggaaaggaatccccagcgagttcagatgagattgagacgtcagaagaaaggtgtcgtgccctttctgggtgattttctgacagaactccagaggctcgactccgctattcctgatgaccttgacggaaataccaataaaagatcaaaagaagtgcgagtgctgcaggagatgcagctgctccaagtcgccgccatgaattacagactgaggcccctggagaagttcgtcacgtatttcacccgcatggagcagctgtcagacaaagaaagctacaagctcagttgtcagcttgagcccgagaacccgtag

SEQ ID NO: 202464 - DNA, 1743 bp, synthetic construct
  misc_feature 1..1743: note = Description of Artificial Sequence: Synthetic coding sequence
  source 1..1743: mol_type = other DNA
atgcggaagctgctgaccaacctgcccgccgccgccgtgctgagcgcccaggtgtactcggcagttctgcagggcttgtgggaagagaatgtatgtggtactcccggacgcactcgagtctgcacagcactgctgtacggacaggtatgtccgttccaggatagcactgacggcctcaggacgattacgagcatcctcttcaattggcccccagagaatacctctgtgtattaccaaccaccccagcgaagtagcttcaggatcaagcttgcctttagaaatctgagctggcctggactggggttagaagaccatcaggagattgtgctggggcaactggtcctgccggaaccgaacgaagcaaaacccgacgaccccgccccaagaccgggccaacatgcgcttactatgcccgccttggagcccgcaccacctcttctcgctgacctcggacctgcgctggaacctgagtcacctgccgcccttggccctcccgggtatctccattctgcgccagggccggccccagcgcccggcgaaggacctccacctggcaccgtcctcgagccccaatcggcccctgagagttcgtgcccttgcagaggttcagttaagaaccagccatcggaggaactccctgatatgacaactttccccccccgcctgcttgcggagcagctgacgctgatggatgcagaacttttcaaaaaggtagtgctacacgagtgtttaggatgcatttggggccagggccatcttaaggggaacgaacatatggcgcctaccgtgcgagcgactattgcacactttaatcgtctgaccaattgcattaccacctcatgccttggagaccattccatgcgagctcgagatcgggccagggtggtcgaacactggattaaagtagcgagggagtgcctctctttaaataattttagctcagtacatgtcatagttagcgcactatgctccaatccaattgggcagctgcacaagacatgggccggggtttcttccaagagtatgaaagaattgaaagagctctgtaagaaagacaccgcagtgaaaagggatctcctcataaaggcaggtagctttaaggttgccacccaggaacggaatccccaacgcgttcagatgagactgcgaaggcagaagaagggcgtagtcccattcttgggggatttcctgacagaattgcagcggctagattcagccattccggatgatctggacggaaatactaataagcggtcgaaagaggttagggtcctgcaggagatgcagctgcttcaggtggctgctatgaactatagattacggcctctggaaaagttcgttacttattttacacggatggagcaactgtccgacaaagagcgttggggattcacaatgatgtcccgcatcgtctccaactcttggccccaggccattcatcctccgcaacctcctaaagtcctgactctgcagctgcaggctgtgctgcctgccggcgcccggaagcccgtgggttggcagcatcccgcagtagccggcaatcctcctggctgttggcccgaacatagactgtgtaccatccctcaccccgaccggagacaccagggaactaccagccggcgactcgctgcccaactccatctcgccctagatccccaccaccagctgttgctgctggcccgcatccgcccttgggatttttgcgagagtgggggacgccccttctatgtgtactttctgtag

SEQ ID NO: 202465 - DNA, 1968 bp, synthetic construct
  misc_feature 1..1968: note = Description of Artificial Sequence: Synthetic coding sequence
  source 1..1968: mol_type = other DNA
atgaccgagtgcttcctgccccccaccagcagccccagcgagcaccggcgtgtggagcacggttccggcctgacccggactccgagcagcgaggagatttctcccacgaaattccctggtctataccgtactggcgagcccagccccccccatgatatcttacacgagccgccagacgtcgtgtctgacgacgagaaggatcatggtaaaaagaaaggaaaattcaagaaaaaggaaaagcgaaccgaaggatatgcagccttccaggaagactcctcaggagatgaagcggagtctcctagcaaaatgaaacggagtaaggggatacatgtgtttaagaaacctagcttttccaagaagaaagaaaaggacttcaagataaaggagaaacccaaagaagagaagcataaagaagaaaaacataaagaggagaaacacaaggaaaagaagtcgaaggacctgaccgcagccgatgtggtgaagcagtggaaggaaaaaaagaagaagaagaagccaattcaagagcccgaagtgccacaaatcgatgtgcctaatctgaagcctatcttcggtattccgctggccgacgctgtggaacgcactatgatgtatgatggcataagacttcccgcagtatttcgcgaatgcatcgactacgtggagaagtacggcatgaagtgcgaggggatctatcgcgtcagcggaattaagagcaaagtggacgagctgaaggcagcgtacgaccgggaggaaagcactaacctcgaggactacgagccaaacaccgtagcatctctgctaaaacagtatctccgggatctgcccgagaacctgctcaccaaagagctgatgccacggttcgaggaggcctgcggcaggaccacggaaacagagaaggtgcaagaattccaacgactgctcaaggagttgcctgaatgcaactatctgctcatctcgtggctaattgtgcacatggatcatgtcattgcgaaagagctggaaactaagatgaacatccagaacatctccattgttctgagcccgacagttcaaatcagtaatagggtgctgtacgtcttctttacccatgtgcaggagttgtttggaaatgtggtgctcaaacaggtcatgaagcccctgaggtggagcaacatggccacaatgccaaccctccccgaaactcaggccggaataaaagaggaaatccgtagacaggaattcttgctgaactgtctccacagagacctgcagggtggtatcaaagacctgagcaaggaggaacgcctgtgggaggtgcaaaggattttaactgcccttaagaggaaacttcgcgaagccaagcgacaggaatgtgagacaaaaattgcacaggagatcgcatcgctcagtaaagaggatgtgtctaaggaagaaatgaatgagaatgaggaggtaattaatatcctgctggcacaggagaatgagattctgactgaacaggaggagctgttagccatggagcagttcttgcggcgacagattgcatccgagaaggaagaaatcgagaggttaagggctgagatcgctgagatccagtctcgccagcagcacggacggagcgaaactgaggaatattcatcggagtcagaatctgagagtgaggacgaggaggaattgcagattattcttgaagatctgcagaggcaaaacgaagaattagaaatcaagaataaccacctcaatcaggcaattcatgaggaaagagaggccatcatcgagctccgtgtacagctaagattactgcagatgcagagagccaaagctgagcagcaggcccaggaggacgaggagccggaatggagaggaggtgccgtccagccgcctcgggacggagtcctggaacctaaagcggctaaggagcagcccaaagctgggaaggagcctgccaagccttcaccaagcagggaccgcaaggaaaccagtatctag

SEQ ID NO: 202466 - DNA, 1968 bp, synthetic construct
  misc_feature 1..1968: note = Description of Artificial Sequence: Synthetic coding sequence
  source 1..1968: mol_type = other DNA
atgaccgagtgcttcctgccccccaccagcagccccagcgagcaccggcgagtggaacatggatctgggcttactaggacacccagttccgaagagatttcgcctacgaaatttccaggactctatcgtactggcgagccctcgcctccgcatgacattttacacgagccacctgatgtcgtaagtgatgatgagaaggatcacggcaaaaaaaagggcaagtttaaaaagaaagagaagaggacagaagggtacgctgcctttcaagaagacagctcaggtgatgaggccgaaagtccctctaagatgaaaagaagtaaaggcatccacgtattcaaaaaaccgtccttctcaaagaagaaagaaaaggactttaaaataaaggaaaagcccaaggaggagaaacacaaagaagaaaaacacaaggaggaaaagcataaggagaagaagtcaaaggaccttaccgctgcagacgtggttaagcagtggaaagagaagaaaaagaagaagaaacccattcaggagcccgaggttccccagatcgatgtgcctaacctcaaacctatctttggcatccctctagccgatgctgtggaacgtacaatgatgtacgacggcattagattaccagctgtcttccgcgagtgcatcgactatgtggaaaagtatgggatgaagtgcgagggcatctatcgcgtgagcggcatcaaatccaaagtggatgagcttaaggcagcatatgacagagaggagagtactaacctcgaggattacgagccaaacacagtggcctctctgctcaagcagtatcttcgagatctgccagagaacttgctgactaaggagctgatgccccggtttgaggaagcgtgcggacggaccactgagacagaaaaggtgcaggaatttcaaaggctgctcaaggaactcccagagtgtaattacctcctgatctcttggttgattgtgcatatggatcatgtgattgcaaaggagttagagaccaaaatgaacatacagaacatcagtattgtgttgagccccacagttcaaatcagcaaccgggtgctgtacgtgttttttacacacgtacaggaactgttcggaaacgttgtgctcaaacaggtaatgaaaccgcttcgctggagtaacatggcaaccatgcctacccttcccgaaacccaggccggaatcaaagaggagatcaggagacaggagtttctgctgaattgtctccaccgggacttgcagggtggcatcaaggatctctccaaggaggagagactgtgggaggtccaacgaatactgacagccctcaagcgcaagctgagggaagccaaacgccaggagtgcgagactaagatagcgcaggaaatcgctagtcttagtaaggaggacgtttccaaggaggaaatgaacgagaatgaagaggtgattaacatactattagcacaagagaatgagatactaaccgagcaagaagaattgctagctatggagcagttcctgaggcggcagatagcttctgagaaagaggagatagaacgcctcagagcagagatcgccgagattcagtctagacagcagcatggtcgatcagaaacagaggaatactcatctgaatcagaatcggagtcggaggatgaggaggaattgcagataatcctcgaagacctccaacgccaaaacgaagagctggagatcaagaataaccacctgaaccaggccattcacgaggagcgcgaagccatcatcgagctgagagtacaactgcggttgctgcagatgcagcgcgcgaaagctgaacagcaggctcaagaagacgaggaacccgaatggcggggcggcgccgtgcagccacctcgcgatggtgtgctggaaccaaaggccgctaaagaacagcccaaggccggaaaggagccagccaagccctctccctccagagaccggaaggaaacctctatatag

SEQ ID NO: 202467 - DNA, 1044 bp, synthetic construct
  misc_feature 1..1044: note = Description of Artificial Sequence: Synthetic coding sequence
  source 1..1044: mol_type = other DNA
atgaccgagtgcttcctgccccccaccagcagccccagcgagcaccggagggttgaacatggcagcggcctcactcgtacgccatccagcgaagagatctcacctaccaagttcccaggtctttatcggacaggcgaaccctctccacctcacgacattcttcacgagccacctgacgtcgtgtcagacgatgaaaaagatcatggcaaaaagaaagggaaatttaaaaagaaggagaaacggactgagggttacgccgcatttcaggaagacagctctggagatgaggctgagagtccatcgaaaatgaaacggagtaagggcatacacgtcttcaagaagcctagcttttccaagaagaaggagaaggatttcaagatcaaggaaaagccaaaagaagaaaagcacaaagaggagaagcataaggaggaaaagcacaaggaaaaaaaatccaaggatctcactgcagccgatgtggtgaagcagtggaaagagaagaagaaaaagaagaagccaatacaggagcccgaagtaccacagatcgatgtgccaaacttgaagccaatctttggaatccccctggctgacgcagttgaacgcactatgatgtacgacggaatccgtttgccagccgtattccgggaatgtattgattacgtcgagaaatacgggatgaagtgcgaaggcatctatagagtgtcagggataaagagcaaagtcgacgaactgaaggctgcttatgatcgcgaagaaagtaccaacctggaggactacgagccaaatacggtggcttcacttctcaagcaatatctccgcgacttgcccgaaaacttgcttactaaggagctgatgccgagattcgaggaagcttgtggaaggacaaccgagaccgaaaaagtgcaatcttccggcgaggaggcagcaaggtcatgtcagttcctgaccgctggcacgagcaagggtttgttgaccggactggtgaagggctcgcacctgggcctggtgcaccctcagaggatgttattcaagcccgagattttctag

SEQ ID NO: 202468 - DNA, 1980 bp, synthetic construct
  misc_feature 1..1980: note = Description of Artificial Sequence: Synthetic coding sequence
  source 1..1980: mol_type = other DNA
atggaggccgccgccgccgccgccgccgccgccgccgccgccgccgcagcaggtggagggtgcggctccgggcctccaccactcctcctctccgaaggggagcagcagtgttattcagaactgtttgcacgatgtgctggggcagccggggggggaccggggtccggtcctccggaagcagcaagggtcgcacctggaacagcaacagctgctgctgggccagtggcagacctttttcgagcgtctcagcttcctgcagagactcttcaccagattacagagctgtgcggggctaagagagtcgggtactttggaccaacacagttttacatagcattgaagctgatcgctgcagcgcagtctggtctgccagtgagaatcgaatccatcaaatgcgaattacccctgcccaggttcatgatgtccaaaaacgatggagaaatacggtttgggaatccagctgagttacatggaaccaaggttcagataccatacctcacaacggaaaagaacagcttcaaacggatggacgacgaggacaagcaggagacacagtccccaaccatgtcccctctcgccagtcctccttcctccccccctcattatcagcgcgtgccccttagccatggatactcaaagctgagatcttcagccgagcagatgcatcccgccccatatgaagcgaggcagccactggttcaaccggaggggtccagtagcgggggaccaggcactaaaccactgaggcaccaggccagcctgatccgctccttcagtgtggaacgggagctccaggataattcttcctatcccgacgaaccgtggagaattaccgaggaacaacgcgaatactatgtgaatcagttccggagcctgcaaccagatcccagctctttcatcagcggcagtgtggccaagaacttcttcaccaagtccaagttgtccataccagagctgagctacatctgggaactttcggatgccgattgcgatggtgccctgactctccccgagttctgcgcagcctttcatctgatcgtggccaggaaaaacgggtatccattgccagaggggctcccaccaaccctgcagccagagtacctccaggctgccttccctaaacccaaatgggactgccagctatttgactcgtactccgagagcttaccagctaatcaacagccacgagatttgaaccgcatggaaaaaacgagcgttaaggatatggccgacctacccgtgccaaaccaggacgtgacctctgacgacaagcaggcactgaaaagcactataaatgaggctctgccaaaggacgtttctgaggatccagcaactccgaaagatagcaattccctgaaagcgagaccgcgcagtcggtcatacagttcaacttccatagaggaggcaatgaagagaggggaggacccacccacaccccctcctcgcccgcagaaaactcactctcgcgcttcgagcttggacctgaacaaggtgttccagccatccgtccccgcaactaagagcgggttgttacctcccccccctgctctcccacccagaccatgccctagccagagtgaacaagtctccgaggcagaactcctgccacaactctctagggcaccttctcaagcggcagagtctagtcccgcaaaaaaggatgtgctgtactcgcagccaccaagtaagccaatacgcagaaaattccggcccgagaaccaggccacagagaatcaggagccaagcacagctgctagcggcccagctagcgctgccaccatgaaaccccatcctacggtgcagaagcagtcctctaagcaaaagaaggccatacagacagcaatcagaaaaaataaggaggccaatgcagtgttggcgagacttaactctgagctccagcagcagttgaaggaagttcatcaggagcgtattgccctcgagaatcagctcgagcagctgagacccgtaaccgttctgtag

SEQ ID NO: 202469 - DNA, 1983 bp, synthetic construct
  misc_feature 1..1983: note = Description of Artificial Sequence: Synthetic coding sequence
  source 1..1983: mol_type = other DNA
atggaggccgccgccgccgccgccgccgccgccgccgccgccgccgccgctgggggggggtgtggaagcgggccccctccgctcctcctctcggaaggagagcaacaatgctactccgaactcttcgcgcgatgtgcgggcgcggccggaggcgggcctggctccgggccgcctgaggcagcgagagtggcccccggtactgccacagccgcggcaggtccggtcgcagatctgttccgggcctcccagttgccagctgagacgctccaccagatcactgagctgtgcggcgcgaaacgcgtggggtatttcggccctactcagttctatatagctctgaaattgattgccgcagctcagagcggcctccctgtgcgaatcgagagcataaagtgtgaactccctctcccacggttcatgatgtccaagaatgatggcgaaatcagattcggaaaccccgcagagctgcacggaaccaaagtccagattccgtacctaacaaccgagaaaaattcttttaagagaatggacgatgaagataaacagcaggagacccaaagcccaaccatgagcccattagccagcccaccttctagccccccacattaccagcgagtgcctcttagtcacggctactctaagctcaggtcaagcgcagagcagatgcacccggcaccttacgaagctcgacagccacttgtccagccggagggcagcagttctggaggccccggaaccaaaccgcttaggcaccaggccagccttattaggtcattttctgtggagagggagctccaagataattctagttatcccgacgagccctggcgtattacggaagagcagagggaatactacgttaaccaattccgatcactccagccagacccaagtagtttcatatctggaagtgtagccaagaactttttcaccaagagcaagctttccattccggaactctcctacatttgggaacttagcgacgcggactgtgacggtgctttaactctgcctgaattctgtgcagcctttcatctgattgtggcaagaaaaaacggctacccccttccagaaggactgcccccaacgttgcaaccagagtatctgcaggcggcttttcccaagcccaagtgggactgccagttgtttgatagttattcagagtccctgccagccaaccagcagcccagggatctaaatcggatggagaagactagcgtgaaggatatggctgacctgcccgtccccaatcaggatgtaacttctgacgacaaacaggccctgaagtcaaccatcaacgaagccctgcccaaagacgtttctgaagaccctgccacacccaaggactccaacagtctcaaagctcggccacggagccggtcgtattcatccacgtctattgaggaggccatgaaaaggggggaagatcctcctacccctccaccgagacctcaaaaaacccattcacgcgcaagtagcttggacctcaacaaagtgtttcagccgagcgtcccagcaactaagagcggattgcttccacctccgccagcacttcctccgcgcccatgcccttcacagtctgaacaggtgtccgaggcagaattgctgccccagctttccagggcccccagccaggcagccgagagcagtcctgccaagaaagatgttctgtatagccagcctccgtctaaacctattaggaggaagtttcgccctgagaatcaagcaacagagaaccaagaaccttccacagctgcatctggccccgcatctgccgctaccatgaaacctcatcccacagtgcagaaacagagtagcaagcagaaaaaggcgattcaaaccgctattcgaaaaaacaaggaggctaacgccgtgctggcaaggttaaatagtgagctgcagcagcagctcaaagaggtccatcaggagagaatcgcccttgagaaccaactggagcagctccgaccagtcacggtgttgtag

SEQ ID NO: 202470 - DNA, 1824 bp, synthetic construct
  misc_feature 1..1824: note = Description of Artificial Sequence: Synthetic coding sequence
  source 1..1824: mol_type = other DNA
atggaggccgccgccgccgccgccgccgccgccgccgccgccgccgctgctggtggcggctgcggctcagggcctccccctctgctcctgtccgagggagagcagcaatgttactctgaactttttgctaggtgcgctggcgcagccggaggagggcccggctccggaccacccgaggccgccagggtggctccaggaaccgccacagctgcagctggacccgtggctgatttatttagagcctcccaacttcctgctgaaactctccatcagattactgagctgtgcggcgcgaagcgcgtcggttactttggacctacccagttttacatcgcactgaaattgattgcagccgctcaatccgggttgccagtgcgcatcgaaagcataaagtgcgagttgccattaccccgttttatgatgagcaaaaatgatggggagattcgattcggaaaccccgccgaactgcatggaactaaagtccagatcccatacttgactaccgaaaagaattcctttaaaagaatggatgacgaggataagcaacaagaaacccagtccccgactatgagccccctcgcatccccaccttcaagtcctcctcattatcagcgtgtgccactttctcacggctactccaagttacgtagctccgctgagcaaatgcacccagcaccatacgaggcccgccagccactcgtgcagccagaaggatcttcatccgggggtcccggaaccaaaccgctgaggcaccaagcttcactgattcgttccttctcggtcgagagagaacttcaggataacagctcttaccccgatgagccctggaggatcaccgaagagcagcgagaatactacgtgaaccagtttaggtcactgcaacccgacccatctagctttataagcggatcagtagcgaagaacttctttacaaagtccaagttatccatcccagagcttagctacatctgggagctgtcagacgctgactgcgacggtgcgctgacactgcccgagttctgtgctgcattccatctgattgtggccaggaaaaatggctatccgctccccgagggactcccacccaccttgcagcctgaatacctgcaggcggcttttcccaagccgaagtgggactgtcagctctttgactcctatagcgagtcattgcctgccaatcagcaaccccgagatctcaataggatggagaagacgtccgttaaagacatggccgatcttcctgtgccaaatcaggacgtgacttcagacgacaaacaggctctgaaaagtaccatcaacgaagccttgcctaaggatgtttcagaggatcccgccactccgaaagacagtaacagcctaaaggctagaccccgttcccgttcctactccagcaccagtatagaggaagcaatgaagaggggagaagaccctcctacaccgcccccccggccacagaagacacattctagagcctcaagcctagatctgaacaaggtcttccagccctccgtcccagccaccaagtccggactgctcccacccccacccgcgctcccccccagaccttgtcctagccagagtgagcaggtaagtgaagcggaacttttaccccagctttctcgagccccatctcaggctgccgagtcttccccggccaagaaggacgtgctctattcccagccaccttcgaagcctatcagaaggaagttccgccccgtctgcggcatccaacctttaatcagtatcgaactgagggccttcagaacctctagacacctttttaatgtgtctctggtgcactggcaggccctttccatagcatag

SEQ ID NO: 202471 - DNA, 1380 bp, synthetic construct
  misc_feature 1..1380: note = Description of Artificial Sequence: Synthetic coding sequence
  source 1..1380: mol_type = other DNA
atgatgagcaagaacgacggcgagatccggttcggcaaccccgccgagctccacggcacaaaggtccagatcccttaccttaccacagaaaagaatagtttcaagcgcatggatgacgaggacaagcaggagacccagagtcccaccatgagcccactcgcctcgcccccttctagccccccacattatcagcgtgtccctctgagtcacggttactctaaactcagatccagcgctgagcagatgcacccggccccatatgaggcccgtcaacccctggtgcagcccgagggaagctcctcgggcggacccggtactaagcctctgaggcaccaagcttctcttatacggtcctttagcgtcgagcgtgaactgcaggataactcctcctaccctgacgaaccctggagaataaccgaggaacaacgggagtattacgttaatcagtttagatccctgcagcccgaccccagcagtttcatctccgggtccgtggcaaagaacttttttacgaaaagtaagctgtctatacctgagttatcgtatatctgggaattatctgacgctgattgtgatggagctttgaccctgcccgaattttgcgctgcattccacttgattgtcgcccggaagaatggataccccttaccggagggcttgccccccacattgcagcccgaatatctgcaggcagcctttccaaaacccaaatgggactgccagttattcgacagttattctgaaagcctacctgccaaccaacagccacgcgatctgaacagaatggaaaagaccagtgtaaaagatatggccgacttacccgtgcccaatcaagacgtgaccagcgacgataaacaagcactaaagtcaaccatcaacgaagccttgcccaaagacgtgtcagaagatcctgccaccaagagcggcttgcttccaccgccaccagcccttcctccgcgaccttgtccaagccagtcagaacaagtgagtgaggctgagctgctgccacagctgtcccgcgctccctcacaggccgccgagtcctcacctgctaaaaaagacgtactatacagccagcctccaagtaagccgatacggcgaaagttccggccagaaaaccaggctaccgaaaatcaggaacccagtactgccgcatcaggtcctgcaagcgccgccactatgaaacctcatcccaccgtgcagaagcagtcttcaaagcagaagaaagccattcaaaccgccattagaaaaaataaggaagccaacgctgtcctggccaggttaaattcggagcttcaacagcagctgaaagaggtgcaccaagagcgaatagcactcgaaaatcagttggagcagctgcgacctgtgaccgtcctttag

SEQ ID NO: 202472 - DNA, 1863 bp, synthetic construct
  misc_feature 1..1863: note = Description of Artificial Sequence: Synthetic coding sequence
  source 1..1863: mol_type = other DNA
atggccgccgccaccgccgaccccggcgccggcaacccccagcccggcgactcctctggtgggggggcaggcggcggactgccatcgccaggagagcaggagctgtcccgcaggttgcagcgcctgtacccagccgttaatcagcaagagactccgttacccaggagttggtccccaaaggacaaatacaactacataggattgtctcaggggaacttgcgagtccattacaagggccatggtaagaaccacaaggatgcggcttctgtccgagcgacccatcctataccagcagcctgtggcatttactactttgaggtgaagattgtttctaagggaagagacgggtacatgggaatagggctgagtgcccagggcgtgaacatgaacaggctgccagggtgggataagcatagctacggttaccacggcgacgatggccactcattttgttctagcggaacaggccagccctatgggcctacgttcacaacaggggacgtgattggatgctgtgtgaatctaatcaacggtacctgcttctacacgaagaatggccactcgctgggcattgcctttaccgaccttccagccaatctgtacccaacagttggcctccagaccccaggcgagattgttgatgccaatttcggacagcagccctttctgttcgacatagaggattacatgcgcgaatggcgtgctaaggtgcaggggacagtacactgtttcccaatcagcgcaagactgggcgaatggcaggccgtgctgcagaacatggtttccagctatctggtgcatcacggctactgcgcaactgccacagcatttgccagaatgacggagacacctattcaggaagagcaggccagtattaagaacagacagaaaatccagaagctcgtcctcgagggacgggtgggcgaagctatcgaaacaacacagaggttctatcccgggttgctcgagcacaaccctaacctgcttttcatgttgaagtgccgccagtttgttgagatggtcaacgggaccgacagcgaagtgcgttcactcagtagccggagccctaagagccaggattcttatcccggctccccctccctttccccaaggcatggaccatcgtcctctcacatgcacaacacaggcgctgactcaccaagttgcagtaacggcgtcgcatcaactaagtccaagcagaaccactccaagtacccagccccctcatcatcatcatcatcatcctcctcctctagctcgtcaagcccaagctctgtcaactactctgagtctaactcgaccgactccactaaatctcagcatcattcttctactagcaatcaagagacatcagatagcgaaatggaaatggaagccgagcactatccaaacggagtgttgggtagtatgtcgacccggatagtgaatggcgcctacaaacacgaagatctccagaccgatgagtctagcatggatgaccggcacccacgccgccagctatgcgggggtaaccaggctgctacggagaggatcatcctgttcggaagagaattacaggctttgagcgagcaactaggcagggaatatggaaaaaatctggctcacaccgaaatgctccaggacgcctttagtctgttagcatattctgacccttggtcttgccccgtgggccagcaactggacccaattcaacgggagcctgtttgcgcggctctgaacagcgcaatcttggagtcacagaacttacctaagcagccacccctgatgctggcactcggccaggcctcagagtgccttcgccttatggctagagcaggactgggcagctgctcttttgcaagagtggacgactaccttcattag

SEQ ID NO: 202473 - DNA, 1602 bp, synthetic construct
  misc_feature 1..1602: note = Description of Artificial Sequence: Synthetic coding sequence
  source 1..1602: mol_type = other DNA
atgggcatcggcctgagcgcccagggcgtgaacatgaaccggctgcctggctgggacaaacactcgtacggttatcatggcgatgacggacatagtttctgttcctctggaactggacagccttacggccctacctttaccaccggagacgttatcggatgctgtgtgaacctgataaacggaacttgtttttatactaaaaatgggcacagcctcggaatcgcattcaccgacctgcccgcaaatctctatcccacagtcggactacaaacgcctggagagatagttgacgcaaattttggacagcagccatttttgtttgatatcgaggactacatgagggaatggagagcaaaagttcaagggacagtgcactgctttccaattagtgcccgtctgggcgagtggcaggcagtcctgcagaacatggtctctagttacctggtccatcatggatattgcgcaaccgccacggctttcgccaggatgacggagacccccatccaggaggaacaggcctctataaagaacaggcagaagatccagaaactggtccttgaaggtagggtgggggaggcaattgaaaccacacagcgattctaccccggattgctggagcacaatccgaacctactgttcatgcttaaatgtcgccagttcgtggagatggtaaacggcactgactccgaagtgcgcagcctgagttctagaagccctaaaagtcaggattcataccctggcagcccaagcttgtcccctaggcacgggccttcttcctcacatatgcacaacactggggcagacagtccctcctgctcaaatggagtggcttccactaagagcaaacagaaccattccaagtatccagccccctcttccagctcttccagctcctcctcttcctcaagctcttcgccatctagcgttaattatagcgagagcaacagtaccgattccactaaaagtcaacatcacagcagtacttctaaccaggaaacctccaacccctggttgcagctggagcggagacctaatcaggccgcacccacgacacctcctggaccaacacctacctcaacaccaccacattctgactccgagatggagatggaagccgagcattatcccaatggagttttgggatctatgagcacaagaatcgtgaacggtgcttataaacacgaagacctccagacagacgagtcatcgatggatgaccggcatcctcgacgacagttgtgcggcggtaaccaagctgcaaccgaacgtatcatattattcggacgtgagctgcaggcactctcagaacagctagggagggaatatggcaaaaatctggcccatacagagatgctccaggatgcattttcgctactagcctactcagacccatggtcatgccccgtcggacagcagctggatccaattcagcgtgagcccgtgtgtgcagctctcaatagcgctatattagaaagccagaatctacccaagcagccacccctgatgcttgcccttggccaagcttcagagtgtctacggttgatggccagagccgggctgggcagctgttcctttgcccgcgtggatgactacctgcattag

SEQ ID NO: 202474 - DNA, 540 bp, synthetic construct
  misc_feature 1..540: note = Description of Artificial Sequence: Synthetic coding sequence
  source 1..540: mol_type = other DNA
atgggctgggacaagcacagctacggctaccacggcgacgacggccactccttttgttcctccgggaccggacagccctacggcccgaccttcacgaccggcgatgtgattggctgttgtgtcaacctcatcaacggaacctgtttttatacaaagaatgggcattcgctcggcatagccttcactgatctccccgccaacctctacccaactgttgggctccagaccccaggggaaatcgtggacgccaactttggccagcaaccatttctgttcgatatagaggattatatgagggagtggcgcgctaaggtccagggcacagtccactgtttcccgatatctgcacgtctgggcgaatggcaagcagttcttcagaacatggtaagctcctacctggttcaccatgggtattgcgccaccgctacagctttcgctcggatgaccgaaacccccattcaggaagagcaggcgagtatcaaaaatcgtcagagcaaggtgtactcgacctttccatttccttttttgacttgtccttag

SEQ ID NO: 202475 - DNA, 1785 bp, synthetic construct
  misc_feature 1..1785: note = Description of Artificial Sequence: Synthetic coding sequence
  source 1..1785: mol_type = other DNA
atggccgccgccaccgccgaccccggcgccggcaacccccagcccggagattcttcgggggggggtgccggaggagggttgccctcacctggggagcaggaattaagtagacggttacagcggctatacccagccgttaatcagcaagaaacacccctccctcgcagttggagtccgaaagacaagtataactacatcggactttcacaaggcaacctgcgtgtccattataaaggccatggaaagaaccataaggatgccgcgtccgtgcgagccacccaccccattccagcagcctgcgggatttattactttgaggtgaaaattgtgagcaagggaagagacggctacatggggatcggcttgtcggcacagggcgtgaacatgaatagactcccggggattgcttttacggatctcccagcgaacctgtatccgactgtcggactgcagacaccgggcgaaatcgtggacgcaaacttcggacagcagcccttcctattcgatatagaagactatatgagagagtggcgcgccaaggtacagggcaccgtgcactgttttcctatatcagcacgcctgggagagtggcaggccgtactgcagaacatggtctcttcatacttggtgcaccacggttactgtgccacagccacagccttcgcccgcatgaccgagacacccatacaggaggagcaggcctctatcaaaaataggcagaaaatccagaagttagttttggaaggaagggtaggcgaggccatcgagaccacccagcgcttttaccctgggttgttggaacacaacccaaacctgctgtttatgctgaagtgtcgtcaatttgtggaaatggtcaatggaacggatagcgaggtccgcagtttgtcatcaagatcccctaagtcccaggactcgtatcctgggtcacccagccttagtccccgacatggcccgtccagctctcacatgcataataccggggccgacagccccagctgcagcaacggcgtggcttccaccaagtcaaagcaaaatcacagcaaatatcccgcgccaagctcttcatcatcctcttcgtcctccagttcatcttcctcaccatcgtccgttaactattcagagtcaaattctaccgacagcacaaagtctcaacatcactctagcaccagcaatcaggagaccagcaacccttggttgcaactcgagcgacggcccaatcaggctgctccaacgacacctcccgggcccacacccacttcaacccccccacacagtgactctgaaatggaaatggaagctgagcactaccccaatggcgtgcttggctctatgagcacccgtatcgttaatggagcttacaagcatgaagacctccagaccgatgagtcctctatggacgaccggcacccaaggagacagttgtgcggaggtaatcaggctgcaaccgagcgaataattttattcggccgggaattacaggcactttcagagcaactgggacgggaatatggtaagaatttggcacacactgagatgttgcaagatgccttcagtctgttggcctattctgacccttggtcctgccccgtgggacagcaactggaccccatacagagagagcccgtgtgcgcggcgttgaactcagctatcctggagtcccagaatctgccaaaacagccaccgttgatgctggcattaggacaggcaagcgagtgcttgcgtttaatggctagggcgggtttgggcagctgttcatttgcaagagtcgacgactacctgcactag

SEQ ID NO: 202476 - DNA, 1176 bp, synthetic construct
  misc_feature 1..1176: note = Description of Artificial Sequence: Synthetic coding sequence
  source 1..1176: mol_type = other DNA
atgcgggagtggcgggccaaggtgcagggcaccgtgcactgcttccctattagcgccaggctgggtgaatggcaggctgttctgcagaacatggtctcgtcttatttggtgcaccatggatactgtgccacagcgacggccttcgccagaatgaccgagacacccatccaggaggagcaggcttccattaagaaccgccagaagatccagaaactggtcctagaaggtagggtgggcgaggctattgagactacacagcgcttctatcccggcctgttggaacataacccaaacctcttgttcatgttaaaatgccgacagtttgtcgagatggtcaatggcactgatagtgaagtgaggagtttatcatcacgctcgccgaagtctcaggacagttatcctggatctccctccttgtcacctaggcacggtccctcatctagccacatgcataacaccggagccgattctccgtcgtgctctaatggcgtggcttccactaaatcgaagcagaatcacagtaagtatcccgctccctcatctagcagttcctccagcagctcctcatcctcatcaagtcccagctcagtgaattattctgagtccaatagcaccgatagcactaagagccagcaccactcatctactagtaaccaggaaacctcagattccgagatggagatggaggccgaacactatccgaacggcgtcctggggagcatgtccaccaggatcgtaaatggcgcatacaaacacgaagacttgcagacagacgagtcttctatggacgatcggcacccaagacggcagttatgcggaggcaatcaagcggctacggagcgaatcatcttattcgggagggagttacaggccttgagcgaacaactcggccgtgagtatggcaagaatcttgctcacactgaaatgctccaagacgcattttccctgctcgcctacagcgatccatggtcctgtccagtgggacagcagctggaccctatccaacgcgaacccgtatgcgcagccctaaactcagccatcctggagtctcagaacctccccaaacagccacccttgatgctcgcactggggcaggcatcagaatgtctgagactgatggctcgagctggattggggtcctgctcatttgctcgtgtggatgattacctgcactag

SEQ ID NO: 202477 - DNA, 3267 bp, synthetic construct
  misc_feature 1..3267: note = Description of Artificial Sequence: Synthetic coding sequence
  source 1..3267: mol_type = other DNA
atggccctgcacttccagagcctggccgagctggaggtgctgtgcacccatttatacattggcaccgaccttactcagagaattgaggccgaaaaggctttgctggagcttatcgattcaccagaatgtctatctaagtgtcagcttctactggaacagggcaccacgtcttatgcacagttgctggccgccacttgtctgagcaagctcgttagcagagtgagtccacttcccgtggaacagcgcatggatatccgcaactacattctcaactatgttgctagccagccaaagctggctccttttgtgattcaagcactgattcaggttattgctaagattaccaagctgggttggttcgaggttcagaaagaccagttcgttttccgggagattattgccgacgtcaagaagttccttcaggggaccgtcgagcactgcatcatcggcgtgatcatcctctctgagcttacacaggagatgaacctggtggactactctaggcctagcgcgaaacatcgcaagattgccaccagtttcagggatactagcctgaaggatgtgttggtcctggcatgttctctcctgaaggaagtgttcgccaagcctctgaacctccaggaccagtgccagcaaaacctggtgatgcaggtcctgaaattagtgctgaattgcctgaacttcgatttcatcgggtcttctgctgacgagtccgccgatgatctctgtaccgtgcagatccccactacgtggcgcaccatattcctggaacccgagacccttgacttgttcttcaatctataccactcgttgccgcccctcctttcccagttagctctgagctgtctggtgcaattcgcttccacacggcggtcactcttcaactctccggaaagagcgaaatatctaggcaacctgattaaaggagtaaagcgcatcttagagaatcctcagggcctcagcgacccaggaaactaccacgagttttgtcggtttttggctcggcttaagaccaactaccagctgggcgagctcgtaatggtgaaagagtatccggaggtgatcaggctaattgctaacttcactatcacctccctgcagcactgggaattcgccccaaattccgtccactatttgctgactctatggcagagaatggtggcctcagtccccttcgttaaatcaaccgagcctcacctgctggatacctacgcaccggagatcaccaaggctttcataacttccagactggatagtgttgctatcgtggtgagagaccacctggacgaccccctggacgacactgcgacagtatttcagcaactggaacaactgtgcacagtcagccggtgtgagtacgaaaagacttgcgcactgctggttcaactttttgatcaaaatgcgcagaattaccagaagctgcttcacccttattctggcgtgaccgtggacatcaccattcaggaagggaggctggcatggctggtgtaccttgtcggcactgtggttgggggaagactgacctacacctctactgacgaacacgacgcgatggacggcgaattgtcttgccgggtgtttcagctaatcagtttaatggatacaggtctcccaaggtgttgtaacgagaagatagaacttgccatcctctggtttctggatcagttcagaaaaacctacgtgggggatcaattgcaacggacctcaaaggtgtacgctcggatgtccgaagtgctcgggatcacagacgataaccacgtactggaaaccttcatgacaaagatcgtgaccaacttaaaatactgggggcggtacgaacccgtgatcagccgcacccttcaatttctcaacgacctcagtgtcggatacatccttctgaagaagctggtgaagatagacgcagtgaagttcatgctgaaaaatcacacgtctgagcatttcccatttctcgggattagcgacaatcatagcctgagtgattttcgctgccggactactttttacactgctttgactcgccttttgatggtcgacctgggggaggacgaggacgaattcgaaaactttatgctgccccttacagtcgcttttgagaccgtcctccaaatctttaataacaactttaagcaggaggatgtgaaacgcatgcttattggccttgccagggatttaagagggatcgcatttgccctgaacaccaagacatcttacaccatgctgttcgattggatgtatccaacttacttgcctctgcttcagaacgccgtggagcgatggtatggcgaacctacttgcaccacacccattctgaagctgatggcagaattgatgcagaaccgttcacagcgcctcaactttgacgtgtcaagccctaacggcatcctcctgttccgcgaggctagcaagatggtgtgcacatacggcaatcagatcctctctttgggctctctgtccaaggaccagatttatccgatgaaactgaaaggtatctccatttgctattctgcactgaaatcagcattgtgtgggaactacgtgagcttcggagtattcaaattatatggcgacaatcattttgacaatgtgctgcaggcatttgttaaaatgctgctgagcgtgtctcattcagatctgctccaataccggaaactgagccagagctactatcctctgctggaatgtctcactcaagaccacatgagctttataattaacctggagccgccggtcctgatgtatgtgctgaccagtatctccgagggccttactacactggacacagtggtgtcatcgagctgttgcacatccctcgactatatagtaacatacttgtttaagcatattgcaaaagaagggaagaaacctctgcggtgccgcgaggctactcaggcgggtcagcggctactgcacttcatgcaacagaatccggacgtattacagcagatgatgtctgtcttgatgaataccatcgtatttgaagattgtcgcaaccagtggagcgtctcacggccgctgttaggtctgatcttattgaatgaaaagtacttcagcgagctaagggcctctttgatcaattcccagccattgcccaagcaggaagtgctcgctcagtgcttccgaaaccttatggagggagttgagcagaacctttctgtcaagaatagagaccggttcacccagaatctgtcggtttttcgccgcgatgtagcagaagctcttagaagcgatggcaacacagaaccctgttctctcgacatgatgtcatag

SEQ ID NO: 202478 - DNA, 1557 bp, synthetic construct
  misc_feature 1..1557: note = Description of Artificial Sequence: Synthetic coding sequence
  source 1..1557: mol_type = other DNA
gtgtacgcccggatgagcgaggtgctgggcatcaccgacgacaaccacgtgcttgagacttttatgaccaagattgtgaccaacttaaagtattggggaagatatgagccagtgattagcaggactctgcagtttctcaacgatctgtccgtaggctatattttgcttaaaaagctagtgaagatagacgcggtgaagttcatgctgaaaaaccacactagcgagcactttccatttctggggatatctgataaccactccctgtcagattttcgatgcagaacgaccttttacaccgctctgactaggttgttgatggtggacttgggagaggacgaagacgaattcgagaacttcatgttaccgttaacggtcgctttcgagacagtgttgcagattttcaacaataatttcaaacaggaagacgtgaaacggatgttaatcgggctggcccgtgacctgagaggcattgcattcgctctcaatactaaaactagctacaccatgctctttgattggatgtatcctacatacctgccgctactgcagaatgcggttgagcgctggtatggagaacccacatgcactactcccattctgaagctcatggccgaactgatgcagaacagatcccagagactgaacttcgatgttagctccccaaatggcatactgctgtttagggaagcctctaaaatggtatgcacttacggcaatcaaatcctgagcctcggttctctaagcaaggatcaaatttatccaatgaaattgaaagggatttccatctgctacagtgccctgaagtccgccctctgcggaaattacgtttcttttggcgtcttcaaattgtacggcgacaatcatttcgataatgtactccaggcatttgttaagatgctactgagcgtgtcacatagtgacttgctgcagtatcgtaagctgtcccagagctactatccgctcctagagtgtttgacccaggaccatatgagttttatcattaatcttgaacctcccgtgcttatgtacgtgttgacgtccatttccgaagggttaacaaccttagataccgttgtgagtagttcttgctgcacgtctttagattatattgtcacttacctcttcaaacacatcgccaaagaaggcaaaaaaccgcttcggtgccgcgaggcgacccaggccgggcagaggctgttgcacttcatgcaacagaacccagacgtgctgcagcagatgatgagcgtgctgatgaatacaattgtcttcgaggattgccggaaccaatggtctgtgtcacgccccctactggggctcatcctcctcaatgagaagtatttcagtgagcttagagctagtctcatcaactctcagcccctgccaaagcaggaggtgcttgcacaatgtttccggaatctgatggagggagtagagcagaacttatccgtgaagaatagggataggttcacccaaaatttgtccgtgtttagacgagacgtagccgaggcccttcggagcgacggcaacacagagccatgtagtttggatatgatgagctag

SEQ ID NO: 202479 - DNA, 1419 bp, synthetic construct
  misc_feature 1..1419: note = Description of Artificial Sequence: Synthetic coding sequence
  source 1..1419: mol_type = other DNA
atggacatccggaactacatcctgaactacgtggccagccagcccaaattggcccctttcgtgattcaagctctgatccaggttatcgcgaaaattacaaagctgggatggtttgaggttcagaaggatcagtttgtgttccgagagattatagctgatgtgaagaaatttcttcaggtcgactacagtagaccaagcgcaaagcataggaaaatcgctacatcattccgggacacctctctcaaggacgtcctcgtacttgcatgcagcctgctgaaggaagtgtttgctaagccactcaacctgcaggaccagtgccagcagaatttagttatgcaagtgctgaagctagtgctgaactgcttgaacttcgattttatcggatcctccgcagacgagtcagccgacgatttatgcacagtgcaaattcccactacatggagaaccatattccttgagcccgagacactcgatctattttttaatctgtatcattctctccctcccctgctgtctcagctcgcactcagttgcctggtgcagttcgcgagcacccgtaggagcctctttaacagtccagaaagagcaaagtatttgggcaacctcattaagggagttaagagaatcctggagaaccctcagggattgagtgatcctgggaattaccacgagttctgcagattcttggcacgcctgaaaaccaattaccagctcggcgaacttgtcatggttaaggaataccctgaagtgatcagattaatcgctaactttaccatcacttctctacagcactgggagtttgcccctaacagcgtgcactacttattgacgctatggcaaaggatggtggcctctgtgccgttcgtgaagagtacggaaccccatttgcttgacacttatgcacccgagattactaaagcttttataacaagcagactagactcggttgcgatcgtcgttcgcgaccacctcgacgacccactggatgacaccgccaccgtcttccagcagttagagcagctctgtacagtaagccgatgtgagtatgaaaaaacatgtgccctccttgttcagcttttcgatcaaaatgcccagaactaccagaaactccttcacccatacagcggagtgactgtggatataacaatccaggagggcaggcttgcttggctggtatatctagtaggcacagtcgttggaggcagactcacctacacaagcactgatgagcatgatgctatggatggagagttatcatgccgggtgttccagctcatctccctgatggatacaggactgcctagatgttgcaacgagaagattgaactggccattctgtggttcctcgaccagttcagaaaaacctacgtgggcgaccaacttcagagaacgtccaaaaagacttttatctatctgtag

SEQ ID NO: 202480 - DNA, 9675 bp, synthetic construct
  misc_feature 1..9675: note = Description of Artificial Sequence: Synthetic coding sequence
  source 1..9675: mol_type = other DNA
atgcggcggagcaaggccgacgtggagcggtacatcgccagcgtgcagggcagtactccttcacctcgccaaaagtccatgaaggggttctattttgcaaagctatattacgaagccaaagaatatgacctggccaagaagtacatctgtacttatataaatgtacaagaaagggatccaaaagcacaccggtttcttggccttctctatgagctcgaggagaacactgacaaagccgttgagtgctataggcgtagtgtggagctgaatcctacgcagaaagatttggttctaaagatcgccgaactcctgtgtaagaatgatgtgactgatggaagggcgaagtattggctggagcgagctgctaagttatttcccggctcacctgctatctacaaactgaaagaacagctgttagactgtgagggcgaggatggatggaataagctgtttgatctcatacagtccgaactgtacgtaagacccgacgacgtccacgtgaacattaggcttgtcgaagtgtatcgatctaccaaacgcctgaaggacgccgtggctcactgtcatgaggccgaacggaatatcgccttaaggtcctccctggagtggaattcttgcgtagtgcagacgcttaaagagtacctcgagtccctgcaatgtctggagagtgataaatcggactggagggcaactaacaccgatttgctcctggcctacgctaatcttatgctgctgacactgtccacgagagatgtgcaggagagcagggaattattacagtcttttgattcagcattgcagtcagtcaagagcctggggggtaacgatgagcttagtgccacatttctggagatgaaaggtcatttctacatgcacgctggatcattgctgctcaagatgggccagcactcgtccaatgttcagtggagagctcttagcgagctcgcggccttatgttatctcattgcctttcaggtacctagacccaaaataaaactgattaagggtgaagcaggacagaatctgctggagatgatggcatgcgaccggttgagtcagtcaggccacatgctgctgaatctgtcaaggggtaaacaggactttctgaaggagatagtagagacctttgctaataagtccggccagtcggcattgtatgacgctcttttctcatcacagtccccgaaagacacatcgttcctcggctctgatgatattggtaacattgacgtaagggaaccagagttggaagaccttactcggtacgatgttggagcaatcagggcccacaacggttcattgcagcatctgacctggctcgggctgcaatggaatagcttgcccgccttgcccggtatcagaaaatggctcaagcagttgttccaccatctgccccatgagacaagccgcctcgaaacaaacgcacccgaatccatatgcatattagatttggaagtgtttctgctcggcgtcgtgtacacatctcacttgcagcttaaggagaagtgtaactcccatcactcatcctaccagccactctgcctgcccctgcctgtttgcaaacagctgtgtacggagaggcaaaaatcatggtgggatgctgtgtgcaccctgattcatagaaaggctgttcctggaaatgtggctaaactgcgtctgttggtgcagcacgaaattaacactctgagagcacaggagaagcatggattgcagcctgctctgttggtccactgggccgagtgtctccagaagacaggttctggacttaacagtttctacgaccaacgcgaatatataggccgatccgttcactattggaaaaaagtgcttcctctgctcaaaatcataaagaagaagaactcaatccccgaacctattgatcctctcttcaagcactttcactccgttgatatacaggcatccgaaatagtcgagtatgaggaagatgcccatatcacattcgcgatcctcgacgctgtgaatggcaacatagaagatgcagtgaccgccttcgagagtataaagtctgttgtctcctactggaatttagctctgatcttccaccgcaaggcggaggatattgagaacgacgccttgtcgcctgaggagcaggaagaatgcaaaaattacctgagaaagacacgcgattatttgatcaaaatcatcgatgacagcgactcgaatttgtcagtggtgaagaaactgccagtgcccctcgagagtgtgaaggagatgctgaacagcgtgatgcaggagctggaagactattctgaaggtggaccgctgtataagaatggatctctgagaaacgctgatagcgagattaaacatagcaccccttcccctactagatactcactgtctccttcaaagagttacaagtatagcccgaagactcctccgagatgggccgaggatcagaatagtctgcttaaaatgatttgtcagcaggtagaggcaatcaaaaaagagatgcaggaactgaagctcaactcttctaatagcgcctccccacatcggtggcctaccgagaactatgggcctgacagcgtgccagatggataccagggctcccaaacctttcatggcgctcctctcacagttgcaacaaccgggccttccgtgtattattcccagtcccccgcgtacaactcacaatatctactgcggcctgcagcaaatgtgacgccaacaaaggggccagtctatgggatgaatcgccttccccctcagcagcatatttacgcatatccacagcaaatgcatacgccccctgttcaatccagcagcgcctgcatgttctcccaggaaatgtacgggcctcccgctctgcgctttgagagccctgccacaggaattctgtccccccgaggagatgattacttcaactacaacgtacaacaaacttccaccaatccaccgctgccagagcctggctactttaccaaaccaccaattgcggcacacgcctccagatccgccgaaagtaaaacaattgagtttggcaaaacaaacttcgtgcagcctatgccaggtgaaggacttcgtccatcgctgcctacccaagctcatactacacagcctactccgttcaaatttaacagtaattttaagagcaacgatggcgactttacgttcagctcaccccaagtggtaacacagcctccaccggccgcatacagcaactccgagagcttgctgggtctgttgacttccgataaacctttgcaaggtgatgggtacagcggggcgaaaccaatccccggcggtcagaccattggacctaggaatacctttaacttcggatccaagaatgtgagcggtatttccttcacggaaaacatggggtctagccagcagaagaatagtgggtttcggagatcagacgatatgtttacatttcatggacccggcaagtctgtcttcggaacgcccacgttagagacagctaataagaaccacgagaccgacggcggttctgcccatggagacgacgacgatgatggcccccacttcgagcctgtagtgccacttcctgacaaaatcgaggtcaaaacaggcgaagaggatgaggaggagtttttttgtaaccgggcaaaactcttcaggttcgatgtggaaagtaaagagtggaaggagcgtgggatcggcaatgtgaaaatcctgcggcataaaaccagcggtaaaataaggctgctgatgaggcgcgagcaggtgctgaagatttgtgccaaccactatatctcccctgacatgaagcttacacccaacgctggcagtgatcgcagctttgtgtggcacgccctggattatgcagatgaactgccaaaaccagagcagctggccatcaggtttaagactcccgaggaagcagccctttttaagtgtaagttcgaggaggcacaatccatattaaaagcaccaggcacgaacgtggccatggccagcaatcaagccgttcggattgtcaaagagcccacgagccacgacaacaaggacatatgtaaatctgacgccggtaatctcaatttcgagttccaggttgcaaagaaggaaggaagttggtggcactgtaatagctgtagtctgaaaaacgcctccacagccaagaaatgcgtctcctgtcagaaccttaaccccagtaacaaagaactggtgggcccaccactggcggaaaccgtgtttactcctaagacatctcccgaaaatgtccaggacaggtttgccctggtcacacccaagaaggaaggtcactgggattgttcaatttgtcttgtaagaaacgagccaaccgtgagtcgatgtattgcctgccagaacaccaaatcagccaataagtccggttcaagtttcgtgcaccaggcctcctttaagtttggacaaggggacctcccaaagcctattaactccgactttcgttcagtgttcagcaccaaagagggtcagtgggactgcagcgcctgcctggttcagaacgagggatcaagtaccaaatgcgcggcctgtcaaaacccacggaaacagtcgctgccagcaacaagcattcccacccccgctagtttcaaattcggcacctccgaaacgagtaaaactctgaagtctgggttcgaggacatgtttgctaagaaggaggggcagtgggactgtagctcctgcctcgttaggaacgaagctaatgccactcggtgcgtcgcttgccagaatccagataagccgtccccgagcacctccgtgcctgcaccagcgagtttcaaattcgggacctccgaaacttccaaggctcctaaatcgggattcgaaggtatgtttacaaagaaagaaggccaatgggattgctccgtttgtttggtgagaaatgaggcctctgctaccaaatgcattgcctgccaaaacccggggaagcaaaaccaaactaccagcgccgtaagtacgcccgcctcaagcgaaactagcaaagcacccaagtctggttttgagggaatgttcacgaagaaggaagggcaatgggactgctccgtttgcttggtccgaaacgaggcctcagcaacaaagtgcatagcctgccagaacccaggaaagcagaatcagaccaccagcgccgtgtccactccggcttcatcagagacctctaaagctcccaaatcaggttttgagggcatgtttactaaaaaggagggccagtgggactgttccgtctgtctcgtgcgcaatgaagcatccgctacaaagtgtattgcttgtcagtgtccgtctaaacaaaaccaaacaactgcaatctctactccagcctcctcagagatctctaaggctccaaagtccgggtttgaggggatgttcatacgtaaaggccagtgggactgctctgtctgctgcgtacaaaatgaaagctctagcctgaaatgcgtcgcctgcgacgcttctaaacccacacataaaccgatcgcagaggccccctccgcctttaccctaggtagtgagatgaagctccatgactcatcaggatcccaggtagggacgggcttcaagagtaatttttctgagaaggctagcaagttcggcaataccgagcaaggctttaaatttggccacgttgatcaagaaaatagcccaagttttatgtttcaaggatcctctaataccgagttcaaaagtacaaaagaaggatttagcatccctgtgagcgcagatggcttcaagtttggtatcagcgagcccgggaaccaggaaaagaagtccgagaagcccttggaaaacgggactggatttcaggcccaggacataagtggtcagaaaaacggtcgcggcgtaatcttcggccagacatctagtacctttactttcgccgacctcgcgaagtctacaagcggcgagggcttccaatttgggaaaaaagatcctaacttcaagggtttctcaggagccggagagaagcttttcagttcgcaatatggtaaaatggccaacaaagcaaatacctctggagacttcgaaaaggatgatgacgcctataagaccgaagactccgacgacatccattttgaaccggtcgtgcaaatgcccgaaaaagtcgaactggtcaccggagaagaagatgagaaagtgctgtattcgcagcgcgttaaactgtttcgattcgacgccgaggtgtcccagtggaaagagcgcggcctgggaaatcttaaaatattaaagaacgaggtgaatggcaagcttagaatgctgatgcggagagagcaggtgctcaaagtctgcgcaaaccactggattaccaccacgatgaacctgaaaccgctgagcggctctgatcgggcttggatgtggttggcctctgatttctctgatggagatgccaagcttgagcaacttgcagcgaaatttaaaacaccagaacttgcagaggagtttaagcaaaagttcgaagagtgtcagcgacttctgctggacatccctctgcaaactccccataagctcgtcgacactggtcgggcagccaagctcatccagagggccgaagaaatgaagtccggtctcaaggatttcaagaccttcctgacgaacgaccagacgaaggttactgaggaagaaaataaagggtctggcaccggcgcagccggcgctagcgacactaccattaagccaaatccagagaacacaggcccaaccctcgagtgggacaactacgacctgcgggaggacgccctggacgattcggtcagttcaagcagtgttcacgcttcaccgctggcctcttccccagttcgtaagaatcttttccgcttcggtgagtcgactactggtttcaacttttcctttaagtcagccctctcgccctctaagagtcctgcgaagctgaaccagagcggcacaagtgtgggcacagacgaggagtcagacgtgacccaggaagaggaaagagacgggcagtactttgagcctgttgttccgttaccggatctggtcgaagtaagttctggagaggagaacgaacaggttgtcttctcacaccgggcaaagctttataggtacgataaagatgtggggcaatggaaagaaaggggtattggagacatcaaaatcttacagaattacgataacaaacaggtgaggatagtcatgaggcgggatcaggtccttaaactctgtgcaaaccaccggattactcctgacatgactctgcaaaatatgaagggcaccgagagagtgtggctctggacagcttgtgatttcgctgacggagagaggaaagtggagcacctggcggttaggtttaaactgcaggacgtcgccgacagctttaaaaaaatttttgatgaggcaaagactgctcaggaaaaagatagtttaattacaccccatgtgagccgctctagcacaccccgggagagtccatgtggcaaaatcgccgtggccgttcttgaggagacaacaagagagcgtacagacgtgatccagggcgacgacgtagcagacgccaccagcgaggttgaagtgtctagtacttcagaaaccacgcctaaggccgtggtctccccgccaaaatttgtgtttggttctgagtccgtgaagtctatcttctcaagtgaaaagtccaagcccttcgccttcggcaactcttcagctactggctcactcttcggatttagttttaacgctcctttaaagagtaacaatagcgaaacctccagcgtcgctcagtcaggctccgaatcgaaagtcgagcccaaaaagtgcgaacttagtaaaaatagcgacatcgagcagagcagtgattctaaggtgaaaaacctcttcgctagtttcccgacggaggaaagctctatcaactacacctttaagacccctgagaaggcaaaagagaaaaagaaacccgaggactctccaagcgatgatgacgtgctcatcgtgtacgagttaacccccacggcagagcagaaagccctagccacaaaattgaagctgcctccgacctttttctgctataaaaaccgccctgactatgtttctgaggaggaggaggacgacgaagatttcgagacagctgtcaaaaaacttaatggcaaattgtatcttgacggtagtgaaaaatgtcgcccgttagaagagaatacagctgacaacgagaaagaatgcattattgtttgggagaaaaagcccacggtggaggaaaaggcaaaagccgatacactgaagctgccacccacgttcttctgcggggtgtgcagtgacacagacgaggataacgggaacggggaggatttccagagcgagcttcaaaaggtgcaagaagcccaaaaaagccagaccgaagaaatcacctccacgaccgatagtgtgtacactggcgggactgaagtgatggtgccatccttctgcaagtcagaagaaccagattctatcaccaagtcaataagtagtcctagtgtgtcttccgagaccatggacaagcctgtagatctgagtaccagaaaggagatagacaccgatagcacctcacagggcgaatccaagattgtcagctttggttttggatccagcactggcctgagttttgcggacctggctagctccaactctggtgactttgcatttggctctaaagacaagaactttcagtgggccaatacaggcgctgccgtatttgggacccagtctgtagggacccaaagtgcagggaaagtgggagaggatgaggacggatccgatgaggaagtggtccacaacgaagatatacacttcgaaccgatcgtgtcccttccagaagtagaggtcaaaagcggcgaggaagacgaggagatcctctttaaggaaagagccaaattgtacagatgggaccgtgatgtctcgcaatggaaggaacgcggggtgggagatatcaaaatcttatggcataccatgaagaactattaccggatcctgatgcgccgcgatcaggtgttcaaggtgtgcgccaatcacgtgattaccaaaaccatggaactcaaaccactgaacgtctccaataatgccctggtgtggacagcctcagactacgccgacggcgaggccaaagtggagcagcttgcggtccgatttaaaaccaaggaagtggctgattgctttaagaagaccttcgaagagtgtcaacagaatttgatgaagctgcagaaaggtcacgtcagcctcgctgctgaactgtccaaagagacaaatcctgtggtctttttcgacgtgtgtgcagacggggaacccttggggcgcattacaatggaactgttttctaatatcgttccccggacagcagagaattttcgggccctgtgcacaggggaaaagggtttcgggttcaagaatagcatatttcatagagtcatcccagacttcgtgtgtcaggggggcgatatcacgaaacatgacggtacaggcggccagtcgatttacggtgataagttcgaggatgaaaactttgacgtcaagcataccggcccaggcctactgtcaatggccaatcaagggcagaacactaacaactcccagttcgtaatcaccctgaaaaaggcagagcaccttgactttaaacatgtagtttttggctttgtgaaagatggaatggatacagtgaagaagatagaaagttttggttcacccaaaggctccgtttgccgtcggattacgatcacggaatgtggacaaatttag

SEQ ID NO: 202481 - DNA, 1500 bp, synthetic construct
  misc_feature 1..1500: note = Description of Artificial Sequence: Synthetic coding sequence
  source 1..1500: mol_type = other DNA
atggccgacctggccaacgaggagaagcccgccatcgccccccccgtcttcgtgttccagaaagataagggacagaaaaggagcgcgggcggttcatccccggaaggtggggaagactctgatcgcgaagacgggaactactgtccccccgttaagcgagagagaaccagcagccttacgcagtttccaccctcacagtctgaggagaggtcttccggattccggctgaagccacctaccctcattcacggacaagccccctccgctggattaccatctcagaaaccaaaagagcagcagaggtccgtcctaaggcccgccgttctgcaggctcctcagcctaaagcactttcacagactgtgccgagctccggcacaaatggagtgtcactgccagcggactgcaccggcgcggtccctgctgccagccctgatactgccgcttggcgctctccttctgaagccgccgacgaggtgtgtgctctggaggagaaggaacctcagaagaacgagagctccaacgcttctgaggaggaagcttgcgaaaagaaggaccccgccactcaacaggccttcgtgtttgggcaaaaccttagagaccgagtcaaactgataaatgagtcagtggatgaagcagacatggaaaacgctggccatccatctgctgacactcccacggccaccaattatttcctccagtacatcagttcaagcctcgaaaattctacaaactccgcagacgcctcctccaacaagttcgtgtttggacaaaatatgagcgaaagggtcctgagtccaccgaagctgaatgaagtgtcttctgacgcaaaccgtgagaatgccgctgccgagagcgggagtgaaagtagcagccaggaagccacacccgagaaagaatcattggccgagagtgcggctgcctatactaaggccacggctcgtaagtgcctgctggaaaaggtggaagtgatcacaggggaggaagccgaatccaacgtgctccagatgcagtgcaagctgtttgtgttcgacaaaactagccagtcttgggtggaacggggcagaggcttgttgcggctcaacgatatggcctcaactgacgatgggacattacaatcccgcctggtgatgaggacacagggaagcctcaggctgattctcaacaccaaactctgggcacagatgcagattgacaaagcaagcgagaagtccatacggatcaccgccatggacacagaggatcaaggggtcaaagtcttcctgatcagcgccagttcgaaggatacagggcaactgtacgctgctctgcaccataggatcctagccttgagaagtagagtagaacaggagcaggaagccaagatgcctgctcctgagcccggcgccgctccatccaacgaggaggatgattctgatgacgacgacgtgctcgctcccagcggcgctacggcagcaggagctggagacgagggtgatgggcagactacaggatcaacttag

SEQ ID NO: 202482 - DNA, 1194 bp, synthetic construct
  misc_feature 1..1194: note = Description of Artificial Sequence: Synthetic coding sequence
  source 1..1194: mol_type = other DNA
gccgacgtgaccaaggccgagaagcccgccatcgccccccccgtgttcgtttttcagaaggataagggtcagaagcggtcagccggcggatcctctcctgaggggggggaggactcagatcgagaggatgggaactactgtccaccagtcaagcgtgagcggacctcctccctgacacagtttcccccttcccagtccgaggaaaggtcctcgggttttcgccttaaacccccaaccttaatccatggccaggctccttcggctggtttaccctcccagaaaccaaaggagcagcagcggagcgtgctgcgccctgccgtgctccaggctccacaacccaaagctctgtcacaaacggtgccttcttctggcaccaacggggtgagtttgccagccgactgtacaggcgcagtgccagcggccagcccagacacagctgcctggcgttctccttccgaggctgccgatgaggtctgtgcgctagaggaaaaggagccacagaagaacgagtcttctaacgcaagtgaggaagaagcttgcgagaaaaaagacccggccactcagcaggcttttgtgtttgggcaaaatctgagagatcgcgtcaagttaatcaatgaatcagtggacgaagcagatatggagaatgcagggcacccttccgctgatactcccaccgcaactaattattttctgcagtacataagcagcagtctagaaaattccaccaatagcgctgatgcttcttctaataagtttgttttcggccagaatatgagcgagagggtgcttagtcccccgaagttgaacgaggtgagctcagatgccaaccgtgaaaatgctgccgcagaaagcggctcagaatcctcgtcacaggaggccactccagagaaagagtccctggccgaatcggccgccgcctacacaaaggccactgcccgtaaatgtctgttggagaaggtcgaagtgattaccggcgaggaagccgagtccaacgtccttcaaatgcaatgtaagctgttcgtgtttgataaaactagccaaagctggtggctgctgaggcatccacacccctctcaccctgccgttggtccttgtctttgcggcgaacagccggccctttgtccgtgcccaggcttgcccaattaccgacccggtaccccggctcaattgggcggtctcctggtgcgggtctag

SEQ ID NO: 202483 - DNA, 1704 bp, synthetic construct
  misc_feature 1..1704: note = Description of Artificial Sequence: Synthetic coding sequence
  source 1..1704: mol_type = other DNA
atggccgacctggccaacgaggagaagcccgccatcgccccccccgtcttcgtgtttcagaaagataaggggcagaaatcccccgccgagcagaaaaacctgtccgattcgggagaagagcctcggggtgaagccgaggcacctcaccatggaaccggtcatccagagtctgctggggagcatgcactggaacctcctgctccagccggcgccagtgcatctactcccccaccacctgctcctgaggctcaattgccaccttttcctagggaactagctggtcgctctgccggcggcagcagtcctgaagggggagaagattctgacagagaagacggtaactactgtcctcccgtgaagagagagaggacctccagcttaacccaattccctccttcacagtcagaagagcgctcgagcgggtttcggcttaaacctccgacgcttatacatgggcaggccccttctgccggcctgccatcacagaaaccaaaggagcaacagaggtccgtactcaggcccgcagtgctccaggccccacagccaaaggctctgtcgcagaccgttcctagcagcggcactaacggtgtaagtttgccagcagattgtaccggagccgtaccagcggcctcaccagataccgccgcatggcgcagtcccagcgaggcagccgacgaggtctgcgcacttgaagagaaggagcctcagaagaacgaaagcagcaacgcttctgaggaggaggcttgcgaaaagaaggatcctgctacccaacaggcatttgtctttggccaaaatttgcgcgaccgggtgaaactgatcaatgagagcgtcgacgaggcggacatggagaacgcaggacacccatccgctgacaccccgaccgccaccaattatttcctgcagtatatttcaagctctctggagaactccactaactccgccgacgccagcagcaataaatttgtgtttggacaaaatatgagtgagcgcgtgctgtctccgcccaaattgaacgaagttagttctgacgccaacagggaaaacgcagccgctgaatcaggctccgagagttcatcccaggaggctaccccagaaaaggaaagtctcgcggagtccgctgctgcttatacaaaagctacagcgcgcaaatgtctcctagaaaaggtggaagtgatcactggagaggaggccgagtcaaatgtgttgcagatgcaatgtaagttgtttgtcttcgacaagacatcccaatcatgggtcgaacgcggtaggggcttattgcggctgaacgacatggcctctactgatgatggcacactccagagtaggctggtcatgcgcacccaagggagcttgaggctgatcctgaatactaagttgtgggctcaaatgcagatagacaaggcttccgaaaagtcaattagaattacggcaatggataccgaggatcagggagtgaaagtatttctaataagcgcatcttctaaagacacaggtcagctgtatgccgcgttgcaccaccgaatcctcgccctgcggagcagagtggagcaagagcaagaagccaaaatgcccgctccagagcccggcgcagctccctccaatgaagaagatgatagtgacgacgatgacgtgcttgcaccctccggagctaccgcagcaggagcaggtgacgaaggcgatggccagacgacgggatcaacctag

SEQ ID NO: 202484 - DNA, 1689 bp, synthetic construct
  misc_feature 1..1689: note = Description of Artificial Sequence: Synthetic coding sequence
  source 1..1689: mol_type = other DNA
atggccgacctggccaacgaggagaagcccgccatcgccccccccgtcttcgtgttccagaaggataaagggcagaagagcccggccgaacagaagaacctgagtgatagcggcgaggaacctagaggagaagccgaggccccccaccatggaaccgggcaccctgaatcagccggcgaacacgccctggaaccacccgcgccagctggggcaagcgcttctactcctcccccgcccgctcccgaggcacagctcccaccttttcctagggagctggcagggaggtccgcaggcgggtcttctcccgagggcggagaagattcagacagggaggatggaaattattgccctccagtcaagagggaaaggacgtcctcactgactcagtttcctcccagccagagcgaggaaaggtccagtggctttagactgaagccacccaccctgatacacgggcaagctccttctgctggcctaccttctcaaaagccaaaggaacagcagagatccgtgcttaggccagcagtgcttcaggccccacagccgaaggcactatcccagaccgtcccatcctccgggacgaatggagtgtcactgccagctgactgtaccggtgctgttcctgcggcatcacctgacacggcagcgtggagatctcctagtgaggcagccgatgaggaaaaggagccacagaaaaatgaatcctccaacgcttctgaggaagaagcctgcgaaaaaaaggaccccgccacgcaacaggcatttgtctttggacaaaatcttagagaccgtgtgaagctgataaacgagtccgtcgatgaggcagacatggaaaacgccggccatccctcagccgacactcctaccgcgaccaactattttctgcagtacatatctagcagtctggaaaacagcactaattccgctgacgcctcctccaataagtttgtctttggccagaatatgagcgagcgagtcctttcccctccaaaactgaacgaagtttccagcgatgctaaccgtgaaaacgccgccgctgaatcgggctctgagtcgagctctcaagaagccacccctgagaaagaatcactggctgaaagtgccgccgcatatacaaaggctacagctcggaagtgcctgttggagaaagtggaggtcattacaggtgaggaggcggagagcaacgtactccaaatgcaatgtaagctgtttgtgttcgataagacgagtcagtcgtgggtggaacgcggacgcgggctgttgaggctcaatgacatggctagcaccgatgacggaaccctgcagagtaggctggtgatgagaactcagggttccctgcgactgatcttaaataccaaactgtgggcccaaatgcagatcgataaagcttccgagaaatctatccgcatcaccgcgatggatacggaggaccagggcgtaaaagtgttccttataagcgcaagctccaaagatactggtcagctttacgcagccctgcaccaccgcattcttgctctacgcagtcgtgtcgagcaggagcaagaggccaaaatgccagcgcccgaaccgggcgctgccccatctaatgaagaggatgatagtgatgacgatgacgtgttggcacctagtggagctacagccgcaggagctggagatgaaggggatgggcaaacaactggctccacgtag

SEQ ID NO: 202485 - DNA, 1320 bp, synthetic construct
  misc_feature 1..1320: note = Description of Artificial Sequence: Synthetic coding sequence
  source 1..1320: mol_type = other DNA
atggccgacctggccaacgaggaggagcggagcagcggcttccggttgaaaccgcccacgttgatacacggccaggctcccagcgcaggactccctagtcagaaacctaaggagcagcagagaagcgtacttaggccagcagtgcttcaggcaccccagccaaaggctcttagtcaaactgtgccttcctcaggtaccaatggcgtgagtctgcccgctgactgcaccggtgcggtccctgccgcgagcccagacaccgcagcatggagatcaccaagcgaggcggccgatgaagtttgcgccctggaggagaaggaaccacaaaaaaacgagtctagcaacgccagcgaagaagaggcctgcgagaaaaaggaccctgcaacccaacaagctttcgtgtttggtcaaaacctgcgtgacagggtaaagctcataaatgaatcagttgatgaggccgacatggaaaatgccgggcacccttcagcagacacccctacggctaccaactactttctgcaatacattagcagctctcttgaaaactctaccaactccgctgacgcttcctcaaacaagttcgtgtttggccaaaacatgagcgagagggttttaagcccacccaaactgaacgaggtgtccagcgatgcgaatcgagaaaatgcggctgctgaatccggctccgagtcttctagtcaggaggctactcctgagaaggagagtctagcggagtcagccgcagcctatacaaaagccaccgccagaaagtgtctgttggaaaaggtggaagtgatcacaggagaggaggccgagtctaacgtcctgcagatgcagtgcaaacttttcgtcttcgacaagacaagtcagagctgggttgaacgggggcggggtctgctgagactaaacgacatggcctccacggacgatggcactttgcagtctaggttagtgatgcggactcaggggagtctccggttgattctgaataccaagctgtgggcgcagatgcaaatcgacaaagcttctgaaaaaagcatacgcattactgctatggacactgaagaccagggggtgaaagtcttcttgatcagcgcaagcagcaaggacacaggacaactctacgcggctcttcatcatcgcattcttgccctgagatcccgcgtcgagcaggagcaggaggcaaagatgcccgcccccgagccgggcgctgctccgtcaaatgaagaggatgactctgacgatgatgacgtcttggccccatcgggggccaccgccgccggcgccggtgatgaaggtgacgggcagaccacaggtagcacctag

SEQ ID NO: 202486 - DNA, 2190 bp, synthetic construct
  misc_feature 1..2190: note = Description of Artificial Sequence: Synthetic coding sequence
  source 1..2190: mol_type = other DNA
atgagcggccagcccccccccccccccccccagcagcagcagcagcagcagcagctgagcccgccccccccagcagctctggcaccagtgtccggagtagtgctgccagcaccacccgcggtcagtgcgggcagcagcccggcagggtcacccgggggaggcgccgggggggagggcttaggggctgctgccgccgccctattgttgcatccccctccacccccccccccggctactgcagcacctcccccccctcctcctccccccccacctcccgcctcagcagcggctcccgcgagtgggccacctgctccacccgggctggcagctggccccggcccagcggggggcgctccgacccccgctttggtggccggtagttctgccgctgcccctttcccccatggagatagtgcgctgaatgagcaagaaaaggaattgcaacgaagactgaagcggttataccctgctgtggacgagcaggaaacacctttgcctcggagctggagcccgaaagacaagtttagctatattggcctttcccagaataatctacgcgtccattataaaggacatggtaagacccctaaggatgccgcatctgtgagagcaactcaccctatccccgccgcgtgcggaatctactactttgaagttaaaattgtgtcaaagggtcgggacggctacatggggattggcttgtcagcccaaggcgtaaacatgaaccgcttgccaggctgggataaacacagctatggatatcacggagatgatggccattcgttttgttcttcaggcactgggcagccctacggcccaaccttcactactggagatgtgataggttgttgtgtgaacctgattaataacacctgcttttacacaaagaacgggcatagcctaggaatagcatttaccgacctcccccctaatctgtaccccactgtaggactccagaccccaggagaagtcgtcgatgccaatttcggccagcatccattcgtgttcgacatagaggactacatgcgggagtggaggactaaaatccaggcccagatagatcgttttcccatcggggacagagagggagagtggcagacgatgattcaaaagatggtgtcatcgtatttggtgcatcacggatactgtgccactgccgaggctttcgctcggtccacagaccagacggtgctcgaagaactggccagtatcaagaacaggcagcggatacagaaactcgtactcgctgggaggatgggagaggccattgagacgacccaacagctttacccctccctattagagcgcaacccaaacctcctgtttacactgaaggtgcggcagtttatcgaaatggtgaacgggacagacagcgaggttcgatgtttgggcggcagatctcctaagtcccaagatagctaccctgtgtcacccaggcccttttcctcaccgtcaatgtccccctcccacggaatgaacatccacaacttagcctctggtaaaggctccacggctcacttctccggcttcgaatcctgcagtaacggcgtgatctctaataaagcccatcagtcctattgtcactcaaataagcaccagagcagcaatctgaatgtgcctgaactgaatagcataaacatgtcgaggagccagcaggtgaataacttcacatcaaatgacgtggacatggagaccgatcattattccaacggggtgggcgagacaagttcaaatggctttctgaatggctcctcaaagcacgaccacgagatggaggactgcgatacggaaatggaggttgattcgagtcaactgagacgtcagctctgcggaggctcgcaggctgcaatagaacggatgattcactttggcagagagctccaggccatgtccgagcaactgcgccgggattgtgggaagaacaccgcaaataagaagatgcttaaggatgccttttcgctgcttgcgtacagcgacccatggaattcccccgtcggcaaccagctggaccccattcagcgggagcctgtctgcagtgccctgaattctgccatcctggagacgcataacctccctaaacagccacccctggccctcgccatggggcaggccacccagtgtctgggcttaatggcccgttcaggaattgggagttgtgccttcgccacggtggaggactatctccattag

SEQ ID NO: 202487 - DNA, 1176 bp, synthetic construct
  misc_feature 1..1176: note = Description of Artificial Sequence: Synthetic coding sequence
  source 1..1176: mol_type = other DNA
atgagcggccagcccccccccccccccccccagcagcagcagcagcagcagcaattgagccccccgccgccggcagctctggctccagtatctggagtggtgctgcccgcccccccagctgtgtcggcgggcagtagccctgcagggtctcctggtgggggagctggaggggaggggctgggtgctgcagctgcggccttgttactacacccccctccacctcccccgccagctacggcggctcccccacctccacccccaccgccccctcccccggcatctgctgctgccccagcatcgggcccccctgccccaccagggctcgccgccggtccagggcccgccggcggtgctcccacgcctgcactggtcgctggatcgagcgccgctgccccattccctcacggcgatagcgctttgaacgagcaggaaaaggaactccagaggaggctaaaaaggctataccctgcggtcgacgagcaggaaaccccactgcccaggtcatggtcccctaaagataaattcagttacatcggtctgagccagaacaatctacgtgtgcactacaagggacacggaaagacacctaaagacgcagcaagcgtccgagccacccacccaatccctgcggcctgcggaatctactacttcgaagtcaagatcgtaagcaaaggccgggacggctatatgggcatcgggctctcggcacagggtgtcaacatgaaccgactgcctggatgggataagcactcctacggatatcacggcgatgatgggcattccttctgtagctccggaaccgggcaaccttacggacccactttcaccaccggcgacgtcatcggatgctgcgtgaacctgatcaacaatacttgcttctacactaaaaatggtcactctctgggaatcgcctttacagacctgcctccgcttgattacccggtgtctcctcgacctttttcttctccctcaatgtcgccctctcatggcatgaacatacacaacctcgcgtcaggtaaagggtctacagcccatttctccggttttgagtcctgttctaatggagtaatcagcaacaaagcgcaccaaagctattgtcatagcaacaagcaccaatcatccaacgagtgcacacgcaccaagcaatacaaatacgtgaagattaccgcatcttag

SEQ ID NO: 202488 - DNA, 1503 bp, synthetic construct
  misc_feature 1..1503: note = Description of Artificial Sequence: Synthetic coding sequence
  source 1..1503: mol_type = other DNA
atgggcatcggcctgagcgcccagggcgtgaacatgaaccggctgccagggtgggacaagcattcctacggttatcatggcgatgatggccatagtttctgcagttccggcaccggacaaccatacggccctacattcactactggggacgtcataggctgctgtgtcaatctgatcaataacacgtgtttttatacaaaaaacggacattcgcttggaatcgcattcacggacctgcctcctaacttatatccgacagtggggctccagactcccggcgaggtcgtagatgccaattttggacagcatcccttcgtgtttgacattgaggattatatgcgggaatggcgtacaaagatccaagcccagatagaccgtttccctattggtgacagggaaggggagtggcagactatgattcaaaagatggtgtctagttacctcgttcaccatggatactgcgccactgctgaggcctttgcaagatccacggatcagactgtcctcgaggagctggcctcaatcaaaaatcgccagcggatacagaagctggtgctggctggaaggatgggcgaagccatcgagacgactcagcagctgtacccttcactacttgagcgaaatcctaacctgctgttcacactgaaagtgcggcagttcattgaaatggtcaatggcactgattccgaagtacggtgtcttggtggcaggtcaccgaagagccaggattcttatccggttagtcctcgccctttctcttcccctagtatgtcccctagtcacgggatgaacattcataacttggcgagcggaaaggggagtacagcacatttttctggctttgaaagttgtagtaatggcgtcatttctaacaaggctcaccagtcctactgtcattccaataagcaccagtcctctaatctcaatgtgcccgagcttaatagtatcaacatgtccagaagtcagcaggtaaacaatttcactagcaatgacgtcgacatggaaaccgaccattacagcaacggtgttggcgagaccagctctaacgggtttcttaatgggtcttctaagcatgaccatgaaatggaggattgtgacacagagatggaagtcgatagctcacaacttaggcgtcagctctgcggagggagccaggctgccattgaacgcatgatccatttcgggagagagctccaagcaatgagtgaacagctgaggcgcgattgtggcaaaaatacggccaacaaaaaaatgttgaaggacgcattctcactgcttgcctatagcgacccatggaactcgccagtgggcaaccaattggaccccatccagcgagagcctgtgtgttccgcactcaatagcgccattctagaaacccacaacttgcccaagcagccgccattggccttggcaatggggcaagccacccagtgtctcggactaatggcccggagcggcatcggttcttgtgccttcgcaacagtggaagactacctgcattag

SEQ ID NO: 202489 - DNA, 387 bp, synthetic construct
  misc_feature 1..387: note = Description of Artificial Sequence: Synthetic coding sequence
  source 1..387: mol_type = other DNA
atgttcgacgtgaccagccgggtgacctacaagaacgtgcccaactggcaccgggatctggtccgggtgtgtgaaaatattcccattgtcttatgcggcaacaaggttgatattaaagacaggaaagtgaaagctaagtctattgtcttccacagaaaaaaaaatctgcagtattacgatatttccgcaaagtccaactataatttcgagaaacctttcctgtggctagcgaggaagttaatcggcgacccaaaccttgagttcgtggcgatgcctgctcttgctcccccagaggtagtaatggacccagccctcgcggctcagtacgagcacgacttagaggttgcccaaacaaccgcgctgccagacgaggacgatgatctatag

SEQ ID NO: 202490 - DNA, 702 bp, synthetic construct
  misc_feature 1..702: note = Description of Artificial Sequence: Synthetic coding sequence
  source 1..702: mol_type = other DNA
atggccgcccagggcgagccccaggtgcagttcaagctggtgctggtgggagatgggggcactggcaagaccaccttcgttaagcggcacctgactggcgaatttgagaagaagtatgtcgcaaccctgggcgtggaagtgcaccccctcgtttttcacactaatcggggccccatcaagtttaacgtgtgggataccgccggccaggaaaaatttgggggcctcagagacggatactacatccaggaaatgggcattcatcatgtggcccacgcaggattggagctgatgtctagtgcccagtgtgccatcattatgtttgacgtgacctcccgcgttacctacaaaaacgttcctaattggcaccgggacttagtgcgtgtctgtgagaatatccccatcgtgctgtgcggcaacaaggtcgatatcaaggatagaaaggtgaaagccaaaagcatagttttccataggaagaaaaacttgcagtattacgacatttctgcaaagtccaactacaacttcgagaagccttttctgtggcttgctcggaaactgattggggatccgaaccttgaatttgtggcaatgcctgccctagccccacctgaggtggtgatggaccccgccctggcggcccagtacgagcatgatctggaggtcgcacaaactaccgcccttcccgatgaggacgacgacctctag

SEQ ID NO: 202491 - DNA, 651 bp, synthetic construct
  misc_feature 1..651: note = Description of Artificial Sequence: Synthetic coding sequence
  source 1..651: mol_type = other DNA
atggccgcccagggcgagccccaggtgcagttcaagctggtgctggtgggtgatggcggaaccggaaaaaccacttttgttaaaaggcacctcacaggggagttcgagaagaaatatgtggccacacttggggtggaagtgcatcctctggtattccatactaaccggggccccatcaaattcaacgtgtgggacacggccggccaggagaaattcggggggttacgagacggatactatattcaggcccagtgcgcaattattatgttcgatgttacctcccgcgtgacctacaaaaacgtgccgaattggcacagggaccttgtgcgggtgtgtgagaacattccaattgtcctgtgtgggaataaggtggatatcaaggatagaaaggttaaagccaaatcaatagttttccaccgcaagaaaaaccttcagtactacgacattagtgcaaagagcaattacaacttcgagaagccatttctctggctcgcgcgtaaattgatcggcgatcccaacctggaattcgtcgccatgcctgctctggctccacctgaggtagtgatggatcctgccctcgctgctcagtacgaacacgacctcgaagtcgcccagacaacagcccttccagatgaggacgacgacttgtag

SEQ ID NO: 202492 - DNA, 705 bp, synthetic construct
  misc_feature 1..705: note = Description of Artificial Sequence: Synthetic coding sequence
  source 1..705: mol_type = other DNA
cggcggcggcggctgcggctgcggcggctgaactgcgccagcgccattttccccgcctcggtgggaagagctagacgccgattttggaaactggttcttgtgggtgatgggggaaccggaaagacaacctttgtgaagcgccacttgaccggggagtttgagaaaaaatacgtagccaccctcggagtagaggtgcaccccttggtgttccacacgaatcgggggccgatcaaatttaatgtctgggacactgccggacaggaaaagttcgggggactgcgggacggttactatatccaggcccagtgcgccattataatgttcgacgtcaccagccgcgtcacttacaaaaatgtgcccaattggcatcgagatctggtaagggtgtgcgagaacattcccatagtgctctgcggcaacaaagtcgacatcaaagaccgcaaagtgaaagcaaagagcatcgtcttccacaggaaaaaaaatttgcagtactatgacatcagtgctaaaagtaattacaatttcgaaaagccgttcttgtggctcgctcgcaagttgataggagaccccaacctggaatttgtggccatgcccgcacttgccccccctgaagttgtaatggaccctgctctggccgctcagtacgagcacgacctcgaggtggcacagactactgcgctcccagatgaagatgacgacctgtag

SEQ ID NO: 202493 - DNA, 387 bp, synthetic construct
  misc_feature 1..387: note = Description of Artificial Sequence: Synthetic coding sequence
  source 1..387: mol_type = other DNA
atgttcgacgtgaccagccgggtgacctacaagaacgtgcccaactggcaccgtgatcttgtcagggtttgcgaaaacattcctatagttctttgcggcaacaaagtcgacatcaaggatcggaaagtcaaggcaaaaagcattgtttttcacagaaaaaagaacctccagtactatgatatcagtgccaaaagcaattacaatttcgagaagcccttcctatggctcgccagaaaacttatcggcgaccccaatctcgagtttgtggcgatgccagctctcgctccgcccgaggtggttatggatccagctttggcggctcagtacgagcatgacctcgaggttgcccagacaactgccctgcccgacgaggatgatgacctttag

SEQ ID NO: 202494 - DNA, 651 bp, synthetic construct
  misc_feature 1..651: note = Description of Artificial Sequence: Synthetic coding sequence
  source 1..651: mol_type = other DNA
atggccgcccagggcgagccccaggtgcagttcaagctggtgctggtgggcgatggtgggacgggcaagaccaccttcgtgaagaggcacctcacaggcgagttcgaaaagaagtatgtcgccactctaggagtcgaggtacaccccctggttttccacaccaacagaggccccatcaagttcaatgtctgggataccgctggacaggagaagtttggcggtctgcgggacgggtactatattcaggcacagtgcgccatcatcatgtttgacgtcacctctagggtgacatataagaacgtgcccaattggcatcgcgatttagttcgggtatgtgagaatattccaattgttttgtgtgggaataaagtagatatcaaggataggaaggttaaggccaaatcaatcgttttccaccgcaagaagaacctgcagtactacgatattagcgcaaagtcaaattataactttgagaagcctttcctgtggctggctcggaagctgattggagatcccaacctggagttcgtggccatgccggcactagcaccacctgaggtggtgatggaccctgcactggcagcgcagtatgagcacgacctggaggtggcacagaccacagcattgccggatgaagatgacgacctgtag

SEQ ID NO: 202495 - DNA, 5271 bp, synthetic construct
  misc_feature 1..5271: note = Description of Artificial Sequence: Synthetic coding sequence
  source 1..5271: mol_type = other DNA
atgcggcggagcaaggcctacggcgagcggtacctggccagcgtgcagggttccgcaccttctcccgggaaaaaattaaggggcttctactttgccaaactatattatgaggctaaggaatatgatctggctaagaagtacgtgtgtacgtacctctccgttcaggagcgggatccgcgggcccaccgctttctgggccttctttatgagctggaagagaatacggaaaaagccgttgagtgttaccgcagaagcctcgagttgaaccctccacaaaaagatttggtcctcaagattgccgagctgttatgtaagaatgacgttaccgatgggagggccaaatactgggtggagcgcgcggccaaactattccccggatctcctgcaatttacaaactgaaggaacacctgctcgactgtgagggcgaagatgggtggaacaaattgtttgattggatccagtccgagctgtacgttaggccagacgatgttcatatgaatattcgcctggtcgaactctaccgttcgaacaaaagattaaaagacgctgtggcaaggtgtcatgaggccgagcgaaatatcgcattgcgatcgagtctggagtggaactcgtgtgtggtgcagactcttaaagaatatcttgaatcactgcaatgtttggaatctgacaaatcagactggcgcgccactaataccgacctcctcctagcgtatgcaaaccttatgctgttaaccctgagtaccagagatgtccaggaaagcagggagctgcttgagagcttcgactccgctctccagtctgccaagagttcccttggaggtaatgatgagctgtccgccacctttctggaaatgaagggccacttttacatgcacgcagggagcttgcttctgaaaatgggacagcacggcaacaatgtacagtggcaggctttaagtgaattagccgcattgtgttacgtgattgccttccaggttccacgacctaaaatcaaactgatcaagggcgaggcaggccagaatttattagaaatgatggcgtgcgatcgcctctcgcagtccgggcatatgttactcaacctgagtcggggaaagcaagactttctgaaagaggtggtcgaaacctttgccaataagagtggacaatccgtactctataacgctctgtttagtagccagtcttccaaggacacctcctttctcgggtctgacgacatcggcaatatagacgtgcaggagccagaactggaggatttggctcgctatgatgtgggtgccatccaggcacacaacggatctctacagcatctcacctggttaggtctccagtggaactctctccccgccctgcccggaattagaaaatggcttaagcaactctttcatcatcttccccaggagacatcaaggctggagaccaacgctccagagtctatctgtatccttgatctagaggtgttcctgttgggagtggtttatactagccacctgcagttgaaggagaaatgcaatagccatcattcttcataccagcctttgtgtctccctctgcctgtatgtaaacgattatgcactgagaggcagaaaagctggtgggacgccgtgtgcacgctgatccatagaaaggctgtgccagggaactcagccgagctccgattagtggtgcagcatgagataaacaccttgcgcgctcaagaaaaacatgggctgcaacccgccctactggtgcactgggccaagtgcctgcagaaaatgggtcgcgggttgaatagttcatatgaccaacaggaatatatcggccgctccgttcattactggaaaaaggtgctgcccctgctcaagataatcaagaagaattccattcccgagcccatcgatcccctcttcaaacactttcactcagtcgatatccaagcttccgagatcgttgagtatgaggaggacgctcatatcactttcgccatactggatgctgttcatggcaacattgaggacgcggtgacagccttcgaatcaataaaatcagtggtcagttattggaacctggccttaattttccatcgaaaggccgaagacattgagaacgacgcggtgttcccagaggaacaggaggaatgcaaaaactatttgagaaaaacaagagactatctcatcaagatcatagatgattccgacagcaacctgtcggtagtaaagaaactccctgttccacttgaaagcgtgaaggagatgttgaagagcgtgatgcaggagctggaagactacagcgagggcggacccctgtacaaaaatgggagcctgaggaacgccgacagtgagatcaaacacagcacaccttcacccactaagtactcactgtcacctagtaagagctacaaatattctccaaagacccctcccagatgggccgaggaccagaattctctgcggaagatgatctgccaggaagtgaaggctatcactaagttaaactcttcaaagtcggcctccaggcatcggtggcccactgagaactacggccccgattccgtccctgatggttaccagggcagccaaacttttcacggcgctcccttaacggtagccaccactggcccatcagtctactatagtcagtctccagcctacaattctcagtaccttctgaggccagccgccaatgttactccgaccaaaggaagctctaatactgagttcaagagcaccaaggagggcttttcaatcgccgtctcagcggacggattcaagttcggaattagcgaacctggcaaccaggagaaaaaatcggagaagcccttggagaacgacacaggattccaggcccaagacattagcggtcagaagaacggtcgcggggttatcttcgggcagacctcctctactttcacgttcgcagacgttgctaagagtactagcggagaggggtttcaattcggaaagaaggatcccaactttaagggatttagtggcgccggcgagaagcttttttcttctcagtgcgggaaaatggccaacaaggcgaacacttcaggcgatttcgaaaaggatgacgacgcctgtaaaacggaagacagtgacgacattcacttcgaacccgtggtgcagatgccggaaaaagtggagctcgtgacaggcgaagagggcgaaaaggtgttgtacagccagggtgtcaaactgtttcggttcgatgcagagatctcccagtggaaggagcgcggccttggcaacttgaagatcctgaagaacgaagtcaatggaaagccccggatgctgatgagaagggaccaggtgctgaaggtctgtgcaaaccattggatcacgaccactatgaacctcaagcctctgtccgggtccgatcgggcctggatgtggcttgcgagcgacttcagcgacggtgacgcaaaactggagcgtcttgccgcacagtttaaaacgcctgaacttgcggaggagttcaagcagaagtttgaagagtgccaacggctattgctagatattcctctgcaaaccccacataaacttgttgacactggacgcgcagctaagctgatacaaagagccgaagaaatgaagagcggtctcaaagatttcaaaacttttctcactaacgatcaaacgaaagttacagaagaggaaaacaaaggctccggaaccggggcagccggggcgagcgataccaccattaagcccaatccagaaaataccgggcctaccctggaatgggataattacgatctgagggaagatgcactggatgataacgttagttcatcaagtgtccatgacagccccttagcctccagccctgtgcggaaaaacatattccggttcgatgaatctactaccggcttcaatttttccttcaaatctgctttgtcgctctctaaaagccccgctaaactcaaccagtccggtacgtccgttggcacagacgaggagagtgatgtgacccaggaagaggagagagacggacaatattttgagcccgtggtcccacttcctgatctggtggaagtctcttccggggaagagaatgaacaggtggtttttagccacagagccgagctgtatcggtacgacaaggatgttggccagtggaaggaacgaggcatcggtgacattaaaatcctgcagaactatgataacaagcaagtgagaattgttatgaggcgcgatcaggtgctgaagctgtgcgccaatcacagaatcactccagacatgagtttacaaaacatgaaggggactgagcgagtatgggtatggactgcatgcgatttcgccgacggagaacgaaaagtggaacacctggccgtgaggttcaaacttcaagacgtcgcagattcctttaagaaaattttcgacgaggcgaaaaccgctcaggagaaggattccttaattaccccacacgtgtctagatcttccactccgcgtgagtctccctgcggaaaaatagctgtggcagtcttagaggagaccacacgcgagaggaccgatgtgattcagggggacgacgtcgcagacgcagcctccgaggtggaagtctctagcacttccgagactaccaccaaggcagtggttagcccccccaagtttgtcttcggctccgaatcagtcaagcgtatcttcagcagcgaaaagagcaacccgttcgcctttggtaattcctctgccacaggatccttgttcggcttttcattcaacgccccactgaaatcgaatgactctgaaacctccagtgtagcccagagcggatcagaatccaaggtggaaccgaaaaagtgcgaactgtcaaagaattctgatatcgagcagagttctgacagcaaggttaagaatctcagcgccagctttccaatggaggaaagtagcattaattacacctttaagactcccgagaaggagcctcctttgtggcacgctgaatttactaaggaggaactggtacagaaactttcttccaccaccaagagtgctgatcaactgaatggtctactgagagagactgaagccacttccgctgtactgatggaacagattaaacttttgaagagcgagatcaggaggctcgagaggaatcaggaggaatccgctgctaacgtcgagcatctgaaaaacgtgttgctccagttcatattcctgaaacctggctcagagcgtgagagtctgttgcccgtcatcaacacaatgctgcagctatcccccgaagagaaagggaagctcgcagccgtggcacagggactgcaggagacttccattcctaaaaagaaatag

SEQ ID NO: 202496 - DNA, 5247 bp, synthetic construct
  misc_feature 1..5247: note = Description of Artificial Sequence: Synthetic coding sequence
  source 1..5247: mol_type = other DNA
atgaacgtgatgggcttcaacaccgaccggctggcctggacccggaacaagcttagagggttttatttcgctaagctgtattacgaagccaaggagtacgacctcgccaaaaaatatgtctgcacgtacctgtctgtccaggagagagatccaagagcacaccggttcctgggcctcctgtacgaactggaagaaaatacagagaaggccgtggagtgttaccgtagatcactagagctaaaccctccccagaaggacttggtcctgaagattgccgaacttctatgcaagaacgatgtaaccgacggaagagctaagtactgggtagaacgagctgccaaactgttccctgggtctcctgccatctataaactcaaagagcacttactcgattgcgagggtgaggacggctggaacaagctcttcgattggatccagtccgagctgtatgtgaggccggacgatgtgcatatgaatattagactggtggagctgtacagaagtaataagcgcctcaaggacgccgttgcaaggtgccacgaagcggagcgcaacattgccttgaggagttcccttgagtggaactcttgcgtagtacagactctcaaagaatacctggaatccctgcagtgccttgagagcgataagagcgattggcgcgcgacaaacacggacctgctgttagcatatgccaacctgatgctcctgacactgtcgactcgagatgttcaggaatctcgcgagctgctggaaagctttgactctgcgctacaatcagccaagagctccttaggcggcaatgacgagctaagtgccacattcctcgagatgaagggccacttttatatgcatgctgggtcccttctgttgaagatgggacagcatggcaataacgtccagtggcaagccctgtcggaattggcagccctgtgctacgtcatcgcattccaggtgcctcggccaaaaattaagctgatcaagggcgaggccggccaaaatttgctggaaatgatggcatgtgaccggcttagtcagtcaggccatatgcttctgaatctcagtcggggaaagcaggatttcctgaaagaggtagtcgagactttcgcaaacaaaagcggacagtcggtcctgtataacgcactgttctcatcacaatcctctaaggacacctctttccttggatccgacgacatcggcaacatagatgttcaggaacctgagttagaggatctggccagatacgacgtgggcgcaattcaggcacacaatgggtcgctacagcatctcacatggctgggcctgcaatggaatagcttgccagcattacctggcattcgaaaatggcttaaacagctgttccaccacttgcctcaggaaacatcgagactcgagacgaacgcacctgagtccatatgcatcttggacctggaagtgtttctgctgggagtggtttacactagtcaccttcaactaaaggaaaaatgcaactctcatcattcctcataccagcctctgtgtctgccactgcccgtctgtaagcgcctatgtacagagaggcagaaatcatggtgggacgcagtctgcactttgatccataggaaggccgtccccggcaattcagccgaattgagactcgtcgtacaacacgagatcaacactcttcgcgcccaggaaaagcacggactgcagcctgcattactggttcactgggcaaaatgtctgcagaagatgggcagaggacttaattcgtcgtacgatcagcaggagtatattgggaggtccgtgcactactggaaaaaggtgctcccactcctcaaaatcatcaaaaagaactcaatccctgagcccatcgaccccctctttaagcattttcattctgttgatattcaagcttcggaaattgtggagtacgaggaagacgcacacatcactttcgcgatcctggacgctgttcacggtaacattgaggatgctgtcacagcattcgaatccatcaaaagcgttgtttcatattggaatttggctctaatcttccacaggaaagctgaagacatcgaaaatgacgccgtgttcccggaagaacaggaagaatgtaagaattatctcagaaagacccgcgactatctgattaagattatcgacgatagtgactccaacctatcggtggtgaagaagttaccagttcccctcgaatctgtcaaggagatgctcaaatccgtgatgcaagaattggaagattacagcgagggcggaccattgtataagaacgggtccctcagaaacgcagattccgagattaaacacagcactcctagtccaacaaagtattctctgtcacccagtaaatcctacaagtattccccgaagacacctcctcgttgggctgaggaccaaaatagtttaagaaagatgatctgtcaggaagttaaggctattacaaagctgaactcaagcaaaagcgccagtcgccatcggtggccaacagagaattatggacctgatagcgtgccggacggttatcaaggcagtcagacctttcatggagcgccccttaccgtggcgaccactggcccaagcgtgtattacagccaaagtccggcatacaactctcagtatctgttacgcccagctgccaacgttacacccaccaaggggagcagtaacaccgagtttaaaagcaccaaggaagggtttagcatcgccgtttcagccgacggatttaagttcggtatctcagagcccggaaaccaggaaaagaagtctgagaaacctcttgagaacgacactgggttccaggcacaagatatcagcgggcagaagaatggccggggcgtcatattcggccagactagctccacgttcacctttgctgacgtggccaaaagcacctccggcgaaggctttcagtttggaaaaaaggatccaaattttaaaggttttagcggagcgggtgagaagcttttctctagccaatgcggcaagatggccaataaagccaacacatctggagatttcgaaaaggatgacgacgcttgcaaaacagaggattccgatgatattcacttcgagccggtggtgcagatgcccgaaaaggtggagctggtaactggggaggaaggggagaaagtgttgtatagccaaggcgttaaactgttccggtttgatgcagagattagccagtggaaggagcgcggactggggaacctcaaaattttgaaaaatgaggtgaacggcaagccgaggatgctgatgcggcgcgatcaggttctcaaggtctgtgccaatcactggataactacaaccatgaatctcaaacctctcagtggatctgatcgagcttggatgtggctggcttccgatttttcggacggggatgccaagttagaaagactggcggcccagtttaaaaccccagaattggctgaagaatttaagcaaaaattcgaggaatgtcagcgactgctcctggacatccccctccagacaccacacaaattagtcgataccggccgcgcagcaaaactgatccagagggccgaggaaatgaagtccggcttgaaggactttaagacgtttttgaccaacgaccagacaaaggtcacagaagaagagaacaaaggttccggaacaggggccgcaggcgcatccgacaccaccattaagccgaaccctgaaaataccggtccaactcttgagtgggataactacgatctaagagaagacgcgcttgatgacaacgtatcatcaagcagcgtgcacgacagccccctggctagtagtcctgtgcggaagaatatctttcgatttgatgaaagtacgaccggattcaacttttctttcaagagcgcgctgagtctctctaaatcccccgcaaagctgaaccaatcgggtacctccgtgggtacggacgaggaatccgacgtgacgcaggaggaggagcgcgatggtcagtacttcgaaccggttgtcccactcccagaccttgtggaagtcagctcaggcgaagaaaacgagcaagtggtgtttagccacagagcagagctttaccgctatgacaaagacgtgggacagtggaaagagagaggaataggcgatattaagatccttcagaactatgataataagcaggtccggattgtaatgagaagggatcaggttttaaaactgtgcgccaaccacagaatcacgccagatatgagcctccagaacatgaagggcacagagagggtctgggtgtggaccgcctgcgacttcgctgatggcgagaggaaggttgagcacttggctgttagatttaaactgcaggatgtggcagactcgttcaagaaaatctttgatgaggcaaagaccgcccaggagaaggattcgctcataacccctcatgtcagtaggagttccaccccaagagagtctccgtgtggtaaaatcgccgtcgccgtactcgaagagacaacgagagagcgaaccgacgttattcagggcgacgatgttgcggacgccgcatctgaagtggaagtgagctcaacttctgagacaactaccaaagccgtcgtctctccgccaaagtttgtcttcggcagtgaatccgtcaaacgcattttttcatccgagaaatctaacccattcgcattcgggaattctagtgccaccggctcactctttggattcagctttaacgccccccttaagtcaaacgattccgaaacttcatcggtcgctcaatctggaagtgagtctaaggtcgaacccaaaaagtgtgagctctccaaaaattccgatattgaacaaagcagcgatagcaaggttaaaaatctttccgccagcttccctatggaagagagtagcataaactatacgttcaagacccccgaaaaggaaccacccctctggcacgcggagttcacgaaggaggagctggtacagaaactttcctctactacaaaatccgccgaccagctgaatggtctgctgcgcgagaccgaggccaccagcgctgttctgatggagcagataaagctactgaaaagcgagataagaaggctggagagaaatcaggaggagtcagccgcaaatgtggagcacttgaaaaatgtgcttctgcagttcatcttcctcaagcctggcagcgagcgtgagtctcttctgccagtcattaatacaatgctgcagctgagccccgaagagaaaggcaaattggccgccgttgcacagggcttacaagagacctcaatcccaaagaagaaatag

SEQ ID NO: 202497 - DNA, 1935 bp, synthetic construct
  misc_feature 1..1935: note = Description of Artificial Sequence: Synthetic coding sequence
  source 1..1935: mol_type = other DNA
atgctgatgcggcgggaccaggtgctgaaggtgtgcgccaaccactggatcactaccaccatgaatctgaagcctctaagtggtagtgacagggcttggatgtggctggcctccgacttctccgacggggacgccaagctcgaacggctggccgcgcagtttaaaactccagagttagccgaggagtttaaacagaaattcgaggagtgccagagactgttgctcgatattcctctgcagactccccacaaattggtggacacaggaagagctgctaagttgatccagagagccgaagagatgaagtctggcttgaaggacttcaaaacattcctaaccaatgatcagaccaaagtcacggaggaggagaacaagggcagtgggaccggcgctgcaggcgccagcgacacaaccataaagccaaaccctgagaatacaggccccactttggagtgggataactacgacctccgtgaggacgctttggacgacaacgtgtctagtagcagtgtgcacgattcccctctcgcgtcgtccccggtcagaaaaaacatctttaggtttgatgaaagcaccacaggcttcaacttttcctttaagtctgcattatccctgtctaagtctccagccaagcttaatcaatccggtacttctgtcgggaccgatgaagaaagcgatgtgacccaagaggaggaaagggatggccagtactttgaacctgttgtcccgctcccggacttggtcgaagtctcttcaggcgaagagaatgagcaagtggtgttcagtcatcgagccgaactgtatagatacgacaaggacgtgggacagtggaaggagcgtgggattggggatattaaaatcctgcagaactacgacaacaaacaggtaaggatcgttatgagaagagatcaggtgctaaagctctgcgccaatcatagaatcacgcccgacatgtctcttcaaaacatgaagggaaccgaacgggtctgggtctggactgcctgcgattttgccgacggagagcggaaggtggagcatctggctgtcagattcaagctccaggatgtggcggacagctttaagaaaattttcgatgaggccaaaaccgcccaggagaaagactccctgattacaccccatgtgagccggtcatctacccctcgcgagagtccatgtggaaagatcgccgtggcggtgctggaagagacaacccgcgaacgcaccgacgtcattcagggagatgatgtcgcggatgccgcctcagaggtagaggttagttccacaagcgaaactactacgaaggcagtagtgtcacctcccaaatttgtatttggttctgagtcagtgaagcgcattttttccagtgagaagtcaaatccttttgcctttgggaacagcagtgccacaggctcactcttcggattttctttcaacgctcccctgaaaagcaatgactctgagacttcatccgtagcgcagtccggctcagaatcaaaagtcgagcccaaaaagtgcgaattgtcaaaaaatagcgacattgaacagagttccgattccaaggtgaaaaacttgagtgcatcctttcctatggaggagagttctatcaactatacattcaagactccagagaaagagccaccgctctggcacgcggagttcacaaaggaagagctggtgcagaagctgagcagcacaacaaagtctgcagatcaattaaacggacttcttcgcgagaccgaggccacctctgccgtcctgatggaacagattaaactcttaaagtcagaaattagacggctcgaaaggaaccaggaggagagtgcagccaacgttgagcacctgaagaatgtgctgctgcagtttattttccttaagcccgggagcgagagggaacccagctcttgctacaagtatgacgtggccgctcagccctag

SEQ ID NO: 202498 - DNA, 5247 bp, synthetic construct
  misc_feature 1..5247: note = Description of Artificial Sequence: Synthetic coding sequence
  source 1..5247: mol_type = other DNA
atgaacgtgatgggcttcaacaccgaccggctggcctggacccggaataaactgaggggattttactttgccaaactctattatgaagctaaggagtacgatctggcgaagaagtacgtgtgcacctacctgtctgtacaggaacgggatccccgggcccaccgattcttgggactcctgtacgaactggaggaaaatacagagaaagccgtagaatgctaccggcgttccttggagcttaatccaccccagaaagacttagttttgaagatagcagaactattgtgtaaaaatgatgtgacagacggcagagctaaatattgggttgaacgggcagcaaaactctttccaggaagcccggcaatttacaaattaaaggagcatctcctcgattgcgaaggggaggatggctggaataaattattcgattggattcaatcagaactttacgtacgtccagatgatgtgcacatgaatatcaggctcgtggaactgtataggagcaacaaacgcctgaaagacgccgtcgctcgctgccatgaggctgagagaaatattgcccttaggtcaagtctggaatggaacagctgcgtggttcagacattaaaggagtatctcgaaagcctgcagtgtcttgaaagcgataagtccgactggcgggcaacaaacactgatcttcttcttgcatacgctaatctgatgctgctaacactcagcacaagagatgtgcaggagagcagggaactgttagaatcatttgacagcgcgttacaatctgctaaatcttcccttggcggaaacgatgaactgtctgcaactttcctggagatgaagggccacttctacatgcacgctgggtctcttctcctgaaaatgggccagcacggcaacaatgtgcaatggcaagcactgagcgagcttgccgcattgtgctacgtgatcgcgtttcaagtgccaaggcctaaaatcaaacttatcaagggcgaggcagggcagaacctgctcgagatgatggcgtgtgatcgtctgtcacagtcggggcacatgttactgaaccttagcagagggaagcaggatttcctgaaagaagtcgtggaaactttcgcaaacaagagtggccagagcgtgctctacaatgccctcttcagctcacagtcaagtaaagacaccagctttctgggcagcgacgacattggcaatatcgacgtccaggagcctgagctggaagatctggcccggtacgatgtgggggcaatccaggcccacaatgggtcacttcagcatctgacctggttaggcctccaatggaattcccttccagcacttcccgggattcggaaatggctgaaacagctcttccatcatctccctcaggaaacttctcggcttgagactaatgctcccgagagcatatgtatactcgatttggaagtgttcctcctgggtgtcgtgtatacatctcatctccagctgaaggagaaatgcaattctcaccatagctcttaccagcccctgtgtcttcccctgcccgtctgcaagaggctctgtactgagaggcaaaaatcatggtgggacgctgtgtgtactctaatccataggaaggccgtccctggtaattccgcggagctgcgcctggttgttcagcatgaaatcaacacacttcgagcccaggagaaacacggattacagcccgcccttcttgttcattgggccaagtgccttcagaaaatgggccgagggctgaatagctcctacgatcagcaagagtacatcggcaggtctgttcattattggaaaaaggtgctccccctgctgaagataatcaagaaaaactctattcctgaacctattgatcctctgttcaagcactttcacagtgtcgacatccaggccagcgaaatcgtcgaatatgaagaggacgcccacattacattcgcaattctggatgccgtccacggaaatatcgaggacgccgtaacggccttcgagtctattaaaagcgttgtgtcatactggaatcttgctctgattttccaccgaaaggcagaagacatcgaaaatgatgccgtattccctgaggagcaggaggagtgcaaaaattatttaaggaaaacacgtgattacctcattaagatcatagacgactcagatagcaacctctccgtggttaagaaactgccagtgcccctggagagtgtgaaagaaatgctgaaatcggtgatgcaggagcttgaagactattctgagggcggcccgctgtataagaacggttccttgcgcaacgcagatagtgagattaaacattcgactcccagcccaaccaaatatagcttgagcccaagcaaaagttacaaatattctccgaaaacgccacctcggtgggcagaagaccaaaattcacttcgtaaaatgatatgtcaagaggttaaggcgataaccaagctaaatagtagcaagagtgccagccggcatcggtggcctacagagaattatggcccagacagcgtcccagacggatatcagggaagccagacttttcatggcgcccccctcacggtggctacaacaggacctagtgtttactactcacagtcacctgcttacaattctcagtacctgttaagacctgccgccaatgttactcccacaaagggatcgagtaataccgaattcaaatctaccaaagagggattcagtattgctgttagcgcggatggctttaaatttggtatatcagagcctggtaatcaggagaaaaagtccgaaaaaccgctggagaatgatacaggatttcaggctcaggatatttccgggcagaagaatggaagaggtgtgatttttgggcagacctctagcacctttaccttcgctgatgtcgccaagtccacatctggcgaggggtttcagtttggtaaaaaagatcccaactttaaggggttctccggtgccggcgaaaagttgttctcctctcagtgtggaaaaatggccaataaggccaacacaagcggcgacttcgaaaaggatgacgatgcttgtaagacagaggattcagatgatatacattttgaaccagttgtgcagatgcctgagaaggtggagctggtcacaggggaggaaggtgaaaaggttctttacagccaaggagtgaagttattcaggtttgacgccgaaatctctcagtggaaggaaagagggctggggaatcttaagatcttaaaaaatgaggtgaatgggaagcctcggatgctaatgagacgggatcaggttctgaaggtgtgtgccaaccactggatcacaacaactatgaatctgaaacccctgtccggtagcgaccgagcctggatgtggctggcctccgacttctccgacggcgatgccaaactagagcgattagcagctcagtttaagacccccgagctggctgaggagtttaagcagaagttcgaagagtgtcagaggttactcctcgatattccattacagacccctcacaagctggtggataccggcagggcagcaaagctcattcagcgtgctgaagaaatgaaatcggggttaaaagactttaagacatttcttactaacgaccaaactaaggtcacagaggaggagaataaaggctcaggtacaggggccgcaggagcctctgacacaacgatcaagcccaacccagagaacacaggccctactctggagtgggacaattatgacctccgggaggacgctctggatgacaatgtgtcaagttccagtgtccacgactctcctctggccagctcccccgtgcgaaagaatattttcaggttcgacgagtctactacgggttttaatttctcattcaaaagcgctttaagcctgtccaagagtccggccaaactgaatcagagcggcaccagcgtcgggaccgatgaagagtccgatgtgacccaggaggaggagcgcgacggccagtacttcgaaccggttgtacccctcccagatcttgtggaggtgagcagtggagaagagaatgagcaagtggtgttttcacaccgcgccgagctttataggtacgataaggacgtgggccagtggaaggagcgcggcataggagacataaagattttgcaaaattacgacaacaagcaggtgcgcatcgtcatgcggcgagaccaggtgctcaagctctgtgccaaccacagaatcactccagatatgagccttcagaacatgaagggtaccgagcgggtgtgggtgtggaccgcctgtgacttcgcagacggcgaacgcaaagtggagcacctggctgtaagattcaaactccaagatgtagccgactcctttaagaagatatttgatgaggccaaaactgcccaggagaaggacagcctgatcacacctcacgttagccggtcatccacaccgcgcgaatcaccatgcggcaaaatcgcagtcgcagtcctggaagaaaccacacgcgagcggacagatgtgattcagggggatgatgtagccgacgccgcgagtgaggtggaggtgagctctactagcgaaaccaccactaaggccgtggtatcccccccgaagtttgtattcgggagcgagtcagtgaaacgtattttcagtagtgagaaaagtaacccttttgccttcggaaacagctccgcgaccggaagcttatttggatttagctttaacgccccactgaagtccaacgattcagaaacaagctctgtcgcccagtccgggagcgaaagcaaagtcgagcccaaaaaatgcgagctgtctaaaaacagcgacattgagcaaagcagtgactctaaagtgaaaaatctctcagcttctttccccatggaagagtccagtattaattatactttcaaaacccccgagaaggagccccccttgtggcacgcggagttcacaaaggaggaactggtgcagaagctctcatcaacaactaagtccgcagaccagcttaatggattacttcgagaaacagaggctacttctgccgtattaatggagcaaattaaacttttgaagtcagaaattcggcggctcgaacggaatcaggaggaaagtgcagccaacgtggagcacctcaagaatgtacttctgcagtttatattcctgaagcccggctcagagagagaatcgctgttaccagtcatcaacaccatgctccagctgagcccggaggaaaaggggaagctcgccgctgtcgcacaaggcctgcaggagaccagcattcctaaaaaaaaatag

SEQ ID NO: 202499 - DNA, 3042 bp, synthetic construct
  misc_feature 1..3042: note = Description of Artificial Sequence: Synthetic coding sequence
  source 1..3042: mol_type = other DNA
atgctgaagagcgtgatgcaggagctggaggactacagcgagggcggccccctctataagaatggatcattgagaaacgctgacagcgagatcaagcacagcactccctctcccacaaagtattcgctgagtccctcaaagagctataaatattcacctaaaacaccaccgcggtgggccgaggatcagaattccttgcgcaaaatgatttgtcaggaggtgaaagctattacaaagctgaactcgagcaagtccgcatcaagacaccgctggcctactgagaactacgggccagactccgtacctgatggataccagggttctcagacttttcatggggctcctcttacagtggctaccacggggcccagcgtgtactattctcagagccctgcatataattctcaatatctgctgaggcctgcggctaatgttacacccaccaaaggatcctccaacacagagtttaagtctactaaggagggtttctctattgccgtgtccgccgacggcttcaaattcggtattagtgaacctggcaatcaagagaagaaatcagagaaacctctcgaaaacgacaccggcttccaggcgcaggacatttccggacagaagaatggccggggcgtcatcttcggccagacctccagcacttttacatttgctgatgttgctaagtcaactagcggcgagggcttccaattcgggaagaaagacccaaatttcaagggctttagtggggccggcgaaaaactgttttcatcccagtgcggcaagatggctaacaaagcaaacacaagtggggattttgagaaggacgacgatgcttgcaagacagaagactctgacgacatccattttgaacccgtggtgcaaatgccagaaaaggttgaattggtgaccggtgaggaaggagagaaggtcctctacagccagggtgtgaagttattccggttcgatgccgaaatttctcagtggaaggagagaggactggggaatctgaagatcctgaaaaacgaagtcaacggaaaacccaggatgttaatgcggagggatcaggtgcttaaggtttgcgccaaccactggattacaacgaccatgaacctgaagcctcttagcggtagcgatagggcttggatgtggttagcctcagatttctcggatggcgacgctaagctcgaaagactcgcggctcagttcaagaccccagagctcgcggaggaattcaaacagaaatttgaagaatgccaacgactgctgcttgacataccactgcagactccccacaagctggtcgacactgggagggctgccaagctgatccaaagggcggaggagatgaagagcggcttgaaagattttaaaacattcctgacgaatgatcaaaccaaggtgacggaagaggagaataagggctcgggcaccggagccgccggcgcctccgatacaaccatcaagcctaatcccgaaaacaccgggccaacgctggaatgggataattatgacctacgtgaagacgctttagacgataacgtttcctccagcagcgttcacgactccccccttgccagctctcccgtgaggaaaaatatctttagattcgatgaaagcacaacaggtttcaattttagttttaagtccgcactgtctcttagtaagagtccagcaaaactgaaccaatcaggcacgagtgtcggtaccgacgaggagtccgacgttacacaggaggaggaaagagacggccaatatttcgaacctgtagtgcccctgccagatctggtggaggtgtcatcaggcgaagaaaatgaacaggtggtcttttctcacatggcagaactgtatcgctacgataaggacgtggggcagtggaaggaacgcgggatcggggacataaagatcctgcaaaattacgacaataagcaagttcgcatcgtaatgcggagggatcaggtgctcaagctttgcgctaaccaccggatcacccccgacatgtctctccagaatatgaaaggcaccgaaagggtgtgggtctggacagcctgcgacttcgccgatggcgagcggaaagtcgagcaccttgctgtcaggttcaagctccaggacgtggccgatagctttaaaaagatcttcgacgaggctaagactgcccaggagaaagacagcctgatcacgccgcacgtgagtaggagttccacaccccgggaatccccgtgcggcaaaattgcggttgccgtgttagaagagaccaccagagagcgcacagatgtaatccagggagatgatgtggccgacgccgcctcagaggtggaggtgtcctctacctccgaaactacaacaaaagctgtggtcagtccccccaaatttgtctttgggtctgagtcggttaaaagaatattctcctctgagaagtccaatccattcgcctttggaaattcctctgcgaccggaagcttgtttgggttctcttttaatgcccctctcaaatcaaatgacagcgagacgagttcagttgcacaaagcgggagcgagagcaaagtggaacccaagaaatgtgagctctcaaaaaacagcgacatcgaacaaagctccgatagcaaagtaaaaaaccttagtgcatcatttccaatggaggagtctagcattaattatactttcaaaacccccgaaaaggagccccccctatggcacgccgaattcaccaaggaggagctcgtgcaaaaactgtcttctaccactaaaagcgccgatcagttgaacggactgctgcgagagaccgaggccactagcgccgtcctgatggagcagatcaagttgttgaagtccgagatcagaagattggagagaaaccaggaagagtccgctgccaatgttgaacatcttaagaatgttctgctgcagtttatcttcctcaaacccggctctgaacgtgagagcctactgcccgtgataaacaccatgctccaactctctccagaggagaagggaaagctggccgctgtcgcacaaggcctccaggagactagtatccctaagaaaaagtag

SEQ ID NO: 202500 - DNA, 5271 bp, synthetic construct
  misc_feature 1..5271: note = Description of Artificial Sequence: Synthetic coding sequence
  source 1..5271: mol_type = other DNA
atgcggcggagcaaggcctacggcgagcggtacctggccagcgtgcaggggagcgccccaagtcccgggaaaaagctcaggggcttttatttcgccaaactctactatgaagccaaagagtacgatttggccaagaagtacgtgtgtacctacctgagtgtacaggaacgtgaccctagggcacacagatttctcggcctcctgtatgaactcgaagaaaataccgaaaaagcagtggagtgctatcggcgatcattagaactcaatcctccgcagaaggacctcgtgcttaaaatagctgagctcctttgtaaaaacgacgtaaccgacggacgagccaagtactgggtggagagagccgccaaactgttccccgggagtcctgccatatacaaacttaaggagcatttattggattgcgagggtgaggacggctggaacaagttgttcgattggatccaatctgagctgtatgtgcgaccagacgacgtgcacatgaatattagattggtggagttgtatcgttccaataagcggcttaaagatgccgtggccagatgccacgaggccgagcggaacatcgctctgcggtcgagtctcgagtggaacagctgcgtggtacagacactaaaagagtacctggaaagcctgcagtgcctggagagcgacaagtccgattggcgagccacaaatactgacctgttgctggcttatgctaacctcatgttgctgacacttagtacccgcgatgtccaggaaagccgggagcttctggagtcttttgattccgccctccagtctgccaagagctctctaggcggtaatgacgagctgtctgccacctttctggagatgaaggggcacttttacatgcacgcagggtccctcctactcaagatgggccagcatggcaacaatgtgcagtggcaggcactctcagagttggcagcgttatgctatgtgattgcgtttcaagtacctcgcccaaaaataaaacttatcaagggtgaggctggccagaacctgctggagatgatggcctgtgatagactgagtcagtcgggacacatgctgttaaacctttcacgagggaagcaggattttttgaaggaagttgtggagaccttcgccaacaagagcggacagtccgtcctttataacgccttgttcagctcccaatctagcaaggacacgagcttcctggggagcgacgacatcggcaatattgacgtccaggaaccagagctcgaggatctcgctcggtacgacgttggagctatacaggcccacaacgggtctctgcagcatctgacctggctgggcctccagtggaactccttacccgccctcccggggattagaaagtggctgaagcagctatttcaccatctcccccaggagacctctcgcttggaaaccaacgcccctgaaagcatctgcatcctggatctggaagtgtttttactgggagtggtgtacaccagccacctgcaactaaaggagaagtgtaacagccatcacagctcctaccagcctttgtgtctccctctgcctgtgtgtaagcgtctctgcactgagcgtcaaaagagctggtgggatgcagtctgcaccctgattcaccgaaaggcagtgcccggaaactctgccgaactcaggctcgtggtccagcacgagatcaataccctgagggcacaagaaaagcatggacttcagccagccttactggttcattgggccaagtgtctgcagaagatgggcagggggctcaactccagttacgatcagcaggaatacattggaagatctgtacactattggaagaaggtgctgcccctcctgaaaatcatcaaaaagaactccatccccgagcccatcgacccacttttcaagcactttcactctgtggatattcaggccagcgagatcgtcgagtatgaggaagatgctcacataacctttgcgatactggacgctgtgcacggtaacatcgaggacgccgtgacagccttcgaatctatcaaaagtgtcgtttcctactggaatcttgcattaatatttcatcgcaaggccgaggacatagaaaacgatgccgtgtttccagaagagcaggaagaatgcaagaattatctgagaaagaccagggactacctgatcaaaataatcgacgactctgactctaacctcagtgtcgtcaaaaagctgcccgtgcctctggaatctgtgaaggagatgctgaaatcagttatgcaagagctggaggattattctgagggagggcccctctacaaaaatggctctctgagaaacgctgatagcgaaattaagcattccacgcccagtcctactaaatacagtctgagtccctctaagtcttacaagtacagccccaaaactcccccccgatgggccgaggaccagaattccctcagaaagatgatctgtcaagaggtgaaagccattactaagctcaacagttccaagtcagcatcgagacaccggtggccaaccgagaactatgggccggatagcgtaccagatggataccaaggaagtcagacctttcatggcgccccactaactgtggcgacaactgggccttctgtgtattatagccagagtcccgcttacaattcccaatatcttctgcgcccggccgccaacgtcacccccacgaaaggctctagcaacaccgaatttaaatccactaaggaggggttttctatcgccgtgagcgccgacggctttaagttcggaatttccgagcccgggaatcaggagaagaaaagcgagaaacctctcgaaaacgataccggatttcaggctcaggatattagcggacagaaaaacggccgcggggtaattttcgggcagactagctccacttttactttcgctgatgtggccaagagcacaagcggagaagggttccagttcggtaagaaagatcccaactttaagggattctcaggggctggggaaaagctgttttcaagtcagtgtggaaaaatggcaaacaaagcaaacaccagtggcgacttcgagaaggacgacgacgcctgtaagaccgaggacagtgacgacattcattttgaacccgtggtgcagatgcctgagaaggtggagttagtgactggcgaggagggagagaaggtcctgtactcgcagggtgtgaaattgtttcggttcgacgctgagatctcccagtggaaggaacggggtctcggcaacctgaagatcctgaagaacgaagttaatggaaagcctcgcatgctcatgcgccgggaccaggtgttaaaggtgtgcgcaaaccactggatcaccaccaccatgaacttgaagcccctgagtggctcagatcgcgcatggatgtggttggcctccgacttcagtgatggcgatgccaagctggaacggctcgcggctcaatttaagacaccagaattagccgaggagttcaagcagaagttcgaggagtgccagcgcctgctgctggatatccctctgcaaactcctcataaactggtcgatactggacgggcagctaagcttatacaaagagcagaagagatgaaatcaggactcaaagacttcaagacctttctgaccaacgatcagaccaaagttactgaggaggagaataaagggagcggcactggggctgcgggtgcctccgacactacaataaaaccaaatccagagaataccggccccaccctagaatgggacaactacgacctccgggaagatgccctggacgacaacgtttcatcatcctccgttcacgactcccctctggcgagctccccagtgcgtaagaacatttttcgcttcgatgagagcaccaccgggtttaacttttcgtttaagagcgccctttccctctccaaatctcccgcaaagctgaaccagagtggtaccagcgttggcacagatgaagagagtgatgttactcaggaggaagagcgagatgggcagtacttcgaacccgtggtgccgctgcccgatctcgtggaggtaagttctggcgaagagaatgagcaggtggtattctcccacatggctgagctgtataggtacgacaaagacgtggggcaatggaaggaacgagggattggagatatcaaaattctgcaaaactatgacaacaagcaggtgcgcatcgtcatgagacgtgaccaagtgctgaagctgtgtgctaatcataggatcactcccgatatgtcactgcagaacatgaaaggcacagagcgcgtgtgggtttggacagcatgcgacttcgctgatggcgaacgcaaggtggagcacctcgccgtcaggtttaaactgcaagacgtggccgactcttttaagaaaatctttgatgaagccaaaaccgctcaagaaaaggactccctcataactcctcacgtatctaggtcgagcactcccagggagagcccttgcggtaagatagcggtagcggtgttggaggagacaaccagagaacgcaccgatgttatccagggagatgacgtggctgacgctgcctccgaggtcgaagtaagctcaactagcgaaactactactaaagctgtggtgagcccccccaagttcgtattcggctcggaaagcgtgaaaaggatttttagctctgaaaaaagcaaccccttcgcctttggaaatagttccgccacgggctccctgttcggattctctttcaacgcacctctgaagagtaatgattctgagaccagctccgtggcccaatcagggagtgagtctaaggtggaaccgaagaaatgtgaactcagtaaaaacagtgacattgaacaaagtagtgattccaaagtgaagaatctttccgcaagttttcctatggaggaaagttcaataaattacacatttaaaaccccggagaaagaacctcccctgtggcacgcagagtttacaaaggaggaactggtccagaagctatcctccaccacaaagagtgcggatcagcttaacggcttacttcgcgaaaccgaggctacctctgccgtgttaatggagcaaattaagctgctgaagtcagagattaggcggctggagcgcaaccaagaggaaagcgccgccaatgttgaacacctcaaaaacgtgctgcttcagttcatttttctgaagcctggatctgaacgagagagtctgttgccagtgataaatacaatgctgcagctctctccagaggagaagggcaaattagctgccgtggctcaaggactgcaagaaaccagtatcccaaaaaaaaaatag

SEQ ID NO: 202501 - DNA, 5247 bp, synthetic construct
  misc_feature 1..5247: note = Description of Artificial Sequence: Synthetic coding sequence
  source 1..5247: mol_type = other DNA
atgaacgtgatgggcttcaacaccgaccggctggcctggacccggaataaactgagaggcttttactttgccaaactgtactacgaggcaaaggaatatgacctagcaaagaagtacgtttgtacttacctcagcgtgcaggagagggaccctagagcccaccgttttcttggactcctgtacgaactagaggagaatacagagaaggccgttgaatgctataggcgcagtctggaacttaatcctccgcaaaaggatctggtgctgaagatcgccgagctgctttgtaagaatgatgttactgatgggagggcaaagtactgggtcgagcgtgctgctaagctcttccctggaagcccagcgatttacaaactgaaggaacatctcctagactgtgagggagaagacgggtggaacaagcttttcgattggattcagagtgagttgtacgtccgcccagacgacgtgcacatgaatatccgacttgtggagctctacagatctaacaagcgccttaaagatgctgtggctcgctgccacgaggctgagcgcaacatagctcttcggtcctcccttgaatggaacagttgtgttgttcagaccctgaaggaataccttgagagtctgcaatgtttggagtccgataagagtgattggcgagccaccaatacagacctcctcttggcgtacgcaaacctgatgctgcttacgcttagtactagagacgtgcaggaatcaagggagctactcgaatctttcgactccgctctccagtcggccaaaagctctttaggggggaatgatgagctgtcagcgacgtttcttgaaatgaagggccacttctacatgcatgccggctcattgctgcttaagatggggcagcacggtaataacgtacagtggcaagcactgtctgaactggccgcactgtgttacgtaatagctttccaggttccgaggcctaagatcaagcttatcaagggtgaagccggccagaatctgctggaaatgatggcctgcgaccgactgagtcagtcaggacatatgctcttgaacctgtcgagaggcaagcaggatttcttaaaggaggtggtggagacctttgctaataagagcggccagtccgtgctgtacaacgccctattttcttctcagtcttcgaaggatacttcctttctggggagcgacgatataggaaatattgacgtgcaggaaccagagctagaagatctggccaggtacgacgtgggggccattcaggcacacaacggctcactgcaacacctcacttggctgggtttacagtggaatagcctccccgccttacccgggatccggaagtggctgaaacagcttttccaccacttgccccaggagacaagccggttagagacaaatgcccctgagagcatctgcattctggatctggaggtgttcctgctgggggttgtgtatacatcccacctgcaacttaaggagaagtgcaacagccatcatagcagctatcagccactgtgccttcccctgccagtttgcaagcgactgtgcaccgaacggcagaaatcttggtgggacgcggtttgcactttaatccaccgaaaagcagtgccaggcaattctgcggagttgaggttggtggtgcagcatgagatcaataccctgcgcgcacaggaaaaacacggcctccagccagctctcctggtgcactgggccaagtgtctccagaaaatgggcagaggactgaattcaagttatgaccagcaggagtacattggtcgctctgtgcactattggaaaaaggtcctaccactgctgaagatcatcaaaaagaattctattcccgaacccatcgaccctctcttcaagcatttccacagcgtagatattcaagccagtgaaatcgttgaatatgaggaagatgcacacattacttttgccatcctcgatgctgtgcacggtaacatagaagacgcggtcaccgcattcgagagcatcaaatctgtggtttcatactggaacctggccctcatttttcacaggaaggccgaggacattgagaatgatgccgtttttcccgaggagcaagaagaatgtaagaactacctcaggaagacgagggactatttgataaagatcatagatgatagcgactcaaatctgagtgtcgtgaagaaactcccagtcccgcttgagtctgtgaaagaaatgctcaagtctgttatgcaggaattagaagactattcagagggtgggcccctgtataaaaacggttctttacgcaatgccgactctgagatcaagcattccactccctccccgaccaaatattctctatctccgtctaaatcctacaagtatagtccaaaaactcctcctaggtgggcggaagaccaaaatagtctgagaaaaatgatctgccaggaagttaaggctatcaccaagcttaacagctccaaatcggcctccagacaccgatggccaaccgaaaattacggaccagacagcgtccccgacgggtaccagggatctcaaacattccatggagcacctctcacagtggctacgactggcccatctgtgtattacagtcaatctcctgcttataactctcaatatctgctgcgccctgcagccaatgtgacgcccacgaaggggtctagtaacactgagttcaaaagcactaaagagggtttcagcatcgcagtgtcagccgatggatttaaattcggcatttctgaaccgggaaaccaggagaaaaagagcgaaaaacctctggagaatgataccggatttcaggctcaggacatctctggacagaaaaacggccgcggcgttatcttcgggcagacctcgagcacttttacctttgctgatgtggccaaaagcaccagtggggaaggattccagtttgggaagaaagaccccaatttcaaaggattcagtggtgcaggggagaagttgtttagctcacagtgcggcaaaatggccaacaaagccaacacctctggagattttgaaaaagatgatgacgcatgtaagaccgaggatagtgatgatattcacttcgagcccgtcgtccagatgccggagaaggtggagctagtcacaggtgaagaaggcgaaaaagttctgtactcccagggcgtaaaactgttccggttcgacgccgagattagtcaatggaaggagagaggcctgggaaatctcaaaatccttaagaatgaggtcaatggcaaacctaggatgcttatgcgaagggatcaagtactgaaggtgtgtgctaatcactggattacaaccaccatgaatctcaagccactctctggcagtgaccgggcgtggatgtggcttgccagcgactttagtgatggtgacgcaaagctggaaaggctggccgctcaattcaagactcctgagctggccgaagaattcaagcagaaatttgaggagtgccagcggctcctactcgacatccccctgcagactccacataagcttgtcgacacaggacgggcggctaaactcatccagcgcgcggaggaaatgaaaagtggcctgaaggatttcaaaacatttttaaccaatgatcaaaccaaggtaaccgaggaagagaataagggctccggcaccggcgctgcaggcgcgagcgacaccacaatcaagccaaaccctgaaaacacaggccccacgttggagtgggataattatgatctcagggaggatgctttggacgataacgtatcctcaagctcagtgcacgacagccctctggcctcgtcacccgtgaggaagaacattttccgattcgatgaatccacgaccggctttaacttcagcttcaagtcagccctgtcattatcaaagagccctgcgaaactgaatcaatcgggaacctcggttgggacagacgaggaatcagatgtaacccaggaggaggaacgcgatggacagtattttgaacccgtggtgcccctgcctgacctggtagaggttagtagtggggaagagaacgagcaggtggtcttctcacacatggccgaactgtataggtacgataaggacgtgggtcagtggaaggagcgtggtatcggggatattaaaatcctccagaattatgataacaaacaagtccggatcgttatgaggagggatcaagtgctgaaactgtgtgctaaccatcggatcacacctgacatgtcgctgcaaaatatgaagggaaccgaacgtgtgtgggtgtggacagcctgcgattttgcagacggcgaacgcaaagttgaacacctagctgtgcgctttaagttgcaggatgtggccgactcttttaagaagatctttgatgaagcaaagaccgctcaggagaaagactccctgataactccacacgtgagccgcagctcaaccccacgtgaatcaccgtgtggcaaaattgctgtggccgtattggaggagactactagagaacgaaccgatgtcattcagggcgatgacgtcgcggatgccgcgtcagaggtggaggtatcttctacgagcgagacaactactaaggccgttgtgtcgccaccaaaatttgtcttcgggagcgagtccgtgaagcgaatattctcttcagaaaaatccaacccatttgcgttcggcaactcatcggccacaggaagcttgtttggcttctccttcaacgcgccactgaagagcaatgactcagagacctcttctgttgcacagtccggcagtgagtcaaaagtggaaccaaagaagtgtgaattatccaaaaattcagacatagagcagagctctgactccaaggtgaagaatctgagtgcttctttccccatggaggagagcagcataaattatacattcaaaacacccgagaaggagcctccactttggcacgccgagtttaccaaggaggagctcgtgcagaagctctcctctacaactaagagcgcggaccagcttaacggtctgttgagagagacagaggcaacttctgctgtcctaatggagcaaattaagttgttgaaaagtgagattaggcggctagaacggaatcaagaggaaagtgcagcaaatgtggaacacctgaagaacgttctcctgcagttcatctttctgaagcctgggagtgagagagagagcctcctccccgtgattaatactatgctgcagctgtcaccagaagagaaagggaagcttgctgcagtcgcccaggggttacaggaaacttccatcccgaagaagaaatag

SEQ ID NO: 202502 - DNA, 1935 bp, synthetic construct
  misc_feature 1..1935: note = Description of Artificial Sequence: Synthetic coding sequence
  source 1..1935: mol_type = other DNA
atgctgatgcggcgggaccaggtgctgaaggtgtgcgccaaccactggattactacaactatgaatcttaaacctttgagcggctctgaccgtgcgtggatgtggctcgccagcgacttctctgacggggacgcgaaactcgagagactggcagcacagttcaagactcccgaactcgccgaggagttcaaacaaaagttcgaagagtgtcagcgtctgctgctcgacatcccccttcagactccacataagctggtagatacagggagagccgccaagcttatccagcgcgcagaggagatgaaatccggcttaaaagacttcaagactttcctaaccaacgatcagaccaaggtgaccgaagaggagaataaaggctccggcacaggcgcggccggcgcaagcgacaccacgataaagcccaacccagaaaacactggcccaactctcgaatgggataactatgatctgcgcgaggatgcccttgacgataacgtgtcttcctctagcgtgcacgacagcccactcgcaagcagtcctgtgcgcaagaatattttccggttcgacgagtctaccaccggcttcaacttcagtttcaagtccgctctttcccttagtaagagtcctgccaagttaaatcagagcggaacatctgtagggactgacgaggaatccgatgtcacccaggaggaagagagggatggccagtactttgagcccgtagtgcccctaccagacctggtcgaggtgagtagtggggaggagaatgaacaggtcgtgttctctcacatggccgaactctaccgctatgataaagatgtagggcagtggaaggagcggggtataggagacatcaagatcctccagaattacgacaacaagcaggtacgtattgtgatgcgacgagaccaggtcctgaagctttgcgccaatcatcgcattacccccgacatgtcattacagaacatgaaaggcaccgaacgggtatgggtgtggaccgcctgcgactttgccgacggcgagagaaaggtagagcatctggcagtgcgttttaaactacaggacgtcgccgactcttttaaaaagatatttgacgaggccaaaaccgcccaggagaaggactctcttattacacctcacgtatccaggtcctctaccccgcgagaatccccttgcggcaaaattgctgtggctgttctggaggagactaccagggagcgcaccgacgtgattcaaggagacgatgtcgcggatgcagctagcgaagtggaagtgagtagcacctcagagaccaccaccaaggccgtggtaagcccacctaaatttgtgttcggttctgaaagtgtgaagcgtatcttcagctcagaaaaatcaaatccctttgcttttggtaactcttcagcgaccgggagcctgtttggtttttcctttaacgctcctcttaaatcaaatgatagtgagactagcagcgtagctcaatctggctcggaatccaaagtagaacccaaaaagtgtgaactatcaaaaaactcggacatagaacagtcctccgacagtaaggtcaagaatttgtcagcttcatttcctatggaagagagttccatcaactacacctttaaaacgcctgagaaggaacctcccctttggcacgccgagttcacgaaggaggaattagtccagaagctaagctccactacaaagagtgctgatcagctgaacggactgctgagggagacagaggctacctccgctgtgctgatggaacagattaagctgcttaaatcggagatcaggaggctggaacggaaccaggaggagagtgcggcgaatgtcgagcaccttaagaatgtcctcctgcagtttatttttttgaaaccaggtagtgaacgggagccgtcttcgtgctataagtacgatgtcgctgctcagccttag

SEQ ID NO: 202503 - DNA, 5301 bp, synthetic construct
  misc_feature 1..5301: note = Description of Artificial Sequence: Synthetic coding sequence
  source 1..5301: mol_type = other DNA
atgagctgcagcaaggcctacggcgagcggtacgtggccagcgtgcaggggagcgcccccagtccccgaaagaagtcgactcgcggattttatttcgctaagttatactatgaggcaaaagaatatgatctagccaaaaaatatatctgtacttacattaacgtgagggagatggatccacgagctcaccgattcctgggcttgctgtacgagttggaggagaacacagaaaaggccgtggagtgctatcgtcggtccgttgagctcaacccaacgcagaaagacctggtgctaaaaatcgccgagctgttatgcaaaaacgacgtaaccgacggacgggccgaatactgggttgaaagggctgctaagctgtttccaggatctcctgccatttacaaattaaaggagcagctcctcgactgtgagggtgaggacggctggaacaaacttttcgatctgatacagtccgagctgtatgtgagaccagatgatgtccatgtcaacataaggctcgtcgagctgtaccggtcaaccaaaaggcttaaagatgccgttgcccgctgtcacgaagcagagcgtaacatcgccctgaggagctcgctggaatggaacagctgtgtggtgcagaccttaaaagagtacctggaatctctgcaatgcctcgaaagcgataagagtgattggagggccacaaacacagatcttctgctagcatatgctaacctcatgctgctaaccctctcaaccagagacgtgcaggagagtagagagcttctcgaaagctttgattcggccctccagtcagctaagtcaagtctcggcggaaacgacgaattgagcgctacattcctagaaatgaaggggcatttttatatgcatgccggctcattactgctgaagatgggacagcacggcaataacgtgcagtggcgcgctctgagtgaattggccgctttatgttatctcattgcattccaggtccctaggcccaagattaaactcatcaaaggtgaggctggacaaaacttactggagatgatggcgtgtgatagactgagtcagagcggacatatgctgctgaacctgagcaggggtaagcaagatttcttaaaggtggttgtggaaacctttgccaacaaaagcggtcaaagtgctctgtatgacgcactcttcagctcacagtcccctaaagatacttcatttctgggttctgatgacattggaaacatagatgtgcaggaaccagaactggaggatctcgcgaggtacgacgtgggcgctattcgagctcataacggatctctgcaacacctgacctggttgggactacaatggaactcattgcccgctcttcctggaattagaaaatggcttaagcagcttttccaccacttgccccaggagacctcgcgattggagacaaatgcaccagagagtatttgtatcctggacctagaggtttttctcttgggcgtggtctacacaagtcatttgcagctgaaggagaagtgcaattctcatcactctagttaccagcccctatgcctcccactgcccgtgtgtaagcaactgtgcactgaacgccaaaaatcatggtgggatgcagtttgtacacttatccacagaaaggccgtgcccgggaatagtgcaaagctacggctgctagtgcaacacgaaattaatactctaagagcgcaggagaaacatggattgcagcccgcactcttggtccattgggcaaagtgtctgcagaagatggggagtggcctcaactcgttctatgaccagagagaatacatagggcgatcagtgcattattggaagaaagtcttaccactcttaaaaattatcaagaagaagaattcgattcccgagcctatcgatccgttattcaagcactttcattctgttgacatccaggcttcagaaatagtcgagtatgaagaggatgctcacgtaacgttcgcaatcctcgacgcggtgaatggtaatatcgaagatgctatgacagcatttgagtctatcaaatcagttgtttcttactggaacctagctctcattttccataggaaggcagaggatattgccaacgatgccctgtcaccagaggaacaggaggaatgcaagaactacctgaggaaaacacgaggttacttgataaagatcctcgacgacagcgactccaacctctccgtggttaagaaactgcccgtgcctctggagagcgtgaaggaaatgctgaagtctgtgatgcaggaactggaaaattattcggagggcggccccctttataaaaacgggtccttgcggaacgccgactccgagatcaagcattctactccatctcctacaaaatactccctaagtccatccaagtcttacaagtactcccccaagacacccccgcggtgggccgaggatcaaaacagcttgttgaagatgattcgccaggaagtgaaagccattaaggaggaaatgcaggaattaaaattgaactcgtccaagtctgcttcgcaccacagatggccgaccgagaactacggccctgacagcgtgccggatgggtaccaaggcagccagacgtttcatggagccccgctgactgtggccacaactggtccatctgtgtactacagccagagcccagcttataacagccagtatctcttgaggccagcagccaatgtcactccaaccaagggtagtagcaacactgagttcaaaagcactaaagagggatttagtatcccagtttccgcagatggtttcaaatttggaatctccgagcctggcaatcaggagaaaaagtccgagaagcctctagagaacgacaccggtctacaggcacaggatatttcaggacggaaaaaaggccgcggagtgatcttcgggcagacatcgagcacctttacattcgccgacgttgctaaaagtactagtggagagggctttcagtttggcaagaaagatctgaatttcaaaggattttcgggagcaggcgagaaacttttttcctcccagtatgggaagatggctaacaaggccaatacttcaggggactttgaaaaggatgatgacgcctacaagaccgaggatagcgatgacattcattttgagcctgtggtgcaaatgccagagaaagtggaattagtgacaggcgaagagggtgaaaaagtgttgtattcccaaggggtgaaactattcaggttcgacgctgaggtctctcagtggaaagagcggggcctgggcaacctgaagatcctgaagaacgaggtcaatggcaaagtgcgcatgctgatgcagcgtgagcaggttttgaaagtatgcgctaaccactggataactaccactatgaacctgaaaccattatcaggatcagatagggcatggatgtggtccgcatccgacttcagcgacggcgatgcaaagctggagcggctggcggccaagtttaagacccccgagctcgcagaagaatttaaacagaagttcgaagagtgccagcgcctgctcctcgacatcccactgcagactccacataaactagttgatactggaagggccgcgaaattaatccagcgcgccgaagagatgaagtccggcttaaaagatttcaagacttttctcactaacgaccaaaccaaggtggccgaggaggaaaataaggggtcaggcaccggcgcagcgggcgcctctgatacaaccatcaagcccaacgctgagaacactggtcccaccctggaatgggacaactatgacctgcgagaggatgctctggatgactctgtctcctcctccagcgtgcatgcttctccactggcttctagtccagtcaggaaaaacctgtttcactttgatgaatccacaaccggtagcaatttttctttcaaaagcgcactctccttgagcaagagccctgcaaaacttaatcagagcgggacctcagtggggaccgacgaggagagcgatgttacacaggaagaggaaagagacggccaatattttgagcccgtggtgcctctgcccgatctggtcgaagttagctccggggaggagaacgagcaggtggttttttctcacagagccgagttctatcggtacgacaaagatgtcggccagtggaaggagcgggggatcggggacatcaaaatcctgcagaattacgacaacaaacatgtgaggatcctcatgcggagggaccaggtacttaaactttgtgctaatcacagaattaccccggatatgagccttcaaaatatgaaaggcaccgaacgtgtttgggtttggactgcatgcgacttcgcggatggagaacgaaaggtggagcacttagcggtacgctttaagctgcaggacgttgcggacagttttaagaaaatcttcgacgaagctaaaaccgctcaggagaaggactcactcattacacctcatgtctcccgctcctccacccccagagagtctccttgcggcaagatcgccgtcgccgttttggaagagactactcgggaacggacggacgtgatccagggagacgacgttgctgatgctgcatctgaggtcgaggtctcatctacgtctgagacaaccaccaaggccgtcgtaagcccgcccaagtttgtgtttggaagcgagtctgttaaacggatattctctagcgaaaagtccaagcctttcgcctttgggaactcttctgctaccggctcattatttggattttcttttaatgccccactcaagagcaataactcagagaccagctctgtggcccagtctggatcagagtcaaaggttgagcctaaaaagtgtgaactttcaaaaaactctgatatcgaacagagctccgactccaaagtcaagaacctctccgcaagctttcctactgaggagagtagcatcaattacacctttaaaacacctgaaaaggagccaccactctggtatgctgaattcacaaaggaagaactcgtgcagaaactgagttcaacaactaaatcagccgatcacctaaatggccttctgagggagatcgaggcgacaaacgcggtgttgatggaacagatcaagctgctcaaatctgaaatccgaagacttgagaggaatcaggaacaggaagtcagcgccgcaaacgtggaacatttgaaaaatgtcctcctgcagttcatctttctcaagccggggtccgaacgtgaaaggttattgccagtgatcaacactatgcttcagttgtctctggaggagaagggcaagctcgccgccgtggcacaggccgaacgcgggtttgttttaaactctacattctag

SEQ ID NO: 202504 - DNA, 471 bp, synthetic construct
  misc_feature 1..471: note = Description of Artificial Sequence: Synthetic coding sequence
  source 1..471: mol_type = other DNA
atggacccccgggcccaccggttcctgggcctgctgtacgagctggaggagaatactgaaaaggcggttgagtgttataggcggagtgtggagctgaaccccactcagaaggatcttgttctgaagatcgctgagctgctgtgcaagaacgatgtaaccgatgggagagcagaatattgggtggagagagctgctaagctgttccccggctcacctgccatctataagctgaaagagcaactgctagactgcgagggagaagatggctggaacaaactctttgacttgattcagtccgagttatatgtgcgcccagatgatgtgcacgtcaatattcgattggttgagttgtaccggagcactaaacgtctgaaggacgcggtggcccgatgccatgaggccgagaggaacatagcactgaggtcctctctcgagtggaattcctgcgtggtccaaacattgaagttctag

SEQ ID NO: 202505 - DNA, 3378 bp, synthetic construct
  misc_feature 1..3378: note = Description of Artificial Sequence: Synthetic coding sequence
  source 1..3378: mol_type = other DNA
atgctgctgaccctgagcacccgggacgtgcaggagagccgggagctcctagagtctttcgattccgccctccagtcggccaagtcttcactgggggggaatgacgaattaagtgccacttttctcgagatgaaggggcacttctatatgcatgccggcagccttcttctaaagatgggccagcacggaaacaatgtccagtggcgtgcacttagtgaattggcagctctatgctacctcattgcctttcaggtgccccgacccaaaataaagctaatcaagggtgaagccggccagaacctgttagagatgatggcctgtgacagactgtctcaatccggccacatgctgctgaatttaagccgcggcaagcaggactttttaaaagtggtggtggaaacctttgcaaataaaagtggtcagtcagcgctttatgatgccttatttagctcacagtctccaaaggatacgagctttctgggaagtgacgacatagggaatatagacgtgcaagagcccgagctggaggatcttgctaggtatgacgtaggcgccatccgagctcataacggaagcctgcaacacctgacttggctaggactccagtggaacagccttccggctttgcccggcattcgcaaatggttaaagcagctgtttcaccacctgccccaggagacttcccgcctagaaacaaacgcacccgagtctatctgtatcctcgatctggaggtcttcctactaggtgtcgtttatacttcgcaccttcaactcaaagagaaatgcaacagtcaccatagtagctatcaacctttgtgcctgcctttaccggtgtgtaaacaactatgcacagagcgtcagaaatcttggtgggacgctgtgtgtaccctgatccatcgaaaagcggttcctggcaatagcgccaagctgcggctgttggtccagcatgaaatcaacaccctccgagctcaagaaaagcatgggctgcagccagctctgctggtgcattgggcgaagtgtctgcagaaaatggggtccgggctgaattctttctatgatcagagagagtacatcggtaggtctgttcactactggaagaaggttttgccacttttgaaaatcattaaaaaaaagaatagcatccctgagccgatagatcctctttttaagcactttcactccgtcgatatccaggcatctgagatcgtggaatacgaggaggacgcccatgtaaccttcgctatccttgacgcggtgaatggaaatattgaggacgccatgactgcttttgagagcatcaagagtgtggtctcttactggaacctggcactcatcttccataggaaggctgaagatattgctaatgatgctttgtcacccgaagaacaagaggaatgtaaaaactacctgcggaaaacacggggatacctaattaaaatcctagatgactcagacagcaacctctccgtcgtgaagaagctgcctgtccctttggagagcgtcaaggaaatgctgaagtctgtgatgcaggagctggagaattacagcgagggtgggcccctgtataaaaacgggagtctgcgtaacgccgattccgagataaagcacagcacaccatcacctacaaagtatagtttgtccccctccaagtcctacaagtatagccctaaaacgcccccaaggtgggccgaagaccaaaacagcctgctgaaaatgattcgacaggaggtgaaggccataaaggaggaaatgcaggaactgaaactcaattcctccaagtctgcatcccaccatcggtggcccaccgagaattatgggcccgatagcgtcccggacggctatcaagggagccagacctttcatggtgcaccactgaccgtggcaacaaccggccctagcgtgtattacagtcaatcccctgcctataattctcagtacctcctcagacctgcagctaatgtgacccccaccaaaggctcgtccaacactgaattcaaatccacaaaagaagggttctcaatcccagtcagtgccgatggattcaaatttggaatttcggagccggggaatcaagagaagaaaagcgagaaacccctggagaacgacacaggcttgcaggcgcaggatatctcggggcggaagaaaggccgtggggtgattttcggccagacgtcttcaacttttacatttgccgacgtggccaagtcaacttctggcgagggctttcaattcggaaaaaaggatttgaatttcaagggcttcagtggtgccggcgaaaaactgttctctagccagtacgggaagatggcgaacaaagctaacacctctggcgattttgagaaagacgacgacgcctacaaaacggaagactccgatgacattcacttcgaacccgtcgtgcaaatgcccgaaaaagtggaactagtgaccggagaggagggcgaaaaggtgctgtacagccagggggtcaagctgtttcgatttgatgccgaggtcagccagtggaaagagagagggcttggcaatctgaaaatactaaagaacgaagtgaacggaaaagtgcgcatgctaatgcagcgagagcaggtgctgaaagtctgcgcaaatcactggattaccaccactatgaatctgaaacctttaagtggctcagatcgagcctggatgtggtcagccagtgacttttcagacggagatgccaaattagagcgtttggccgcgaaattcaagacccctgaactggcggaagagtttaagcagaaattcgaggaatgccagcggctgcttttagacatccccttacagactcctcacaagttggttgatactggcagggcagctaagctaatacaacgcgcagaggagatgaaatcaggaagcgaatcaaaggtggagcccaagaaatgtgagctgagtaaaaactctgatatagagcaatcaagcgactcaaaggtaaagaacttgtctgctagctttccgaccgaagagtcaagcatcaattatacattcaagaccccagaaaaggagccacctctatggtatgcggaatttactaaagaagaactggtccaaaaattgtcatctactacgaagagcgcagaccacctcaacggtctgctgcgcgagatcgaggcgaccaatgcagtgcttatggagcagatcaagctgctgaagtctgaaatccgccgactggaaaggaatcaggaacaggaagtttccgcggctaatgtggagcatttgaagaacgtgctattgcagtttatctttctgaagcccggctcagaacgagagaggctactccctgtgatcaatacaatgctacagctgagtttggaagagaaggggaaactcgccgcggtggctcagggtgaggagtag

SEQ ID NO: 202506 - DNA, 423 bp, synthetic construct
  misc_feature 1..423: note = Description of Artificial Sequence: Synthetic coding sequence
  source 1..423: mol_type = other DNA
accgaggagagcagcatcaactacaccttcaagacccccgagaaggaaccccccttgtggtacgctgagttcaccaaggaggaactcgttcaaaaactgagttccactacgaagtcggccgatcacctcaatggactccttagggaaatcgaggccacaaacgcagtgcttatggaacagattaaattgctcaaatcagagatcaggcgtctcgagaggaaccaagagcaagaagtgtctgccgctaatgtggaacacctgaagaacgtcctcttgcaatttatcttcttgaagcccgggtcggaacgggagcggcttctgcccgtaatcaatactatgctccagcttagcctcgaagagaaagggaagctggctgcagtagcccaggggctacaggagacatcgatcccgaaaaagaaatag

SEQ ID NO: 202507 - DNA, 5277 bp, synthetic construct
  misc_feature 1..5277: note = Description of Artificial Sequence: Synthetic coding sequence
  source 1..5277: mol_type = other DNA
atgagctgcagcaaggcctacggcgagcggtacgtggccagcgtgcaaggctctgctccctctccccgcaaaaagtccacccgtggtttctacttcgcgaagctgtactacgaagccaaagaatacgatctcgcaaaaaaatacatatgtacgtacatcaacgtgcgtgaaatggaccctagggcgcaccggtttctcggcttgctgtatgagctggaagagaatacggagaaagctgtcgaatgttacaggcgttccgtcgagctaaatcccacgcagaaagatctggttttgaagatcgctgagctcttgtgtaagaatgacgtcacggacgggcgagcggagtactgggtggaaagagccgccaaactgttccccgggtccccagcgatctacaagcttaaagagcagcttctggactgtgagggtgaggatggctggaacaagctctttgatctcatccagtctgaactttacgtacgacccgacgacgtgcacgtcaatatcagacttgtagaactatatagatccaccaaacgcttgaaggatgctgtggcgagatgccatgaggctgaacggaatatcgccctccggtcaagcctcgaatggaatagctgcgtggtgcagactctgaaggagtacttagaaagcctccagtgtttagagtctgacaagtccgactggagagccacaaacacagatctgctcttagcatacgcaaacctgatgcttttgaccttgtctaccagagatgttcaagaaagccgggaactgctggagagctttgacagcgctctgcaatccgccaagtcttctcttggcggcaatgatgagctgagcgcgacattcctggaaatgaaaggccacttttatatgcatgctgggtcactgctactgaagatgggccaacacgggaacaatgtacaatggcgggcactgtccgaactggccgccctgtgttacttgatcgcatttcaagtccccaggcccaaaatcaaattgattaagggtgaggccggacaaaatttactggaaatgatggcttgcgaccgtctgtctcagagcggccacatgctgctgaacctctcgagaggaaaacaggactttttgaaggttgtggtcgagacatttgctaataagagcgggcagagtgctctatacgacgcactgttctccagccaaagtcccaaagacaccagtttcctgggaagcgatgacattggaaatattgacgttcaggagcccgagctggaggatctcgcacgatatgacgttggcgccattcgtgcacataacggatctctccagcacctgacatggctgggcctgcaatggaattccctgccagccttgccagggattcggaaatggctgaaacagttgtttcaccatttgccccaggagacaagcaggctcgaaactaacgcccccgaaagtatatgcatcctggacctcgaggtgtttctccttggcgtcgtgtatacctcccatttacagctgaaggaaaagtgtaactctcaccactcaagctatcaacccctgtgcctgcccctgccagtctgcaagcagctctgcacagaaaggcagaagtcatggtgggatgccgtgtgcacattgattcacaggaaggctgtgcccgggaatagcgccaagctgcggctcctggtccaacacgagattaatactttgcgggcgcaggagaaacacggtcttcagcccgctctgttggttcattgggccaagtgcctgcaaaagatgggctcaggcctgaacagcttctatgatcagagagaatacatcggccgctcagttcactattggaaaaaggttctgcctctcctcaagatcataaagaagaaaaattccatacccgaaccaattgaccccttgttcaagcacttccactcagtagatatccaggccagtgaaattgtcgaatatgaggaagatgcccatgttacgttcgccattctggacgccgttaatggcaatatcgaggatgcaatgaccgcgtttgaatccatcaagtccgtcgtcagctactggaatctggccttgatttttcaccggaaagccgaagatatagccaatgatgctcttagtcccgaagagcaggaagaatgtaaaaactatctgcggaaaacacggggatatctgattaaaatcctcgacgactccgattccaacttgagcgtggtgaagaagctgcccgtgcctttagaatccgtcaaagaaatgcttaagtcggtcatgcaggaattggaaaactactcagagggtggacccctgtacaaaaacgggtctctgagaaacgccgacagtgagatcaagcactccacgccgagcccaacaaagtactcactgtccccatccaaaagctacaagtattcccctaagacacccccccgctgggcggaggatcaaaattccctactcaagatgattaggcaagaagttaaagccatcaaggaggaaatgcaagagctgaaattaaatagctccaagtcagctagccatcaccgctggcctacagaaaactacgggcccgacagcgttccagatggctatcaaggttcacagactttccacggtgcccctcttacagtggccacaacgggaccctccgtgtactacagccagtctcccgcatataacagtcagtatttactgcgccctgcagctaatgtcaccccaacaaaaggctcttccaatacggagttcaagtctaccaaagaaggcttcagtatacccgtgagtgctgacggatttaagttcggcatatccgaacccggcaaccaagagaagaagtcagagaagccccttgagaacgacaccggcttgcaggcccaggatatcagtggacgaaaaaaggggcggggtgtgattttcggacaaacctctagtacattcacattcgccgacgtcgcaaaatctacgtctggtgaggggtttcaattcggtaagaaggatctgaacttcaagggctttagcggcgctggcgagaagttgttctcctcacaatatggcaaaatggccaacaaagccaacacctccggggatttcgaaaaagatgacgatgcttataaaacagaggattctgacgacattcatttcgaacctgtggtccagatgcccgaaaaggtggagctcgtaacgggcgaggaaggcgagaaggtgctttatagccagggcgtcaagttattccgctttgatgctgaagtaagccaatggaaggagcgtgggctaggaaacctcaaaattttgaaaaacgaagtgaatgggaaggtgcgcatgctgatgcagagagaacaggtgctcaaggtatgtgcaaaccattggatcacaacaactatgaatctaaagccactgtcagggagcgatcgtgcttggatgtggtcagcaagcgacttttccgacggggatgcgaaactggaacgtctggccgctaagttcaagacgcccgagctagcggaagagttcaagcaaaaattcgaagagtgtcagaggcttttacttgatatacctctgcaaacacctcataagctggtggacaccgggagggcagcaaagctgatccaaagagcagaggagatgaagtctgggctgaaagactttaaaacatttttaacaaacgaccagactaaagttgctgaggaggagaataaaggatccggcaccggggcagccggggctagtgatacaacgatcaaacctaatgcagagaataccgggcccaccttagagtgggacaattatgatctgcgcgaggacgctctggacgatagcgtcagttcaagcagcgtgcatgcctctcccctagcaagcagccctgttagaaagaacctctttcacttcgatgagtcgactaccggctcgaattttagctttaagagcgccctcagcctatctaagagtccagcgaaactcaaccagagtggcacctctgtaggaaccgatgaagagagcgatgtgactcaggaggaggaacgcgacggacagtactttgagcccgtagtgccacttcccgatcttgtggaggtgagcagcggcgaagagaatgagcaggtcgtgttttcgcatcgggccgagttttatcgctacgacaaggatgtgggccagtggaaggaacgaggtatcggggatataaagatcctgcagaactatgacaataagcacgtccgcattctgatgcggagggaccaggtgctgaagctctgtgccaaccacagaataactcccgacatgtcacttcagaatatgaagggcaccgagcgggtttgggtctggactgcctgtgattttgccgacggtgaacgcaaagtggagcatttagccgtgaggttcaaactgcaggatgttgcagacagcttcaagaaaatttttgatgaagcgaaaacggcacaggaaaaggattcccttataacccctcacgtttcgcggtcgtctacacctagagaaagtccttgtggcaagattgccgttgctgttcttgaagagacaacccgagagcgaacagatgtgattcagggcgatgacgtagccgatgcagctagtgaggtggaggtctcctcaacgtcggagaccactactaaggctgtggtgtcacctccaaaatttgtcttcggaagcgagtcagtgaagcgtatcttcagctccgaaaaatccaagcccttcgccttcggcaactccagcgccaccggatctctcttcggattttctttcaatgcccccctgaagtccaataattcagagaccagtagcgtagcccagtctggctccgagagcaaggtggagcctaaaaaatgtgagttgtcgaaaaacagtgacattgagcagagtagcgactccaaggtcaagaacttgtcagcctcctttcccaccgaggaaagctctataaattacacattcaagacacctgagaaggagcctcccctgtggtacgctgagttcaccaaagaggagcttgtacagaagttgagtagcactacaaaatctgcagatcacctgaatggtctgctacgtgaaattgaggctactaatgcagtgttaatggaacagatcaagctgctgaagtccgagatccggcggctggagcggaatcaggaacaagaagtctctgcggctaacgtagaacatctcaagaatgtcctgttgcagttcatatttctcaaacctggcagcgagcgcgaacgtctcctcccagtgatcaatacgatgttgcagctctctctggaggagaaaggcaagttagccgcagtcgcccagggtgaagagtag

SEQ ID NO: 202508 - DNA, 5301 bp, synthetic construct
  misc_feature 1..5301: note = Description of Artificial Sequence: Synthetic coding sequence
  source 1..5301: mol_type = other DNA
atgagctgcagcaaggcctacggcgagcggtacgtggccagcgtgcaggggtcagcaccatccccaaggaaaaaatctacccgtgggttttactttgccaagttgtactacgaggcaaaggagtacgacttggccaaaaaatacatctgcacatatataaatgtaagagagatggacccaagagcccaccgattcctgggcctgctatacgagttggaagagaacacagagaaagccgtggagtgttaccgccggtcggtagagttgaatccaacccaaaaagacctcgtgctaaagatcgccgaactcttgtgtaaaaacgacgttacagatgggcgggctaaatactgggtggagagggccgccaaactgtttcctggttcgccggccatctataagttgaaggaacagttgctcgactgcgaaggcgaagacggttggaataagttgttcgatttgatccagagcgagttatacgtcagacccgatgacgtgcacgtgaacatcagacttgtagaattgtaccggtcaaccaagcgtctaaaggacgccgtcgctcgctgccatgaggcagagcgaaatatcgcgctgagaagcagcctcgaatggaattcctgtgtggtacagaccctgaaggagtacttggagtccctgcagtgcctggagtccgataaatctgattggagagcaactaatactgacctgttacttgcgtacgccaatctgatgcttctgactctgtccacccgcgacgtgcaagaaagtcgagagctccttgagtctttcgatagcgctcttcagtccgctaagagctccctgggagggaacgatgaactaagcgctacttttctagagatgaaggggcatttctacatgcatgctggctccctgcttcttaagatggggcagcatggcaacaatgttcagtggagagctctgagcgagcttgccgccctgtgctacctcatcgccttccaagtgcccaggcccaaaattaagctaataaaaggggaggccgggcagaacctgctggaaatgatggcctgtgaccgcctctctcagtccgggcacatgctacttaacctgtcgagaggaaagcaggacttcttaaaagtggtcgtggaaacttttgccaacaagagcgggcaaagtgctttgtatgacgctctcttttcttctcaatctccaaaggatacctccttcctcgggagcgacgacatcggtaacatcgacgtgcaagagcctgagttggaggatctggcacgttacgatgtaggggctatccgggcccataacgggtctctccagcacctcacatggctgggcctacagtggaactctcttcctgccctgcccgggatacggaagtggcttaagcaactgttccatcacctacctcaggagacatcccggctcgagactaatgcacccgagagcatatgtattctcgatctggaggtgttcctcctcggtgtagtgtatacttcacacttacagctgaaagagaaatgcaactcccaccatagctcttaccagcccctgtgtttgcctttgcccgtctgcaaacaactttgtacagaaaggcaaaagagctggtgggacgccgtgtgcactctgatccaccggaaggctgtccctggtaactctgctaagctgcgcctgctggttcagcacgagatcaatactctccgtgcccaggaaaagcacggtctgcaacccgcgctgcttgtccactgggctaagtgcctccaaaagatgggttccggactgaatagcttttacgaccagagagagtacattggtaggtctgtgcactattggaaaaaggttctgcctctgctgaagattatcaagaaaaaaaattcgattcccgaacccatcgacccattatttaaacatttccacagtgtggatattcaggcaagcgagatcgtggagtacgaggaagacgcgcatgtgaccttcgcaattttagacgccgtcaatggaaacattgaggacgcaatgactgcgttcgagagcatcaagagtgtggtcagctactggaacctggcccttattttccatcgcaaggcggaggacatcgccaacgatgctctgtcccccgaagaacaggaagagtgcaagaactatctaaggaagaccaggggctacctaataaaaatcctggatgatagtgattctaatctatctgtggttaagaagctgccagtgcccctggaatccgtcaaagagatgctcaaatctgtgatgcaagaacttgaaaattactcggagggcgatccactatataaaaacgggtccttgcgcaacgcagatagtgaaattaaacattcaactcccagcccaactaagtactccctgtcacctagcaaatcatataaatattctccaaagacaccccctcgatgggcggaggatcagaactctcttctgaagatgattcgccaggaagtgaaggccataaaagaggagatgcaggaattgaagttaaacagtagcaagagcgccagtcaccatcgctggcccacagagaactatgggcctgactcggttcccgatggctaccagggtagccagacatttcacggagcccctctcaccgtcgctaccaccggccctagcgtttactattcacagtccccggcatataatagtcaatatctgttgaggcctgcggcaaacgtcactcccactaaagggagctctaataccgagttcaaaagtacaaaagagggattcagtatccccgtgagtgccgatggcttcaagttcggaataagcgagcccggaaaccaggaaaaagaaagtgagaagcccttagagaacgacacaggcttccaggcccaggatatatctggccagaagaacgggagaggagtgatctttggacaaacatctagcacttttactttcgctgatgtcgcgaagtctacaagcggggaaggcttccagttcggaaagaaggatcccaatttcaaaggattttccggggcgggggaaaagctcttttctagtcagtgtggcaagatggctaacaaggcaaatacaagcggagacttcgaaaaagacgacgacgcttacaaaaccgaagactccgacgacattcattttgaaccagtggtccagatgccggaaaaggtcgagctcgtgattggagaagaaggggagaaagtgctgtactctcaaggcgtgaagctttttaggttcgatgccgaggttaggcaatggaaggagaggggtttgggtaaccttaaaatcctcaagaatgaggttaacgggaagccccgaatgctgatgcgccgggagcaagtgctgaaggtctgtgctaatcactggattacgactactatgaaccttaagccactctcgggatccgacagagcatggatgtggtccgccagtgatttcagtgacggcgacgctaaattggagcggctggccgccaagttcaagacgccggagctggccgaagagtttaaacagaagtttgaggagtgccagcagctcttattagatattccccttcagaccccacacaaactggtggatacaggccgtgcagctaagttgattcagagggccgaggagatgaagagtgggttgaaagacttcaaaacctttctgacgaatgatcagaccaaggtgactgaagaagagaataagggatctggtaccggtgcagctggagcatccgataccaccatcaagccgaacccggagaacaccgggcccaccctggagtgggacaattgcgatctgagagaggacgcgctggatgatagcgtgtcttccagcagcgtgcatgcttctccgctcgcaagcagtccagtccggaaaaatcttttccattttggcgagtccactacagggagcaacttctcttttaagtcagccctgtcaccaagtaagtcccctgccaagctaaatcagagcggcacctcggtgggaacggatgaagagtctgacgtgactcaggaggaagaacgtgacggccaatacttcgagccagtagtgccactgccggacctcgttgaagtctccagcggcgaggaaaacgaaaaagttgtcttttcacacagagcagaactataccgctacgataaggatgttggccaatggaaagagagggggatcggcgacatcaaaattttgcaaaattatgataataaacaggttcgaatagtgatgagacgggatcaagtcttgaagctgtgtgccaaccatacaattaccccagatatgagcctccagaatatgaaagggaccgagcgtgtttgggtctggactgcgtgcgacttcgcagatggcgagagaaaggtggaacatttggccgttcgattcaaacttcaggatgtcgctgattcattcaaaaaaatcttcgatgaggccaagacggctcaagagaaggacagcctgatcacccctcacgtgagcaggagtagtaccccccgggaatcaccttgcggtaagatcgctgttgcagttttagaggaaactaccagggaacggactgacgtgatccagggcgatgacgttgccgacgctgctagtgaggtggaagtgagctctacttcggagaccactaccaaggccgttgtcagtcctccaaagttcgtcttcggctccgagagcgtgaagaggatcttctctagcgagaagtctaaaccgtttgcatttggtaatagctcggctacagggtctctgttcggatttagctttaatgcctctctcaaatccaataatagtgagacttcttccgttgcccaaagtggatccgaatctaaagtcgagcctaagaaatgcgagttgtctaagaactctgacatagaacaaagctccgatagcaaggttaagaatctgagtgctagctttcctatggaggaaagctctatcaactacacttttaagacccccgagaaagagcccccgctctggcacgccgagttcaccaaagaggagctggtacagaaactttcgtccactactaaaagcgcagaccacctgaacgggctgctgcgtgaggcagaggccacatcagctgtactgatggaacaaatcaagcttttgaagtctgagatccgtcgcctcgaacgaaaccaagagcaagaggagtctgctgctaatgtggaacatctgaagaacgtcctactccagttcattttcttgaagcctggctccgagagagaacggttgcttcccgttatcaatacaatgttacagctctctccagaagagaaaggcaaacttgcagccgtcgcacaggccgaacgtgggtttgtgcttaatagtacgttttag

SEQ ID NO: 202509 - DNA, 3378 bp, synthetic construct
  misc_feature 1..3378: note = Description of Artificial Sequence: Synthetic coding sequence
  source 1..3378: mol_type = other DNA
atgctgctgaccctgagcacccgggacgtgcaggagagccgggagctgctggagagcttcgatagcgccctgcagtccgcaaaatcctcccttggcggcaacgacgaactctctgctacctttttggaaatgaagggtcatttctacatgcatgccggctcccttctgttaaaaatgggccagcatggtaacaatgtgcaatggagggccttatccgagctggccgccctgtgctacctcatagctttccaagtaccgaggccaaagattaaactgattaaaggtgaagccgggcagaatttactcgaaatgatggcttgtgatcggctgtcccagtctggtcatatgctgctaaacttatctagaggaaagcaggacttccttaaagtggtggtggaaacgtttgctaataaaagcggccaatcggcactgtacgacgctttatttagttcccagagcccgaaagacactagtttcctgggaagcgacgatatcggcaacatagacgtgcaggagcccgagcttgaggacctcgccagatacgacgtgggcgccattcgagcccacaatggaagcttgcaacacctgacctggcttggtttgcaatggaactcgctgccagccctgcccgggatccggaagtggctgaaacagctgtttcaccatctcccccaggagacaagccggctagagaccaacgctccagagtccatctgcatactggatttagaagtattcctgctgggcgtggtctatacaagccacctgcagctcaaagaaaaatgcaattctcaccatagctcataccaaccgctatgcctgccgctccctgtgtgtaagcagctttgtacagaaagacaaaaaagctggtgggacgctgtatgcaccttaatccataggaaggccgttccagggaactccgctaaactgcgactgctcgtacagcacgaaatcaatactctgagagcccaagagaaacatggtttgcagccggccctgttggttcactgggcaaaatgcttgcagaaaatggggtcaggactgaacagcttctacgatcaacgagagtatattggcagaagcgtccactattggaagaaagtgctcccactgctgaaaattatcaaaaaaaaaaatagcatcccagaaccaattgaccccctgtttaagcacttccactccgtcgacattcaagcatccgagatcgtggagtacgaagaggacgcccacgtgacctttgctatcctggatgctgttaacggcaacatagaagatgccatgactgcgtttgaatccatcaagagtgtagtaagctattggaatttagcgctcattttccacagaaaagccgaggacatcgcgaatgacgctcttagcccagaagaacaggaagaatgtaagaactacctaaggaaaacacggggataccttatcaaaattttagacgactctgattctaatctctcagtggtgaaaaaactgcccgttcccctggagtccgtgaaagaaatgctgaagtcagtgatgcaggagctggagaactactccgaaggcgacccgctgtataaaaatggaagcctacgcaatgcagattctgagatcaaacacagtaccccctcgccaaccaagtattccctatccccatctaaaagttataagtacagccccaagacccctccacgctgggccgaagaccagaactctctgctgaagatgattaggcaagaggtaaaggcaatcaaggaagagatgcaagaactgaagctgaatagctcgaagtccgcaagtcatcacagatggcctacggagaactatggccccgattccgtgcccgacggctaccagggtagtcagactttccacggtgcaccactgaccgtggccaccactggaccttccgtatattattcgcagagccccgcctataattcacaatatctactgcggcctgcagccaatgttactcccaccaaaggctcgagtaataccgagtttaagtcgaccaaagaggggttctctattccagtgtctgcggacggtttcaaatttggcatcagtgaacctggtaatcaggaaaaggaaagcgaaaagcctctggagaacgatacaggttttcaggcccaagatatcagtggacagaagaacggccgaggagtgatcttcggacagacatctagtacgttcaccttcgccgatgttgctaaaagcacctccggagagggttttcagttcggaaagaaagatccaaactttaagggattctccggcgctggggagaagctctttagttcccagtgtggaaaaatggcaaacaaggccaacacttcaggcgatttcgagaaggacgatgacgcttacaagactgaggacagtgatgatatacactttgagcctgtggtgcagatgcccgagaaagtggagctggtgatcggagaggaaggggagaaagtcctttactctcaaggcgtaaagctctttcgcttcgacgccgaggttaggcaatggaaggagcgaggtttaggaaacttaaagattctgaagaacgaggtgaacggcaagccaaggatgcttatgcgtcgcgagcaggtgctcaaggtctgtgccaatcactggataacaacaaccatgaatctgaaacccctgtctggttcagatcgcgcatggatgtggtctgcaagtgacttcagcgacggcgacgccaagttggagcggctcgctgcaaagttcaagacccccgagttagctgaggagtttaagcaaaagttcgaggaatgccaacagctgcttctggacatcccacttcaaaccccacataagctggtagacactggaagggctgcaaaactgattcagcgcgccgaggaaatgaaatccggctctgagtccaaggtggaaccaaagaagtgcgagttatcaaagaattcggacatcgaacagagcagcgattccaaggtcaaaaatttatctgcctctttccctatggaggagtcttccataaactacaccttcaaaacacccgaaaaggaaccaccactctggcacgctgagttcaccaaggaagaacttgtccagaagttatcttcgacaactaaatcggcggaccacctgaacggcctgctgagagaggctgaagccacttccgcagtcttgatggaacagatcaaactcctcaaaagtgaaattagaagactggaaagaaaccaagagcaagaggaatccgcggcgaacgtggagcatctcaagaacgtgcttctacaattcattttccttaagcctggctctgaaagagaacgcttgctgcctgtgattaatacaatgctccagctgagtccggaggagaaaggcaaactggcagcggtggcacaaggggaagagtag

SEQ ID NO: 202510 - DNA, 471 bp, synthetic construct
  misc_feature 1..471: note = Description of Artificial Sequence: Synthetic coding sequence
  source 1..471: mol_type = other DNA
atggacccccgggcccaccggttcctgggcctgctgtacgagctggaagaaaacaccgaaaaagccgtcgagtgttaccggcgctctgtggagttgaaccctacacagaaggatctggtcctgaaaatcgccgagctgttgtgcaagaatgatgtaaccgatggccgagctaagtattgggtggaacgggctgccaaacttttccccggctcccctgcaatatacaagctgaaagaacagctcctggactgcgagggcgaggacggttggaacaagttgttcgacctaatacagtcagaactgtacgtgagaccagacgatgtgcacgtgaatattcgattagtggaactgtacaggtcaactaagaggctcaaggatgctgtggcccgctgtcatgaggctgaacggaacatcgctctccgaagttcactggagtggaattcatgcgtggttcagacactcaagttttag

SEQ ID NO: 202511 - DNA, 5277 bp, synthetic construct
  misc_feature 1..5277: note = Description of Artificial Sequence: Synthetic coding sequence
  source 1..5277: mol_type = other DNA
atgagctgcagcaaggcctacggcgagcggtacgtggccagcgtgcagggatcggctccatctccgagaaagaaatctacacgagggttttatttcgccaagctgtactatgaagccaaagaatacgacctagcaaagaagtacatctgcacgtacatcaacgtgagagagatggaccccagggcacaccgattcttgggactgctgtacgaattggaagagaacacggagaaagcggtcgagtgctaccggcgatccgtggaactgaacccgactcagaaggatttagtgctcaaaattgctgagctcctttgtaagaatgacgtgacggatggtagggctaaatactgggttgagcgggccgctaagcttttccccggaagcccggccatttacaagctcaaggagcagctgcttgattgcgaaggtgaggatggctggaacaagttgttcgacctgatccaatcggagctgtatgtccggcctgacgacgtgcatgttaatatcagattggtggaactatacaggtcaacgaagagactcaaggacgcagttgcccggtgccatgaggcagaaaggaacattgctctaagaagctctctagagtggaattcgtgtgtcgtccagacactcaaggaatacctagaatccctccaatgcctggaaagtgataagagcgattggcgagccacaaacactgacctgctgcttgcctatgctaatctcatgctgttgacactcagtacacgagatgttcaagagagtcgagaactgctggaatcgtttgacagcgcattacaatcagctaaatctagcctcggaggaaatgatgaattgtctgccacctttctggagatgaaagggcacttttatatgcatgccgggagtctgcttttaaagatgggccaacatgggaacaacgtccaatggcgagcactctccgaactggccgctctctgttacctaatcgcgtttcaagtgccaaggcctaaaataaagctcatcaagggggaagcaggtcaaaaccttctggaaatgatggcctgcgaccgactgtctcagtctgggcacatgctactgaacctgtcccggggtaagcaagactttctgaaggtggtagtggaaactttcgcgaacaaatccggccaaagcgcgctgtatgatgcactgttctctagccagagccctaaggacactagctttctgggatccgatgacataggcaatatcgacgtccaggaacctgagctcgaagacttggctcggtatgacgtcggagcaatacgagcccataatggctccctgcaacacttaacatggctcgggctgcagtggaactcactccctgccctcccaggtatacgcaaatggttgaagcaattgtttcatcacctacctcaggagacctcaaggcttgaaaccaatgccccagagtcaatctgcattctggaccttgaagtgtttttacttggggtcgtttatacatcgcatctgcagttaaaggagaaatgtaattcccaccacagctcatatcaacccttgtgtctgccgctgcctgtgtgcaagcaactctgcaccgagaggcagaagagttggtgggacgcagtatgtacacttattcaccgcaaggcggtccccggaaattctgctaagttaaggctgctagtgcagcatgaaatcaatacattgcgggctcaagagaaacacgggctacaacctgcgctgctcgtgcattgggctaaatgtctgcagaagatgggatccgggctgaactctttttatgatcagcgtgagtatatagggcggtccgtacattattggaaaaaagtcctgccactgctgaagatcattaaaaagaagaactctatcccagagccgatcgacccactcttcaagcattttcactctgttgacattcaggcttctgagattgtcgagtacgaggaggatgctcatgtgactttcgccatcttagacgctgtgaatggcaatattgaggatgctatgaccgcattcgaatccatcaaatcagttgtatcatactggaacctggctttgatctttcaccgcaaggcagaggatatcgctaacgatgctctgagccccgaagagcaagaagaatgcaagaactacctgcgcaaaacaaggggttacttgattaaaatactggacgacagcgacagcaacctcagcgttgtgaaaaagctgccggtccccctggaaagtgtaaaagagatgttgaaatccgtcatgcaggaattagagaactactctgagggcgatcctctgtataagaacggatctctccgcaatgccgatagtgagattaaacacagtaccccatcccccaccaagtactctctctctccaagcaagtcttacaaatactcacccaagacccccccgagatgggccgaggatcagaattccttgttgaaaatgatccggcaggaggtgaaggcaatcaaggaggagatgcaagagttgaaattgaattcttcgaaatccgccagtcatcatcggtggccaaccgaaaattacggacccgacagtgttcccgacggataccagggttcccagactttccacggcgcgcccttgactgtcgctaccacaggtccgtctgtatattattcccagagtccagcatataactctcagtatctgctcaggccagcggccaatgtgactcctactaaggggtcctcaaacaccgagtttaagtcaaccaaagaagggttttcaatccctgtatccgctgacggatttaagttcggaatcagcgagccaggaaaccaggaaaaggaatccgagaaacctctggagaatgacacgggctttcaagcgcaagacatctccgggcagaaaaatggccgcggggttattttcggccagacaagcagcacttttactttcgctgatgtggccaagagtactagtggagaagggtttcaatttggaaagaaggatcccaacttcaaaggttttagcggagcaggggaaaagctcttttcttcccagtgcgggaagatggccaacaaagcaaacacctctggggacttcgaaaaggacgacgacgcctacaaaacagaagacagcgatgacatacattttgaacctgttgtccaaatgccagagaaagtggaacttgtaatcggagaagagggtgaaaaagtgctatattctcaaggtgtaaagcttttccggttcgacgcggaggtcagacagtggaaagaacgggggttgggtaatctcaagatattgaaaaatgaggttaacgggaagcctcgcatgctgatgcggagggagcaagtgcttaaggtctgcgccaatcactggatcaccacaacaatgaatcttaagcccttgtccggttccgaccgggcatggatgtggtccgcttcagattttagtgacggggatgctaagctcgagaggctggcggctaagttcaaaaccccagaactggccgaagagtttaagcagaagttcgaagaatgtcaacagcttctgctggatatcccactgcagaccccacataaactggtggataccggtagggcagctaagctgatccagcgagctgaggagatgaagagtggcctgaaggacttcaaaacatttctcactaatgaccagacaaaagttacagaagaggaaaacaaaggctcggggaccggcgctgccggcgcctcggatactaccatcaagcctaaccccgagaatactggaccaacacttgaatgggacaactgcgacctgcgagaggatgcgctggatgactcagtcagtagcagcagtgtccacgcctcaccactggcatctagccctgtgagaaaaaacctttttcactttggtgagtctacgacagggtctaacttcagcttcaaatctgccttatcccctagcaagtcacccgccaagctgaatcagtccggaaccagcgtggggaccgacgaggaatcagatgtcacccaggaggaggaacgggacggtcagtatttcgaacccgtggtgcctttaccagatttagttgaggtgagttccggcgaagaaaacgaaaaggtggtcttctctcatcgggcagaactgtatagatacgacaaggatgtgggccaatggaaagagcgcggtatcggagacatcaaaattctccaaaactacgataataaacaagtgagaatcgtaatgaggagggatcaggtgctgaagttatgtgccaaccacacaattacacctgacatgagtcttcagaacatgaagggaactgaacgggtgtgggtgtggacagcctgtgatttcgcggacggcgagagaaaggtcgagcatttggcagtgcgattcaagcttcaggacgttgccgatagctttaagaagatcttcgatgaggctaagacagcgcaagagaaggatagcttaatcactcctcacgtgtctagatcctccacccccagggagagcccctgcggaaagatcgccgtagctgtactcgaggaaaccacacgtgaaagaacagatgtcattcagggggacgacgttgccgatgccgcctcagaggtggaagtgtcttcaacgtctgagactaccaccaaagctgttgtaagcccaccgaagtttgtctttggaagcgagtctgtaaaacgaatttttagcagtgagaaatccaaaccctttgcgtttggcaactcctcagcaacaggttcacttttcggtttttcatttaatgctagccttaaaagcaacaactccgaaacctccagtgtcgctcagtcaggatctgaatccaaggtcgaaccgaagaaatgtgaactatccaagaatagcgatattgaacagtcgtctgactctaaagtgaagaatctgtcagcctcatttccaatggaggaatcgagcataaattacaccttcaaaacaccggagaaggagcctcccctgtggcacgccgaattcacaaaagaggaacttgtccagaagcttagctccaccaccaaatctgcagaccacctgaatgggctgctgagggaggccgaggctacatcagctgtgctcatggaacagatcaaacttctcaaatccgagataaggcgacttgaacgtaaccaggagcaggaagagagtgctgcgaatgtagagcacctcaagaatgtgttattacaattcatttttctcaagcccggcagtgaacgggaaaggttactgccagtgatcaacacaatgcttcagctgtctcctgaagagaagggcaaattagccgccgtcgctcagggcgaggagtag

SEQ ID NO: 202512 - DNA, 5298 bp, synthetic construct
  misc_feature 1..5298: note = Description of Artificial Sequence: Synthetic coding sequence
  source 1..5298: mol_type = other DNA
atgcggcggagcaaggccgacgtggagcggtacgtggccagcgtgctgggactcactccttctcccagacaaaagagtatgaaaggtttttactttgcaaagctgtactacgaagctaaagaatacgacctggcgaaaaaatatatttgtacatatatcaacgtgcaggagcgagatccaaaggcacaccgatttctcggactgctttatgaactggaggagaatactgagaaggccgtggaatgttaccggcgctcagtggaactcaatcctacacagaaggatctcgtcctgaaaatcgcggagctgctgtgtaagaacgacgtcacagacggcagggcgaagtactgggtagaacgggcggcgaaactgttccccgggtcacccgccatctacaagctgaaggagcagttgttagattgtgaaggagaggatgggtggaataaactgttcgatctcattcagtctgaactctacgtgaggcccgatgatgttcatgtgaacatccgactggtagaactgtatcgttccacgaagagactgaaagatgccgtggctcactgccacgaagcagaaaggaatatcgcccttcgtagtagccttgaatggaactcatgcgtagtccagacgcttaaggagtatctcgagagccttcagtgtctggaatccgataagagcgactggcaggcaacaaacacagacttgctgctggcctatgccaatcttatgcttctaacactgtccactagggatgtccaggaaaatagagaactgttagagagtttcgattccgcacttcaatcagccaagtcttcgctcggcggcaatgatgagctcagcgccaccttcctggagatgaaggggcacttttacatgtacgctgggagtctcctcctgaaaatgggtcagcatggaaacaacgttcagtggcgggccctgtctgagctggccgcgctttgctatcttatagcctttcaagtgccacggcctaagatcaagctgagagagggtaaggcaggacagaacctcctcgaaatgatggcctgtgacagactgagccaatctggtcacatgctgctctctctgtcgcggggtaagcaggactttctgaaagaggtcgtcgagacttttgccaataagatcggccagtctgcattatacgatgcactcttctcatcgcagtcccctaaggacacgagcttcctgggctccgatgacattgggaaaatagacgtgcaagagcctgaactggaagatcttgccagatacgacgtgggcgccataagggcacacaacggttccctgcagcaccttacttggttaggcttgcaatggaatagtttgccagccttgcccgggatccgtaagtggcttaaacaattgttccacagactgccccatgaaacctctagattagagacgaacgcacccgaatccatctgcattctggacctggaggtgttccttctgggtgttgtgtacacaagtcacctccagctcaaagagaagtgcaactcacatcactccagctaccagcccctttgccttccattccccgtgtgtaagcagttgtgcacagagcgacagaaatcttggtgggatgctgtgtgtactctgattcatagaaaagccgtgcccggaaacctggctaagctcagactgttggtgcagcatgagatcaacactctgagagcacaggagaagcacgggctccagccggcattgctcgtgcactgggccaagtatctccaaaagactggatccgggcttaattctttctatggccagctcgagtacatcggtcgcagtgtccactactggaaaaaggtcctgcctttactgaagatcattaaaaagaactctattccggagcccattgatcccttatttaaacacttccactcagtcgatatccaggcaagcgagatcgtggagtacgaggaggacgctcacattacattcgccatgctggatgcagtgaacggcaacatcgaagacgctgtaacggctttcgaaagcatcaagtcggtggtgtcatattggaacctggctctgatctttcatcgcaaagccgaagacattgagaacgacgccctgtcgcccgaggagcaggaagaatgtcgcaattaccttactaaaacccgcgattatctaataaaaatcatcgacgacggcgattccaacctctcggttgttaagaagctgccggtgcccctcgagagcgtaaaacaaatgctgaactctgtgatgcaggaactggaagactattcggagggagggcccctctacaagaatggttcactgagaaatgctgactcagagattaaacacagcactccaagtcctactaagtactctttaagtcctagcaaatcttataaatactctcctgaaacccctccgcggtggacggaggaccgaaacagccttctgaatatgatctgtcagcaggtggaagccatcaagaaggaaatgcaggagcttaaattaaattcaagcaagtcagcctctagacatagatggcccacggaaaactatggccctgatagcgttccagatggctatcagggctcccagaccttccacggagctcctttgacagtggcaacaacagggccaagcgtttattacagccagtcccctgcctataatagccaatatttactgcgccccgcagccaacgtgacccccactaagggttcttcaaacaccgagtttaaatctacgaaggaggggttctcaattcctgtcagtgctgatggatttaaattcggcatctctgagccgggtaaccaggagaaaaagagggagaaacccctggagaatgatacaggatttcaggctcaagacatctccggacgaaaaaaggggagaggtgtgattttcggccagacatcttcaacctttacattcgcggatgtggccaagtcaactagcggcgaaggattccagtttggaaagaaggacctcaactttaagggcttcagtggagccggggaaaaacttttcagttccaggtacggaaagatggctaataaggctaatacctcgggcgatttcgagaaggatgacgacgcttacaaaaccgaggatagtgacgacattcactttgaaccagtggtccagatgcccgaaaaggtggaactcgtgaccggggaagaaggagaaaaggtcctatacagtcagggagtgaagctgttccggttcgacgccgaagtgcgtcagtggaaagagcgaggtctggggaatctgaagatcctgaagaacgaggtaaatggaaagctgaggatgctgatgcggcgggagcaggtgctgaaggtatgtgctaatcactggattacgaccacaatgaatctgaagcctctgtccggttctgaccgagcttggatgtggagcgcgagtgacttcagcgacggagacgcgaagctggagcgcctcgccgctaagttcaagaccccagaactcgccgaagaattcaaacagaaattcgaagaatgccagaggctgttgttggacatccctctacagacacctcataagctggttgatactggacgggcagccaagttgattcagcgtgcagaagagatgaaaagtggcctgaaagattttaagacgtttctgacaaacgaccaaaccaaggtcacggaggaggaaaataaaggctccggcacgggggcagctggagcgagcgatactaccatcaagcccaatgccgagaacaccggccctacacttgaatgggacaattacgaccttagggaagacgctttagatgacagtgtaagttcatccagcgttcacgcctctcccctggcttcttcccctgtccgtaagaacctcttccggttcgacgaatctacaactggatctaacttctccttcaagtcagccctgtccctctcaaagagtcccgccaaactgaaccagagtggtacttctgtgggcaccgatgaggaatctgtcgtgactcaggaagaggagcgtgacggccagtattttgagcccgtcgtgcccctgcccgacctcgtggaggtctccagtggcgaggagaatgaacaggtggttttctcccacagggctgaaatctacaggtacgataaggacgtcggacagtggaaagagaggggaattggcgacatcaagatcctccagaactacgataacaagcaagttcgcattgttatgcgtagagatcaggttctcaaactctgcgctaaccatcgaatcacacctgatatgtccctgcagaatatgaagggcactgagagggtttgggtctggactgcatgcgatttcgctgatggagagcgtaaggtggagcatctcgctgtacgcttcaagctccaggacgtcgcagattccttcaaaaaaatattcgacgaagccaagactgcccaagagaaggacagcttgatcacgccgcacgtatctagatcgagtacaccgcgtgagagtccttgtggaaaaattgccgtggccatacttgaagagacaaccagagagaggacggatgtgattcagggcgacgacgtggctgatgcagcaagcgaagttgaggtgtcaagcacctccgagactactactaaggccgttgtgagcccgcctaaattcgtctttgtttccgagtctgtgaagaggattttttctagcgagaaatctaaaccatttgtcttcggaaacagtagcgccacgggctctctgttcggcttttcttttaatgctccacttaaatcgaataattcagagaccagcagcgttgctcagagcgggagcgagagcaaggtcgagccgaaaaaatgcgagctcagcaagaacagcgacattgaacagagtagtgacagcaaggttaaaaatttgagtgcgtccttcccgactgaggaatctagcatcaactatacgttcaagacaccggagaaagaacctcccttgtggcacgccgagtttacaaaagaagaactggtgcaaaaacttcgtagtacaacaaagtctgccgatcatctgaatggcttactgcgggaaattgaggcgactaacgcagttctcatggagcaaattaagctcctgaagtccgagatcagacgcctggaaagaaaccaggagagggagaagtccgccgctaacttggaatacctgaaaaacgtactcctgcagtttatcttcttaaagccaggatcggagcgagaaagactgctgcctgtgattaacacaatgctccagttgtccccagaggagaagggcaagctcgcagccgttgctcaagacgaggaggaaaatgcaagtaggtcttccgggtag

SEQ ID NO: 202513 - DNA, 2715 bp, synthetic construct
  misc_feature 1..2715: note = Description of Artificial Sequence: Synthetic coding sequence
  source 1..2715: mol_type = other DNA
atgcggcggagcaaggccgacgtggagcggtacgtggccagcgtgctgggactgaccccctccccaagacagaagtctatgaagggcttctattttgctaaactgtactatgaagccaaagagtatgacctcgccaaaaaatatatctgtacctatattaacgtgcaggagcgagatcccaaggcacatcggtttctgggtttattgtacgaactcgaagaaaacactgaaaaagcagtcgaatgctaccgtagaagtgttgaactaaatcccactcaaaaggacctggtgctgaagatcgcagagcttctgtgcaagaacgatgttacagacggacgagcaaagtattgggtggagcgggctgctaagctcttccccgggagtccggctatctacaaactaaaggaacaacttctcgactgcgaaggggaagacggctggaataagttgtttgacctgatacagtctgagctgtacgtgcgccccgatgacgtccacgtcaacatccgcctagtagagttgtacagaagtactaagcgacttaaggatgcagtagctcactgccacgaggcagagcgaaacattgcactgcgatcatctctcgagtggaactcttgcgtggtgcagacactgaaagagtacttggaatcccttcagtgcctggagtctgacaaaagtgattggcaggccaccaacactgacctcctcttagcgtacgctaacctgatgctgctgaccttgagtaccagagatgtgcaggaaaatcgcgagctgttagagagttttgactccgctctccaaagtgcaaagagttctctcggagggaatgacgaactttctgctactttcctggaaatgaagggacacttctatatgtacgctggctcccttctcctgaagatgggccagcacgggaacaacgtacagtggcgggcgctgtccgagctggctgcactgtgctacctgattgcctttcaggttccccggcccaagattaagctacgagagggcaaagctggtcagaacctgctggagatgatggcctgcgatcggcttagtcagtcgggacacatgctcctctctttgagccgcgggaagcaggatttcctgaaggaggtcgtggagacattcgccaacaaaattggacagtcagcgttatacgatgctctgttctcttctcaatccccaaaggatactagcttcctcgggagcgacgatattgggaaaatcgacgtgcaggaacccgaactcgaagacctagcacgatatgatgttggagctattcgcgcacataacggcagtttacaacacctaacctggttaggattgcagtggaattccctgccagcgctcccagggattcgcaagtggctgaaacaactgttccaccgactgccccacgagacaagtcggttagagactaatgcccccgagtccatatgcatattagacctggaggtttttcttctcggtgttgtgtatactagccacctgcaattaaaggaaaagtgtaatagccaccactcatcctaccagccgctgtgtttaccctttccggtgtgcaaacaactgtgcactgagcgccagaagagctggtgggacgccgtttgtactctcatccaccgcaaggccgtgcccggtaacctcgccaaactgcgcctcctggtccagcacgaaattaacactctgcgtgcccaggagaagcatgggttgcagcctgctctcctcgtgcattgggcaaaatacttgcaaaagaccggatcaggcctgaattcattttacgggcagctggagtacattggccgttcagtgcactactggaaaaaagttctgcccctacttaaaatcattaagaaaaattctatccccgagcctattgatcctctattcaaacattttcactccgtggacatccaggcgagtgaaatcgttgagtacgaggaagacgcccatatcacctttgccatgctggacgcggtgaacggaaatatcgaggacgctgtgacggcttttgaaagcataaagtcagtagttagctactggaacttagccctgatttttcataggaaggctgaagatatcgagaatgacgctttgtccccagaggaacaggaagaatgcagaaattatttgactaaaaccagagattacctaatcaagatcattgatgacggggactctaacctgagcgtcgttaaaaagctgcccgtaccactcgagtccgtgaagcagatgctaaattctgtgatgcaggaattggaagactattccgagggcggcccgttatacaagaacgggagcctgcggaacgcggactctgaaattaagcattcaacgcctagccccaccaagtactctctgagtccctctaaaagctataagtactcacctgaaactcccccaagatggacagaagacaggaactcacttctgaacatgatatgccagcaagtggaggctattaaaaaggaaatgcaagagctgaagcttaacagcagtaagtccgcctcacggcaccggtggcctacagaaaactatgggccggattccgtgcccgatggttaccaagggtcccaaacctttcacggcgctcctcttaccgaagccgctcaccggcactttacgatcgaaaagcatggcgactctaagtggatcatataccgttttaccaaacagctctgcggcaccgaacgagctcgggcaaagatttcctag

SEQ ID NO: 202514 - DNA, 459 bp, synthetic construct
  misc_feature 1..459: note = Description of Artificial Sequence: Synthetic coding sequence
  source 1..459: mol_type = other DNA
atgtggagcggcaccagcccccggtgctgggtgagcccccggcggctcgaccgctacatttgtacctacattaatgtgcaggagagagaccccaaagcccaccgcttcttggggctcctgtatgagcttgaggagaataccgagaaagccgttgaatgctatagacgctctgtagagttaaatcctactcagaaagacctcgtgttgaagatcgccgagctgctgtgcaaaaatgatgtgacagatggaagggcaaagtactgggtagaacgcgcggccaagctgttccccgggtcccccgcaatctacaaactgaaggaacagttgctcgactgcgaaggcgaggacggttggaacaagctgtttgacctgatccaatctgaattgtatgtgaggcccgacgacgtgcatgtgaatatacgactagttgaattatatagatctacaaagcgcctgtag

SEQ ID NO: 202515 - DNA, 2715 bp, synthetic construct
  misc_feature 1..2715: note = Description of Artificial Sequence: Synthetic coding sequence
  source 1..2715: mol_type = other DNA
atgcggcggagcaaggccgacgtggagcggtacgtggccagcgtgttgggcctcacaccctctcctaggcaaaaatcaatgaagggattttatttcgccaaattatactacgaggcaaaggagtacgaccttgccaagaaatacatctgcacctatattaacgtccaggaacgggatcccaaagcccaccgctttctgggtctactttatgagttagaggagaatacggaaaaggctgtggaatgttacaggcggagtgtcgagttaaaccccacccagaaggacctggtgctgaagatcgccgagctgttgtgcaaaaacgacgttacagacggtagggccaaatactgggtggaaagggcggccaaacttttccccggatcacctgcaatctataaattgaaagagcaattgctggattgtgaaggggaagacggctggaataagctctttgatctcatacagtctgagttatacgtcagaccagacgatgtacatgtcaacatccggttggtcgagctgtacagaagcaccaaacgcctgaaggacgcggtggctcattgtcacgaggccgagcgcaacatagccctaaggagctccttggagtggaactcttgcgtagtgcagactctcaaggaatacttggagagcctgcagtgcctagagtctgacaaatcggactggcaagctactaacacagatctcctgctggcttacgcaaatcttatgttactgacactgtctacacgtgatgttcaggagaaccgcgagctgctggaatcgttcgatagcgcccttcagagtgccaaaagctccctggggggtaacgacgaactgtccgctacatttttagagatgaaaggccatttctatatgtatgctgggagcctgctgctcaaaatgggccaacatgggaataacgtgcagtggcgagcactctctgagttggccgccttgtgctatctgattgcatttcaggtgcccagaccaaagatcaagttgcgggagggaaaagctgggcaaaatctattggagatgatggcatgcgacaggctaagtcagagcggccatatgctcctcagcttgtcccgaggaaagcaagactttttgaaggaagtggtcgaaacattcgctaataagataggacaaagcgctctctacgacgcactgttcagtagccaatccccaaaggatacgagctttctgggcagcgacgacatcgggaagattgatgtgcaggagcctgaattggaggacctcgccagatatgacgttggtgctatccgggctcacaatggcagcctccagcacctgacttggctgggtctgcaatggaacagcctgcccgcccttccagggatacggaaatggttgaagcaactgtttcaccgcctgccacacgaaacatcccggctggagactaacgcacctgagtctatctgtatccttgatctggaagttttcttgctgggcgtggtttacacgtcccacttacaactgaaggaaaagtgcaatagccatcattctagttatcagcctctttgtctcccttttcctgtttgtaagcaactctgcacagagcggcagaagtcttggtgggacgccgtatgcacattgattcatcgtaaggccgttcccggtaatctagcaaaactccgacttctggtccagcacgagattaatacacttagagcccaggagaagcacggcctccagccagccctgctagttcattgggccaaatatctacagaaaacgggctcaggcttaaacagcttctacggccagctggaatatattggtcgttccgtacactactggaaaaaggtgctaccactgctgaagatcatcaagaaaaattccattccagaacctatcgacccattgtttaaacactttcattcagttgacattcaggcttctgagattgtggaatatgaggaggacgctcatatcactttcgcaatgctcgatgctgtgaacgggaacatcgaagacgccgtcactgcattcgagtctattaaatctgtggtttcttactggaatctggcacttatttttcaccgtaaggctgaagacattgaaaacgatgccctgtcacctgaggaacaggaggagtgccgaaactatctgacgaaaacgagggattacttaataaagataattgatgacggcgattctaatctgagtgttgtcaagaaacttccagttcctttggaaagcgtaaaacagatgctgaatagcgtcatgcaggagctcgaagattacagcgaggggggtcccctgtataaaaatgggagcctgagaaatgcggatagtgagatcaaacacagcacaccgtcccccaccaaatatagcctctctcccagcaaaagctataaatacagccccgaaactccgccaagatggacagaagatcgcaattctcttctgaatatgatatgtcagcaggtggaggctattaagaaagaaatgcaggagctgaaactgaacagcagtaagagcgcgagccgtcatagatggccgactgaaaactacgggcctgacagcgtcccagatggctatcaaggttctcagacattccacggcgctccgttgaccgaagcggcccatagacactttaccattgagaagcacggcgacagcaaatggatcatctataggtttacaaaacaactgtgtggcacagagagagcccgtgccaaaatctcttag

SEQ ID NO: 202516 - DNA, 5298 bp, synthetic construct
  misc_feature 1..5298: note = Description of Artificial Sequence: Synthetic coding sequence
  source 1..5298: mol_type = other DNA
atgcggcggagcaaggccgacgtggagcggtacgtggccagcgtgcttggcctcaccccaagcccaagacagaagtccatgaagggcttttactttgcaaagctgtactatgaggccaaggaatatgatctggctaagaagtacatctgtacgtacatcaacgtgcaggagcgcgaccccaaggcacatcgcttcctcgggctgttatatgagctggaggaaaacaccgaaaaagcagtcgaatgctaccgtcgttccgttgaactgaaccctacacagaaagatcttgtgttgaaaattgcggagctcctctgcaaaaatgacgttactgacggccgtgcgaagtattgggtggagcgggcagccaagctctttccaggtagccctgccatctataaacttaaagaacagcttctcgactgtgagggagaagacggatggaacaagctcttcgaccttattcagtcggagttgtatgtgaggcctgatgatgttcacgtcaatattaggctagtggaactctatcggtctacaaagcgtctaaaggatgctgtagcccattgtcatgaggccgaaaggaatatagccttaagatcgtctttagagtggaattcctgtgtagtgcagaccttaaaggagtaccttgagtcactgcaatgcctggagtcggataaatccgattggcaggctacaaacacagacctcctgcttgcatacgccaacttgatgctccttaccctctccacgagggacgtgcaagaaaatagggaattgctggaatcattcgacagcgctttgcagtccgccaagtctagtttgggcggcaatgatgaactgtccgcaaccttcctggaaatgaaaggtcatttctacatgtacgctggaagccttctgttgaaaatgggtcagcacggcaacaatgtgcaatggcgcgctctgtccgagctcgccgctctgtgttacctgatcgcttttcaggtaccccgacctaagattaaactacgtgagggtaaggccggccaaaatctccttgaaatgatggcgtgcgaccgactctcccaatcagggcacatgctgttatctctaagccgaggtaagcaggatttcctgaaagaagtggttgagactttcgcaaacaagatcggccaatccgccctgtacgatgccttgttttcttcccaatcacccaaggacacatctttcctgggcagcgacgacatcgggaagatagacgttcaggagcctgagctcgaggacctggctcgttacgatgtgggcgcaatcagagcgcataatgggagcctccagcacttgacttggctgggactacagtggaattccctccccgccctcccaggcatccgcaaatggcttaaacaacttttccatagattgccacacgagacatctcgattggagaccaacgcccctgaaagtatatgtattctggacctggaggtgttcttgctcggagtggtctacacctctcacctccagctgaaggaaaagtgcaattcacaccactcttcttatcaacctctgtgtctgcccttcccagtctgcaagcagttatgtacagagcgtcagaagagttggtgggatgccgtgtgtacccttatccatcggaaagccgtgcctggcaacttggccaagctgcgactcctagtgcagcatgagattaataccctgcgcgcacaggagaaacacggtctccagcccgcactcttggtgcactgggccaagtatctgcaaaagaccgggagtggcctgaacagcttttacgggcagctggagtacattggcaggtcagtgcactactggaaaaaagttcttcccttactcaaaattattaaaaagaattccattcctgaacccattgatcctctcttcaaacatttccactccgtagacatccaagcttctgaaatcgtggagtacgaagaggacgcgcatattacgtttgctatgctcgacgcagttaacggcaacatagaggatgccgtgactgcttttgagtctatcaagtccgtggtgtcatactggaacctggccctgatctttcaccgcaaggctgaagatatcgagaacgatgccctgtcacctgaggaacaggaggaatgtcgcaattacctgaccaagacacgggactatctcatcaagattatcgacgatggggattccaacctgtccgtggttaagaaactaccagtgcccctagagtcagtaaaacagatgctcaactccgtgatgcaggaactggaggactatagcgaaggcggaccactgtacaagaatggaagtctccggaatgcggacagcgaaatcaagcatagtactccttctccgacaaagtacagtttgagcccaagcaaaagttacaaatacagtccggaaactccacccaggtggactgaagatcggaactccctgttgaatatgatctgccagcaggtggaagcaattaaaaaggagatgcaggagcttaaactgaactctagtaaatcagcctccagacataggtggccaacggaaaactatgggcctgatagcgttccagatggctaccagggttctcagactttccacggcgcaccactcacagtcgccaccacagggccaagtgtttactattctcagagcccggcctataactcccagtacctgctacggcctgctgccaacgtgacaccaactaaaggctccagcaacacagagttcaagagtactaaagaaggtttttcaattccagtgtcagccgatgggttcaagtttgggatctctgaacctggtaatcaggaaaagaagcgcgaaaaaccactggagaatgacactggctttcaggcacaggatatttccgggcggaaaaaagggcgaggtgtcatctttggccaaactagtagcacgtttacgttcgcagacgtcgctaagtctacctccggtgaaggatttcagtttggtaagaaggatctcaattttaaaggattctctggagctggggagaaactgttcagcagcagatatggtaagatggcaaataaggcaaatacaagtggagattttgaaaaggacgacgacgcttacaaaacggaagactccgacgacatacatttcgagccagtggtacaaatgcccgagaaggttgagcttgtgaccggtgaggaaggggagaaagtgctgtactcccagggcgttaagctcttccgctttgatgccgaggtgaggcagtggaaagaaaggggcctggggaacctaaaaatcctgaagaacgaagtgaatggaaagctaagaatgctcatgcgacgcgagcaggtcctcaaagtttgtgctaaccactggattactacgacaatgaatctcaagcctctaagcggaagtgacagggcctggatgtggtcagcctcagacttctctgacggtgatgctaagctagaacgattagctgcaaaattcaagacccctgaattggctgaggagttcaagcagaagtttgaagaatgtcaaaggttgttactcgatatccccctgcaaaccccacacaagctggtggacactggccgagccgccaaactaattcagcgcgccgaagagatgaagtccgggctcaaagacttcaagacgtttctgacgaacgaccaaaccaaggttacagaagaggagaataagggatctggcacaggagctgcgggagccagtgacacaactattaaaccaaacgccgagaacacaggaccaacgttggaatgggacaactacgatttaagggaggacgctctcgacgattccgtgtccagctctagcgtgcacgcaagtccgctggcgtctagcccagttcggaagaatctgttcaggtttgacgaatcaaccacaggcagtaatttctcctttaaaagtgccctatctctgtccaagagcccggctaagctgaaccagtcaggcacctccgttgggaccgatgaagagtccgttgtaacacaggaggaggagcgcgatggccagtattttgagcctgtcgtccctctccctgacctggtggaggtgtcttctggggaggagaacgaacaggtcgtcttttcccatagggctgagatctaccgctacgacaaggatgtcgggcagtggaaagagcgggggattggagacatcaaaatactccagaattacgacaacaagcaggtccgcatcgtgatgaggcgggaccaggtgttaaaactttgtgccaaccataggattacccccgacatgtcactccagaacatgaaagggactgaaagagtttgggtttggaccgcctgcgatttcgccgatggtgagaggaaggtcgaacatctcgccgttcgattcaaactgcaagatgtagccgatagcttcaagaagattttcgacgaggcaaagaccgcgcaggaaaaagacagcctgataaccccccatgtgtccaggtcgtctactcctcgagaaagcccctgcggcaagattgctgtagctattcttgaggaaactacaagggagagaacagatgtgattcaaggagatgatgtggccgatgctgcatctgaagtggaggttagcagcacctccgagacaacaactaaggctgtggtatccccacccaagttcgtcttcgtctcagaatcggtaaaaagaatcttttcatccgagaaatcaaagccatttgtattcggaaatagctccgccaccggctccttgtttggtttcagctttaacgccccccttaagtctaataactccgaaacgagctctgtggcacaatctggcagtgagtccaaggtcgagcccaaaaagtgcgaattgtccaaaaattcagatatagagcaaagctccgactccaaagtgaagaacctttcagcatctttcccaacagaggagtccagcatcaactatacctttaaaacaccagaaaaggagcctcctctttggcacgccgagtttactaaggaggagcttgtgcagaaacttcgctctacgactaaaagtgctgaccatttgaatgggctgctccgggaaatcgaggccactaacgctgttctgatggagcagatcaagctcttaaagtcagaaataagacggctggagcggaatcaggagagagaaaagagcgccgccaatttggaatatcttaagaatgtgctcctgcagttcatctttctcaaaccaggaagcgaacgggaaagactgctgcccgtcattaacacgatgctgcaacttagcccagaggagaagggtaagttagccgccgtcgctcaagatgaagaggaaaacgccagccgatccagcggttag

SEQ ID NO: 202517 - DNA, 2715 bp, synthetic construct
  misc_feature 1..2715: note = Description of Artificial Sequence: Synthetic coding sequence
  source 1..2715: mol_type = other DNA
atgcggcggagcaaggccgacgtggagcggtacgtggccagcgtgctgggcttgacccctagtcctcgtcagaagagtatgaaagggttctattttgcaaaattatattacgaagctaaagagtatgacctcgctaaaaaatacatctgcacatatataaacgtgcaggagcgcgatccaaaagctcacaggttccttggtctcctgtacgagcttgaggagaatacagaaaaagccgttgaatgttacagacgttctgtcgagcttaaccctacccagaaggatcttgtactgaagatcgccgagctgctctgcaagaacgacgttaccgatggacgtgcaaagtactgggtggaacgcgctgccaagctgttccccggtagccccgccatctataaacttaaagaacagttgttggactgtgagggggaggatggttggaataagctcttcgatcttatccagtcagagctgtacgtcagacctgacgatgtccacgttaacataagactggtggagttatatcggagcacgaaacgcctgaaggatgctgttgcccactgccacgaggctgaaagaaacattgccctgcgcagttccttagagtggaactcttgcgtggttcagacactgaaagagtaccttgagagtttacagtgcctggaatcagataagagtgattggcaggccaccaataccgacctcctgctggcatatgccaatctgatgttgctgaccctgtcaaccagggacgtgcaggagaatcgggagttgctggaaagtttcgatagcgcactgcagagcgccaaaagcagtcttggaggaaacgacgaattgagtgccactttcttggaaatgaaaggtcatttctatatgtatgcaggcagccttctgctgaagatggggcagcatggtaacaacgtgcagtggcgcgccctatcagagctggctgctctgtgttacctgattgcgttccaagtccctagaccaaagatcaagctgcgggagggaaaggcggggcagaacctccttgaaatgatggcctgcgacagactgtcgcagtccggtcacatgctgttaagcctttcccgaggcaaacaggacttcttgaaagaggtcgttgagacatttgctaacaaaatcgggcagagcgcactctacgatgcccttttttcttcacagtctcctaaggacacatcttttttgggctctgacgatatcggcaagatcgatgtgcaggagcctgaacttgaagatctagcccggtacgacgtaggagctataagggcacataatggttcccttcagcatttgacctggctggggttgcagtggaacagcctgccggccctgccgggaataagaaagtggcttaaacaactcttccatagactcccccacgaaacttcacggttggaaacgaatgccccagagagcatttgtatcttagacctggaagtgtttctgctaggtgttgtgtacacgtcccacctccagcttaaggaaaaatgtaattcacatcacagcagttaccagcctctttgtttaccctttcccgtgtgtaagcagctttgtacagagaggcagaaaagctggtgggacgcggtctgcaccttgatacaccggaaggccgtaccagggaacctggccaaattgcgtttactcgtgcagcacgagatcaatacactgagggcgcaggaaaaacacgggctgcagccagctctgctcgtacactgggccaagtacttgcaaaagaccggttctggcttgaattcgttctacggccagctggaatacatcggtcgatctgtgcactattggaaaaaggtgcttcccctgttgaagattatcaaaaaaaattcgattcccgaaccaatcgacccattattcaaacacttccactcagtggacatccaggcctccgaaatcgttgaatatgaggaggacgcacatatcacattcgcaatgctggacgccgtgaacgggaatattgaagacgctgtgacagcattcgagtctatcaaaagcgtggtgagctactggaatctcgcattgatctttcatagaaaggccgaggacattgagaacgatgctctgtcccctgaggaacaggaggagtgcaggaactacctcaccaagacccgggactatctgatcaaaataatcgatgacggcgatagcaatttaagcgtagtcaaaaagctgcccgtcccgcttgagagcgtgaagcagatgctgaacagtgttatgcaagaactcgaagactatagcgaaggcggccccttatacaaaaatggatccctccgcaacgccgatagtgagatcaaacactctaccccctcaccaacaaagtactccctgagccctagcaagtcttacaagtattcacccgaaactcctccccggtggaccgaagacagaaattcactgcttaatatgatttgccagcaggtggaggcaattaagaaagaaatgcaagagctgaaactgaactcttctaaatcagcctctcgtcaccgctggcctaccgagaattatgggcccgacagtgtgcccgacggttaccaaggttcccagacatttcacggcgcaccactgacagaggccgcccaccgacattttaccatcgagaagcacggagatagtaaatggatcatatataggtttactaagcaactctgcggaactgagcgggcacgggccaaaatctcgtag

SEQ ID NO: 202518 - DNA, 5298 bp, synthetic construct
  misc_feature 1..5298: note = Description of Artificial Sequence: Synthetic coding sequence
  source 1..5298: mol_type = other DNA
atgcggcggagcaaggccgacgtggagcggtacgtggccagcgtgcttggtctcacgcccagtcctcgccagaaatctatgaagggattttatttcgcaaaactctactacgaagcaaaagagtatgatctagccaaaaagtacatctgtacctatattaacgtccaggagagggatcccaaggcccatcggtttcttggcctgttatacgagctggaagagaacacggagaaggccgtggaatgctacaggcggagcgtcgagctgaacccaactcagaaggacctagtgttgaaaatcgccgaactcctgtgtaaaaatgacgttaccgatggacgcgccaagtactgggtggaacgcgctgccaagttatttcccggttcccctgctatttacaagctaaaggagcagttactggactgcgagggggaagacggctggaataagctgtttgatttaattcagtccgaactttatgtgagaccggatgacgttcacgtgaacatccgtctggtcgaattgtatcgctcaactaaaagacttaaggatgcggtcgcacactgtcacgaagcagaacgaaacatcgctttacggtcctctctggaatggaacagttgcgtggtgcaaacactgaaggaatatctcgaaagtctccagtgccttgagagtgataaatccgactggagagcaactaatacagatctgctgctagcctacgccaatcttatgctattgacgctgagcacccgagacgtgcaggagaacagagaattactggagagcttcgacagcgccttacagagcgctaaaagcagcctgggggggaacgacgaactttcggctacattcttggagatgaagggtcacttttatatgtacgctgggtccttgctactgaagatgggtcagcacggtaacaatgtgcaatggagggcactgagcgaactagcagcactgtgttatctcatagcatttcaggtgccaagacccaaaatcaagttgcgagaaggtaaggctggccagaatttgcttgaaatgatggcttgtgacagattgtctcagagcgggcatatgttgctgtcactcagccgaggtaagcaggactttctgaaagaggtggtggagaccttcgcaaataagatagggcagtcagcactttacgacgctctgttttcttcccaatccccaaaggatacctcatttctgggatctgacgatatcgggaagatcgacgtccaagagcccgaattggaagacctcgcaaggtacgatgtgggggcaattcgggcgcacaatggctccctacagcacctgacatggcttgggctccaatggaattccctccctgcactgcctggcatccgcaagtggctcaagcagctgttccatcgcttaccacacgagactagcaggctggaaacaaacgcccccgaatcaatttgcatcttagatctcgaggtctttctcctgggcgtagtgtacaccagtcatctacagttaaaggaaaaatgtaatagccaccacagcagctaccagcctctgtgtttacctttccccgtgtgtaagcagctctgtactgagcgccagaaatcctggtgggacgcagtctgcactctgatccatcgcaaggcagtacccggtaatctggccaagctccgattgttggtgcagcatgagatcaacaccctcagggcccaggagaagcatgggttacagcccgctcttctggtgcactgggccaaatacttgcagaaaactggaagtgggttgaattctttctacgggcagcttgagtacatcggacgctctgttcactactggaagaaagtgctgccactgttgaaaattattaagaagaattccatacccgaaccgatcgaccctctcttcaaacattttcactccgttgacattcaggcatcagagatagtcgagtatgaggaagatgcacatatcacattcgcgatcctggacgcggtaaacggcaacatcgaagatgccgttacggcattcgagtccataaagtctgtggtttcgtactggaatctggccctgatctttcaccgcaaggctgaggacattgagaacgacgcactgtcaccagaagaacaagaggaatgccgaaactatttgactaaaacccgcgattaccttattaagattatagacgatggagactctaacctgtccgtggtcaaaaagttgcctgtcccactggagagtgttaagcagatgctcaacagcgtgatgcaggagcttgaggattactccgagggcggccccctgtataaaaacggctctctcaggaacgctgactctgaaattaagcacagtacaccatctccaacaaagtattctctgagcccctcaaaatcctataaatattcaccagagacccctcctcgttggacggaggacaggaacagtctgctgaatatgatttgccagcaggtggaggctattaaaaaggagatgcaggagttaaaactcaatagcagcaagagcgcatcccgacaccggtggcctacagaaaactatgggcctgattccgtgcccgacggttatcagggcagccagacttttcatggcgcgcctttgactgttgctactacaggtcctagcgtctactattcccagtcaccggcttacaattcccagtacctactgagacccgctgcaaacgtaaccccaaccaagggtagttccaatacagagttcaagagtacaaaggagggcttttcgatccccgtgtcagccgacggttttaaatttggcatttcagagcccgggaaccaggagaagaaacgggagaagcccctagagaatgacaccggacttcaggcccaggacatacgagggaggaaaaagggcagaggggtaatctttgggcagacaagtagtacgtttaccttcgccgacgtagccaaatccactagcggtgagggcttccagtttgggaaaaaagatctgaatttcaaggggttcagcggcgcgggtgagaaactcttctcatcacgctatggcaaaatggcgaacaaggctaacacaagtggggatttcgaaaaggacgacgatgcgtacaagactgaggacagtgacgatattcattttgagcccgtggtccagatgcccgagaaggtcgagctggtcaccggcgaggaaggcgagaaggtgctctatagccagggtgtgaagctctttcggttcgatgccgaggtgagacagtggaaggaacgcggactgggtaacctgaagattctgaaaaatgaggtgaacggtaaactccggatgcttatgaggagagagcaggtactcaaagtctgcgccaaccattggataaccaccactatgaatctgaaacccctgagcgggagcgaccgagcgtggatgtggagtgcaagtgacttttcagatggggacgccaagctcgagagactggccgctaagttcaagacacccgaactggccgaagaattcaaacagaagttcgaagagtgtcagcggttactgctggacattcccttgcaaactcctcataaattggtggataccgggcgtgccgcaaaactaatacagcgagcggaagaaatgaagagcgggctgaaggacttcaagacatttttgaccaacgaccagacaaaagtcacagaggaggaaaataaaggatcgggaactggtgtagctggagcctctgacacaacgatcaaacccaacgctgagaataccggtcccactttggagtgggataactatgacctgcgtgaagacgcactcgacgacagcgtttccagtagctcagtgcacgctagtcccctggcgtcctcccccgtccgcaagaacttgtttaggttcgatgaaagcaccacgggtagcaattttagcttcaagtcagcactaagtctctctaaaagccccgctaagctgaaccagagcgggacctctgtggggacggacgaggagtcggttgtgacgcaggaagaggagcgcgacggccagtacttcgaaccagttgtacctcttccggaccttgtggaggtgagcagcggcgaagaaaatgaacaggttgttttcagccatagagccgagatctatcggtatgataaggacgtgggacagtggaaagagaggggcatcggagacataaagattctgcagaactacgacaataagcaggtcagaattgtgatgcgcagagatcaagtgttaaaactgtgtgctaaccataggattacccccgacatgtccctgcagaacatgaaagggacggagagggtctgggtctggaccgcctgcgacttcgcggatggagagcgtaaggtggagcacctcgctgtccggttcaaacttcaggatgtggcagatagctttaagaaaatatttgatgaagccaaaaccgcccaggagaaggacagtctgatcactcctcatgtatcaaggtcctccacacccagagaaagtccttgtggcaaaattgcggtggccgtgctggaggaaataacgcgtgaaagaactgacgtgattcagggggacgatgtagcggacgccgcatcagaagtggaagtgagttcaacgagcgaaaccaccaccaaggcggtggtgagtccaccgaaatttgtctttgtctcagagagtgtcaagaggatattctcttctgagaagtcgaaacctttcgctttcggcaacagtagcgcgacaggatctctgttcggcttctcctttaacgcccctctaaagagcaataattcggagacatcaagcgtggcgcagagcggctcagaatctaaagtcgagccaaagaagtgcgaactgtctaagaatagcgatattgagcaatcttctgattcaaaggtgaagaacttgtcggcttccttcccaacggaagaatcatcaattaactacacttttaaaacacccgagaaagaaccacctctctggcacgccgagttcactaaagaagaactggtccagaaactgcgctcaactacgaaatctgctgatcacctcaatggcctcctaagagagatcgaggccactaacgccgtcttgatggaacagatcaagctccttaagagcgaaatacgccgcctcgagaggaaccaagagcgtgaaaagagcgctgccaacctggagtaccttaagaacgtgttgttgcagttcattttcctcaaacctggaagcgaaagagagcgactcctccctgtgatcaacaccatgctgcagctgagccccgaggagaaaggcaagttagccgccgtggcccaggatgaggaggaaaatccatcccgcagcagcggatag

SEQ ID NO: 202519 - DNA, 1407 bp, synthetic construct
  misc_feature 1..1407: note = Description of Artificial Sequence: Synthetic coding sequence
  source 1..1407: mol_type = other DNA
atgggcaccgccacccccgacggccgggaggaccaggagcggctgtgggtgagcgtcgaagatgcgcagatgcataccgttactatatggctgaccgtacgcccagacatgaccgttgccagcctgaaggatatggtcttcctggattatggtttccccccggtgttgcagcagtgggtcatcggtcaacggcttgccagagatcaggaaacactgcactctcacggcgttcggcaaaacggcgattccgcctatctctacctcctttctgctcgaaacacatcactgaacccccaggagttgcagagggaacgtcagctgcgcatgctcgaggatctggggttcaaggacttgacactgcagccccgcgggcccctggagcctggaccgcccaagccaggcgtcccccaagagccaggacggggccagcccgacgcagtccctgagccgccacctgtcggatggcagtgccccggttgcaccttcattaacaaacccacaagaccaggttgtgaaatgtgctgtcgagctcgacctgaagcgtaccaggtccctgctagctaccagccggatgaagaggagcgagcacggctcgccggcgaagaagaggcactgaggcagtaccagcaaaggaaacagcagcaacaggaaggcaattaccttcagcatgtccagctagaccaacgctccctggtgctgaacacggaacccgcggagtgtcctgtgtgctattccgttcttgccccaggggaagccgttgtcttgcgcgaatgtctccacactttctgccgtgagtgcctccaagggactattcggaatagccaggaagcagaagtatcatgcccatttatcgacaacacctatagctgcagtggaaagctgctcgaaagagagatcaaagccctgttgacccctgaagactatcagcgctttttggatctcggtatctccatcgcagaaaacaggagcgctttttcataccactgtaaaacaccagactgcaagggctggtgtttttttgaggatgatgtaaatgaattcacatgccctgtgtgttttcacgtgaactgtctgctgtgtaaggctatacatgaacagatgaactgtaaggaatatcaagaggacctggccttacgcgctcagaacgatgtggctgcccgacagacaaccgaaatgcttaaggtgatgcttcagcagggagaggcaatgagatgcccgcagtgtcagattgtcgtgcagaaaaaggatggatgcgactggattagatgcacagtgtgtcacactgaaatttgttgggttaccaaaggaccacggtgggggcctggcggcccaggcgacacctctggcggatgtagatgtagggtgaacggaattccttgccacccatcctgtcagaactgtcactag

SEQ ID NO: 202520 - DNA, 1533 bp, synthetic construct
  misc_feature 1..1533: note = Description of Artificial Sequence: Synthetic coding sequence
  source 1..1533: mol_type = other DNA
atggacgagaagaccaagaaggccgaggagatggccctgagcctgaccagggcagtggccgggggcgatgagcaggttgccatgaaatgcgcaatctggctggccgaacagcgcgtgccattgagcgtccagttgaagcctgaagtatcccctacccaggatataagactgtgggtctcagtcgaggatgcccagatgcacactgtcactatatggctgaccgtgcggcccgacatgacagtggccagcctgaaggacatggttttcttggattatggttttcctcccgtgcttcagcaatgggtcatcggacaacggctggcgagggaccaagagacccttcacagccatggagtcaggcaaaacggagatagcgcttatctctatctgttgtccgcacgtaatacatcactgaatccccaggagctccaacgcgagcggcaattgcgtatgctagaggacctggggtttaaggacctaactctgcagccacgaggaccactggagccaggtccacctaaaccaggggtaccacaggagcctggacgtggccagcctgatgctgtacctgagcctccaccagtcggttggcagtgcccaggttgtactttcataaataagccaacgagacccggatgtgaaatgtgttgccgcgcccggccagaagcttatcaggtgcctgcctcttatcagccagatgaggaggaacgtgccaggcttgcaggtgaagaggaagctttaaggcaataccaacagcgaaaacaacagcaacaggagggaaattacctgcaacatgtgcaattggatcaacgctctctggttctgaatactgaaccggctgagtgtcccgtttgttatagtgtattggcccccggtgaggccgttgtcctgagagagtgcttgcatacattttgccgcgagtgtctgcaagggactattcggaactcacaggaggcggaggtgagttgtcccttcatcgacaacacatacagttgtagcggcaagctgcttgagagggagataaaagcgcttctgacaccagaggattaccagcggttcctggacctgggtatatccatcgccgaaaatagaagcgcattttcctaccattgcaagacccccgattgcaaaggctggtgcttcttcgaagacgatgtgaacgaattcacttgtcccgtgtgctttcacgtcaactgtcttctttgtaaagctattcacgagcaaatgaactgtaaggaatatcaggaagacctggcacttcgcgcccaaaacgatgtggcagccagacagactacagagatgctgaaagttatgctccaacaaggggaggctatgcgctgcccccagtgccagattgtggttcagaagaaagatggatgtgactggataaggtgtactgtgtgtcacacagagatatgttgggttacgaagggcccacgctggggccctggcggtccaggggacacatcgggggggtgtaggtgtcgagtcaatggtataccctgccacccatcatgtcagaactgccactag

SEQ ID NO: 202521 - DNA, 1011 bp, synthetic construct
  misc_feature 1..1011: note = Description of Artificial Sequence: Synthetic coding sequence
  source 1..1011: mol_type = other DNA
atggacgagaagaccaagaaggccgaggagatggccctgagcctgacacgagctgtcgctggcggggacgagcaggtggccatgaaatgtgcaatctggcttgccgagcagcgcgtgcctctgagcgttcagctgaagcccgaagtctcccctacacaggatattagactgtgggtgagtgtggaagatgcccagatgcacaccgtgactatatggctgacggttcgccccgacatgactgtggcctccctgaaagatatggtctttctagactatggattcccgcctgttcttcaacagtgggtaattggacagagattagccagagatcaagaaacgctccactcacatggcgtgcggcagaatggagactccgcttacctctatctcctgagcgcgcgtaacacttccctgaatcctcaggagctgcagcgggagcgacagctcagaatgctcgaggacctgggattcaaggacttgaccctgcagccgaggggtcctctggaacccggcccccccaagcccggggtgccacaggagcctgggagaggacaacctgatgctgtccctgagccaccaccggttggctggcagtgccccggatgtacattcattaataaaccaacacgtcccggatgcgaaatgtgctgccgggctaggcccgaagcctatcaagtgccggctagttaccagcccgacgaggaggagcgggcacgtcttgccggtgaagaggaggccctccgccagtatcagcagcgcaagcaacaacagcaggaagggaactacctccagcatgttcagctggaccagaggtctttagtgctgaacactgaacctgccgaatgtcctgtatgctattccgtcctggcccccggagaagccgtcgtgcttcgtagtgcttgtagggctccttccgctactgcacgcagacgcagaagcccagcaccaagtctcactacaccgacccgcgccagggcaagttgttggcgcgggcgctcccgcagaagctag

SEQ ID NO: 202522 - DNA, 792 bp, synthetic construct
  misc_feature 1..792: note = Description of Artificial Sequence: Synthetic coding sequence
  source 1..792: mol_type = other DNA
atggacgagaagaccaagaaggccgaggagatggccctgagcctgaccagggccgtggccggcggcgacgaacaggtggccatgaagtgcgcaatatggcttgctgagcaacgcgtgcctttgtcagtgcagcttaagcccgaagtgtctcccacccaggacataaggagcaggggcgaaaagaccgaagaggtcggtgaagtgagagaggtacctgaccatggaggtcctcgtgtattgcccagagtggacagtaagtcctctgtagagccattggaaggcccaaactggttgtgggtcagcgtggaagacgcacagatgcatacggtcacaatatggctgacagtgaggcccgacatgactgttgcttcccttaaggatatggtcttcctggactatgggttccccccggtccttcaacagtgggttattggccaaagactcgcgagagatcaagaaaccttgcattcacatggcgtacgtcagaacggcgatagtgcctatctttacctcctgtctgctcgtaacacctcactcaacccacaggagcttcagcgagaacggcagttgcggatgctggaggaccttggctttaaggacctgacactgcagcccagaggacctctggagccgggtcctccgaagcctggcgtgccccaggagcccgggcgggggcagcctgatgccgtgcctgaacccccacccgtggggtggcaatgcccaggctgcacctttatcaataagcctactcgccccgggtgtgagatgtgctgtcgcgccagacctgagtag

SEQ ID NO: 202523 - DNA, 819 bp, synthetic construct
  misc_feature 1..819: note = Description of Artificial Sequence: Synthetic coding sequence
  source 1..819: mol_type = other DNA
atggacgagaagaccaagaaggccgaggagatggccctgagcctgacccgcgcagtcgcaggaggtgacgagcaggtggccatgaaatgtgcaatttggttagccgaacagagggtgcccctctcagtccaactaaagcctgaggtgtcgcctacacaggatatccgcctctgggtgtcagtggaggacgcgcagatgcacactgttacgatctggctgacggtgcggccggacatgaccgtggcttccttgaaggacatggtttttctcgactacggctttccgccagtactccagcagtgggtgatcggccagcggctggcccgagatcaggaaaccctgcactcacacggcgtgagacagaacggcgatagtgcatatctctatctgctgtctgcgaggaatacctcactcaacccccaggaactccaaagggaaagacagttgcgaatgctagaagacctgggctttaaggatctcactctgcagccccggggcccgttggaacccgggccaccaaaaccgggcgtgcctcaggaacctgggagaggtcaaccggacgccgtacctgaacctcctcctgtcggctggcagtgccccggttgtacattcatcaacaaacccaccaggcccggctgcgaaatgtgttgccgtgccaggcccgaggcttaccaggttcctgcctcgtaccagcctgatgaggaagagcgggcccgcttagcaggagaagaagaggctctgcggcagtatcagcagggggtcccagccggacatcacccacaacagcctggcggcggcgggctccttccattgcactag

SEQ ID NO: 202524 - DNA, 354 bp, synthetic construct
  misc_feature 1..354: note = Description of Artificial Sequence: Synthetic coding sequence
  source 1..354: mol_type = other DNA
atggacgagaagaccaagaaggccgaggagatggccctgagcctgacaagagctgtggctggaggcgatgagcaagtagcaatgaagtgtgccatctggctggcggagcagcgggtacccctgtcagtacagctcaagcctgaagtaagccccactcaggatattcgcctctgggtgagcgtggaggacgctcaaatgcacaccgtgacaatctggctcactgtgcgccctgatatgacagtggcttccctgaaggatatggtgttcctggactatggctttccccctgtgctgcagcagtgggtaataggccagagactcgcacgggatcaggagacacttcattcccattag

SEQ ID NO: 202525 - DNA, 768 bp, synthetic construct
  misc_feature 1..768: note = Description of Artificial Sequence: Synthetic coding sequence
  source 1..768: mol_type = other DNA
tgagagatggccctgagcctgacccgggccgtggccggcggcgacgagcaggtggcgatgaagtgcgccatctggctcgcggaacagagagtgccccttagcgtacagctgaaaccagaagtgtccccgacacaggacattagaagccggggcgagaaaactgaagaagtcggtgaggtgcgcgaagttccggaccatgggggcccacgggtgctacctagagtggatagcaagtcctctgtggagccgctcgaggggcccaactggctttgggtttccgttgaagacgcccagatgcataccgtcacaatctggctcaccgtgcggccggatatgacggtcgcatcactgaaggatatggtgtttctcgattacggttttcccccagttctccaacagtgggtcattgggcaacgcctcgccagggaccaggagacactgcattcccacggtgtgagacagaatggggatagcgcgtacctttatttactcagcgctcgcaatacatctctaaatccccaagagctccagcgggagcgccagcttcgaatgcttgaggatcttggctttaaagatctgacccttcagccccgcgggcctttagagcccggcccccctaaacccggagtcccacaggagcccggtagggggcaacccgatgccgtgcccgaaccaccgcccgtgggttggcagtgtcccggatgtactttcattaacaagcccactcgccctgggtgcgaaatgtgctgcagagctagacctgagtag

SEQ ID NO: 202526 - DNA, 819 bp, synthetic construct
  misc_feature 1..819: note = Description of Artificial Sequence: Synthetic coding sequence
  source 1..819: mol_type = other DNA
atggacgagaagaccaagaaggccgaggagatggccctgagcctgacacgcgccgtggcagggggagatgaacaggtcgccatgaagtgcgcgatttggctagcggagcagagggtccccctgtccgtgcagctgaagcccgaagtgagccctacccaggacatcaggttgtgggtgtcagtagaggatgcacaaatgcacactgtgacaatatggctgacagtgaggcccgatatgaccgtcgcttcattgaaagatatggttttcctggactacggatttccgccagtattgcagcaatgggtgatcggccagcggctagcccgcgaccaggagaccttgcatagccacggcgtgcgtcagaacggcgatagcgcttatttgtatcttctaagcgcccgaaacacctcgttgaacccccaggagctccaacgagaaaggcagctgagaatgcttgaagatctgggatttaaagacttgacactccagccgcggggccctttagagcctggtccccccaagccgggggtaccccaggagccaggccgcgggcaaccagatgctgtacctgagccaccaccagtaggatggcagtgtcctggctgcactttcattaataaacctacaagaccaggatgcgagatgtgctgtcgggcaagacccgaagcctatcaagtgcccgcctcctaccagcccgacgaggaggagcgtgctagactggctggggaggaagaggccctccgccagtatcagcagggggtgcctgctgggcaccatcctcagcagcccggcgggggcggacttttgccactgcactag

SEQ ID NO: 202527 - DNA, 4830 bp, synthetic construct
  misc_feature 1..4830: note = Description of Artificial Sequence: Synthetic coding sequence
  source 1..4830: mol_type = other DNA
atgaacagccccgtggaccccggcgcccggcaggccctgcggaagaaacctccagagagaactcccgaagatctgaataccatttattcctacctgcatgggatggagatcctgtcgaatctcagagaacaccagctaagactgatgagcgcccgggccaggtatgaacgatatagcgggaatcaggtgcttttttgttccgagaccatagctcgctgctggtacatattgttgagcggaagcgtgttagtgaagggctccatggttcttcctccgtgctctttcggaaagcagtttggcggtaaacgaggatgcgactgtctagtgctggagccttctgaaatgattgtggtcgagaatgccaaggataacgaagactcgatcctgcagagggagattcctgcccgtcagagcagacggagatttagaaagattaactataagggcgagaggcaaacgattaccgacgatgttgaggtcaactcctacctatcactacctgccgatctcacaaagatgcacctcacagagaatccacacccccaagtcactcatgtctccagttcccagagcgggtgcagcatcgcttccgatagcgggtctagctccctatctgatatttaccaggcgacagaatctgaggtaggagacgtggacttgactcgactgccagagggtcccgtggatagcgaagacgacgaggaggaggatgaggagatcgaccgtactgaccccctacagggaagggatctcgttcgggaatgtttggaaaaggagccagccgacaagaccgatgatgacatagagcagctcctcgagtttatgcatcaattacctgccttcgcaaatatgaccatgtctgttagaagagagctttgttccgtcatgattttcgaggtggtcgagcaggctggggccatcatcctcgaggatggccaagaactggactcatggtacgtgatcctcaacggtactgtagagatctcccaccctgatggtaaagttgaaaatctgtttatgggcaattcatttggcattaccccaaccctggataaacagtacatgcatggcatcgtgcggacaaaagtggatgactgccagttcgtctgtatcgcccagcaggactactggcgaatcctcaatcatgtcgaaaaaaacacacataaggtggaagaagagggtgaaatagttatggtgcatgagcatcgcgaactcgaccgcagcgggactcggaagggacatatcgtgatcaaagccacccccgagcgactcatcatgcacctgatcgaggagcacagcatcgtggatccaacgtacatcgaggattttttgctgacctatcggacatttctcgaaagtcccttagatgttggtatcaagctgctagaatggttcaagatcgattccttaagggacaaggtgactcggatcgttcttttgtgggtcaataaccatttcaacgatttcgaaggggaccctgccatgacccgctttctggaggagttcgaaaaaaacctggaggatacaaaaatgaacggacatctgaggctgctgaatattgcctgcgctgccaaagcaaagtggagacaggtcgtgctgcagaaggcttcgcgcgaatcacccctccagttctcattaaacggagggagtgagaaaggcttcggcattttcgtagagggggtggagcctggttccaaggcagccgatagcggcctaaagaggggggaccaaattatggaagtaaacggccagaattttgagaatattacatttatgaaggccgtggaaatcttgcgaaacaacacccacttagctctgacagtgaaaacaaacatctttgtattcaaggagttactgtttagaacagagcaggagaaatccggcgtgccgcacattccgaagattgctgaaaagaagtctaatcgccactcaattcaacatgtccctggggacattgagcagacgtcccaggagaaaggaagcaagaaggtgaaagcaaacaccgtcagtggagggaggaacaagattagaaaaattttagataagacacgcttttctatcctgccacccaagttgttcagcgatggcggactgagtcaatctcaagacgattcaatcgtaggcacccggcactgcaggcatagtttggctattatgcctatacccggcaccctatccagctcatcccccgacctgctgcagccaactaccagcatgctagatttttcgaatcccagtgatatccccgaccaggtgattagggtttttaaagtcgaccagcagtcatgctatatcattatcagtaaggatacaaccgctaaagaagttgtgtttcacgccgtgcacgagttcggtctaaccggagccagcgacacttattctttgtgcgaggtgagtgttacccccgagggcgtgattaaacaacgccgactccccgaccagttctcgaaactggcggaccgcatacagttaaatggccggtattacctcaagaataatatggagactgagaccctctgcagtgacgaagacgcccaggagctggtcaaggagagccagctatcaatgctgcagctctctacgatagaggtagccacccagctgagcatgagagattttgacctgttccggaacatcgaacccacagaatacattgatgatctgtttaagttaaattccaagaccggaaacacccaccttaagagattcgaagacatcgtcaatcaggaaaccttctgggtcgctagcgaaattctgactgaggccaatcaactgaaacgtatgaagatcataaagcatttcattaagatcgctctccactgcagagagtgcaaaaacttcaactccatgttcgctattatctccggtctgaacctcgccagcgtggcccgattgagaggaacttgggagaagctgccctcaaagtacgagaagcacctgcaggatttacaagatattttcgacccctcgaggaatatggcaaagtatcgtaacattctgtcaagccaaagtatgcagccccccatcatcccgctgttccccgtcgttaaaaaggatatgacctttctgcacgaaggcaacgactctaaggttgatgggttagtcaattttgaaaagctgagaatgattagtaaggagatacgacaagttgtgcggatgacctccgcaaatatggacccagctatgatgttcagacagcgcaagaagaggtggaggagcctcggtagcctttcccaaggatccacaaacagtaacatgctggatgtacaaggcggtgcccacaagaagagggcgcgccggtccagccttctgaatgccaaaaaactgtatgaggatgcccagatggcccgaaaggtgaaacaatacctaagctctctggatgtggaaaccgatgaggaaaaatttcagatgatgagtcttcaatgggaaccagcgtacggaacactaacaaaaaacctgagcgaaaagcggtcggctaaaagctctgagatgtcacccgtgcccatgcggagtgccgggcagaccactaaagcgcacctacatcaaccccatcgagtgtcgcaggtgctccaagttcctgcagttaacctgcaccccatccggaagaaaggccagactaaagaccccgccctgaatacctctctgccccagaaagtcctaggcactaccgaggagataagtggtaaaaagcacaccgaggacacgatttcggtggccagctccctgcactcaagccccccagcatcgccacaaggttctccccataaagggtacaccttgatccctagcgcaaagtctgacaatctgtctgacagttctcatagcgagataagctccaggtcgtcaatcgtgagcaactgcagcgtagactcgatgtctgctgccttgcaagacgagcgatgctcctcgcaagccttagctgtaccggagagcaccggcgccctggagaagaccgagcacgcttctgggataggcgatcattctcaacacggccccggttggacgttgctcaaaccatccttgattaagtgcctggctgttagttcatcggtttccaacgaggagattagtcaggagcacatcattatagaagccgctgactcgggtcggggcagttggactagctgttcttcatcctcacacgataatttccaatccttgccaaatccgaagagttgggatttcctgaatagctaccgccatactcacctcgatgaccccatcgccgaggtggagccaacggactccgagccctatagctgttctaagtcctgtagtcggacctgtgggcagtgcaaaggttccttggaaagaaagtcatggacttctagctcaagcctctctgatacatacgagcctaactatgggactgtgaaacaaagagtcctcgaatcaacacccgcagagtcgtccgaggggctcgaccctaaggacgcgaccgatcccgtatataagactgtgacgtcttctaccgagaaggggctgatcgtgtactgcgtcacctccccgaagaaagacgatagataccgagaacctccgccgacacccccgggctatcttggtatcagcctggccgatctaaaagagggtccccatacgcacctgaaaccccctgattactctgtggcagtgcagagatccaaaatgatgcataactctttatcccgcctcccaccggcctctctctcatcgaaccttgtcgcgtgtgtgccttccaaaatcgttacacagcctcagaggcacaatttacagccatttcatcctaagcttggtgacgtcaccgatgccgatagcgaggcagatgagaacgagcaagtctcggctgtttag

SEQ ID NO: 202528 - DNA, 4530 bp, synthetic construct
  misc_feature 1..4530: note = Description of Artificial Sequence: Synthetic coding sequence
  source 1..4530: mol_type = other DNA
atgaacagccccgtggaccccggcgcccggcaggccctgcggaagaagccaccagagagaacacctgaagacctcaacactatttattcttatctgcatggcatggagatcttatctaacttgcgtgaacatcagcttcggctgatgtcggcccgcgctaggtacgaaaggtactccggtaatcaggtccttttctgctctgaaacaatagcaagatgttggtacattttactgtccggttccgtgctcgtgaagggttctatggtgcttcccccatgctcgttcggcaagcagttcggggggaagcggggatgcgactgcctggttctcgagcctagcgagatgatcgtggttgaaaacgcgaaagataacgaggactctatccttcagagggagatcccagctaggcaaagtaggaggaggtttagaaagattaactacaagggcgagagacaaactatcacagacgatgtggaggtgaacagctatctcagccttccagccgatctgaccaaaatgcatctgaccgaaaatccgcaccctcaagtcacccacgtttcaagctcacaatctggatgctccatagcgtccgattctggctcttcaagcctatcagacatttatcaagcaacagagtccgaggtcggtgacgttgacctgactagactgccggaaggaccagtggattctgaggatgatgaagaagaggacgaggagattgatcgcacagatcctctacagggcagagatctggtgcgcgagtgtctggaaaaggagccggccgacaaaactgatgatgatatcgagcaattactcgaatttatgcaccagctgcccgcattcgccaatatgaccatgagcgtgaggcgtgagctttgtagcgtgatgatatttgaggtggttgagcaggccggcgccattattttggaggacggccaggaactggattcatggtatgtgattctgaacgggacagtggaaatttctcatcccgatggcaaagttgagaatctgtttatggggaactcctttggcataacacctactctggataaacagtacatgcatggtattgtacgtaccaaggtggacgattgccagttcgtttgcatcgcccaacaggattactggaggatactgaatcatgtggaaaaaaacacacacaaggtagaggaagagggtgagatcgtcatggtacatgagcatcgggaattagaccggtcgggtaccaggaagggacacatcgtgattaaggccacacccgagcgcctgatcatgcatttaattgaggaacacagcattgtcgacccaacctatatagaggacttcctgctaacatacaggacattcttggagtctccactggatgtggggatcaaattactcgaatggttcaagattgacagcctcagggacaaggtgacgcgaatcgtgttattatgggtgaacaatcattttaacgacttcgagggggacccggccatgacacggtttcttgaagaattcgagaagaatctggaggacacgaagatgaatggtcatctacgacttctgaatatagcttgcgcggcaaaagccaaatggcgccaggtggtcctgcaaaaggcgtccagggagagtcctctgcagttcagcctgaacgggggcagcgaaaaaggctttgggatcttcgttgagggagtggagcccggtagcaaagctgccgactccggactgaagcggggagaccaaattatggaagtcaacgggcaaaatttcgaaaatatcacctttatgaaggccgtcgagatactccggaataacacccatctggccctgaccgtgaagaccaacattttcgttttcaaggagctgctgttccgaactgagcaggaaaagagcggagttcctcatatcccaaaaatcgccgaaaaaaagagcaatcgtcatagtatacagcatgtcccaggtgacatcgaacagacaagccaagagaaaggcagtaaaaaagtgaaagcaaacaccgtgtcagggggtcgcaacaaaatcagaaaaattttggataaaacacgttttagcatcttgcccccgaaattattttctgatgggggcctgtcacagagccaagatgatagcattgtgggtacgagacactgcaggcattccttagcaataatgccgatcccaggtacgctgtcatctagcagccccgacctgttacaacccactactagtatgctggatttctctaatccctcagcggttggcttctattacatccccgaccaagtgataagagtgttcaaagtggatcagcaaagctgctatattataataagcaaagatactaccgcaaaggaagttgtgtttcacgccgtccacgagttcggtctgaccggtgcctcagatacttactcattgtgtgaagtatctgtcacgcccgagggcgtgatcaagcaacgccgattgccagatcagttcagtaagttggctgatcgcattcagctgaacggaaggtattaccttaagaacaatatggagacggagactttatgtagcgatgaagacgcgcaggagctggtcaaggagtcccaactcagtatgctccagttgtccacaatcgaagtggccacacagcttagcatgagagactttgatctgtttcggaacatcgagccaacagaatacatcgacgacctgttcaagttgaactccaaaaccggcaatacgcatctcaaaagattcgaggatatagtcaaccaggagaccttctgggtggcatctgagatactcaccgaagccaaccagcttaagcgcatgaaaattataaagcatttcatcaaaattgcgttacattgccgggaatgtaagaacttcaacagcatgttcgccatcatctcaggcttgaacctggcctctgtcgcaaggttgcgcggtacctgggagaagctgcccagcaagtatgagaagcaccttcaggatttacaagacattttcgatccatcccggaacatggccaagtacaggaacatcctgtcttcacagtcaatgcagccacctatcatccctttatttcccgtggtgaagaaagatatgacctttctgcacgagggaaatgatagtaaggtcgatggtctggtcaattttgagaaacttaggatgatcagcaaagaaatccggcaggtggtgagaatgacctctgccaatatggaccccgcaatgatgtttagacagagaaagaagcggtggcgtagcctgggcagcttgtctcagggaagcactaatagtaacatgctggatgtgcaaggaggggcgcacaaaaagagagccagacggtcatctttgctgaatgccaaaaagctttatgaggacgcgcagatggcccgcaaggtgaagcagtatctgtccagccttgacgtggaaacagatgaggagaaatttcagatgatgtctctgcaatgggagccagcatacggtacgttgaccaaaaacctttccgagaaacgatccgccaaaagctcagaaatgtccccagtaccgatgaggagtgctggccagaccaccaaggctcacctccatcagccccacagggtctctcaagtgctgcaggttcccgccgtcaatctgcatcccatcaggaagaaaggccagactaaagaccccgcactgaatacctccctgccccaaaaggtgctcggaacgaccgaggaaatctcaggaaagaaacacactgaggataccattagtgtagcctccagtttgcatagcagcccccctgcgtcgccacagggatctccgcataaaggctataccctgatcccatcggccaagtccgacaatctatctgattcaagccactctgaaatttcttctaggtcctccatcgtgagcaattgcagcgttgattcaatgtcagcagccttacaggatgagaggtgctcctcgcaagccctcgctgttcccgaaagtaccggggccttggagaagactgaacatgccagcggaataggagatcactcacagcatggaccaggatggacactgctgaaaccgagtctgattaagtgcttagctgtcagctctagcgtgtcgaatgaagaaatttctcaggaacatatcattatcgaggccgcggattcaggaagaggatcgtggactagctgcagttccagctctcacgataatttccagtccttgccgaatccgaaatcatgggattttctgaactcctatcgccacactcacctcgatgatccgatcgcagaggtggagccgacagattccgaaccctatagctgtagcaaatcctgcagtcgcacctgcggacagtgcaagggaagccttgagagaaagagctggacatccagttcatctctgtcagatacatacgaacctaactatgggactgtaaagcagcgcgtgctggaatccactcctgccgaatcaagtgagggacttgacccaaaggatgctaccgatccagtctacaaaaccgttacatcaagtactgagaaaggcctcattgagaacgaacaggtaagcgctgtctag

SEQ ID NO: 202529 - DNA, 4530 bp, synthetic construct
  misc_feature 1..4530: note = Description of Artificial Sequence: Synthetic coding sequence
  source 1..4530: mol_type = other DNA
atgaacagccccgtggaccccggcgcccggcaggccctgcggaagaaaccgccagagaggacccccgaggatctcaacacgatctatagctatctgcatgggatggaaatcttgagcaatctgcgcgaacatcagctgcgcctcatgagcgcccgggctcggtacgaaagatatagtggaaatcaggtgcttttctgctccgaaactatcgctagatgctggtatatcctgttgtccgggtctgtccttgttaagggttcaatggtacttccaccgtgctcgttcgggaagcagtttggtggaaagagaggctgcgactgccttgtgttagagccgtcagagatgatagtcgtggaaaatgctaaggacaatgaagactccatcctacaacgcgagatccctgctagacaatctagaaggcggtttagaaaaattaattacaagggagagcgtcaaaccattaccgacgacgtggaggtcaactcctatttgtcactgcctgcagacctgacaaaaatgcatcttacagagaaccctcacccacaggtgacacatgtgtctagcagccagtctggatgctctattgcctcagattcggggtcctcaagtctcagtgatatctaccaggctacagagagcgaggttggagatgttgacttgaccagactccctgaagggcctgtcgattctgaggacgatgaggaagaagacgaagaaatcgatagaacagaccccctgcagggccgggacctggtgcgtgagtgcctggagaaagagccagcagacaaaaccgacgacgacattgagcaactgctggagttcatgcaccagctgcccgcgtttgctaatatgacaatgtcagttaggcgggaactgtgttctgtaatgatcttcgaggtagtggagcaggccggagctatcattctggaagatggccaggaactggatagctggtacgtgatacttaatggtaccgtggagatcagccaccccgatggcaaggtggaaaatctgtttatgggtaacagcttcggcattacacccaccctggacaaacagtatatgcatgggattgtccgcactaaggtcgatgactgccaatttgtgtgcatcgcacagcaggactactggcgaattttaaatcacgtggaaaaaaacactcataaagtagaggaagagggagagatcgtcatggtccacgagcatcgcgagttagacagatccggaacccggaaaggtcacattgtaatcaaggctacacccgaacggttgattatgcacttgatcgaggaacattcaatagtcgatccgacttatattgaagatttcctcctgacttacaggacttttctggaaagcccactcgatgtcggcataaagctcctggagtggttcaaaattgatagcttgcgagacaaggtgacccgcattgtacttctctgggttaacaaccacttcaatgattttgagggcgatccggccatgactcgtttcctcgaagagtttgagaaaaatttggaagatacaaagatgaacgggcacttgcgcctgttgaacatcgcctgtgccgctaaagcaaagtggcggcaggtcgttcttcaaaaagcctctagagaaagtcctctgcaattcagcctaaatggcggatccgagaagggttttggcatattcgtggaaggagtcgagccaggaagtaaagcagcagattctggtcttaagcgcggggaccagattatggaagtgaacggtcaaaattttgagaatattacgtttatgaaggctgtcgaaattctgcgtaataacacacacctcgcgctgacagtgaagaccaacatcttcgtgtttaaggagcttttgttccgtactgaacaggagaagtctggagttccacacattcctaagatcgcagaaaaaaagagcaatcgccactctattcagcacgttcccggcgacatagagcagacaagtcaggagaaaggaagtaagaaagtgaaggctaatactgtgtcaggaggcaggaataagattcggaagatcctggataagacaagattctccatactcccacccaaactattctctgatggaggactgtcacaatcgcaggatgattccatcgtcggcactcgccattgccgacactccttggccattatgccgatccctggcacgttaagtagcagctcacccgatttgctgcagcctactacatctatgctagacttctccaatccttcggctaaagggtttaagaatataccggaccaggtgattagagttttcaaagtggatcagcagtcttgttacatcatcatctcgaaagatacaacagcaaaggaggtcgtgtttcacgccgtgcacgagttcggcctgaccggtgcatccgacacatactcactctgtgaggtgagcgttaccccagaaggagtgattaaacaacgcagactgccagaccagttctctaaactcgccgatcgcatccagctcaacggccggtactatctaaagaacaatatggaaaccgaaactctgtgctccgacgaggatgcacaagagctagttaaagaaagtcaactaagtatgttgcagctgagcaccatcgaggtcgccacacagcttagtatgcgcgactttgacctttttcgaaatatagaacccacagagtacattgatgacctgttcaagttgaactcaaaaaccggcaacacccatctgaagaggtttgaggatatcgttaaccaggagacattctgggtggcgtccgagatcctgactgaggccaatcaactaaagcggatgaaaattataaagcactttatcaagatcgccttgcattgtagagagtgcaaaaactttaacagcatgttcgccattatcagcggcctgaacctggcatccgtagcccgccttcgcggcacctgggagaaactgcctagcaagtatgagaaacatcttcaggatctgcaggatatttttgacccctcaaggaatatggctaagtacaggaatatcctctccagccaatctatgcagccccctatcattcccctctttccagttgtcaagaaggatatgaccttcctgcatgagggtaatgattccaaagttgatggcctggtgaatttcgagaaactcaggatgatcagcaaggagatcaggcaggtcgtgcggatgacctccgctaatatggatccagccatgatgtttaggcagagaaaaaagcgctggcgcagcctcggaagcctttctcagggatctacgaacagtaacatgctcgacgttcaaggcggtgcacacaaaaagagggccagacgctccagcctgcttaacgcaaagaaactctatgaagatgcccagatggccagaaaagttaagcagtacttatccagcctggacgtcgagaccgacgaggaaaagttccaaatgatgtctctgcagtgggaacctgcctatggcaccctgacaaaaaatctgagcgagaaaaggagcgctaaaagcagcgagatgagtccagtgccaatgcgatccgcaggccagaccaccaaggcacacctgcaccagccccatcgcgtgtctcaggtgctgcaggtgcctgccgtgaacctgcaccctatcagaaagaaaggccaaacaaaggacccagctttgaatacttcgctgcctcagaaggtactcgggacaacggaggagattagcgggaaaaagcacacagaggataccatttctgtcgcatcatccttgcattcttcaccgcccgccagcccccagggatcgcctcacaaggggtacactctcatcccttccgcaaaatctgataatttgagcgatagctcacactccgagattagctcacgatcctccattgtctctaattgctctgtcgactcaatgagtgccgccttacaggatgaaaggtgtagttctcaggccttggcggtccctgaatccactggagcgctggaaaagacggagcatgcgtccgggatcggagaccactctcagcacgggccgggatggaccctgctgaaaccatcgctgataaagtgtttagccgtgtcaagttctgtttcgaacgaggagatttcacaggaacatatcatcattgaggctgctgattccggccgcgggagctggaccagttgtagtagctcctctcatgacaattttcagagtttaccaaaccctaagagctgggacttcttaaattcctacaggcatacccatttagatgacccaatagccgaggtagagcccactgactcagaaccctactcatgtagcaaatcatgcagcaggacctgcggccagtgtaagggctcgttagaacggaaaagctggacctcttccagctctctgagcgacacatacgagcctaattatggaacagtgaaacaaagggtgttggagagtactcccgctgagtccagcgaaggcctggaccccaaggacgctacagacccagtatataaaacggtaactagcagcactgagaagggcttgatagggaagaagcagacctcatatttttag

SEQ ID NO: 202530 - DNA, 4515 bp, synthetic construct
  misc_feature 1..4515: note = Description of Artificial Sequence: Synthetic coding sequence
  source 1..4515: mol_type = other DNA
atgaacagccccgtggaccccggcgcccggcaggccctgcggaagaaacctccagagcgtacccccgaagacttgaacaccatctacagctatctgcatggaatggagatcctgagcaatctcagagagcatcagctgcgattgatgtcagcgcgggcaagatacgagagatattccggaaatcaggtgctgttttgctccgagaccatcgcccgatgttggtacattctgctttctggtagtgtcctggtgaaagggtccatggtgttgccaccttgcagctttggaaaacagttcggcggcaagcgcggttgcgattgtctcgtgctcgaaccgagcgagatgattgttgttgagaacgctaaagacaacgaggactccatcctccaaagagaaatccctgccaggcagtctaggagaagattcaggaaaatcaactacaaaggcgaacgtcaaaccattaccgatgatgtcgaagtgaattcttacttatctctacctgccgacttaactaaaatgcacctcacagaaaacccccacccccaggttacacacgtttcttcctcccagtcaggatgttccatagccagtgattctggcagttcttcactgtctgacatatatcaggccaccgagtctgaggtcggcgacgtagatcttacgcgcctccctgagggccctgtcgacagtgaggatgacgaagaagaagacgaagagatcgataggacggaccccctccagggccgggacctggtacgggagtgtctggagaaagagccagccgacaagactgatgatgatattgaacagctgctggagtttatgcaccagcttcctgcattcgccaatatgaccatgtccgtgcgacgcgagttgtgttccgtgatgatatttgaagtggtcgaacaggccggcgctatcattcttgaagatggccaggaattggactcgtggtatgtgattctgaatggcaccgtggaaatatcccatccagatggaaaggtagaaaatctgtttatgggtaattcgttcgggatcacgcccacacttgacaagcagtacatgcacgggatcgtgcggacaaaagttgatgactgccaattcgtttgtattgcacagcaggattactggcgcatcttgaaccatgtggagaaaaacacccacaaagtcgaggaagagggggagatcgtaatggtgcacgaacaccgggagctggaccgctcaggaacgagaaaaggacacattgtgataaaggctactcccgagaggctgattatgcatctcatagaggagcactccatcgtggatcccacatacattgaggactttttgctaacttatcggaccttcctggagagccctctcgatgtggggatcaaactgctggaatggtttaagatagatagcctcagagacaaggttactagaatcgtcttgctttgggttaacaaccactttaacgacttcgagggggatcctgctatgacccgatttctcgaggagtttgaaaaaaatctggaagatacaaagatgaacgggcatctccgcttgctcaacattgcttgcgccgcgaaggccaaatggagacaagtcgtcctccaaaaagcctcccgcgagtcaccccttcaattctccttaaacggagggagcgagaaggggtttggaattttcgtggagggggtcgagcccggctcaaaggctgccgattcaggattgaagagaggagatcagattatggaagtgaacgggcagaatttcgaaaacattaccttcatgaaagccgttgagatcctgcggaataatacacacttagccctcaccgtcaaaacgaacattttcgtgttcaaagagctgctctttcgcacagagcaagagaagtctggagttccgcatatacccaaaatcgccgagaagaaatcgaatcgccacagtatccagcacgttccaggggacattgaacagacctctcaggaaaaagggtctaaaaaggtgaaggccaataccgtgtccggagggcgcaataaaatccgtaaaattcttgacaagactaggttcagcatcctgccaccaaagttgttcagtgacggaggcttgtcacagagccaagacgacagtattgtcgggacaagacattgtagacattctctggccattatgccaattccagggacactgtctagcagctctccagacctactgcagccaaccacctctatgctggatttttccaacccctccgatattcccgaccaggtaataagagtgttcaaagtcgaccaacagtcttgctacatcataatcagtaaagatactaccgctaaggaagtggtctttcatgctgttcatgaatttggtctgacaggcgcgagtgatacttacagcttgtgtgaagttagcgtgactcccgagggggtgattaagcagcgaagacttcctgaccagttcagcaaattggccgaccggatccagctgaatgggagatattacctcaaaaataacatggagacagagaccttgtgcagtgacgaagacgcacaggagctagtgaaggagtctcagctctcgatgctacagttatctaccatcgaagtggccactcagctcagtatgagagatttcgacctgttccggaacatcgagccaaccgaatatatcgatgatctgtttaaacttaattccaagactggtaatacgcacctcaagagatttgaagatattgtcaaccaagagacattctgggtcgcatcagaaattttaaccgaggctaatcagctgaagaggatgaaaatcattaagcactttatcaaaattgccctgcattgtcgcgaatgcaagaacttcaattccatgttcgccattatttccggcctgaatttggccagcgttgcccgtttgaggggaacttgggagaaactgccttccaagtatgaaaaacaccttcaggatctgcaggacatctttgacccgagccggaacatggctaaataccgaaatatccttagttcccagagtatgcagcctccgatcattcctctgtttcccgtcgtgaagaaagacatgaccttcctgcatgagggtaatgacagtaaggtagatggtctcgtcaactttgaaaagcttcgaatgattagtaaggaaatccgacaggtcgtcagaatgactagtgccaacatggaccccgcaatgatgttccgccagaggaagaaaaggtggcgatccctgggatctctttcccagggatccaccaattccaacatgctggatgtgcaagggggggcccacaagaagcgcgctcgtcggtcgagccttctgaatgctaaaaagctgtacgaggacgcccagatggcgcgaaaggtaaaacagtacctatcctctctggacgttgagacagatgaagagaagttccagatgatgtctttacagtgggaacccgcttatggcacacttacaaaaaatctatctgaaaaacgcagtgctaaaagctccgaaatgtcccctgttccaatgagatcagccggacagaccacaaaagcgcacctccatcagcctcacagagtttctcaggtacttcaggtgcctgcagtgaatttacatcctatccggaagaaaggtcagacaaaagaccccgccttgaacacgagcctgccccagaaggtgctgggcaccaccgaggagatctctggtaagaaacacaccgaggacacgattagcgtggcttcttcgctacactcaagccctcccgcttcaccacagggtagtccccacaagggctacacgctgatcccgagcgcgaaaagcgacaacctgagcgatagcagccattccgagatttcatctaggtcctcaatcgtctcaaactgctccgtggacagcatgagtgcagctctgcaggacgagcgctgctcctctcaagcactggccgttccagaaagtaccggcgctctcgaaaaaacggagcatgcctctggaattggtgatcatagccagcacggccccggctggactcttctgaaaccatccctgattaagtgcttggcagtcagtagcagcgtcagtaacgaggaaatttcccaggagcatatcatcatcgaggctgccgactccggcagaggatcatggacttcgtgctccagcagcagccatgacaatttccaaagcctgccaaatcccaaatcctgggacttcctgaatagctataggcatacacacctggatgaccccatcgcagaggtcgaacctactgacagcgaaccttactcctgttcgaagagctgctctaggacctgcgggcagtgcaaaggatctttggagaggaagtcttggacgtcttccagctccctgtcagatacctacgagccgaattacggcactgtgaagcaaagagtgctggagagcactcctgccgagtctagcgaggggctcgacccaaaagacgccactgatcctgtgtacaaaactgtcacctcctctacagaaaagggtctcatcgagaacgagcaggtgtcagccgtgtag

SEQ ID NO: 202531 - DNA, 4806 bp, synthetic construct
  misc_feature 1..4806: note = Description of Artificial Sequence: Synthetic coding sequence
  source 1..4806: mol_type = other DNA
atgaacagccccgtggaccccggcgcccggcaggccctgcggaagaagccgccagaacgcacgcccgaagacctcaatactatatactcttatctgcatggcatggagatcctctcaaatttacgggaacatcagctacggctcatgtctgccagagcaagatatgaaagatattctgggaatcaagtgctgttctgctcagaaactattgctcgctgttggtatatcctactgtcggggagtgtgctcgtcaaggggtccatggtgctgccaccttgttcctttggcaagcaattcggcggaaaaaggggatgcgactgtctggttctcgagccctctgaaatgattgttgttgagaacgctaaggataacgaggactctatactacagcgagagatacccgctcgccaatctcggcgcagatttcggaaaataaactataagggagaaaggcaaactatcactgatgatgtggaggtaaactcttatctgtctctgcccgcagacctgaccaagatgcacctgaccgaaaaccctcatccccaggtgacccacgtgtcttcatcccagagtggctgttccatcgcatcagacagtggatcctctagcctgtccgatatctatcaggctacagagagcgaggtaggagacgtggacctgacccgattgccagagggacctgtcgacagcgaagacgacgaggaggaggacgaagagatcgataggacggaccccctgcagggccgagatcttgttcgggagtgtctggaaaaggaaccagcggacaagacggacgacgacattgaacaactgctcgagtttatgcatcagctgccagcttttgcaaatatgacgatgagtgtgcgcagggagctctgctcagtcatgatctttgaagtggttgagcaggccggagctataatcctggaagatggccaggagctggatagctggtatgtcatattgaatgggaccgtggagatttcccatccagatggcaaagttgagaaccttttcatggggaatagtttcgggattactccaaccctggacaagcagtacatgcacggaattgtgcggactaaggtggacgattgtcagtttgtgtgtatagcccagcaagactactggcggatcctgaaccacgtggaaaaaaacacccacaaagttgaagaagagggagagatcgtaatggtgcacgaacatagggaacttgataggtccggaaccaggaagggtcacatagtgattaaggctaccccggaacgcttaatcatgcatctaattgaggagcactccattgttgacccgacatacatcgaagacttcttactgacttataggacattcctagagtcacccctggatgtaggcatcaagctgctagagtggttcaaaatcgatagcttgagagataaggttacccgcattgtgctgttatgggtaaataaccatttcaacgattttgaaggggaccccgccatgactcgtttcctggaagagtttgaaaagaatctcgaggatactaaaatgaacggacatctaagattgctgaacatcgcttgcgccgccaaggctaaatggcgtcaggtggtcctgcagaaagcgtctagggagagccctctgcagttcagccttaatggtggttcggagaagggattcgggattttcgtggagggagtagagccgggctctaaggccgctgactctggacttaaacgcggggatcagattatggaggtcaacggccaaaactttgagaatatcacttttatgaaagccgtggaaatattaagaaacaacactcatctcgctctaactgttaagacaaatatattcgtcttcaaggaactgctgtttcgaacggagcaggaaaagtccggggttccacacattcccaagatagccgagaagaaatctaataggcatagcattcaacacgtacctggtgatattgagcaaaccagtcaagaaaaagggagcaaaaaggtgaaagctaacactgtgagcggcggccgcaacaagattaggaagatactcgataaaactcgattttccattctgccacccaaactctttagtgacggggggttgtcacagagtcaggatgatagcattgttgggacccgacactgtcgacactctcttgcaattatgccaatcccaggtaccctttctagctcaagtcccgacttactgcagcccactacctctatgttagactttagcaatcccagtgacattcccgatcaagtgattagagtttttaaagttgaccagcagtcctgttatataatcatctctaaggacacgacggccaaagaagttgtctttcacgccgttcacgagttcgggttgaccggagcgagcgacacgtacagtctgtgtgaagtctctgtgacacccgagggtgtcattaaacagcgacgcctccctgaccagttcagtaaattggctgatcggattcagctgaatggacgttattacctgaaaaataacatggagactgaaactttgtgctctgatgaggacgcccaggaactagtcaaggaatctcagctgagcatgctgcagctgagcactatcgaggtggcaacccagctgagcatgagggatttcgatctgttcaggaatatagagcctactgaatatatagacgatttgtttaagcttaactctaaaaccggcaacacccacctgaaaagatttgaagatattgttaatcaggagactttctgggttgcaagtgagattcttacagaggctaaccaactgaagcggatgaaaattatcaagcatttcatcaagatagccctgcattgtagggagtgcaaaaatttcaattcaatgtttgccattatttccgggttgaacctcgcctcggtggcacgccttcgcggtacatgggagaaattaccctcgaagtacgaaaagcatctgcaggaccttcaggacattttcgacccgtctcggaacatggccaagtatcggaacatcctgagctcacaatctatgcagccgcccattataccgctgtttcctgtggtgaaaaaggatatgacatttctccacgaggggaatgattcaaaagtcgatggcctggtcaacttcgaaaaactgaggatgatatctaaggaaattcgccaggtcgttaggatgacgtcagcgaatatggaccccgcgatgatgtttcgccagcggagtctcagccaaggatctaccaacagtaacatgctcgacgtgcagggcggagctcataaaaaaagggctagacgctcttctctgctcaatgcaaaaaaactgtatgaggatgctcagatggcaagaaaggtgaagcagtacctgtcctcccttgacgtcgagactgacgaagagaaatttcagatgatgagtttgcagtgggaacctgcttatggtacgctcaccaaaaacctctctgaaaagcggtctgcaaaaagctcagaaatgtctcccgtacctatgaggtctgctggccagaccacgaaggcccatctgcaccaaccccaccgggtgtcacaggtactgcaggttcccgccgtgaacctgcatccaatccgcaaaaaaggtcagacaaaagatcctgctctcaacaccagtctgccacagaaagtcctcggcactaccgaggagatcagcggtaaaaagcacacggaggacactattagcgtcgcttcatctcttcattccagtccccccgcttccccacaggggagcccacataaaggatacacattgattccttcagcaaaaagcgacaacctgagcgactcctcgcacagcgaaatcagttctaggtcctccatagtttctaattgttccgtggactccatgtctgcggctcttcaagatgagcggtgcagcagccaggctttggcagtgccagagtcaaccggcgccctggagaagacagagcatgcgtcgggtatcggcgatcattctcagcatggccctggctggacattgctgaagccatctctgattaaatgcctggccgtcagttcttctgtatcaaatgaagagattagccaagaacacataatcatcgaggcggctgactcaggtcgcggatcctggacctcatgctctagctccagtcacgacaattttcagagcctgcccaatcctaagtcttgggactttctgaacagctatcgccacactcacctcgatgaccccatcgctgaggttgagcctaccgattcagagccttactcatgcagcaaaagctgcagccggacatgcggccagtgcaaaggcagcctggaacggaaatcctggactagctcctcatccctctctgacacctacgaacccaattatggtaccgtcaagcaacgcgtgctggagtctactcctgctgagagtagcgaaggtctcgaccccaaggatgctaccgacccagtgtataagactgtgacttcttcaactgagaagggactgatcgtgtattgcgtcacatcccccaaaaaagacgaccgctatcgggagccgccccctaccccccctggctatcttggcatctctctggctgacctgaaggagggaccgcacactcaccttaagccacccgattacagtgttgccgtgcagaggtccaagatgatgcataatagcctctctagactgccccccgccagcctcagcagtaatttagtggcatgtgtgccctccaaaatcgtgactcagccccagcggcacaatctgcaacctttccatccaaagctgggtgatgtgaccgatgctgactctgaagccgacgaaaacgagcaagtgagtgccgtctag

SEQ ID NO: 202532 - DNA, 3615 bp, synthetic construct
  misc_feature 1..3615: note = Description of Artificial Sequence: Synthetic coding sequence
  source 1..3615: mol_type = other DNA
atgaacagccccgtggaccccggcgcccggcaggccctgcggaagaagccccccgaaagaactcctgaagatttaaatacaatttacagctacctccacggcatggagatcctctctaacctccgtgagcaccagttacgactaatgagtgcgagggcaagatatgaacggtacagcggtaatcaggtgctgttctgctctgaaactattgcccgatgctggtacattctactcagtgggtccgtcctggtaaagggcagtatggtgctccccccttgtagttttggtaagcagttcggtggaaaaagagggtgtgactgcctggttctggagccatctgaaatgatcgttgtcgagaatgccaaagataatgaagattccatcctgcaaagggagattccagctagacagtctcgcagaagattcaggaagatcaattacaagggcgagagacagactatcaccgacgacgtcgaggtgaattcctatctcagtctccctgcggatttaaccaagatgcacctcactgagaatccccatccccaagtgactcacgtatccagctcacagagcggatgctcgattgctagcgactctggcagcagcagcctgtcagatatctatcaggctaccgagagcgaggtgggggatgtggacttgactcgcctgccggaaggccccgttgattctgaggacgacgaggaggaggatgaagaaatcgataggacagaccctctccaggggagggatctcgtgagagagtgcctggagaaggaaccagccgacaagacagatgacgatatcgagcagctacttgagtttatgcaccaattgccagcctttgcaaatatgactatgagtgtccggcgcgagctctgcagtgtgatgatcttcgaggtggtagagcaggccggtgctatcattctggaagatggccaagagctagattcttggtacgtgatcctgaatgggaccgtagaaatcagccaccccgatgggaaggtggagaacttatttatgggcaactcatttggaattacacccactctggataaacagtacatgcacggcattgttagaacaaaggtggatgattgccagttcgtgtgtatagcccagcaggactattggcggatcctgaaccacgtggaaaagaatactcacaaagtggaggaggagggtgagatagtgatggtgcatgagcatcgcgaactcgaccgatcaggcaccagaaaggggcacattgtcatcaaggccaccccagaacgcctgatcatgcacctgatcgaagagcattcgattgttgatcctacgtatattgaggactttctcctgacataccggacgttcctggagtcacctctggatgtgggcatcaagctgttagagtggttcaagattgactccctccgcgataaggtaacacggattgtgttactgtgggtcaataaccactttaatgattttgagggagaccccgcaatgacacgctttttggaagaatttgaaaagaacctggaggacactaaaatgaacggacacctgagattactgaacatagcgtgcgctgccaaggctaagtggcgtcaagtggtcctgcaaaaagcatctcgcgagtctcccctgcagttcagcctgaacggaggatccgaaaaggggtttgggatatttgtcgaaggtgtggaaccaggctccaaggcggcggacagcggattaaaacgcggggaccagatcatggaggtgaatggtcagaactttgaaaatattaccttcatgaaagccgtggaaatcctgcgtaacaacacgcatctggcgctcactgtgaaaacaaatatcttcgtattcaaagagctacttttccgtacggaacaggagaaatctggcgtgccccatattcccaagattgccgagaaaaagagcaaccgccactctatccaacatgtgcccggggacattgagcagactagtcaggaaaaaggttccaaaaaagttaaggcaaacaccgtttcaggggggcgaaacaaaatccgcaagatattggataaaacacgctttagtatcctccctccaaaactcttctcagatggaggtctcagccagagccaggacgacagcattgtggggacccggcattgccgccactctctggcgatcatgcctatccccggcactctgagttcaagctcccctgacctgcttcagcccaccacctcaatgttggatttttctaatccatctgacattcctgatcaggtgattagagtgttcaaggttgatcagcagtcatgctatatcatcatctccaaggataccaccgccaaggaggtggtttttcacgccgttcacgaattcggcttaacaggtgccagcgatacatactctctctgtgaagtttccgtgacacccgaaggggtcataaaacagaggcgattaccagatcaatttagtaaactggccgatcgcatacagctgaacgggaggtactatctgaaaaacaacatggagacggagaccctgtgctcagatgaggacgctcaggagctagtcaaggaaagccaactatcaatgctacagttgagtacgatcgaagtggctactcagttgagcatgcgcgactttgacctcttccgcaatatagaacctaccgagtacatagacgacctgttcaagttgaactccaagaccggaaatacacacctcaaacgctttgaggacattgtgaaccaggaaactttctgggttgcttccgaaatcctgactgaagcgaatcagttgaaaagaatgaaaattattaaacatttcattaaaatagccttgcactgccgcgaatgtaagaatttcaatagcatgttcgccatcatcagcggtttaaacctggccagcgttgcaaggttgcgcgggacctgggagaagttgcctagcaaatatgaaaaacatctacaggatctgcaggacatatttgatccaagtaggaatatggctaagtatagaaacatactctcgtcccagagcatgcagccaccgatcattcccctgttccctgtagttaaaaaggatatgacatttctccatgaggggaatgacagcaaagttgatggtctcgtgaatttcgagaagctgaggatgatttctaaagaaatccgacaagtagttcgcatgactagtgctaacatggaccccgccatgatgtttaggcagagaagcttatctcaaggttcaaccaatagcaacatgttggatgtccagggcggggctcataagaagagggcgcggcgcagctctctgctcaacgcgaaaaagctgtacgaggacgcacaaatggcccgcaaggtcaagcagtatctttcctctcttgatgttgagactgacgaggaaaagtttcagatgatgagtctgcagtgggaacccgcatacggtacgctgacgaaaaatctgtcagagaagcggagcgccaaaagctcagagatgtcaccagtgccaatgcgctccgcaggacagaccactaaagctcatttacaccagccacatagagttagccaggttctgcaggtgccagccgtgaatcttcaccccatacggaagaaagggcagaccaaagatcccgcactgatgtag

SEQ ID NO: 202533 - DNA, 4176 bp, synthetic construct
  misc_feature 1..4176: note = Description of Artificial Sequence: Synthetic coding sequence
  source 1..4176: mol_type = other DNA
atgaacagccccgtggaccccggcgcccggcaggccctgcggaagaaaccgccagaacgtacgcccgaggatctgaacaccatttacagctatctgcacggcatggagatcttgagtaatctgcgagagcaccagctgcgtcttatgtcagccagagcccggtatgagagatacagcgggaaccaagtgctgttctgcagtgaaactatcgcacgctgctggtacatactgctgtctggctctgttctggtcaagggaagcatggttctccctccatgttcctttggcaaacagttcggtggcaagagaggctgtgattgcttagtcctcgagccgtcagaaatgattgtcgtggagaatgctaaggacaatgaagattcaatcctccagcgcgagattcccgctcgccagtcgcggaggcgcttcaggaagatcaactataagggagagaggcagactattaccgacgatgtagaggtaaacagctacctgagcctcccagctgatctgaccaaaatgcacctcactgagaacccccacccccaggtaacccatgtgtcaagctctcagtctggctgtagtattgcctctgacagcggttcttccagcctgtcagatatctaccaggctacagagagtgaagtgggtgatgtagaccttacacgcctgcccgaaggaccggtcgactcagaagacgacgaggaagaggacgaggagattgatcggacagacccattgcaaggacgggacctggtccgcgaatgtcttgaaaaggagccagctgataagaccgatgacgacatagagcagcttttggagtttatgcaccagctgccggcgttcgcaaatatgacgatgtcagtgcgacgggaattgtgttccgtgatgatcttcgaggtggtcgagcaggcgggcgcgataatactggaggacggacaggaactggattcctggtatgtgattctcaacggtacggttgagatctcgcaccctgacgggaaggtggagaatttgtttatgggcaacagcttcggtatcactcctaccctggacaagcagtatatgcacggcatcgtccgaacgaaggttgatgactgccagttcgtatgtatcgcacagcaggattattggcgcatcctgaatcatgtggagaaaaacacccacaaggtcgaggaggagggtgaaatcgtgatggtacacgagcatcgcgagctggatcgatctggaactcggaagggtcatattgtgatcaaggccacgccggagcgtttgatcatgcatcttattgaggagcattctatagtggatccaacctacattgaagacttcctgctcacctacaggacattcttggagtctcccttggacgtgggaatcaaactccttgagtggttcaagatcgattctctccgagacaaagtgacgagaatcgtgctgctctgggttaacaaccacttcaatgattttgagggcgatccggcaatgaccagatttctcgaggaattcgaaaaaaatctggaggacacgaagatgaatggccacctgcgcctgcttaacattgcctgcgctgctaaggcaaaatggagacaggtggtgttgcagaaagcttcgcgggagagccccctccagttttccttaaacggcgggagtgagaaaggatttggcattttcgtcgaaggtgtcgaacccggcagcaaggctgctgatagcgggcttaagcgcggcgaccaaattatggaggtgaatgggcagaactttgaaaacattacgtttatgaaagccgtcgagatcctgcggaataatactcacctggcgctcactgttaaaaccaatatcttcgtgtttaaagagctcctgttccggactgagcaagaaaagtccggcgtcccccacatacctaaaatcgcggagaagaaatctaacaggcactctatccagcacgttcccggagacatagagcagacatcacaagagaaagggagtaagaaagtaaaggccaatacagtgtctggggggcgaaacaagatcaggaagatcctcgataaaacaaggtttagcattctgcctcctaaactgttcagcgacggagggctctctcaatctcaggacgactccatcgtgggaacaagacattgtcgtcatagtttggctataatgcctattcccggaacgctgtcatccagttcccccgacttacttcagccaaccacaagcatgctggacttttctaacccctctgatatccccgatcaggtcatcagagtcttcaaggtagaccagcagtcttgctacataataatcagcaaagacactacggcaaaggaagtggtgtttcatgcagtccacgagtttggcttaacaggcgcttccgatacctacagtctttgtgaggtaagcgtgacgcccgaaggagtgatcaagcagcggagactccccgatcagttctcaaaactagctgatagaatccagctcaatggccgctactaccttaaaaacaatatggaaaccgagacgctgtgtagcgatgaagatgcgcaagagttggtgaaagagagtcagctctcgatgcttcaactatccacaattgaggtggcaacccagctatccatgagagatttcgatctgtttcgaaatatcgaacctacggagtacattgacgacctgttcaaactgaatagcaagaccggcaacacacaccttaagcgcttcgaagatattgtgaaccaagagactttctgggttgcctcagagatactgactgaagcaaatcaactcaaaaggatgaagatcatcaaacatttcatcaagatcgccttgcattgccgggagtgcaagaattttaactctatgttcgctatcatctccggcttgaatttggcaagcgtggcacgattgcggggcacgtgggaaaaacttccaagcaagtatgaaaaacaccttcaggacctgcaggatatcttcgatccttcacgcaatatggccaaatatcggaatatcctgagctcacaatccatgcagccgcccattatcccattgttcccagtggtgaaaaaagacatgacattcttgcatgagggaaacgattctaaagttgacgggctcgtaaattttgagaaactccgtatgatcagtaaggagattagacaagtggtgagaatgacttccgcgaacatggaccctgctatgatgttccgacaacggtctcttagtcagggctccaccaatagcaatatgctcgatgtacaggggggcgctcataagaaacgcgcacgccgatcctctctgctgaacgccaagaagttgtatgaggacgctcagatggcccggaaagttaaacagtacctatccagtctggacgtcgagacagatgaggaaaaattccagatgatgtccttgcagtgggaaccagcttatggcaccctcaccaaaaatctgagcgagaaacgaagtgcgaaatcttcagagatgtccccagttccaatgcgaagcgctggtcaaacaaccaaagctcacctccatcagcctcatcgggttagccaggtactgcaggtacctgcggtaaacctccaccctatccggaagaagggccaaacaaaggatcctgccttgaatacctctctgccacaaaaggttctgggaactactgaggaaatttccgggaagaagcatacagaggatacaatatccgtcgccagttctctccacagttctccacctgcaagcccccagggcagcccgcacaaggtcggctccattatttccgaccattcctccaagatctcaggtcagagctgccccggcataggcggggcctatctgcagaagaagattctgcagattacgcgcagcacagccaagagaacagacagcactgagaaagccaccgaggaaaacagggacagaacgtcctgcgagaataccacgaggaaacggatgacctcccctttccgccgcttgagggaaaggatgctgtctcgtgagagactggtgaactctcaaaaagaagacaccgatcataatcaagccaccgagagttgcgaaaaggtcaaagatgtgggaagtaatatcaaagatgagaagggaagcgccatctttaattcaaatagccaggggaactcaaacacactcaattgtttttacacacgcttcaagtccaagaggagaaaaaccctctag

SEQ ID NO: 202534 - DNA, 2484 bp, synthetic construct
  misc_feature 1..2484: note = Description of Artificial Sequence: Synthetic coding sequence
  source 1..2484: mol_type = other DNA
atgaacagccccgtggaccccggcgcccggcaggccctgcggaagaaacctcctgagcgcaccccagaggatcttaatacgatatattcatacctacatggcatggaaatcttgagcaatctgcgcgaacaccagctgaggctgatgagcgcccgagctcggtacgaacgatactccggaaaccaggttctcttctgcagcgaaaccatcgctcggtgttggtacatcctgctgtcaggctctgtgctggtcaaaggtagcatggtgcttcccccctgctcttttggaaagcagttcgggggcaagcgcgggtgcgattgtcttgtgctggagccatccgaaatgatcgtggtggaaaacgctaaagacaatgaagattccattctgcagagagagattcctgccagacagagtagaaggcggttcaggaagatcaattacaaaggagagcgacagaccattacggacgatgtagaggtgaactcctacctaagtcttcccgccgacctgactaagatgcacctaaccgaaaacccacaccctcaggtgacccacgttagcagtagccaatcaggctgtagcattgcctctgacagtggatcatcatcgctgagtgatatctatcaggccacagaatctgaagtcggggacgtcgatttgacccgcctgccagagggccctgttgacagcgaagatgacgaagaagaagacgaggaaatagaccgcactgacccactgcaagggcgagatcttgtgagagagtgcctcgaaaaggagccagcagataagacagatgacgatattgaacagctattggagtttatgcatcaattaccagcttttgctaacatgacgatgtctgtgcggcgcgaactttgctcggtaatgatttttgaagtcgttgagcaggccggcgctatcattttagaggatggccaggaactcgactcttggtatgtgatacttaatgggactgtagagatcagtcaccccgacgggaaggtcgaaaatctgttcatgggcaacagtttcggcattaccccaactctcgataagcaatacatgcacggtatcgtgcggactaaggtggacgactgtcagttcgtatgcatcgcacagcaggactactggcgcatactgaatcacgtggagaaaaacactcataaggttgaggaagagggcgaaatagttatggtgcacgaacatcgagagttggacaggtcaggcacacggaagggccacatcgtcattaaagccacccccgaacggcttatcatgcacctgattgaggagcacagcattgtggatccaacctacatagaggactttctcctaacttataggacctttcttgaaagcccactggatgtagggatcaaactgctagagtggttcaagatagatagccttcgcgataaggtgacacggatagttctgctgtgggtgaataatcattttaatgattttgagggcgacccagctatgactagatttcttgaggagtttgaaaagaatctggaggacactaaaatgaatggacacctgaggctgctcaacatcgcgtgtgcagcaaaggctaaatggaggcaggtcgtccttcagaaggcttcccgggagtctcctctgcaattttctctgaacggcggttcagagaaaggtttcggaattttcgtagaaggtgttgaaccaggttcaaaagccgcagattccggcctgaagagaggagatcaaattatggaggtgaacggccagaacttcgagaacattacatttatgaaggctgttgagatcctgcggaacaatacacacctggccctgacagttaagactaacattttcgtttttaaggagcttctgtttcggaccgagcaggaaaagtctggcgtccctcacatcccaaagattgctgagaagaagtctaatagacactctatacagcatgtgccaggcgatattgagcaaaccagtcaggaaaaggggtccaaaaaagtgaaggctaacactgtatcaggtggccgcaataaaatacggaaaatcctggataaaacgagattctccatcctccctcccaaattattctccgacggaggactgtctcagtcccaagatgactctatagtgggaacaaggcattgtcgtcattcactggcaataatgcccattcccgggacgttgtctagctcctcccccgaccttctgcaacctaccacctctatgctggatttcagcaatccatctgacatacccgaccaggtcatccgcgtgtttaaagtcgaccagcaaagttgctacattataatctcaaaagacactactgcaaaagaagtggtgtttcacgctgtgcatgagtttggattaacaggtgcttctgatacctactccctctgcgaagtttcagtgacacctgagggcgtgataaaacagaggagactgccggatcagttctcgaagttagcggatcgaatacagcttaatgggcggtag

SEQ ID NO: 202535 - DNA, 1551 bp, synthetic construct
  misc_feature 1..1551: note = Description of Artificial Sequence: Synthetic coding sequence
  source 1..1551: mol_type = other DNA
atggccgacaacctgagcgacaccctgaagaagctgaagatcaccgcagttgataagactgaggattcactagaggggtgcctcgattgcctcttgcaagcgctggcgcagaataatacggaaaccagcgagaagatccaagccagcggcatcctacagctgttcgctagcttactgacacctcagagcagctgcaaagccaaagtagccaacattatcgcggaagtggccaaaaacgaatttatgagaattccttgcgtagacgcaggactcatctcacctttggtgcagctactcaactccaaggaccaggaggtcctgttgcagacggggcgggccctcggtaatatatgttacgactcccagagcagcaaggagcaattcgcctctacaaatatcgctgaggaactggtcaaactattcaaaaagcagatcgagcacgataaacgggagatgatctttgaagtactcgcccctctagctgagaacgatgctattaagctccagctggtggaggcggggctggtggagtgtctcctggaaatagtacagcaaaaagtcgattcagacaaagaggatgacattactgaacttaagaccgggagtgatctgatggtcctactacttttgggggatgagagtatgcagaagttgttcgaaggcggcaagggttcagtgttccagcgagtgctgtcctggataccttccaacaaccatcagctgcaactggcgggggcccttgccattgctaactttgctcgtaatgacgctaattgtatccacatggtggacaatggcatagttgaaaaactgatggatctgcttgatagacacgtcgaggacggtaatgtcacagtgcagcacgctgctctctccgcactgcgcaatctggcaatccctgttatcaacaaagccaaaatgctctccgctggagtcactgaagctgtacttaaattcttgaagagcgaaatgcctccagttcaatttaagctcctgggcactttgcgcatgcttatcgatgcacaggcagaggcggcggaacagctagggaaaaatgtgaaactcgttgagaggttggtcgagtggtgtgaagcgaaagaccatgcaggcgtcatgggagaatccaatcggttactgagtgccttgatccgccatagcaagagtaaagatgtgatcaaaaccatcgtgcagagcggtggcattaagcatctggttaccatggccacgagcgaacacgttatcatgcagaacgaggcactggtagccctggccctgatagcggccctggaacttggcacagcagaaaaggacctcgagagcgccaaattggtgcagatactgcacaggctgcttgccgatgagcgcagcgccccggaaatcaagtataactctatggtgctaatctgcgcactaatggggtccgagtgtttgcacaaggaagttcaggacttggcatttctggacgtagttagcaaactccgatcacacgaaaataagagtgttgctcagcaagccagtctgacggagcagcgccttactgtggaatcctag

SEQ ID NO: 202536 - DNA, 1827 bp, synthetic construct
  misc_feature 1..1827: note = Description of Artificial Sequence: Synthetic coding sequence
  source 1..1827: mol_type = other DNA
atggccgacaacctgagcgacaccctgaagaagctgaagatcaccgcagtggacaagacggaagattctctggaaggatgcctggactgtttgttgcaggctctcgctcaaaacaacactgaaacctctgaaaagatacaggcttcagggatcctgcagctgtttgcaagcttattaactccccaatcttcttgtaaggctaaggtcgccaatattatcgcagaagttgccaaaaatgaattcatgagaatcccatgtgtggatgccggcttgatttctcccctggtccagctcctgaattcaaaagaccaagaggtgctgctgcagaccggccgtgctctgggcaacatctgttacgatagtcatgagggaaggtcggccgtcgaccaggcagggggcgctcagattgtgatcgatcatctgcgaagcctatgcagtattactgacccagcaaatgaaaaactactgacagtgttctgtggcatgctgatgaattactcaaacgagaacgactccctgcaggcccagctgattaatatgggcgtgatacccaccttagtcaaacttcttggcattcattgccagaacgcagcactcaccgagatgtgcctggtggcttttggcaacctcgcagaactggagtcctctaaggagcagttcgcgagcactaacatagccgaggagctggtgaagctgttcaaaaaacagatcgagcacgataagcgcgagatgatctttgaagtcctcgcccctcttgctgagaatgatgccattaagttacagctggtggaggctggcctggtcgagtgcctgctggaaatcgtccaacagaaagtggattccgataaggaggacgatattactgaactcaagactggctcagatctgatggtactgctcttgctcggcgacgagtccatgcagaaactattcgaggggggcaaaggcagcgtgtttcagagggtgttgtcctggataccctctaacaatcaccagctgcagctggcaggggccttagctatcgccaactttgcacggaacgatgccaattgcatccacatggtagataatgggatcgtcgaaaagctgatggaccttctcgaccgacacgtggaagacggaaacgttaccgtgcagcacgccgccctctctgccttgcggaatctggcgataccagtgatcaataaagctaagatgctcagcgccggagtgaccgaggccgtgttgaagtttctaaaatcggaaatgccccccgtgcagttcaagctacttgggacgcttaggatgcttatcgatgctcaggccgaagccgctgaacagctcgggaagaatgtcaagctggtcgaacgcctagtggagtggtgcgaagctaaagaccatgccggcgtaatgggcgagtcaaacaggctactctctgctctaattcggcacagtaaatccaaagacgtgatcaaaactattgtgcagtccgggggcattaaacatctggtgactatggccacatcagagcatgtgattatgcaaaacgaagcccttgttgcactcgctctgatagccgctctcgaactcggcaccgccgaaaaagacctggagtccgccaagctggttcagattctgcatagattgttggcagatgagcgctctgccccagagataaagtacaactctatggtcctgatatgtgctctgatgggatcagagtgtctgcacaaggaggtgcaggatctagcttttctggacgtggtatcaaaactccggtcacacgagaataaatccgttgcgcagcaagcctcccttaccgaacagaggttaaccgtggaatcatag

SEQ ID NO: 202537 - DNA, 1680 bp, synthetic construct
  misc_feature 1..1680: note = Description of Artificial Sequence: Synthetic coding sequence
  source 1..1680: mol_type = other DNA
atggccgacaacctgagcgacaccctgaagaagctgaagatcaccgctgtggataaaacagaggacagtctggaggggtgtctggactgtcttcttcaggcccttgcacaaaacaacactgagacatcagaaaaaatccaggcatccggcatacttcagctgttcgcctctctattgactccacagtcctcttgtaaagctaaagtggcgaatattatcgcagaagtcgctaaaaatgagttcatgcgcataccatgtgtagacgccggactaatttcaccactggtgcagctcctgaatagcaaggatcaggaggtattactccagacggggcgggccctcggcaatatttgctatgacagccactcactgcaggcccaactgatcaacatgggcgtgatccctacacttgtaaagctgctcggaattcattgccagaatgccgctctcaccgagatgtgtctggttgccttcggcaacctggccgaattagagtcttctaaagagcaattcgcatccacaaacatcgccgaggagctggtgaagttgttcaagaagcagattgagcacgataaacgggaaatgatttttgaagtccttgctccgctggcggagaatgatgcaattaaattacagctagtggaggccggactggtcgagtgcctcttggaaattgtccagcagaaagtggactctgataaagaggatgacattactgaactaaaaaccggctcagatcttatggtcctgctcctcctgggtgacgaatccatgcaaaagctctttgaggggggcaaaggctcagttttccagcgagtcctttcctggattccaagtaacaaccaccaactgcagcttgctggggctctagccatcgctaattttgctcggaacgacgcgaattgcatccatatggtcgacaatggtattgtggagaaactaatggatctcctggacagacacgtggaggacggaaacgttaccgttcagcacgcagctctgtccgccctacgcaatttggctatccctgtgattaacaaagccaagatgctttcagcaggggttacagaggctgtgttgaaattcctgaaatcggagatgccacctgtgcagtttaaactgctcggtaccctgcgcatgttaatcgatgcccaggctgaggccgccgagcagctgggaaaaaatgtgaagctggttgagcgactggtcgagtggtgtgaggctaaggatcacgcgggggttatgggagagtctaataggctgctgagcgccctcattcgacattctaaatccaaagatgtgatcaagacaattgtgcagagcgggggcatcaaacatcttgtaaccatggccacctcagaacatgttataatgcaaaacgaggccttggtggcattggccctcatcgcggcactcgaactcggaaccgcggaaaaggatttggaaagcgctaaattggtgcagattttgcaccgcctgttggcggatgaacgaagtgccccggagattaaatataattctatggttttgatttgcgcactgatgggatcggaatgcctacacaaggaagtccaggacctcgcgtttttggacgtggtcagcaaactgcggagccatgaaaataaaagtgttgcacagcaggcaagcctcactgagcagagactgaccgtggagtcctag

SEQ ID NO: 202538 - DNA, 1677 bp, synthetic construct
  misc_feature 1..1677: note = Description of Artificial Sequence: Synthetic coding sequence
  source 1..1677: mol_type = other DNA
atggacaacctgagcgacaccctgaagaagctgaagatcaccgccgtagataagaccgaggatagcctggaaggctgtttagattgtctgctgcaggctctggctcaaaacaatacggagacatcagaaaagattcaggccagcggcattcttcagctgttcgcttctctgctgacaccacagagcagttgtaaagcgaaggtggctaacatcattgccgaggtcgccaagaatgagtttatgaggattccatgtgtcgacgccggcctcatcagtcccctggttcagctgctaaattctaaggatcaggaagtgctgttgcagacggggagagctttaggaaatatctgctatgacagtcattctctacaggctcaattaattaatatgggagttatccctacactggtgaagctcctcggcatccattgtcagaacgccgccctcaccgagatgtgccttgtggcatttgggaatctggcggagctggaatcctctaaagagcaatttgcctcaaccaacatcgctgaggagctcgtgaaactgttcaaaaagcaaatcgagcacgataagagagaaatgatcttcgaagttctggccccgctggcggagaatgacgctattaaactccagctcgtagaagcaggccttgtggaatgtttactggaaatcgttcaacaaaaggtcgatagtgacaaggaagacgatatcacagagctgaaaacgggcagcgatctgatggtgttattattattgggcgatgagagtatgcagaaactgtttgagggagggaaaggctccgtctttcagcgggtcctttcctggatcccttcaaataaccaccaactccagcttgcaggcgcactggcgatcgctaatttcgccagaaacgacgcaaattgcatacatatggtcgataacggtatagtggagaaactcatggacttactggaccgtcacgtcgaagatggcaacgtgaccgttcagcacgcggctctgtccgcgttgaggaacctggcaattccagtcattaataaggcgaaaatgctgtcagccggtgtgaccgaggcagtactaaagtttctaaaaagcgagatgcctccggtgcaatttaagctcctgggcacgctccggatgctgattgacgcccaggccgaggcggccgaacagctcggaaaaaatgtcaagctggttgaacgcctcgtcgaatggtgtgaagcaaaagatcacgcaggagttatgggagagtccaacaggcttctttctgcgctgattcgccactccaagtcaaaagacgtaattaagactatagttcagtccggcggtatcaagcacttggtcaccatggctactagcgaacacgtgattatgcagaacgaagctctggtggccctggctctgatcgccgcactcgagttgggcaccgccgaaaaggacctagagtctgctaaactggtgcaaatcttgcacagattgttggcggatgaacgtagtgcaccagagataaaatataatagcatggtcttgatctgcgctttaatggggtccgagtgtttgcataaggaagtccaggatctagcgtttctggatgtcgttagtaagctacggagtcacgaaaacaaatccgttgcccaacaggcatctctgactgaacagcgtctcaccgtggagtcttag

SEQ ID NO: 202539 - DNA, 1824 bp, synthetic construct
  misc_feature 1..1824: note = Description of Artificial Sequence: Synthetic coding sequence
  source 1..1824: mol_type = other DNA
atggacaacctgagcgacaccctgaagaagctgaagatcaccgccgtggacaaaacagaggactctctcgaagggtgcctggactgcttactgcaggcactagcacagaataacacagaaaccagtgagaaaatccaagcgagcgggatcctgcagcttttcgcatcattactgacccctcagtcttcctgtaaagccaaggtggccaatattatcgccgaggtggcaaaaaacgagtttatgcgtatcccttgtgtggatgctggtctcattagcccactggtacagctgctcaactccaaagaccaagaagtattgttgcagacgggtagagccttaggcaatatctgttacgacagccacgaagggcggagtgcagtcgaccaggccggtggtgcgcagatcgtgattgatcatcttcgcagcctatgttccattaccgacccagccaacgagaagctcctaaccgtcttttgtggtatgctgatgaactatagcaacgaaaatgattcattgcaggcccaactgatcaatatgggcgtcattccgacactggtaaagctgttagggatccactgccagaacgcagccctgacagaaatgtgccttgtggctttcggcaatctcgcagaactggaatcatctaaggaacaatttgctagtactaacatcgccgaggaattggtgaaattgttcaaaaagcagattgagcacgataaacgagaaatgatattcgaggtactggcccctttggccgaaaatgacgctattaagctgcagctggtcgaggcgggactagtggaatgcctgcttgagatagttcagcagaaggtagatagcgacaaggaggacgacattaccgagttgaaaactggctcagacctcatggtcctcctgctcttgggtgacgagagcatgcagaaactcttcgagggtggcaaagggtctgttttccagagagtgctttcctggattccatccaataatcatcagctccagttagccggagcgctggccatagccaatttcgcaaggaatgacgctaattgcattcacatggtcgataacggcatcgtggagaagctgatggacctcctagacaggcatgtggaagacggaaatgttactgtgcagcatgctgctctgtcagccctacgcaatctcgctatccccgtgattaacaaggccaagatgttgagcgccggcgtaaccgaagcagtgctgaagtttctgaaatctgaaatgccacccgtgcagttcaagttgttaggtactctgagaatgttaatcgacgctcaggctgaggcagcagagcagctggggaaaaatgtgaaactggtggaaaggctggtggagtggtgcgaagcaaaagaccacgcaggcgtgatgggagagtctaacagactgctcagcgccctgattcgtcactcgaagagtaaagacgtgatcaagacgattgtgcagtcaggaggcatcaagcatctggtcaccatggcaacttcagagcacgtgataatgcagaacgaggcgttggtggcgttggctctgatcgcagcactcgagcttgggaccgcagagaaggatttagaatccgcaaagctcgtgcagatcctgcatcgactgttagcagacgagcgttccgcaccagagattaaatataattcgatggtgctaatttgcgcgttaatgggctcagagtgcttacacaaggaagttcaggatctcgctttccttgacgtggtgagcaagcttaggagtcatgaaaacaagagcgtggcccaacaggcaagcctgacggaacagaggttgacggtcgagtcctag

SEQ ID NO: 202540 - DNA, 1824 bp, synthetic construct
  misc_feature 1..1824: note = Description of Artificial Sequence: Synthetic coding sequence
  source 1..1824: mol_type = other DNA
atggccgacaacctgagcgacaccctgaagaagctgaagatcaccgccgtagacaagaccgaggactcgctggagggctgccttgactgtctgctgcaggccctggcacagaataatactgagacgagcgaaaagatccaggcctccggtatactgcagctgtttgccagccttttgaccccgcagagcagttgcaaagcgaaggtggccaatattatcgctgaggtcgccaagaacgaatttatgcgcattccatgtgtcgatgctggtctgatcagccccctggtacagctactcaattcgaaggaccaggaggtgctcctacagaccggacgcgcccttggtaacatttgctacgatagccacgaaggaaggagtgccgtcgaccaggccgggggagctcagattgtcattgaccacctccggtcactgtgcagcatcacagatccagccaacgagaagctcttgaccgtcttctgcgggatgctcatgaactattccaatgagaatgactctctacaagcccagctaattaacatgggggttattcctactctggtgaaactcttgggcatacactgtcaaaacgccgccctgaccgaaatgtgtctggtggcattcgggaatctggcagaactggaatcatctaaagagcaattcgcatccactaatattgcggaggaactggtaaagctttttaagaagcagatcgagcacgacaagcgggagatgatcttcgaggttctggcccctctcgccgagaatgatgcaattaaactacaactagtggaggcaggcctggttgagtgcctgctggaaatcgttcagcagaaagtggactccgataaagaggacgacatcaccgagctcaagacggggtccgacctgatggtcctgctccttcttggtgatgaatccatgcagaaactctttgagggcgggaagggtagcgtttttcagcgtgttctctcctggatcccttcaaacaaccaccagttacagctggccggagccctggcaatcgcaaattttgccagaaacgacgcgaactgcatccacatggtcgataatgggatcgtggagaaactgatggacctgctggaccggcacgtagaggatggtaacgtgacagtgcagcacgctgccctttccgcgctgaggaatctggctatcccggttatcaacaaagccaagatgctttccgcaggagtaaccgaagctgtgctgaagttccttaagtccgagatgcctccagtccagttcaaactgctcggaacgttgagaatgcttattgacgctcaggaagctgccgaacagttaggtaaaaatgtcaaactggtggagagacttgttgaatggtgtgaggcgaaagaccatgcaggagtgatgggagagtctaacagattactgagtgccctgattagacattcaaaaagtaaggatgtgataaaaacgatcgtgcagtcagggggaattaagcacctcgtaacgatggcaacatccgagcacgtgataatgcagaacgaagctcttgtagcactggcactgattgccgccctagaactcggcacagccgaaaaggacttggagtccgccaagctcgtgcagatcttgcacagactgttggctgacgaacgctctgcacctgaaattaaatacaactctatggtcctcatctgtgccttgatgggaagtgaatgtttgcacaaagaggtgcaggacctcgcctttctcgacgtcgtcagtaaactgaggtcacacgagaataagtctgtggcccagcaggcttcgctgactgagcagcgcctgacagttgaaagctag

SEQ ID NO: 202541 - DNA, 555 bp, synthetic construct
  misc_feature 1..555: note = Description of Artificial Sequence: Synthetic coding sequence
  source 1..555: mol_type = other DNA
atgcgggagtacaagctggtggtgctgggcagcggcggcgtgggcaagtccgccctcacagtgcaatttgtgcagggcatcttcgtcgagaaatacgaccccacaatcgaggacagttaccggaagcaagtagaagtggatgcccaacagtgtatgctagagattctcgatactgcaggaacagaacaatttacggcaatgcgtgacctttacatgaagaatggccagggtttcgccctggtgtacagcatcacagcccaatcaactttcaatgatctgcaggacttacgtgagcagatcctgagggtgaaggatacggacgatgtgcctatgatactcgtcggaaataagtgcgatctggaggacgaacgcgtagtgggaaaggaacagggtcaaaacctcgcacggcagtggaacaactgcgcatttttggagagctctgctaaaagtaaaatcaatgttaatgaaattttctacgatttggtccggcagattaacaggaaaaccccagtgccaggaaaggccaggaagaagagttcctgccagctcctgtag

SEQ ID NO: 202542 - DNA, 555 bp, synthetic construct
  misc_feature 1..555: note = Description of Artificial Sequence: Synthetic coding sequence
  source 1..555: mol_type = other DNA
atgcgggagtacaagctggtggtgctgggcagcggcggcgtgggcaagtccgctctgactgtgcagtttgtccagggcatcttcgtagaaaaatacgaccccacaattgaagacagctatcggaagcaggtcgaggttgatgctcagcagtgtatgcttgaaattctggacacagcaggaacggagcagttcactgcaatgcgggatctgtacatgaagaacggccaagggttcgcacttgtgtatagtatcaccgctcagagcacattcaacgacctgcaggacctgcgtgagcaaatcctccgcgttaaggacacagacgacgtaccaatgatactggtggggaataaatgcgatctggaagacgagagagtggtcggcaaggaacagggacaaaacctagcccggcagtggaacaactgtgctttcttggaaagcagtgccaagtccaagattaatgttaatgagatcttctacgatctggtgcggcaaattaacagaaagacgcccgtccccggcaaagctcggaaaaagtctagttgtcagttgctgtag

SEQ ID NO: 202543 - DNA, 357 bp, synthetic construct
  misc_feature 1..357: note = Description of Artificial Sequence: Synthetic coding sequence
  source 1..357: mol_type = other DNA
atgcgggacctgtacatgaagaacggccagggcttcgccctggtgtactcaatcaccgcccagtccacattcaacgatctgcaggaccttcgagaacagatccttagggtaaaagacacggatgacgttcccatgatactcgtgggtaacaagtgcgaccttgaagacgagcgtgttgttggtaaggagcagggacagaacctggctaggcaatggaataattgtgccttcctggaatcatcggcaaagtctaagattaacgtgaatgagatcttttacgatctcgtgagacagatcaacaggaaaacccccgttcctggcaaggccagaaagaaatctagctgccagcttctgtag

SEQ ID NO: 202544 - DNA, 555 bp, synthetic construct
  misc_feature 1..555: note = Description of Artificial Sequence: Synthetic coding sequence
  source 1..555: mol_type = other DNA
atgcgggagtacaagctggtggtgctgggcagcggcggcgtgggcaaaagtgcactgactgtgcagttcgtgcaaggaatctttgtcgagaaatacgatcccaccatcgaagactcttacagaaaacaggttgaggtggatgcgcagcagtgcatgctggagatacttgacacggctggtactgagcaatttaccgcaatgagagatctctatatgaagaatggccagggtttcgcgctcgtttattctattaccgctcagagtacctttaacgatctccaggacctgcgcgaacagatcctgcgggtgaaggatacagatgacgtgcctatgatcctggttggcaataagtgtgacctggaagacgaacgggtggtcggtaaggagcaagggcaaaacctggcacggcagtggaacaattgtgccttcctggagagcagcgccaagagcaaaatcaatgtcaacgaaattttttacgacttggtgcggcagatcaacaggaagacgcccgttcctgggaaagcacggaagaaatccagctgtcagctgttgtag

SEQ ID NO: 202545 - DNA, 99 bp, synthetic construct
  misc_feature 1..99: note = Description of Artificial Sequence: Synthetic coding sequence
  source 1..99: mol_type = other DNA
atgcgggagtacaagctggtggtgctgggcagcggcggcgtgggcaaatccgccctgaccgtgcagtttgtgcagggtatcttcgtggagaaatactag

SEQ ID NO: 202546 - DNA, 429 bp, synthetic construct
  misc_feature 1..429: note = Description of Artificial Sequence: Synthetic coding sequence
  source 1..429: mol_type = other DNA
atgcgggagtacaagctggtggtgctgggcagcggcggcgtgggcaagtcagccctggaacaattcactgccatgcgggacctatacatgaagaacgggcagggctttgcactggtgtatagcatcacggcccagtccactttcaacgacctacaagatctgagggaacagatattaagagtgaaggatacagacgatgttccaatgattctcgtggggaataagtgtgatttagaggatgaacgggtggtggggaaggagcagggtcagaacctggccaggcagtggaacaactgcgccttcctcgagagcagtgcaaaatctaaaataaatgtgaatgagattttctatgatctggtgcgacagataaatagaaagactccagtgcccggaaaggcccggaagaaatcatcttgccaactgctgtag

SEQ ID NO: 202547 - DNA, 384 bp, synthetic construct
  misc_feature 1..384: note = Description of Artificial Sequence: Synthetic coding sequence
  source 1..384: mol_type = other DNA
atgcgggagtacaagctggtggtgctgggcagcggcggcgtgggcaaaagcgctctgacagtgcagtttgtgcaggggatatttgtggagaagtatgaccccacaatcgaggactcctataggaagcaagtcgaggtggatgcccagcagtgcatgctggagatcttagacacggctggaacggaacagttcacagctatgcgcgacctttacatgaagaatggtcagggcttcgctctcgtgtacagcatcacagcacaaagtactttcaatgacctccaagacttgcgggaacagattctaagggtgaaggacactgatgatgtccctatgatccttgtcggaaataagtgcgatctggaagacgaacgtgttgtaggctag

SEQ ID NO: 202548 - DNA, 429 bp, synthetic construct
  misc_feature 1..429: note = Description of Artificial Sequence: Synthetic coding sequence
  source 1..429: mol_type = other DNA
atgcgggagtacaagctggtggtgctgggcagcggcggcgtgggcaaaagcgctctcacggtgcagttcgtacagggaattttcgttgagaaatacgatccgacaatcgaagactcataccgtaagcaggtggaagtcgatgcccagcagtgcatgctggagatcctcgacacagccggcaccgagcagttcaccgctatgcgggatctctatatgaaaaacgggcaaggtttcgcccttgtttacagtatcacagcccaatctactttcaatgacttgcaagaccttagggaacagattctgagagtgaaggacacagatgatgtaccaatgattttggtgggaaataaatgtgatctcgaagacgaacgtgtggtcggtaaggaacagggacagaatctggacaacggcaccactgtgcactcctag

SEQ ID NO: 202549 - DNA, 147 bp, synthetic construct
  misc_feature 1..147: note = Description of Artificial Sequence: Synthetic coding sequence
  source 1..147: mol_type = other DNA
atgcgggagtacaagctggtggtgctgggcagcggcggcgtgggcaaaagtgcattgaccgtccagtttgttcaaggcatcttcgtggagaagtatgacccgactatcgaagacagctacagaaagcaggtggaagtggatgcatag

SEQ ID NO: 202550 - DNA, 36 bp, synthetic construct
  misc_feature 1..36: note = Description of Artificial Sequence: Synthetic coding sequence
  source 1..36: mol_type = other DNA
atgcgggagtacaagctggtggtgctgggcagctag

SEQ ID NO: 202551 - DNA, 264 bp, synthetic construct
  misc_feature 1..264: note = Description of Artificial Sequence: Synthetic coding sequence
  source 1..264: mol_type = other DNA
atgcgggagtacaagctggtggtgctgggcagcggcggcgtgggcaagagcgctctcacagtccagttcgtgcaagggattttcgtggaaaagtatgaccctaccatcgaggacagctacagaaaacaggtggaagtggatgctcaacagtgcatgctggaaatcttggacacagcggggacggagcaatttacagcaatgcgcgacctctacatgaaaaacggacaaggctttgctctggtgtactccatcactgcccaatag

SEQ ID NO: 202552 - DNA, 555 bp, synthetic construct
  misc_feature 1..555: note = Description of Artificial Sequence: Synthetic coding sequence
  source 1..555: mol_type = other DNA
atgcgggagtacaagctggtggtgctgggcagcggcggcgtgggcaaatccgcactgacagtacagtttgtgcagggaatatttgtggagaagtacgaccccactattgaagacagttaccgcaaacaggtggaagttgatgcccagcagtgtatgttggaaattctcgacacggctgggacggagcagttcacagccatgcgcgacctttacatgaagaacggccaggggtttgccctggtttactctattaccgcccaatccacttttaacgacttgcaagacttgagagagcagatccttagggttaaggatacagatgacgtgccaatgattctggttggaaataagtgcgacttagaggacgagcgagttgtgggcaaggagcaaggacagaacctcgccagacagtggaataactgtgctttcttagagagtagtgccaaatctaagattaatgtgaatgagatcttctacgacctcgttagacagatcaaccgtaaaactccggttcctggcaaggcacgaaagaagtcctcctgccagcttctgtag

SEQ ID NO: 202553 - DNA, 306 bp, synthetic construct
  misc_feature 1..306: note = Description of Artificial Sequence: Synthetic coding sequence
  source 1..306: mol_type = other DNA
atgcgggagtacaagctggtggtgctgggcagcggcggcgtgggcaaaagcgcactgaccgttcagtttgtccagggaattttcgtcgaaaaatatgaccccacaatcgaggactcttatagaaagcaagtggaagtggacgcccagcagtgtatgttagagattctagatactgccggcaccgagcaatttacagcgatgcgtgacctttatatgaaaaatggccaggggttcgcgcttgtgtactcaattacagctcaaagtacattcaacgacttacaggacctgcgcgagcaaatactctag

SEQ ID NO: 202554 - DNA, 162 bp, synthetic construct
  misc_feature 1..162: note = Description of Artificial Sequence: Synthetic coding sequence
  source 1..162: mol_type = other DNA
atgcgggagtacaagctggtggtgctgggcagcggcggcgtgggcaagagtgccctgaccgtccagtttgtgcaagggatcttcgtcgagaaatacgacccgaccattgaggactcttacaggaagcaagtcgaggtcgacgcacagcagtgcatgctgtag

SEQ ID NO: 202555 - DNA, 429 bp, synthetic construct
  misc_feature 1..429: note = Description of Artificial Sequence: Synthetic coding sequence
  source 1..429: mol_type = other DNA
atgcgggagtacaagctggtggtgctgggcagcggcggcgtgggcaagtccgcgttggagcaattcacagcaatgcgagacctgtacatgaaaaacgggcaggggttcgcgctggtttatagtatcacagcgcagtcgactttcaacgacctccaagacctaagggagcagatactccgggttaaggacaccgacgatgtacctatgattttagtgggaaataagtgcgatctggaggacgagcgggtggttggcaaagagcagggccagaatctggctcgccagtggaacaactgcgcctttctcgagtccagcgcgaagtccaaaattaatgtaaacgaaatcttttacgacctagtgcggcagataaacaggaaaacacctgtgcccggtaaggctcggaagaaaagttcctgtcaactcctgtag

SEQ ID NO: 202556 - DNA, 498 bp, synthetic construct
  misc_feature 1..498: note = Description of Artificial Sequence: Synthetic coding sequence
  source 1..498: mol_type = other DNA
atgcgggagtacaagctggtggtgctgggcagcggcggcgtgggcaagtctgccctaacagtccagtttgtgcaaggcatttttgtggaaaagtacgaccctaccatagaagactcctatcggaaggagcagttcacagccatgcgggacctttatatgaagaacggtcagggattcgcgttggtctattcgattacagcccagtcgacattcaacgaccttcaagacctcagagagcaaatcttgagagtgaaagatactgatgacgtccctatgattctggttggtaacaagtgtgatctcgaagacgagagagtggtgggcaaagaacaaggtcagaatctggcccggcagtggaataactgtgccttcctggagtcgtctgctaaaagtaagatcaacgttaatgagatcttttacgacctggtacggcagataaatcgcaaaacccctgtcccaggcaaggccagaaagaaatctagctgccagctcctctag

SEQ ID NO: 202557 - DNA, 420 bp, synthetic construct
  misc_feature 1..420: note = Description of Artificial Sequence: Synthetic coding sequence
  source 1..420: mol_type = other DNA
atgcgggagtacaagctggtggtgctgggcagcggcggcgtgggcaaatcagccctgacagtgcaattcgtacaagggatcttcgtagaaaagtacgatcccaccatagaggattcctatcgaaagcaagtggaagtcgatgcccagcagtgcatgttggaaattctggacacagctggtacagagcagttcaccgccatgcgcgatctctacatgaaaaacggccagggtttcgccctggtgtatagtatcactgctcaaagcacttttaacgacttgcaggacctccgagaacagattctccgagtgaaggataccgatgacgtacctatgatcctcgttggaaacaagtgtgacctggaagatgagagggtggtcggtaaggaacaggggcagaacctcgctcgtcagtggaattag

SEQ ID NO: 202558 - DNA, 282 bp, synthetic construct
  misc_feature 1..282: note = Description of Artificial Sequence: Synthetic coding sequence
  source 1..282: mol_type = other DNA
atgcgggagtacaagctggtggtgctgggcagcggcggcgtgggcaagtcagccctcacggtgcagtttgtgcaggggatctttgtcgaaaagtacgaccccacgatcgaagatagctaccgaaaacaagtcgaggttgacgcacaacagtgtatgttagagattctcgataccgcaggcacagagcagttcactgccatgagggatctgtatatgaaaaacgggcagggtttcgccttggtctactccatcaccgcccagtccactttcaatgacctgtag

SEQ ID NO: 202559 - DNA, 36 bp, synthetic construct; identical to SEQ ID NO: 202550
  misc_feature 1..36: note = Description of Artificial Sequence: Synthetic coding sequence
  source 1..36: mol_type = other DNA

SEQ ID NO: 202560 - DNA, 297 bp, synthetic construct
  misc_feature 1..297: note = Description of Artificial Sequence: Synthetic coding sequence
  source 1..297: mol_type = other DNA
atgcgggagtacaagctggtggtgctgggcagcggcggcgtgggcaagtcagccctgaccgttcagttcgtccaggggatctttgtagagaagtacgaccccacaatagaagactcataccgcaaacaggttgaggtagacgcccaacagtgcatgctggaaatcctcgataccgcagggaccgagcagtttacagcgatgcgagacttgtacatgaagaatggccagggatttgctctggtgtatagcataacggcacagagcacgttcaatgacctacaggatctgagggagtag

SEQ ID NO: 202561 - DNA, 414 bp, synthetic construct
  misc_feature 1..414: note = Description of Artificial Sequence: Synthetic coding sequence
  source 1..414: mol_type = other DNA
atgcgggagtacaagctggtggtgctgggcagcggcggcgtgggcaagagcgcactgaccgtacagttcgtgcaggggatcttcgtggagaagtacgaccccaccatcgaagatagctacaggaaacaggtggaagtggacgcccaacaatgtatgctggagatcttagataccgctggcactgtacccatgatcctggtgggcaataaatgcgacctagaggacgaacgtgtggtgggtaaggagcagggtcagaatctcgccaggcaatggaataattgtgcattccttgagtcttcggctaagtccaagattaatgtcaatgagatcttttatgatctggtgcggcagatcaatcgcaagacgcctgtgcctgggaaggcacggaaaaagtcatcgtgtcagcttttgtag

SEQ ID NO: 202562 - DNA, 357 bp, synthetic construct
  misc_feature 1..357: note = Description of Artificial Sequence: Synthetic coding sequence
  source 1..357: mol_type = other DNA
atgcgggacctgtacatgaagaacggccagggcttcgccctggtgtactccatcacagcacagagtactttcaacgaccttcaagatctccgcgaacagatcctgcgagtgaaagacacagacgacgtgccgatgattcttgtcgggaataagtgcgacctagaagacgagagggtcgtaggcaaagagcaagggcagaatcttgctcgacaatggaacaactgcgcgttcttggagagcagtgccaagtcaaagattaatgtgaatgagatcttctacgatctggtccgacaaatcaatcggaagacacctgtacctggcaaggccaggaagaaaagcagctgtcaactgctatag

SEQ ID NO: 202563 - DNA, 369 bp, synthetic construct
  misc_feature 1..369: note = Description of Artificial Sequence: Synthetic coding sequence
  source 1..369: mol_type = other DNA
atgcgggagtacaagctggtggtgctgggcagcggcggcgtgggcaaatccgccctaaccgttcagttcgtgcaggggatctttgtcgaaaagtacgatccaaccatcgaggactcttacagaaagcaggttgaggtggatgcgcagcagtgtatgctggagatcttagacactgccggcactgaacagtttaccgccatgagagacctgtacatgaaaaatggtcaaggttttgccctcgtgtactcaatcactgcacagtcgacattcaatgacttacaggatctccgggaacagatcctacgggtgaaggacacagacgatgtcccaatgatcctggttggaaacaaatgcgatctggaagactag

SEQ ID NO: 202564 - DNA, 258 bp, synthetic construct
  misc_feature 1..258: note = Description of Artificial Sequence: Synthetic coding sequence
  source 1..258: mol_type = other DNA
atgcgggagtacaagctggtggtgctgggcagcggcggcgtgggcaaatccgcactgactgtacagtttgtgcagggcattttcgtggaaaagtacgatcccacgatagaggattcataccggaagcaggtggaggtggacgcccaacagtgcatgctggaaatactggacaccgccgggaccgaacagttcaccgccatgcgagacctctacatgaagaatggacagggcttcgcacttgtttacagtatcacatag

SEQ ID NO: 202565 - DNA, 552 bp, synthetic construct
  misc_feature 1..552: note = Description of Artificial Sequence: Synthetic coding sequence
  source 1..552: mol_type = other DNA
atgcgggagtacaaggtggtggtgctgggcagcggcggcgtgggcaaaagcgccttgacagtccagttcgttacgggaacatttattgaaaaatacgatcctacgattgaggacttttatagaaaggaaattgaagtggactcgtctccctcagtgctagaaatactggacacagccggcacagagcagttcgcttcgatgcgggacctgtacatcaaaaacgggcagggctttattttagtttactcactagtgaatcaacagtctttccaggacattaagccaatgcgggaccagatcatccgcgtaaagcggtacgagaaggtgcccgtgattcttgtcgggaacaaagtggatctcgagtccgagcgagaagtgagctcttctgaaggcagggctttagccgaggaatgggggtgccctttcatggaaacctcagccaagtcgaagaccatggtggacgagctctttgctgaaattgtgagacagatgaactatgctgctcagccagacaaggacgacccttgttgctctgcttgtaatattcagtag

SEQ ID NO: 202566 - DNA, 1671 bp, synthetic construct
  misc_feature 1..1671: note = Description of Artificial Sequence: Synthetic coding sequence
  source 1..1671: mol_type = other DNA
atgaacgagggcgcccccggcgacagcgacctggagaccgaggcccgcgtcccctggagtatcatgggccattgcctccgaaccggacaggcgcggatgtccgcaactcccactcccgcaggcgaaggtgctcgtcgggacgaattgtttggaattttacaaattttgcaccagtgtatcctcagctccggggacgcttttgtgctaaccggagtgtgctgttcttggcgacagaacggcaagcctccctacagccagaaagaggataaggaggtgcaaacaggttatatgaatgcccagattgaaattatcccgtgtaagatctgcggggacaaaagtagcggaattcactacggtgtgatcacatgcgaaggctgcaaaggattctttaggcgatctcaacagagcaacgccacctacagctgtccccgacagaaaaattgtcttatcgacagaacctcccgtaataggtgtcagcattgcaggctgcagaaatgcctggctgtgggcatgagtagagacgccgtgaagtttgggaggatgagcaaaaagcagcgggattccctttatgccgaggtacagaaacaccgcatgcaacagcagcagcgggaccaccagcaacagcccggtgaggcagaacctttaacccccacttacaatatcagcgcaaatggcctcacagagctacatgatgatctgtccaactatatcgacgggcacaccccagaaggaagtaaggcagacagcgccgtgtcatccttttatcttgacattcagccaagccctgaccagtctgggttggacataaacggtattaagcctgagcccatctgcgactatacaccggcctccggcttttttccatactgcagctttaccaacggagaaaccagtccaactgtgagcatggccgaactggagcacctggcccagaacatatccaagtcccacttggagacatgccagtacctcagagaagaactacaacagataacatggcagacatttctgcaagaggagatcgagaattatcagaacaagcagcgtgaagttatgtggcaattgtgcgctatcaaaatcacagaggctatccagtacgtagtggagtttgccaagcgcatagacgggtttatggagctgtgccaaaacgatcagatcgtgctgctgaaggcaggcagtctcgaggttgtctttattcggatgtgtagggctttcgacagccaaaataatacagtgtatttcgacggcaagtatgctagcccagacgtgtttaaaagcctgggctgcgaggactttatttcctttgtctttgagtttgggaaatcactgtgctccatgcacctcaccgaggacgaaatcgccctgttcagcgctttcgtgttaatgagtgcagacaggtcttggttgcaggagaaggttaagatcgaaaagctgcagcaaaaaatccagcttgcgctgcagcatgttctgcagaagaaccacagagaggacgggatcctaacaaagctgatatgtaaggtgagtacactgagagcattatgtggcaggcataccgaaaagcttatggcattcaaggctatctacccagatatcgtgagactgcactttccccccctctataaggaactgtttacgagcgagttcgaacccgcaatgcagatcgatggttag

SEQ ID NO: 202567 - DNA, 1647 bp, synthetic construct
  misc_feature 1..1647: note = Description of Artificial Sequence: Synthetic coding sequence
  source 1..1647: mol_type = other DNA
atgaacgagggcgcccccggcgacagcgacctggagaccgaggcccgagtgccctggagcataatgggccactgcctgagaacaggccaggcccggatgtccgcaacccccactccagcgggcgagggggcgaggagctcttccacctgttcgagcttgtctcgcctcttttggtctcagctggagcacatcaattgggacggggctacagctaagaatttcatcaatctaagagagttcttttcgtttctgctgcccgcccttaggaaagcccagattgagatcatcccctgtaagatatgtggggacaagtcctctggtattcactatggcgttatcacatgcgaggggtgtaaaggattctttcgcaggagccaacagtccaacgctacctattcgtgtccacgccagaaaaattgtttaatagatcgaacatccaggaataggtgtcagcactgcagactgcagaaatgcctggctgtgggaatgagccgcgacgcagtcaaattcggcaggatgtccaagaagcagcgggattccctatacgccgaggtgcaaaagcatcggatgcagcagcagcaaagagaccaccaacagcaaccaggcgaggccgagcccttgaccccgacttataacatctcagccaacggtttaactgagttgcacgatgacctcagcaattatatcgacgggcatacacctgaaggaagcaaagctgacagcgcggtatcatccttttatcttgatatccagccttcgccagaccaatctggcctcgatatcaacggtatcaagcccgagcctatctgtgattacactccagcgtctggttttttcccctattgcagttttaccaatggggagacctctcccactgtgtccatggcagagctagaacatctagcgcagaacattagcaagagccatttagaaacatgccagtatttgagggaggaactgcagcagatcacgtggcagacgttcctgcaggaagagattgagaattatcagaacaagcagcgggaagttatgtggcagctgtgtgccattaagatcaccgaagcaatccagtatgtcgtcgagttcgcaaagcgcatcgatggtttcatggagctgtgccagaacgaccagatcgtgctgcttaaagcgggctcattggaggtggtttttattcgtatgtgcagagcctttgattcccaaaacaataccgtatattttgacggcaagtacgcaagtcccgatgtgtttaagagcttgggctgtgaggacttcatctcctttgtgttcgagttcggaaagagcctctgttccatgcacttgacagaagacgagattgccctgttttctgcctttgtgctgatgtcagccgacaggagctggctgcaggaaaaggttaagatagagaagcttcagcagaagatccaactggcccttcaacacgttctgcagaagaaccatagagaggacggaatacttacaaagctgatttgtaaggtctcaacactgagggctctatgtggccgccacactgagaagctgatggcatttaaggcaatataccctgatatagtcagattgcatttccctcccctgtataaggagctcttcacctcagaattcgaacccgctatgcagatagacggatag

SEQ ID NO: 202568 - DNA, 1572 bp, synthetic construct
  misc_feature 1..1572: note = Description of Artificial Sequence: Synthetic coding sequence
  source 1..1572: mol_type = other DNA
atggagagcgcccccgccgcccccgaccccgccgccagcgagcccggctctagtggtgctgatgctgccgcgggaagccgggagactcccctgaatcaggagtcagctcggaaatccgagccacccgccccagtgcgccggcagtcctattccagcacatctagaggcatctcagtgacaaagaaaacgcatacatctcagatagaaatcatcccttgtaaaatttgtggcgataagagttcagggatccattacggcgtcatcacatgcgagggatgtaagggatttttccgaagatcacagcagtccaatgcaacatacagctgtcccaggcagaaaaattgtctgatcgacagaacatcacgaaacaggtgtcaacactgtagactacagaagtgtcttgcagtggggatgtctagggacgcagtcaagttcggccgtatgagtaaaaagcagcgggattcattatatgctgaggttcagaagcacagaatgcaacagcagcagagggatcaccaacagcaaccaggggaagctgaaccactgacgcctacttacaacatcagcgcgaatgggctgacagagcttcatgatgacctcagcaactatatcgacgggcacacccctgaggggagtaaggccgactcagccgtgtcatccttctacctagacattcagccaagcccagaccagtcaggcctcgacattaatggcattaaaccagaacccatctgtgactataccccagctagcggcttctttccctattgtagcttcacaaacggcgaaacatctcccactgtctcaatggctgagctcgagcatctagctcagaacatttctaaatcccaccttgaaacatgtcagtacttgcgggaagaactgcagcagataacatggcagaccttcctgcaagaggagattgagaattaccagaacaagcagcgtgaagtcatgtggcagttatgtgccatcaaaatcacggaggcaatccagtacgtggtagagtttgctaaacgcattgatggctttatggagctgtgtcagaacgatcagatagtgctgctcaaagcgggtagcctcgaggtggtcttcatcagaatgtgccgggcttttgactcacagaacaatacagtttactttgatggaaaatacgcaagccccgatgtatttaagtctctcggctgcgaggacttcatatccttcgtgttcgagtttgggaagtcactctgttctatgcatctgaccgaagacgaaatagccctctttagtgcctttgtgctgatgtcagccgaccggtcctggttgcaggagaaagtcaaaattgaaaagctgcaacagaaaattcaactggcactgcagcacgttctgcagaagaaccacagagaggacggaattttgacgaagctaatctgcaaagtaagcacactccgggctctttgcggccgacacacagagaagttgatggccttcaaagctatctatcctgatatcgttagactccacttccctccgctctataaggagttgtttacaagcgaattcgagcccgcaatgcagatcgatggttag

SEQ ID NO: 202569 - DNA, 1407 bp, synthetic construct
  misc_feature 1..1407: note = Description of Artificial Sequence: Synthetic coding sequence
  source 1..1407: mol_type = other DNA
atgatgtacttcgtgatcgccgccatgaaggcccagatcgagatcattccatgcaagatctgcggggacaaaagtagcggtatccactacggcgtaatcacatgtgagggttgcaaggggttcttcagacgctcccagcaaagcaacgcgacctattcctgcccgcggcagaaaaattgtcttatcgaccggaccagccggaaccgatgtcagcactgtcggttgcaaaagtgccttgccgtgggtatgtcccgggatgcagtgaaatttggaagaatgagcaagaaacaacgagacagcctctacgccgaggtccagaaacatcgaatgcagcagcagcagcgggaccaccagcaacagcccggcgaagcagaacctctcacacccacatacaatattagtgccaacgggcttacagaattacatgatgatttgtctaactacatcgatggccacacccccgagggctcaaaagccgatagcgccgttagcagcttctacctggatatccagccttcccctgaccaaagcggcttagatatcaacggtataaagccggagcctatttgtgactatactccggccagcggcttcttcccctattgcagctttaccaatggagagacctcgccaactgtgtctatggccgaacttgagcaccttgcccagaacattagtaagagccacctggaaacctgccagtacctccgtgaagagcttcaacagatcacttggcagacgttcctacaggaagaaattgagaactaccaaaacaagcagagggaggtgatgtggcagctgtgcgctatcaaaatcactgaggccatacaatacgttgtcgaattcgcaaagcggatcgatgggtttatggagctatgccagaatgaccaaatcgttctgctgaaagctgggagtctcgaggtcgtatttatccgcatgtgccgcgccttcgactcgcagaataacacggtctattttgatggaaagtacgcctcacctgacgtgtttaagtcgctgggttgtgaggattttatctccttcgtcttcgagttcggcaaatccctatgttctatgcacctgacagaagatgaaatcgccctattttccgcgttcgtactgatgagtgccgaccgtagctggctacaggagaaggtgaagattgaaaaattgcagcagaagattcaacttgccctccaacacgttctgcagaaaaaccatagagaagacgggattctcacaaagctaatctgtaaggtttccactctacgagccctgtgtgggaggcatactgaaaagttgatggcctttaaggccatctacccggacattgtcaggttacactttccacctctatataaagaactgtttactagcgaatttgagcctgcgatgcaaattgatggctag

SEQ ID NO: 202570 - DNA, 1557 bp, synthetic construct
  misc_feature 1..1557: note = Description of Artificial Sequence: Synthetic coding sequence
  source 1..1557: mol_type = other DNA
atggaccgggccccccagcggcagcaccgggccagccgggagctgttggctgcgaagaagacgcacactagtcagatagaggtcattccttgcaagatttgcggggacaaatcatcaggaattcactacggcgtgatcacttgcgagggctgtaaaggcttctttcggcgaagtcagcgatgcaatgcagcttactcctgtaccagacagcagaactgtcccattgatcggacctcccgcaataggtgtcagcactgtcgacttcagaagtgcttagctctcggcatgtcacgggatgctgtgaaatttggccggatgagtaaaaagcagagggatagcctccatgccgaggttcagaagcagctgcaacaaagacagcagcaacagcaggagccagtcgtcaagacacctccggcgggcgcccagggagcagacacattgacgtacacccttggcctccccgatgggcagctcccgttaggttctagccctgatctccctgaggcctcagcctgcccgcccggtcttcttaaggcctcaggctcgggaccctcatatagcaataaccttgccaaggcaggacttaatggtgcatcatgccatttggagtattctcctgaaagaggcaaagccgagggacgggagagtttctactcgaccggcagccaactgacacctgaccggtgtgggcttcgctttgaggaacaccgtcaccccggcctgggcgagctcggccaggggccagatagctacggcagtcccagcttccgctcaactccagaggccccctatgccagcctgacggagatcgagcaccttgtacagtctgtctgtaaaagttatcgagagacctgccaattaagattggaggatcttctccgacagaggagcaatatcttctcccgagaggaggtgaccggctaccagcgcaagtccatgtgggaaatgtgggaaagatgtgctcaccacctgacagaagcgatacagtatgtggttgagttcgcgaagcgactgtcaggcttcatggagctatgccaaaacgaccagatagtgctcttaaaggcaggcgctatggaagtcgttctcgtgaggatgtgtcgcgcttataatgcagacaatagaaccgtcttttttgagggcaagtacgggggtatggagctcttcagggctctgggatgctccgaactcatcagttccatctttgacttttcacatagcctgtccgccttacattttagcgaggatgagatcgcactgtatactgctctcgtgttgataaatgctcacaggcctgggctacaagaaaagcgtaaggtcgagcagctacagtataacctcgaactggcctttcatcaccacctgtgtaagacccataggcagagtatactagcaaagctcccaccgaaagggaaactgcgttctttgtgctctcaacatgtggaaaggctccagatatttcagcacttgcaccccatcgtcgtccaagcagcatttccacctctgtataaggaactgttctctacagagaccgaaagccctgtgggactgtccaagtag

SEQ ID NO: 202571 - DNA, 1494 bp, synthetic construct
  misc_feature 1..1494: note = Description of Artificial Sequence: Synthetic coding sequence
  source 1..1494: mol_type = other DNA
atgcggacccagatcgaggtgatcccctgcaagatctgcggcgacaagtctagtggaattcattacggcgtgattacctgcgagggatgcaaaggattctttagaagatcccagagatgcaatgctgcttattcttgtacaagacagcaaaattgcccaatcgaccgcacttcgcgtaatcggtgccagcactgccggctacagaaatgtctagccctgggcatgagcagagacgctgtcaagttcggcagaatgagtaagaagcagagggactccctgcacgcagaggtccagaagcagctgcagcagagacagcagcagcagcaggaacctgtggtcaagacacccccggccggtgcccaaggggctgatacactcacatatacgctcggccttcctgacggtcagctgccattgggctccagcccagatctccccgaggcctctgcatgtcccccgggtttgctaaaggccagtgggagcggtccatcctatagcaataatcttgccaaggccggtctgaacggggcaagttgccatctggagtacagtcccgagagaggcaaagcagaaggtagagaatctttttactccacaggcagtcagctgactccggacagatgcggactcaggttcgaggagcaccggcacccagggctgggagagctgggccagggtcctgattcctacggctcccctagcttccggagcacccccgaggccccttatgcaagtctgaccgagattgaacatctggttcaatccgtgtgcaagtcttaccgggagacgtgtcagctgaggcttgaggacttgctacggcaacgctccaacatattttctagggaagaagtgacggggtaccagaggaaatcgatgtgggaaatgtgggaacggtgcgctcatcacctgacagaggccatccaatacgtggtcgaatttgctaagagattgtcaggattcatggagctgtgccagaatgatcagatagtgctgcttaaagcgggcgctatggaagttgtgttggtcagaatgtgcagggcctataacgcggacaataggacagtattcttcgagggcaagtatgggggtatggagttattccgcgccctcgggtgcagcgagctgattagctctatctttgatttttcccactcattatcggccctgcacttctcggaggacgagatcgccctatacaccgccctggtgcttatcaacgcgcatagaccaggcctacaagaaaaaagaaaggttgaacagctacagtacaacctggagcttgcttttcatcaccatctctgcaagactcatcgccagtccatcctggctaagcttcccccgaaagggaaactcagaagcctctgcagtcagcacgttgaaagacttcagattttccagcatctgcatcctatcgttgtgcaagctgcatttccgcctctatataaggaacttttcagtaccgagaccgaatcacccgtaggcctatcaaaatag

SEQ ID NO: 202572 - DNA, 1719 bp, synthetic construct
  misc_feature 1..1719: note = Description of Artificial Sequence: Synthetic coding sequence
  source 1..1719: mol_type = other DNA
atgtggggcaccggccccagcgccggcaaggaccggatgagcggccggccttggcctcatccttggtcgaaatccggaaccccctctgagcaggaccgacgggcaaccgggctcgtgagttgcgagcacgggggaggcaaattcgaggggcagtcgcaccaggccccaggtcctccgggtggcggcaggacggggtgcttggaactcctggcagcaaaaaagactcatacaagccagatcgaagtgatcccttgtaagatttgtggagacaagagcagtgggattcactacggggtcataacatgtgagggctgcaagggtttcttcaggcgcagccaaaggtgcaacgcggcatacagttgcactcgccagcagaattgtcccattgatcgcacatcacggaaccggtgccagcattgccgtctacagaaatgtcttgcactgggcatgtcaagagatgcagttaagttcggccggatgagcaagaaacagcgggacagcctgcacgccgaagtccagaagcagttacagcagaggcagcagcagcagcaggaacccgttgttaagaccccaccagctggcgcacaaggggccgacacgctgacttatactctcggactccccgatggacagctgcccctgggcagcagccccgacctgccagaagcttccgcatgtccgcctggccttctgaaagcaagcggttctgggccaagctatagtaataatcttgctaaggcagggctgaacggtgcaagttgtcatctcgaatacagccctgaacgagggaaggctgaagggagggagagtttctactccactggttcccagctgacacctgacagatgcgggctgcggtttgaagaacatcgccatcccgggctcggcgagctgggccaagggcctgatagctacgggtccccgagttttcggtccactcctgaggctccttatgcctcccttactgagatcgagcacttggttcagtcggtgtgtaaaagctacagggagacctgccaactgcgtctggaagacttattgcggcagagatcaaacatattctctagagaagaggtcaccggataccagcgtaaatcaatgtgggaaatgtgggagcggtgcgcccatcatctgacagaagccatccagtatgtggtggagtttgctaaacggctatctggcttcatggagctgtgtcaaaacgatcagatcgtgctgcttaaagccggtgctatggaggtggttctggtgcggatgtgccgagcatacaatgctgataaccgcaccgtgttctttgaggggaagtacggcggcatggagttattcagagcactcggatgctccgagctaatctcatctatatttgacttctctcacagtctgagtgccttacatttttccgaggacgagatcgcgctttatactgcattggtcctgataaatgctcatcgcccaggcttacaggagaaacggaaggtagaacagctgcagtataatctggagctcgcctttcaccaccatttgtgcaaaacccacaggcagtctatcctggcaaagctcccaccaaaggggaagctgcgctccctatgtagccagcatgttgaacggttgcagatcttccagcatctgcatcccatagtggtccaggccgcctttcctcccctctacaaagaactgtttagtaccgaaacagaatcacctgtggggttaagtaaatag

SEQ ID NO: 202573 - DNA, 2835 bp, synthetic construct
  misc_feature 1..2835: note = Description of Artificial Sequence: Synthetic coding sequence
  source 1..2835: mol_type = other DNA
atgctggacagcttcagccaggagagcaccctgcccttccgggaggctcggaaacgaacaagcttccagcctgttcaggtatggaggaatttcactgcctcgcaaacgactgagagccccgcctgtagtggggctagcctgggagagatgacggcttggaccatgggagcacgagggctggataagcgcggatcgttttttaaactcattgatactattgcatctgagatcggcgagttaaagcaggagatggtccggactgatgtgaacctcgaaaacggccttgaacctgccgaaactcactccatggtgcgacacaaagacggcggttattcggaggaggaggatgtgaagacgtgcgcgcgtgatagtggttatgacagcttgagcaatagactttccatcttggaccgcctcctgcacacacaccctatctggttacagctgtctttatccgaagaagaggcggccgaggtgctgcaggcgcagcctcccgggattttcctggtacataagtcgactaagatgcagaaaaaagttctctcactacggctgccttgcgagttcggcgccccactgaaagaattcgccataaaagaatccacctatacgttttccctggaggggtccggcatcagcttcgcagacctgttcagactgatcgccttctattgtatcagtcgggatgtgctcccctttaccctgaagcttccctatgccatcagcactgccaagtccgaagcccagcttgaagagttggctcagatgggactcaatttctggtcgagccctgccgactcaaagcctccaaacctgcctcctcctcacagacctttgtcatcagatggcgtttgccctgcctccttgcggcaactgtgcctaatcaatggcgtgcactccatcaagacaaggactccctcggagctggaatgttctcagacgaatggagccctgtgtttcattaatcctcttttcttgaaggtgcatagtcaggatctgtccggaggattgaaaagaccttcaactcgtacccccaacgccaatggcacggaacgtacccggtcgcctcctcctcgacccccaccgccagcgattaactctctgcatacaagtcccaggttggcgagaacagagacgcagactagcatgcccgagacggtgaatcataataaacatggcaacgttgcgctgccagggaccaagcctacaccaatccctccacctagactgaagaagcaagccagcttcctggaagctgagggtggcgctaagaccctaagcggcgggcggcccggtgcaggtccggaactggagctcgggacagccggaagcccaggcggggctccgcctgaggctgccccgggggattgcacacgcgccccccccccctccagtgagtcccgacccccttgccatggcgggcgccagagactttccgatatgtcaatttctaccagctcaagtgacagccttgaatttgacagaagtatgccactatttggctacgaagcagacaccaacagttcactcgaggattacgagggcgagtccgatcaagaaactatggcacccccaatcaaatccaaaaaaaaaagaagctcttctttcgttctgcctaagcttgtgaagtctcagctgcaaaaagtgtccggggttttcagctcttttatgacacctgaaaaacgcatggtgcgcagaattgccgagctgtctcgcgataaatgcacttacttcggctgcctcgtgcaggactatgtttcctttttgcaagagaataaggagtgccatgtgagctccacggacatgcttcagaccattcgccagtttatgacccaggtcaagaattacctgtcacagtcgagtgagctggaccctccgattgagtcacttatacccgaggatcagattgacgtcgtgctcgagaaggccatgcataaatgcattctgaagcccctgaaggggcacgtggaagctatgctgaaagactttcacatggccgacgggtcttggaagcaactgaaagagaacctacagctcgtacgccagcgaaacccccaggaactgggggtctttgcacccacacccgacttcgtagacgtagaaaaaattaaagtgaagttcatgacgatgcagaagatgtactctcctgagaaaaaggtgatgctcctccttcgcgtatgtaaactcatttacacggtcatggaaaacaacagcggtagaatgtacggtgccgacgattttctgccagtgcttacctacgtcattgcccagtgcgacatgcttgagcttgacacagagatcgaatacatgatggagcttcttgatccctccctgttacacggagagggcggttactatcttacatccgcctatggcgcactttctctgattaaaaacttccaggaggaacaggcggctagactgttatcctcagaaactagagacaccctgcggcagtggcataaacgccgcacaaccaaccggaccattccgagtgttgatgattttcagaattacctcagagttgcctttcaggaagtgaacagcggatgcactggcaagaccttgctggtcagaccttacattactacagaggacgtatgccagatttgcgccgagaaatttaaagttggcgaccctgaggaatattccctcttcttattcgtcgacgagacttggcagcagcttgccgaggacacttacccacagaaaatcaaggctgaactccactccagaccacagccccatatcttccacttcgtttataagcgcattaaaaacgatccttacggcatcatcttccagaacggggaggaggatctcacaacatcatag

SEQ ID NO: 202574 - DNA, 1389 bp, synthetic construct
  misc_feature 1..1389: note = Description of Artificial Sequence: Synthetic coding sequence
  source 1..1389: mol_type = other DNA
atgaccgcctggaccatgggcgcccggggcctggacaagcggggctctttcttcaaactcattgataccattgcctctgaaatcggagagctgaagcaggaaatggtcagaaccgatgtgaacctcgaaaatggtctagaacctgcggagactcacagcatggtgcgccataaagatggcggttattccgaagaagaagacgtgaagacttgcgctagagatagcggctacgacagcttatccaaccggctgagcatcttggacagactgttgcacacccacccaatctggctccagctgtccctttccgaggaggaagccgccgaggtcctccaggctcagcctccgggcattttcctagtgcacaagagcaccaagatgcagaaaaaggtgctgagccttcggctgccttgcgagttcggcgccccactgaaggaattcgcaataaaggagagcacctataatgtcgtcctggaaaaggctatgcacaaatgcatcttaaagccactcaaagggcatgtcgaggctatgcttaaggactttcacatggccgatggttcctggaagcagctgaaggagaacctgcagcttgttcgtcagagaaatccgcaagaattaggagtttttgccccaactcctgattttgttgatgtcgaaaagatcaaggtcaagtttatgactatgcagaaaatgtacagtccggaaaagaaggtgatgctgctgctgcgcgtgtgtaagctcatctatacagtcatggaaaataattccggacggatgtacggcgctgatgattttctgcccgtgctaacctatgtgatagcacaatgcgacatgcttgaactggacaccgaaattgaatacatgatggagctgctggacccatcattgctacatggtgagggcgggtattacctgacatctgcttatggcgcgctgagcctgatcaaaaatttccaggaggagcaggccgcacggttgctctcctctgaaacgcgggacaccctgcggcagtggcacaagcggagaacgactaaccggacaattccctcagtcgatgatttccagaattatcttagagtggccttccaggaggtcaacagtggttgcactgggaagaccctcctggttcgcccgtatattacaacagaagatgtctgccaaatctgtgcagaaaagttcaaggtgggcgaccctgaagaatactctctctttctgttcgtcgacgaaacttggcaacaactagccgaagacacctaccctcagaagatcaaagcagagctgcattcaagaccccaacctcacatcttccactttgtgtacaaacggattaagaatgacccatacggcattatctttcagaacggagaagaggacctgacaacatcatag

SEQ ID NO: 202575 - DNA, 717 bp, synthetic construct
  misc_feature 1..717: note = Description of Artificial Sequence: Synthetic coding sequence
  source 1..717: mol_type = other DNA
atgagcagcggctacagcagcctggaggaggacgccgaggacttcttctttaccgcccggactagcttctttcggcgtgcgccgcagggcaaacctagaagcggacagcaggatgttgaaaaggagaaggaaacacacagctatctgtctaaagaagaaatcaaggagaaagtccacaaatacaatctggcagtcacggataagctaaaaatgacccttaactccaatggtatctatacgggcttcattaaggtgcagatggagttatgcaaaccgcctcagacctccccaaattcagggaaactttccccctctagcaatgggtgcatgaacaccctgcacatctctagtacgaacacagtgggggaagtgattgaggcgctgctaaagaagtttttggtgactgaatccccggccaaattcgccctatacaagagatgtcaccgggaggatcaagtgtatgcctgcaaactgagtgatcgcgagcatcctctgtatctccgactcgttgcaggacctaggactgacactttatccttcgtgctccgagagcatgagatcggggaatgggaagccttctcccttccggagctccagaattttctgaggatcctagataaagaagaggacgaacaactgcagaacctgaagcgaagatacacagcctatcggcagaagttagaagaggctttacgggaggtatggaaaccagattag

SEQ ID NO: 202576 - DNA, 507 bp, synthetic construct
  misc_feature 1..507: note = Description of Artificial Sequence: Synthetic coding sequence
  source 1..507: mol_type = other DNA
atgaccctgaacagcaacggcatctacaccggcttcatcaaggtgcagatggagctttgtaagcccccgcagacatcacccaactccggtaagctgagtcccagtagtaatgggtgcatgaacacactgcacatctcatcgaccaatacagtgggggaggtcatagaggccctccttaaaaagttcctggtaacggaatctccagctaagttcgccctgtataaacgttgtcatcgggaggatcaggtgtacgcttgcaaattgagcgatcgggaacacccactctatctgagactggtcgcaggccctcgtacagatactctgtctttcgtgctaagggagcatgaaatcggggagtgggaggcattcagtctgcctgaactccaaaactttctgaggatcttagacaaagaggaagatgaacagctgcagaacctcaaacgcaggtacaccgcgtacagacagaagctagaggaggctctgcgggaggtgtggaaacccgattag

SEQ ID NO: 202577 - DNA, 717 bp, synthetic construct
  misc_feature 1..717: note = Description of Artificial Sequence: Synthetic coding sequence
  source 1..717: mol_type = other DNA
atgagcagcggctacagcagcctggaggaggacgccgaggacttcttttttacggcccggacttccttttttaggagagcgccccagggcaaacctcggtcgggacagcaggacgtagaaaaggaaaaggagacgcactcttatttgtctaaagaagaaatcaaagagaaagtacacaagtacaatctggccgttactgataaactaaagatgaccttgaactccaacggcatctatacagggttcattaaagtacagatggagctctgtaaaccaccacaaacctcacccaatagtggcaagttatcacccagctctaacggttgcatgaacaccttgcacatatcctccactaataccgtaggtgaggtgattgaagccctactgaagaaattcctggtaaccgaatctcctgccaaatttgctctctacaaacggtgccatagggaagatcaagtgtacgcctgcaaactgtctgacagagagcaccccctgtacttaaggctcgtggcaggaccgagaaccgacaccctttcttttgttctgcgcgagcacgagatcggcgagtgggaggcctttagcttgccagagctgcagaattttctgcggatcttggataaggaggaagacgagcagctacagaacctcaaaagacgttatacggcctacagacagaaactggaggaggcacttagagaggtgtggaagcctgattag

SEQ ID NO: 202578 - DNA, 1014 bp, synthetic construct
  misc_feature 1..1014: note = Description of Artificial Sequence: Synthetic coding sequence
  source 1..1014: mol_type = other DNA
atgaccatgatggcccaccagtaccccagctggatcttcatcaacgagaagaccttcattactagggaacagctgaactccctcctcaagacctacaacatcttctacgagaaccaaaagaatttgcatattctgtatggcgagaccgaggacggaaaactaattgttgaaggcatgctcgatattttttggggcgtgaagcggccaattcagctgaaaattcaggacgagaagccattcagcagcttcacatcaatgaaaagcagtgacgtatttagctccaagggaatgacgcgttggggcgagtttgatgacttgtatagaatcagtgagctggaccgcacccaaattccaatgtctgaaaagcggaattcacaagaggactatctctcctatcactccaacactttaaagcctcacgcgaaagacgagcccgactcccctgttctgtacaggaccatgtcggaggccgcgctcgttcggaaacggatgaagcctttaatgatggatcgcaaggaacggcagaagaacagggcatcaatcaacgggcacttctacaaccacgaaacatccatcttcatcccagccttcgagtcagaaaccaaggtgcgggtgaatagcaatatgcgcacagaagaggtgattaagcagctgttgcagaaattcaaaatcgagaattctcctcaggactttgccctacatatcattttcgcaaccggcgagcagaggcggcttaagaagacagatatccctctcctgcagcgcttgttacagggtccgtccgaaaaaaacgcgcggatcttcctgatggacaaggatgccgaggagatctcatccgatgttgcccagtacattaatttccatttttcactgctcgagagtatactgcagcgattaaatgaggaggagaagagagaaattcagcggatagtgaccaaatttaacaaagagaaggccattatacttaaatgtctccagaacaagctagttattaaaacagagactaccgtgtag

SEQ ID NO: 202579 - DNA, 978 bp, synthetic construct
  misc_feature 1..978: note = Description of Artificial Sequence: Synthetic coding sequence
  source 1..978: mol_type = other DNA
atgctgtgggaggagaccggcgccgcccccgcccccgcccgggccagtgatctcccctacaggatccatttcctgagctccggcctcattctggtgactcgccaattgaccgaggacggtaagcttattgtggaaggcatgcttgacattttttggggcgtgaaacgcccgatacagctgaaaatacaagatgagaagcctttttcttcttttacgtctatgaagtcttcggacgtgttttcttcaaaagggatgacccgctggggggaatttgatgacttgtacagaatcagcgagctagataggacgcagatccctatgagtgagaaacgcaacagccaggaggactacctatcctaccattccaacactctgaagcctcacgccaaagacgagccagacagccccgttctgtaccggacaatgtcagaggctgctctcgttcggaagagaatgaagccgctaatgatggatagaaaggagaggcagaaaaaccgggcctccatcaatgggcacttttacaatcacgaaacgtccatcttcatccccgcattcgagtcagaaactaaagtgagggtaaacagcaatatgcggaccgaagaagttataaagcagctgctacagaaattcaagatagagaattcaccccaggactttgccttgcatataatatttgctaccggggaacagaggagactcaaaaaaacagacatacctctgctccaacgactcctacagggaccgtcagagaagaatgcccgaatcttcctgatggacaaagacgccgaggagatttcttcagacgttgctcagtatatcaatttccacttcagcctcttagaatctatcctgcagaggttaaatgaagaggaaaagcgagagatccaacgaatagtgacaaaatttaacaaggagaaagctatcatcttgaagtgtctgcagaataagctcgttatcaaaaccgagacaacagtttag

SEQ ID NO: 202580 - DNA, 1110 bp, synthetic construct
  misc_feature 1..1110: note = Description of Artificial Sequence: Synthetic coding sequence
  source 1..1110: mol_type = other DNA
atgctgtgggaggagaccggcgccgcccccgcccccgcccgggcctctgacctgccatacagaatctcttctgaccacctgaaaaaggaggaaaaaatgaccatgatggctcaccagtatcccagctggatcttcattaatgagaagacctttattacccgagagcagttaaattctcttttaaaaacctataacattttctacgagaatcaaaaaaacttacatattttgtatggcgagacggaggatggtaagcttattgtcgaggggatgctggatatcttctggggggtcaagaggcccatccagctaaagatccaggacgaaaaacccttttctagctttacctccatgaagtcatccgatgtgttttctagcaagggcatgactaggtggggagaattcgatgacttatatcgcatcagtgaactcgatagaactcagattccgatgtcagagaagcgcaatagccaagaggattacttgtcttaccactccaatacattgaaaccccatgccaaagacgaaccagatagtcctgtgctgtaccggacaatgtctgaagccgccctggtgcggaaaaggatgaaaccgctcatgatggaccgcaaggagcggcagaaaaaccgcgcgagcatcaatggccacttttacaaccacgaaacgagcatcttcatccccgcttttgaaagtgagaccaaggtgcgagtcaattctaatatgagaactgaggaagtgatcaaacagctcctccagaagttcaagatagagaatagcccacaagattttgcccttcatattatcttcgcaacaggcgagcaacgccggctcaagaagaccgatataccactgctgcagcggctgctgcaggggccgtcggagaaaaatgcacgcatcttcttgatggataaggatgcggaagaaatctcttccgacgttgcacaatacattaatttccacttctcattgcttgagtccattctccagaggctcaacgaggaggagaagcgcgagatccagaggatagtcacaaaatttaataaagagaaagcgatcattctgaaatgcctgcagaacaagctcgtgatcaagacagagaccaccgtttag

SEQ ID NO: 202581 - DNA, 912 bp, synthetic construct
  misc_feature 1..912: note = Description of Artificial Sequence: Synthetic coding sequence
  source 1..912: mol_type = other DNA
atgaccatgatggcccaccagtaccccagctggatcttcatcaacgaaaagacctttattacccgtgaacagctcaacagcttgctgaagacatacaatatattttacgagaatcagaaaaacttacacatcctgtacggagagaccgaagatggcaaacttatagtggagggaatgctcgacatattctggggcgtgaagcgaccaattcagctgaagattcaggatgagaagccgtttagcagctttacttctatgaaatcttcagatgtgttctcatcgaaagggatgacgcgctggggggaatttgacgatctgtaccgcatatcagaattggatcgtacgcagatcccaatgagcgaaaaaagaaacagccaagaggattacctgtcttaccactccaacacattgaagccccacgcaaaagacgaaccggattcgccagtcctgtaccgaacaatgtcagaggcagcgttggtcaggaagcggatgaagcctctcatgatggacagaaaagagcgtcagaaaaatagggcaagcattaacggacatttttacaaccacgagatcgagaacagtccgcaagattttgcgttgcatattatcttcgccacaggtgaacagcgcaggctgaaaaagacagatattccactgctacagaggctgcttcagggcccgtcagagaagaatgcaagaatatttctgatggataaggacgcagaggagattagctcagacgtggcccagtacatcaacttccacttcagcctgctggaaagcatcctgcagcggctgaacgaggaggaaaaacgggagatacagcggattgtaacaaagttcaataaagaaaaagccataattttaaaatgcctgcagaataagctggtgatcaagaccgagactacagtgtag

SEQ ID NO: 202582 - DNA, 3141 bp, synthetic construct
  misc_feature 1..3141: note = Description of Artificial Sequence: Synthetic coding sequence
  source 1..3141: mol_type = other DNA
atgctgagccggaccctgagctacaagtaccgggacctggacagcacctttagcagcttaggcgcatcagacgaccctgcagaactgagtacccagctgagcgcccccggagtgctgaaggtgttcggtgactctgtttgtactggtactcattataagagtgtgcttgccactggcacatcttcagcacgagagctggtgaaagaagctctcgaacgctatgcactggaccctagacaggctgggcagtacgttttgtgcgatgtagtcgggcaggccggagacgctggacaaaggtggcaggcacgctgttttcgcgtgttcggtgatagcgagaagcccttactgatacaggaactttggaagccccgcgaggggttatctagaagattcgaactgcgcaaacgctccgacgtcgaagaacttgcggctaaggaggtggacacaatcacggctggaattaatgcacaggcaagacggttacagcggtctcgcgctaagggtacacctacaccagccctgggtgatgcccggtcttcaccgccccctaggctcagacgcacagtgagcgaaactagccttagtcctgtgaatgctcttccagctgccgcacagggtcccgaggagcccggtcctgacgctatgcgatactctctttaccagtctccacatcttctattactgcaggggtattcccagcaacaccctggagtgtgtgcgcagcccggccctgcccacggaggaccagccgacccaagcaagcctagcatttcactcagcgctcctgacatcctgccattgcattgtaccatccgccgtcagccgctccccgatagcgggcaggccgcaggtcgactggtacttgaacccattcctggagcccacatctcagtgaactttagtgaggtcggtcaccggaccgtcgttctccatcacggtgacctgttgagcctgggactgtactatttgctactttttaaggatccggcacaggctcagcccctcccagcacgggcactagctcggctccgcgctgtgccccaaagctgtcgcttgtgcggagctgctctgggcgccagaggggccgcatcccccactcaggcggctctgccacgccggcaacagctcctgctcgagtttgagccccatctggaggacacactgctgcagcgtatcatgacactaatcgagcctggcggggacgatcacaagctgacacccgcgtttttgctttgtctgtgtatccagcacagcgccactcacttccagccaggtacttttggtcagctcctattgaagattgcgcggctgatccgggagaccgtgtgggagaagactaaagaattggctgaaaagcaagcacagttgcaggagccgataagcctggccagctgtgctatggcagacctggttcctgacttgcagcccattttgttctggatgagtaactctatagagctgctatatttcatccagcagaagtgtcccctgtatatgcagtctatggaagaacaacttgatatcactggcagcaaggaatctctgtttagttgcacactaacagcctcggaggaagccatggcggtactggaagaagtcgtgctgtatgcgtttcagcaatgtgtgtactatgtgtcaaagtctctttatatctgtctccccgcgctcctggaatgtccccccttccagacggaaaggagagagtcgtggtcatccgccccagagctgccagaagagctgagacgcgtcgtcagcgtctatcaggcagccttggatcttctgcgccagctccaagttcatcccgaagtggcttcacagatgctagcatatttgttcttctttagcggtacactgttacttaaccaactgctagaccggggaccttccctttcttgtttccattggccaaggggcgtccaggcgtgcgcccgacttcagcaattacttgagtggatgcggtcagctggcttcggcgcagccggtgagcacttctttcagaaactctcttgtacgctgaacttgctggcaacgccacgggcccagcttatccagatgtcctggaccgcacttcgcgcagccttccctgccctaagtcccgctcagcttcataggcttttgacccactaccagctcgcttctgcgatgggccccatgagcacctgggaacccggtgcacaggacagccctgaggcttttcgcagcgaggacgtgctggagagctacgaaaaccctccccccattgtactgccgagtgacgggtttcaggtggacctagaggcaaattgcttggacgattccatttatcaacacctcctatatgtccggcacttcctgtgggggctgcgtagcagggctagcccaggatctccaggccgaccaggcagtggcgcaagccagcctgtatgtcccgagggcatgcaccatgtggtactcgacggccacttggaggctccctcgtgcccactggccccaagagatccgggcccggcggcccgcgaagtagcccccgagcgtacattgcctcttagaggcgccccttgggcccaggctccccctggacggcagcctagtcgcggagggagccaggccggtcctccgcacaccgattcctcctgtctactgactccgccatccacaccgctggggccggagccaggggaccccgactggcctgagagcgggggaccctgtggcaaggcccttcccgaacgccaaagaaacggtctgtccggtttgcgcggagccgcccctgaaggagacagcgcagctctcgctgaagaatccccacccgcccccagttccaggagtagcagcacagaggatttttgttatgtgtttaccgtggaactggaacgaggaccatccggactgggtatggggctgatcgacgggatgcacacccacctcggggcccccggtctctacatccagacgctccttccagggtctcccgcagccgccgatggacgcctctcattgggggataggattctcgaagtcaacggatcaagcctcctcggtttagggtacctcagagcggtggatctgatcaggcacggggggaaaaaaatgagattcctggtagccaagagtgatgttgaaactgccaaaaagattcatttccgcactcccccattatag

SEQ ID NO: 202583 - DNA, 3228 bp, synthetic construct
  misc_feature 1..3228: note = Description of Artificial Sequence: Synthetic coding sequence
  source 1..3228: mol_type = other DNA
atgttctacggcacccacttcatcatgagcccccccaccaagagcaaacttaagaggcagtctcagttgctttcgagcatgctaagtaggacgctttcctacaaatacagggatctggactcaactttctcgagtcttggggctagcgatgatcccgccgagcttagtacacaactcagtgcacctggcgtcctcaaggtgttcggtgattccgtctgcaccggtactcattataagtcagtactcgcaactggaacctctagtgcaagagagcttgtaaaggaagctctagagcgctacgcattagaccctcggcaggcagggcagtatgtcttgtgtgatgtcgtgggacaggccggggacgctggacaacgctggcaggccaggtgcttccgggtgtttggggacagcgaaaagccgcttcttatacaggaactgtggaaaccaagggagggacttagcagaaggttcgaactgagaaaacgtagcgacgtggaagagctcgcggcaaaggaggttgataccatcaccgcgggaattaacgctcaggctagacgacttcagagaagccgtgcaaaaggaacacctaccccagcattgggggacgcacggagtagccctccgcccagactgcggcggactgtgtcagagacttcgctgagccccgtcaatgcactgcccgcagctgcccagggcccggaagagcctggaccagacgcaatgcgctattcgctgtaccaaagtccccacctgctgctgctccagggctactctcagcaacatgacagcttggtgtacgtcctgaatagggaccggcatacagtgggtcaaaggaccccgtcatccaagccttctatctccctgagcgctcctgatattctgccgcttcactgtactatccgacgtcagccccttcccgattcaggtcaagctgcaggtaggctagtcctcgagccgatcccgggcgcgcacatctccgtgaacttttcagaggtaggacacagaaccgtcgtgctacatcatggcgacttgctgagtctggggctctattacctgctcttattcaaggatccagctcaggcccaaccactgcctgcccgcgctctggcaaggctgagagcggtgccccagtcttgccgcctctgtggcgctgccctcggcgcccgcggggctgcaagtcccacccaggctgcactgccacgaagacaacaactgctgctcgagtttgaacctcatctggaggatacattgttacaacggatcatgacgctgatcgaacctggaggagacgaccacaagctgacccccgcttttcttctgtgtctttgtattcagcacagcgccactcattttcaacctggcacatttgggcaactcctcctcaagattgcaaggcttattagggagactgtctgggagaagacaaaggagctagccgagaagcaggctcagctccaggagcctatctctttggcatcctgcgcgatggctgatcttgtgcccgatctgcagccaatcctcttttggatgtctaacagtatcgaactcctttacttcattcagcagaaatgcccactctatatgcagagcatggaggaacagttggatatcacgggcagcaaagagtcactcttttcttgtacgctgacagcctcagaggaagctatggccgtgctggaagaggtggttctttatgcgttccagcaatgtgtctattatgtgagcaaaagtttgtacatatgtctccctgcattgctcgagtgccccccatttcagacagaacggcgtgagagttggagctccgcccctgagctgccagaagaactcaggagagtggtctctgtgtaccaggccgcactggatctcctgaggcagctccaggtccacccggaggttgctagccagatgctggcctatctgtttttttttagtggaacactgctgcttaatcaactgctcgaccgggggccatcactgtcatgctttcattggccccgcggcgtccaggcctgcgctcgcctacagcagctgctggagtggatgcggtccgcagggttcggagccgctggagagcattttttccagaagttaagctgcactttaaaccttctggcaacccctagagcccagctgattcagatgtcttggaccgctttgagagccgccttccccgccctgagcccagcacaactacataggttgcttacacattaccagcttgcctccgccatgggtcctatgagcacatgggagccaggcgcccaggatagcccagaggcctttaggagcgaagacgtcttggagagctatgaaaacccaccccccattgtccttccttcagacggtttccaggtggaccttgaagcaaattgcttagacgacagtatataccagcacctcttgtacgttagacatttcctgtggggactgcgttctcgggccagcccaggctcccccggccgtccagggtccggtgccagccagcccgtgtgccccgagggcatgcatcatgtggtgctggatggccatttggaagctcctagctgtcctttagcaccgcgagatccaggccccgccgctcgtgaagtggcaccagaaaggactttgccactgcggggagctccctgggcacaggcaccgcccggtcgccaaccaagcagaggaggttcccaagccggcccaccacacacagatagtagctgcctcttaacaccaccaagcactcctctcggccccgagccaggagaccctgattggcccgagtctgggggaccttgtggaaaagcacttcccgaacgtcagagaaatggtctgagtggtctcagaggagccgctcctgagggggatagcgccgctctcgccgaggagtccccacccgcaccttcttctaggtccagttcaacggaggatttctgttatgtgttcacagtagagcttgaacggggcccttccgggctgggcatgggcctgattgacggaatgcacactcatttaggcgcgccaggactctatatacaaaccttgctgcctggctccccggctgctgctgacggccgactttcgctgggtgacagaattcttgaggtgaatggctcctctctgctggggctcgggtatctgcgagcagtcgatttgatacgtcatgggggcaagaaaatgcgtttccttgtggcaaaatccgacgttgagaccgccaaaaagatccatttcagaactccaccactttag

SEQ ID NO: 202584 - DNA, 405 bp, synthetic construct
  misc_feature 1..405: note = Description of Artificial Sequence: Synthetic coding sequence
  source 1..405: mol_type = other DNA
atgttctacggcacccacttcatcatgagcccccccaccaagagcaagctgaaacgacaaagccagcttctgtcatctatgctgagtcgcaccctgtcatataagtaccgggatcttgacagtaccttttcatccctgggagcttccgatgatccagccgagctgtcaacccagctgagcgcccccggggtgttgaaagtcttcggagattccgtttgtacgggtacccactacaagtccgttctggccactggcacctcttccgccagggagctggtcaaggaggcgttggagcgatatgcactagatcccagacaagcaggacagtatgttttgtgtgacgtggtcggccaggcgggggatgcagggcaacgatggcaagctcgatgtttccgggtcttttag

SEQ ID NO: 202585 - DNA, 1629 bp, synthetic construct
  misc_feature 1..1629: note = Description of Artificial Sequence: Synthetic coding sequence
  source 1..1629: mol_type = other DNA
atgttctacggcacccacttcatcatgagcccccccaccaagagcaaactgaaacggcagagtcagctattgtctagcatgctgagccgtacacttagctacaaatacagggacctggattccacctttagtagtctcggggcgtccgacgacccagcggaattgtccactcagctgagcgcacccggggtcctgaaggttttcggcgattccgtatgtaccggcacccattacaagtccgtcctggccaccggaacctcgagtgcgagagagttggtgaaagaagcccttgaacggtacgccttggatcctaggcaggccggacagtatgtgctgtgtgacgtcgtggggcaagctggtgacgcgggccagaggtggcaggcacgttgcttcagggtttttggtgactctgagaaacctctgcttattcaggaattgtggaagccaagggagggactgtccagacgctttgagctgcgcaagaggagtgatgtggaagagctcgcagccaaggaagttgacactatcaccgcaggaatcaatgcccaggctagaagactccagcggtcgagggccaaggggacaccaaccccggccctaggcgacgctcgaagcagccctccccctagattaaggcggaccgtgtctgaaacgagcctgtccccagtgaacgctcttccggcggcagctcagggtccagaggagcctggcccagacgccatgcgatactcgctatatcagagccctcatttactgctgctgcaaggctatagtcagcagcacgacagtctggtgtacgtactgaaccgtgacaggcacacagttggtcagaggaccccaagttcaaaaccatctatttcgctgtcagctcctgatattcttcccctgcactgtacaatcaggcggcagcccttgcctgatagtggacaggccgccggcaggctggtgttagaaccgattcctggcgcccacatctccgttaacttttctgaggtggggcacaggacagtagtgctgcaccacggcgatctgctctctctcggactatactacctgctccttttcaaagatcctgcccaggctcagcccctgccggccagagctctagccaggctacgggcggtaccgcagagttgtaggctgtgtggagcagcactgggcgcgaggggcgcggccagccctacacaagcggcattaccacggcggcagcaactacttctcgagttcgagccacacctggaggatactctcctgcaaagaatcatgaccctgattgagcctgggggggatgaccataaacttacgcctgccttccttctctgcttgtgcatacagcacagcgctactcacttccagcctggcacctttggccaactcctgcttaaaatcgctcgcttaattagagaaacagtgtgggaaaagactaaggaactggcagagaaacaggcccagctgctggagggcatcgccgtgcttctacacgccgacgggcagaggggcgggcatggaggagctggcggcggtggcgcggttagactgccagccgtacggctgctctgtctgcaggtccctgtgcatttgccccctgggaccccgggggtgcccgcaattcccgacggagctccctag

SEQ ID NO: 202586 - DNA, 2508 bp, synthetic construct
  misc_feature 1..2508: note = Description of Artificial Sequence: Synthetic coding sequence
  source 1..2508: mol_type = other DNA
atgcggtacagcctgtaccagagcccccacctgctgctgctgcagggttactcacagcagcacgattccctggtgtacgttctgaaccgcgacaggcatacggtggggcagcgcacacccagctctaagccatctatcagtctttcggcccctgacatcctgcctctgcattgtaccataaggcggcagcctctgccagattcaggtcaagcggccgggagactcgtgttggaacccatccctggagcccatatttctgtgaatttcagcgaagtaggtcatcggaccgtagtccttcatcacggggacctcctgagtctcggcctttattaccttttgctttttaaagacccagcacaggctcagcctctgcctgctagagcactagctaggctgcgggcagtcccacaatcttgtcgcctctgcggggccgcattgggcgcacgtggcgccgcttctcctacacaggctgccttacccaggagacagcagctccttctcgagttcgagcctcatctcgaggacactctgctgcagcgtatcatgacactcatcgagcctggaggcgacgatcataagcttactcccgccttcttattgtgcctctgtattcagcactccgcgacgcactttcagcctgggactttcgggcaactcctactcaagatcgcgcgcttgatcagggagacagtgtgggaaaagaccaaggagctggccgagaagcaggcccagctccaagaaccaatcagcctcgctagctgtgcaatggcagacttggtccctgatttgcagcccattctgttctggatgagcaactcaatcgaacttctctactttatccagcagaagtgtcccttatatatgcagtctatggaagaacaactggacattaccgggtccaaggaatccttgtttagctgcacgctgacagcgagtgaggaggctatggccgtattggaagaggtggttctgtacgcgttccagcagtgtgtctattatgtgtctaaatctttgtacatttgcctcccggcgcttctggaatgccccccatttcagactgagaggagagagagttggagctcagcccctgaactgccagaagagctgagacgggtcgttagcgtgtatcaggcagccctggatctacttagacaactgcaggtgcatcccgaggttgcgagccagatgctcgcctaccttttttttttctctggaacactgttgttgaaccagctgttagaccgtgggcccagcctgtcgtgctttcattggcccagaggcgtccaagcatgcgccagattgcaacagctcctggagtggatgagaagtgctgggttcggggccgcgggtgagcatttctttcagaagctgagctgcaccctcaatctgttagccaccccacgcgcacagcttatccagatgtcctggacagccttaagggcagcctttccggctctgagccccgcacaacttcatcgactgcttactcattaccaactcgctagcgcaatgggacctatgtccacttgggaaccaggcgcccaagattctcccgaagcttttcggagtgaagatgtcttagagagctacgagaatcctccaccaatcgtgctgcctagtgatggctttcaggttgatctcgaggccaactgtttggatgatagtatataccagcacctcctgtacgtgagacactttttatgggggctgcggagcagggcctcacctggctctccaggtcgtcccgggagtggagcttctcagccggtctgtccagagggtatgcaccacgtcgtgctggacggacacctcgaagctccgagctgccccctggctcctcgggaccctgggcccgcggcccgagaggtagcgccagaacgcaccctgcccctaagaggagcgccctgggcccaagcaccacccggccgccagccatctagaggcgggagtcaagccggtccccctcacactgactccagttgcctcttaacccccccctccacccccttgggtcccgagcccggcgatcccgactggcccgagtcaggcggcccatgcgggaaggcgctcccagagaggcagcgcaatgggctgagtggtctgcgcggtgcagcccccgagggtgacagtgctgccctggcagaggaaagtcctccggcaccttcttcccgctcatcctctacggaagacttctgttatgtcttcacagtggagttggagcgggggcctagcggactgggcatggggttgattgacgggatgcatacacacctcggcgccccaggtctctacatccagacactgttacccggcagcccagccgcggccgatggtcgcctgtctttgggggaccggattctggaggtgaacgggtccagcctgctcgggcttggctatctgcgggccgtggacctgatacgtcacggtgggaagaagatgcgatttctcgtggctaagtctgatgttgagaccgctaaaaagattcatttccgtaccccaccactatag

SEQ ID NO: 202587 - DNA, 2085 bp, synthetic construct
  misc_feature 1..2085: note = Description of Artificial Sequence: Synthetic coding sequence
  source 1..2085: mol_type = other DNA
atgtgcagcaccggcaccggcacccggtgggccagcggccccccccccgcttccccagcctctgcctcccaacctccaacgtcttgcctgtacacagctccctccgccggtaaccggtcaaggactgccgctcgccctagaggcggatggctggagcccatccctggggctcatatctctgttaacttttcagaagtcggccatcggaccgtggtgctccatcacggtgacctccttagcctgggattgtattatctcctgctgttcaaagatccagctcaggcacaaccgctgcccgctagagcactggctagactccgggcagtacctcaaagttgtcgactgtgcggcgccgccttgggagccaggggggctgcctcccccacacaggcggcactgccacgcaggcagcagctcctacttgaattcgagcctcacttagaggatactttgcttcaacggattatgacgctgatcgaaccggggggagacgaccataagctcactcctgccttcctgctgtgcctgtgtatccaacatagtgctacacacttccaacctgggaccttcggccaactactcttgaagatcgcccggttgattagggaaactgtctgggagaaaactaaggaactggcagaaaaacaggcacagctccaagagccaatttccctggcatcctgtgccatggccgacctagtgcctgatctccagcccatcttattttggatgagcaattcaattgagctcctgtattttattcaacagaagtgtcctctgtatatgcagtccatggaggagcaacttgacattacaggatcaaaggagagtctattttcctgcacgctcacagcctccgaggaagccatggccgttctcgaggaagtcgtgctgtatgcttttcaacagtgtgtctattacgtgtcaaagagcctgtatatctgtttgcccgccctcctcgagtgtcccccattccagacagaaaggcgggagagctggtccagcgcacccgagctgccagaagagcttaggagggttgtctccgtatatcaggcggcactggacctacttcgacaactccaggtgcacccagaagttgcgagtcagatgcttgcatacttattctttttttctggaactctgctgctgaaccaactcctggataggggccctagtctctcctgtttccattggcctcggggagtgcaagcatgtgcacgccttcagcaactcctggagtggatgcggtctgcgggttttggagctgctggggagcacttctttcagaagctgagttgcactctgaaccttttggcaacaccaagagcccaactgatccaaatgtcttggacagctctgagggccgctttccctgcgctgagccccgctcaactgcaccggctgctcacccactatcaactggcctccgccatgggaccaatgtccacttgggaaccgggtgcacaggattcacccgaagcgtttcggtccgaagacgtgctggaatcctacgagaatccaccacccattgtgctcccttcagacgggtttcaggtggacctcgaagccaattgtctcgacgactccatctaccagcatctgctgtacgtgcgccattttctgtggggattaagatcccgtgcgtcgcccgggagtcccggtagacccgggtcaggtgcttcccaacctgtatgtcccgaagggatgcaccacgtcgttttggacgggcacttggaagccccgtcttgcccattagctcccagagatcccggtccagcagctagagaggttgccccagaacgcactcttcctctgcgtggggcgccatgggcccaggcacctccaggaaggcagcctcccggcctatatattcagacactcctgccgggatcccccgctgcggccgacggacgtttgagcctaggtgatcgaattctcgaggtcaacggatcttctctgctgggcctagggtacctcagagctgtggacctgattagacacggtgggaaaaaaatgcggttccttgtggccaagagcgatgtggagacagccaaaaagatccactttcgcactcctccactgtag

SEQ ID NO: 202588 - DNA, 369 bp, synthetic construct
  misc_feature 1..369: note = Description of Artificial Sequence: Synthetic coding sequence
  source 1..369: mol_type = other DNA
atgaagctggccgccatgatcaagaagatgtgccccagcgacagcgaattgtcaataccagcaaaaaactgttataggatggttattctcgggtcttccaaagtcggaaaaaccgccatcgtgagccggtttttaaccggacggttcgaggatgcttacacaccgacaattgaggactttcacagaaagttttatagcatcaggggagaggtttatcaactcgatattctggacactagtggaaatcacccattccctgctatgcgacggttaagcatattaactgaccctcgccaccaggtgcttccccaagagcaaaaccagggtgaaagaggaagggccccggggcaccttcgacagcaggggtag

SEQ ID NO: 202589 - DNA, 2394 bp, synthetic construct
  misc_feature 1..2394: note = Description of Artificial Sequence: Synthetic coding sequence
  source 1..2394: mol_type = other DNA
atgggcaccctgggcaaggcccgggaggccccccggaagcccagccatgggtgtagggctgcgtcaaaagcccggctcgaggccaagccagccaactcgccatttccgtcgcacccatcactggcccatataacgcagttcagaatgatggtgtcattgggacacctcgccaaaggagccagtctagacgatcttattgattcttgcatacagagcttcgatgcggatggaaatttgtgccggagcaatcagcttctgcaagtgatgctaacaatgcaccgtattgtgatctcaagcgcagaactgttgcagaaagtcatcaccctctacaaggatgccctggcaaagaattccccagggctctgcttgaaaatatgttactttgttcgctactggatcactgagttctgggtgatgttcaaaatggatgcatcactgacagacaccatggaagagttccaggaactggtcaaagcaaagggcgaagaactgcactgtaggctgattgatacgacccagataaacgcccgagactggagtagaaagctgacccaaagaattaagagcaatacaagtaaaaaaagaaaagtgagtttattatttgatcatctcgaaccagaagagttaagcgagcacctcacgtaccttgagtttaagagcttccggagaataagcttcagtgactaccagaactacctggtgaactcctgtgtcaaagagaatcccaccatggaacgcagcatagccttgtgcaatggtatctctcagtgggtccaacttatggtattatctcgcccaaccccacagctccgggctgaagtgttcattaagtttatccaggtggcccagaaactgcaccaactgcagaacttcaacacactgatggccgttattggtggcctgtgccatagctccatcagccgactcaaggaaacaagctcccacgtgccacacgagattaataaagtgctgggtgagatgaccgaactcctcagtagttccagaaactacgacaactataggagagcttacggcgagtgtacggatttcaaaatcccaattttgggggttcacctcaaagatttgatctccctgtatgaggcaatgccagattatcttgaagacggaaaggtgaacgtgcataagctactcgcgctatacaaccacataagtgaactggtccagctgcaagaagtggccccacctctggaggccaacaaggatctggtgcacctgctgacactgtcgctggacctctactataccgaagatgagatctatgaactgtcatatgcccgggagccccggaaccaccgggcgccccccctcacaccatctaaacctccagtggtggtagattgggcatctggcgtgtcccccaaacccgacccaaaaactatctcaaagcatgtgcagagaatggttgacagtgtgtttaaaaactatgaccacgaccaggacgggtacatctcgcaggaagagtttgagaagatcgcagcatcttttccattctctttttgcgtgatggacaaagatagggaaggtcttatttcccgcgacgagattacagcctacttcatgagggctagcagtatttacagcaagctgggcctcggcttccctcacaatttccaggaaactacttatctgaaacctaccttctgtgacaattgtgcaggcttcctttggggagtgatcaagcaaggctatcgttgcaaagactgtgggatgaactgtcacaagcagtgcaaggatttggtagtgttcgaatgcaagaagagagctaagaatcccgtggcccctactgagaataacaccagcgtggggcccgtttccaacctttgttctttaggggcaaaggacttactgcacgcgcctgaggagggtccattcaccttcccaaacggtgaagccgtggaacacggcgaggaatctaaggaccgcacaataatgctgatgggtgtctctagccagaaaatatcgttacgactaaagcgcgccgtggcccataaagcaacacagacagagtcccagccttggatcggatccgagggccccagcggccctttcgtcctatcttctccccggaagacagcacaggacacactgtacgtccttccttcacctacatccccctgtccgagcccagtgctggtaagaaaacgagcttttgtcaagtgggagaataaggattctcttatcaagtctaaggaagagctccgacatttgagactgcccacttatcaggaactcgaacaggagattaacacacttaaggcggacaatgacgctctgaaaattcagttaaaatacgcccagaagaagatcgagagtctccaacttgagaagtccaaccacgtcctggcacagatggagcaaggagactgctcatag

SEQ ID NO: 202590 - DNA, 1794 bp, synthetic construct
  misc_feature 1..1794: note = Description of Artificial Sequence: Synthetic coding sequence
  source 1..1794: mol_type = other DNA
atgggcaccctgggcaaggcccgggaggccccccggaagcccagccacggctgccgtgctgcaagcaaggcaagattagaagctaagcccgcaaactcccctttcccctcacaccccagtctcgcgcatattactcagtttcggatgatggtcagccttggccatcttgcaaagggtgcaagcttggacgacctgattgatagttgcatccagtcctttgacgcagatgggaatctttgccggtcgaatcagctgctgcaggtcatgctgacaatgcatagaatcgtgatcagtagcgccgagctgctccaaaaggtgataactctgtatcctgacgccctggcaaagaattctccggggctctgtctcaaaatctgttatttcgtgaggtactggataaccgaattttgggtgatgtttaagatggatgcgagcttgaccgacacaatggaagaattccaagaactagtgaaagcaaaaggcgaggagctccactgtagactcattgacaccactcaaattaacgcgcgtgactggtctcggaagctgacccaaagaatcaagtccaatacatcaaaaaaacggaaggtgagtctcctgtttgatcatctggagcccgaagaacttagtgagcacctaacatacctggagtttaaaagctttcgccgcatttcattttcagattatcaaaactacttagtgaattcctgtgtcaaggaaaaccctaccatggagaggtcaatcgcactgtgtaatgggatcagtcagtgggtgcagctcatggtactgtcccgcccaactcctcagttgcgtgccgaggtctttattaagttcattcaggtggcacaaaaacttcatcaactgcaaaattttaacacgctgatggccgttatcgggggcctctgccatagcagcatctccagactgaaagaaacctcctcacacgtgccacatgaaatcaacaaggttcttggagagatgaccgagcttctctcatcgtcgcggaactacgacaactataggagagcctacggcgagtgcaccgatttcaagattcctatactgggtgtgcatctgaaagatctcattagtttgtatgaggcaatgcccgactatctggaagatggaaaggttaacgtacataagcttcttgccctgtacaaccatataagcgagctcgtacaactgcaggaggtggcacctcctctggaggccaacaaagaccttgtccacttgctgacgctgtcgctggacttgtattatacggaggatgaaatatacgagctctcctacgcacgggagccacggaaccaccgtgctcctagtgtatttaagaattacgatcacgatcaagacggctacatttcccaggaggaatttgagaagattgcagcaagcttccctttttccttttgtgtgatggataaagatagagagggactcatttctcgcgatgagattaccgcttattttatgcgggcctcaagcatatatagcaaattgggcctgggctttccgcacaacttccaggagactacctatctcaagcctactttttgcgacaattgtgccggatttctgtggggcgtcattaagcaagggtatagatgcaaggactgtggaatgaactgtcataaacagtgtaaagaccttgtggtgttcgagtgcaaaaagagagcgaagaaccctgtggcgccgacggagaacaatactagcgtgggtcctgtcagcaatctgtgctccctaggagcaaaagatttactgcacggtaacaaatacagcgaaagccgctag

SEQ ID NO: 202591 - DNA, 1641 bp, synthetic construct
  misc_feature 1..1641: note = Description of Artificial Sequence: Synthetic coding sequence
  source 1..1641: mol_type = other DNA
atgggcaccctgggcaaggcccgggaggccccccggaagcccagccacggttgcagggcagcttcaaaagccagactggaagcaaaacccgccaactccccctttcccagtcatccctccctcgctcatatcacacaattcagaatgatggtctccctgggccacctggctaaaggagcaagcctcgacgacctgatcgattcctgcatccagtcttttgacgccgatggcaatctctgcagatctaatcagctgctccaggtcatgcttaccatgcaccggatcgtgatttcgagcgccgaattgcttcagaaagttattacgctgtacccagacgctctagcaaaaaacagtcccggactctgcctgaaaatctgttatttcgtgagatactggattactgaattttgggtgatgtttaagatggacgcgtctttaactgataccatggaagaattccaggaattggtcaaggctaagggggaggagctccactgccgactgatcgacaccacacagattaacgcgcgagactggtctcggaaactcacccagcgtattaagtccaacacgtctaaaaagcggaaggtttctctgctatttgatcatctggagcccgaagaactctcagagcacctcacttacctcgagtttaaaagttttcggcgcatctccttcagcgattaccagaactatcttgtgaattcctgtgtcaaagaaaaccccaccatggaaagatccatcgccttgtgtaatggtataagccagtgggtacaactgatggtgttatcacggcctaccccacaactacgagccgaggtgttcattaagtttatccaagtggcccagaaactgcaccagttacaaaactttaataccttaatggccgtcataggaggcctctgtcattcaagcatcagtcgtctgaaagagacctcatcgcatgtgccacacgagataaacaaagttctgggcgagatgaccgagcttctctcctccagtaggaactacgacaactacaggagggcctatggtgaatgtacagactttaagattccaattctgggcgtgcatctaaaggacctaatttcattgtatgaagccatgcccgactacctcgaagatgggaaagtcaatgtgcacaaactgctggccttgtacaaccacattagcgagttagtgcagctccaggaagtagccccacccctggaggccaataaagacctggtgcatctcctcaccctatccctggacctctactacactgaggatgaaatttatgagctgtcatacgcaagagagccacgtaatcatcgggccccttcagtttttaagaattacgatcatgaccaagacggttacattagccaggaagagtttgagaaaatcgccgcctcctttcctttctccttctgcgtaatggacaaagacagggaaggactgatctcccgcgatgagattaccgcctattttatgcgtgcctcaagcatctattcgaaactggggctgggtttcccccacaatttccaggaaacaacgtacctcaaacccaccttttgcgacaactgtgcggggtttctttggggagttataaaacagggatatagatgtaagggcaacaagtacagtgaaagtcggtag

SEQ ID NO: 202592 - DNA, 2289 bp, synthetic construct
  misc_feature 1..2289: note = Description of Artificial Sequence: Synthetic coding sequence
  source 1..2289: mol_type = other DNA
atgggcaccctgggcaaggcccgggaggccccccggaagcccagccacggctgcagagcagcctctaaggcacgcttggaggccaaacctgccaacagccccttcccatctcacccttctctggcacatatcacccaatttaggatgatggtttcacttggacatctcgctaagggggccagtctggacgacctcatcgactcttgcattcagagctttgatgcagacggcaacctttgccgaagcaaccagctgctccaggtcatgttgaccatgcacagaatcgtgatctccagtgccgagctcctacagaaggtcattacactgtataaggatgcactggccaaaaatagccctgggctgtgcctgaagatttgttattttgtgaggtactggattaccgaattttgggtcatgttcaagatggatgccagcctaaccgatacaatggaagagttccaagagctggtgaaggccaagggcgaggagctgcactgcagactcattgacacaacacagataaatgccagagactggtccaggaagttgacacagagaattaagtctaacacctcgaaaaagcgtaaagtcagtctgctcttcgatcaccttgagcccgaggaattaagcgaacaccttacatatctcgagtttaagtctttccgacgcattagttttagtgactaccagaactacctggttaacagctgtgtcaaagagaacccgacgatggaaagatctattgccctgtgcaatgggattagccagtgggtgcagctgatggtcctgtccagaccaaccccacagctgagagcagaggtcttcataaaattcattcaagtagctcagaagcttcatcagttgcagaatttcaatacactcatggctgtgatcggtggcctgtgccacagcagtatctccaggttgaaggagacttctagccacgttcctcatgaaattaataaagttctgggcgaaatgaccgagcttttgagctcctcgcgaaattatgataactacagacgggcctacggggagtgcacagactttaagattcccattctcggcgtacatctcaaagacttgatctccctgtacgaggcaatgcctgattatctggaagacgggaaagtaaacgttcacaagctactggccttatacaaccacattagcgaactggttcagctccaggaagtcgcacccccattagaagctaataaggatttggttcaccttctgacattgagcctggatctgtattatactgaggacgaaatatatgagctttcctacgcacgagagccacggaaccaccgtgccccttctgtgttcaagaactacgatcacgatcaggacgggtatatcagtcaggaagaattcgagaagattgcagctagttttcccttttccttctgcgtgatggataaggacagagagggactgatctcccgagacgagattacagcttattttatgcgcgcttcctctatctactcgaaattgggtctgggcttcccacataacttccaggagaccacctatctgaagccaacattttgcgataattgtgcaggatttctgtggggagtcatcaaacagggttatcgctgcaaagattgcggcatgaactgccataaacaatgcaaggacctggttgttttcgagtgcaagaagagggcaaaaaaccccgtagctcccactgagaacaacacttcagtgggaccagtctcaaatttatgctcactgggcgcaaaagaccttttacatgctcctgaagagggcccgtttaccttccccaacggtgaggctgtcgagcatggagaagaaagcaaagacaggaccattatgttaatgggtgtaagctcacagaagattagtctacggcttaaaagggcggtcgcacataaagccacccaaaccgaatcccagccatggattggaagcgagggtccctccggcccattcgtgctctcttcacctagaaagaccgcacaagacaccctttacgtgcttccgtcaccaacgtctccatgtccttccccagtgcttgtccggaaaagagcttttgttaagtgggagaataaagactctcttataaagtcaaaggaggaactgaggcacctgcgcttgccaacctaccaggagttggagcaggagatcaacacactcaaggctgataatgacgcattaaagattcagttgaaatatgcgcagaagaagattgagtccctacagctggaaaaatcgaatcacgtcctcgcccagatggaacagggcgactgttcctag

SEQ ID NO: 202593 - DNA, 2250 bp, synthetic construct
  misc_feature 1..2250: note = Description of Artificial Sequence: Synthetic coding sequence
  source 1..2250: mol_type = other DNA
atgatggtgagcctgggccacctggccaagggcgccagcctggacgacttgatcgattcctgtatccaatccttcgacgccgatggaaacctctgtcgatcgaatcagttgctccaggttatgctcactatgcacagaatcgtgatctcgtccgccgagctcctgcaaaaagttatcactctgtacaaggatgcactggccaagaattctccaggactgtgtctcaagatctgctattttgtgcgatattggataactgagttttgggtcatgttcaagatggatgctagcctgacagacacaatggaggagttccaggaattagtgaaggctaagggggaagaactacattgcaggcttattgacactactcagattaatgcccgggattggtctcgcaaactcactcagaggatcaagtcaaatacgtctaaaaaaagaaaagtttccctgctgtttgatcatcttgagcccgaggaactttctgaacaccttacatacctggagttcaaatccttccgaagaatctccttctcagattaccagaactatctcgtgaattcttgtgtgaaggagaacccaaccatggagagatccattgccctgtgtaacggtattagccagtgggtccaactcatggtgctgtcacgccctaccccacaattgcgggcagaggtctttataaaattcatccaggtcgcccagaagttgcaccaactccaaaatttcaacaccctgatggccgtgattggcggtctctgtcatagtagcatatcaagactaaaagagaccagttcacacgtcccacacgagatcaacaaggtcctgggcgaaatgacagagctcctcagcagttctcgtaactatgacaactaccgtagagcgtacggcgagtgcaccgactttaaaatccctatactgggcgtccatctgaaagatctgatttcgctctatgaggccatgcctgattacctggaggatggtaaagtgaatgtgcataagttactcgctctttacaatcacatcagcgaacttgtacagctccaggaggtcgcgccacccctggaggctaacaaggaccttgtgcatctgctcacgctatcattggacttatactataccgaggacgagatttatgagctgtcatacgcaagagagccaagaaaccacagggccccccccttaacccccagcaagcccccagtcgtggttgactgggcctctggtgttagcccaaaacccgaccccaaaacaatttccaagcatgtccagcgaatggtcgactccgtgttcaagaactacgatcacgaccaggacggctacatttcacaggaggagtttgagaagatagctgcgagcttccccttctcattttgtgtaatggacaaggatcgggagggactgatatcccgtgatgagatcaccgcctactttatgagggccagctctatttattctaaactgggactcggcttcccgcataacttccaggagaccacctacttgaagccgacgttctgcgataattgcgccggattcctgtggggcgttataaagcagggctacaggtgcaaggattgtggcatgaattgccataagcagtgcaaagaccttgtggtgtttgagtgcaagaagagagctaagaacccagtagctccaaccgagaacaacacctccgtggggcccgtctcgaacttatgcagcctcggcgctaaggatctgctgcacgcacccgaagaaggaccgtttacattccccaacggtgaagctgtggagcacggcgaggagagtaaggacagaaccatcatgctcatgggggtatcaagccagaagatctctctccgcttaaagcgcgccgtcgcacataaagcaacacagacggagtctcagccttggatcggcagcgaagggcctagtggtcctttcgtcctttctagcccgcggaagaccgcccaggacacactgtacgttctcccctctccgacctcaccctgtccttcacccgtcctggtccgtaaaagagccttcgtcaaatgggaaaataaggattccctcataaagagtaaagaagaattgcgccacctccgacttccaacgtaccaggagctggagcaagaaataaatactcttaaggctgacaatgatgccctgaaaatccaactcaagtatgcccagaagaagatcgagtccctgcagcttgaaaaaagcaaccacgtgctcgcccagatggaacagggtgactgctcatag

SEQ ID NO: 202594 - DNA, 1446 bp, synthetic construct
  misc_feature 1..1446: note = Description of Artificial Sequence: Synthetic coding sequence
  source 1..1446: mol_type = other DNA
atgggcaccctgggcaaggcccgggaggccccccggaagcccagccatgggtgtcgagcggcttccaaagctaggttggaagccaagcccgcgaactcaccttttccgagtcatccctccctggcccacattacccagttccgaatgatggtaagtctggggcacctagccaagggcgcatcactggatgacctgatagacagctgtatccaaagtttcgacgcagatggcaatctgtgccgtagtaatcagctgctgcaggtcatgctcacaatgcaccggatcgtgatctcttccgccgagctgctccagaaggtcatcaccctgtacccagatgctctcgccaaaaattcccccggcctctgcctgaaaatctgctatttcgtccggtattggattacagagttttgggttatgttcaaaatggacgcatctctgacggacaccatggaggaattccaggagctggtgaaggcaaagggtgaagaactgcactgtcggctgattgataccacccagattaacgccagagattggtcgcgaaaactgacgcaacgcataaaatctaatactagcaagaagcgcaaggtgagtcttttatttgaccacctcgaaccagaggagctgtcggaacatttaacctacctcgaattcaaatcctttaggagaatttcattctctgattatcagaactacttggtcaactcatgcgtgaaggagaatcccaccatggaaagaagtatcgccctgtgcaatggaatctcccagtgggtccagctcatggttctgtctaggcctaccccacagctgagagcggaagtctttatcaagttcattcaggttgcccagaagctgcatcaactgcagaattttaatacgctgatggcagtgatcggagggttgtgccattcatccatttccagattgaaggagaccagttcgcacgtgccgcatgagatcaacaaggtcctgggagaaatgactgagctactgtcctcctcaaggaactacgacaattataggagggcctatggcgaatgcaccgattttaagatccccatcctcggagtccatctgaaagatctgatctcgctgtacgaagcgatgcccgattatctggaagatggtaaagtaaatgtgcataaactgctggccttgtataaccacatttctgaactagtgcagcttcaagaggtcgctccccccctggaggcaaataaagatttggtccatcttcttacgctctcactcgatctgtactatacggaggacgagatttatgagctatcttacgctagggagcccaggaaccaccgcgccccctccgtgttcaaaaattacgaccatgatcaggacggctatatatcacaggaggagtttgaaaagatcgcagcctccttccccttttctttttgtgtgatggacaaggatagatccggcgcctag

SEQ ID NO: 202595 - DNA, 1641 bp, synthetic construct
  misc_feature 1..1641: note = Description of Artificial Sequence: Synthetic coding sequence
  source 1..1641: mol_type = other DNA
atgggcaccctgggcaaggcccgggaggccccccggaagcccagccatggctgcagagccgccagcaaggctagactggaggccaaaccagccaactctccttttccgagtcaccctagtttggcccatatcacccagttccggatgatggtgtctctcggacacctggctaagggagcatctttagacgacttgattgactcttgcattcaaagtttcgatgctgatggcaatttgtgccggtcaaaccagctgctgcaggtcatgcttaccatgcaccgcattgttatttcctctgccgaactcctacagaaagtgatcacattgtataaggatgcgctagccaaaaattctccaggtctgtgccttaagatctgctactttgtcagatactggataactgagttttgggtcatgttcaagatggatgcctccctgaccgacactatggaggaattccaagagctggtcaaagccaagggtgaggaactgcactgtcgactcatcgacacaacccagatcaatgcacgggattggtcccggaagttaactcagagaatcaagagcaatacctcaaagaaacgcaaggttagtctgctgtttgatcatctcgagccagaagaactgtctgagcatctgacctacctggaatttaaatcctttaggagaatttcattctccgactatcagaattatcttgtgaactcttgtgtgaaggagaatcccactatggagcgcagtatcgcactttgcaacggtatttcccagtgggtgcagcttatggtactttcacggccgaccccccagttgcgcgcggaggtctttatcaagtttatccaggtagcccagaaactccatcagttgcagaacttcaataccctaatggcggtgattggcggcctgtgtcattccagtataagtagactcaaagagacctcctcccatgtaccccacgagattaacaaggttctgggcgagatgacagagctgctctccagtagcagaaattacgataactatcggcgcgcttatggcgaatgtacagactttaagatccctatcctcggggtccatctcaaggatctgatctccctctacgaagctatgcctgattacctcgaagatggtaaggtgaacgtgcacaaacttctagcgctttataaccatatcagcgaactggttcagctccaggaagtggccccaccactggaggccaacaaagatctggtgcacctgctgacactgagcttagacttgtattacacggaagatgaaatctatgaactgtcatacgctcgagagcctcgtaatcacagagcgccctccgtttttaaaaactacgaccatgaccaggacggctatatctcccaggaggagttcgaaaagatcgccgccagtttcccattcagcttctgtgtgatggacaaagaccgtgaaggactgatttcccgggatgaaatcactgcctattttatgagagcctcaagcatttattctaagctgggcctcggcttcccccacaactttcaggagacaacatatctgaaacctactttttgtgataactgtgccggtttcttgtggggagtaataaaacaaggctacagatgtaagggcaataagtactccgaaagccgttag

SEQ ID NO: 202596 - DNA, 1794 bp, synthetic construct
  misc_feature 1..1794: note = Description of Artificial Sequence: Synthetic coding sequence
  source 1..1794: mol_type = other DNA
atgggcaccctgggcaaggcccgggaggccccccggaagcccagccatgggtgccgggccgcctcaaaggcaaggcttgaggctaagccagcgaactcccccttcccctctcacccttccctagcacacatcacccagtttaggatgatggtgagcctgggtcacttggcaaagggcgctagtctagatgatttaatcgactcttgcatccaaagcttcgacgccgatggcaacttatgcagatcgaaccaactactccaggtaatgctcacaatgcataggatcgtcattagttcagctgaactgctccagaaagtgattacattgtacaaagacgccctcgcgaaaaatagtcctggcttatgccttaagatatgttattttgtccgttactggatcaccgaattctgggtgatgtttaagatggacgctagccttactgatacaatggaagaattccaggaactggttaaagcgaaaggcgaggagctgcactgcaggttgatcgatactactcagatcaacgcgcgcgattggagtaggaaacttacccaacgaatcaaatcgaacacatctaagaaaagaaaagtaagcctgctgttcgaccatctcgagcccgaagaactgtccgagcacctcacgtacctggaatttaagtctttcagacggatatccttcagcgattatcagaactatctggtgaattcttgcgtaaaggagaacccgaccatggagaggagcattgcgctgtgtaacggcattagtcaatgggtgcagctgatggtgttaagtagacctacccctcaactcagggccgaagtgtttattaaatttattcaggttgcccagaagctgcaccagttgcagaattttaacacacttatggccgtgatcggcggcctgtgccattccagcatctcgagacttaaagaaacaagttcacacgttccacatgagatcaataaggtgctcggtgaaatgactgagttactttctagttcacgcaactacgataattaccggcgagcctatggggaatgcaccgactttaagatccccatcctgggggtccatctgaaagatctaatatcactgtacgaggccatgccagactatttagaagacggaaaagtcaatgttcataagctgctcgccctttacaaccacatcagcgagttagtgcagttgcaagaagtagctcctcctcttgaagctaacaaagacctggtgcacctgctcaccctctcgctggacctttactatactgaggacgagatatacgagctctcatacgcgcgtgagcctcgcaatcaccgggccccatccgttttcaagaactacgaccacgaccaggatggatacattagccaggaagagttcgagaagatcgcagcttccttccctttcagcttctgcgtgatggacaaagacagggaaggtctgattagccgcgacgagatcactgcctacttcatgcgagcatcgagtatttactcaaagctgggtcttgggttcccacacaatttccaggaaacgacatacctgaagcctacattctgcgacaattgcgccggctttttgtggggcgtgattaagcagggttacagatgcaaggactgtggaatgaattgtcacaagcaatgtaaagatcttgtcgtatttgaatgcaaaaagcgcgcaaagaaccctgttgcccctacggaaaacaacacctccgtcgggcctgtaagtaacctgtgctccctcggtgccaaggatctgctgcatgggaataagtactctgagagcagatag

SEQ ID NO: 202597 - DNA, 1830 bp, synthetic construct
  misc_feature 1..1830: note = Description of Artificial Sequence: Synthetic coding sequence
  source 1..1830: mol_type = other DNA
atggccggcaccctggacctggacaagggctgcaccgtggaggagctgcttcgggggtgtatcgaggcattcgacgactcaggcaaggttcgtgacccccaactggtgagaatgttcctgatgatgcacccctggtacattccctcatctcagttggcggccaaactgctccacatctaccagcagtctcgaaaagataactccaactccctgcaggtcaaaacatgccatctcgtgcgctactggatctctgccttccctgccgagttcgatctaaatcccgaactggctgaacaaatcaaagagttgaaggccctcttagatcaggaggggaaccgcaggcacagttccttgattgatatcgattcagtccccacgtacaagtggaaaagacaggttacccagcgcaatccagtcggtcaaaaaaagcgaaagatgagcctgctgtttgaccatttagagcctatggaactggctgagcatctgacctatctagaatatcgcagcttctgcaagatcctgtttcaggattaccatagcttcgtgacacatggctgcaccgtggataatcctgtgctcgagcgctttatcagtcttttcaactctgtgtcacagtgggtgcagctgatgattctgagcaaaccgacagccccccaacgagccctggttattacacactttgtgcacgtcgccgaaaaacttctacaactgcagaatttcaacacactaatggctgtcgtgggcgggctgagtcactccagtatctcacgtcttaaagagacacactcccatgtgagtcccgaaactatcaaactttgggagggcttaaccgaactggttaccgcaacagggaactacgggaactaccgccgcaggctggcggcttgcgttggcttccgttttcccatcctgggggtccatctaaaagatttggtcgctctgcagctcgccttgcccgattggctggatcctgctaggacccggcttaatggcgcgaagatgaaacagctgttctccattctggaagaacttgctatggtgactagcctgcgacccccagttcaggcaaaccctgatctgctgtctctcctgacggtgtccctggatcagtatcagacagaggacgagctataccagctgagcttgcagcgggagcctaggagcaaaagtagtccgacatcacccacttcctgtacccccccgccccgccctcccgttctcgaggaatggacatccgccgctaagccaaaactggaccaggctttggtggtagaacacatcgaaaagatggtggaatcggtcttcaggaactttgacgtcgacggagacggtcatatctcccaggaggagttccaaatcatccggggcaacttcccataccttagtgctttcggcgacctggaccaaaaccaggacgggtgcatcagccgcgaggagatggtctcttattttctccgcagttcatccgtgctggggggccggatgggcttcgtgcacaacttccaggaatccaatagcctgaggccagtggcatgccgccactgcaaggcactaatactgggcatctataaacagggcttgaagtgcagggcgtgtggtgtgaattgccacaagcagtgcaaggacagacttagtgtggagtgtcggcgacgcgctcagagtgtcagcctggaagggtcggctccctcaccttcacccatgcattcccaccaccaccgggccttttctttttccttgcctcgccccggccgcagaggaagcaggccaccagagatccgggaggaggaagtccagacagtggaggatggcgtcttcgacattcatctgtag

SEQ ID NO: 202598 - DNA, 1833 bp, synthetic construct
  misc_feature 1..1833: note = Description of Artificial Sequence: Synthetic coding sequence
  source 1..1833: mol_type = other DNA
atggccggcaccctggacctggacaagggctgcaccgtggaggagcttcttagaggctgcatagaggcttttgatgacagcgggaaagttcgcgatccacagctcgttcgcatgtttctcatgatgcatccttggtacattcccagctctcagctcgcggccaagctcttgcacatctaccagcaaagccgcaaggacaatagcaattccttacaggtgaaaacatgccacctggtacgttactggatatccgcattcccagcggagttcgaccttaaccccgagcttgccgagcaaattaaggaattgaaggctcttttggaccaagaagggaataggcgccactcctccttgatcgatatcgattcagtgcctacctacaagtggaagcggcaagtcacacagaggaaccctgtcgggcagaaaaaaagaaagatgagcctgctgttcgatcaccttgagcctatggaactggccgagcacctgacctatttggaatatcgatccttctgtaagatcctgttccaggactaccactccttcgtcactcacggctgcacagtcgataatccagttctagaacgttttatttccctcttcaactctgtgtcacagtgggtgcaactcatgatcttgagcaaacctaccgctcctcagagggcactggtaatcacgcactttgttcacgtggccgaaaagctcctacaactgcagaatttcaacaccctgatggccgtcgtgggcgggctgtcccattcatccatctctcggctgaaggagactcattcgcacgtttcacctgaaacaatcaaactctgggagggattgactgagctggtcaccgccaccgggaactatggcaactaccgaaggcggttggccgcgtgcgtgggatttaggtttcccatcctcggcgtgcacctgaaagacttagtggccctccaactagctctgccagactggctggatcctgctaggacaagactcaacggggccaaaatgaaacagcttttttcgatactggaggagctggccatggtcaccagtctgaggccccccgtacaggctaatccggacttattgagcctcctcactgtctctttggaccagtatcagaccgaggacgaattgtatcagctctcactgcagagagagcctaggagcaagagcagccctacatctcctacatcctgtacccctcccccgcgaccaccagtgctggaagaatggacctccgctgctaagcctaagctagaccaggccctcgttgttgagcatatcgagaaaatggtggagtcggtgtttagaaactttgatgtggatggggacggccacatctcacaggaagagttccagataatccgcggtaatttcccatatctaagtgccttcggagatcttgatcagaatcaggacgggtgcatttcccgtgaagaaatggtgagctactttctacgcagttccagtgtcctaggaggtcgaatgggcttcgttcacaacttccaagagagcaactcccttcgaccagtcgcatgccggcactgcaaggctcttattcttgggatttataaacaaggccttaagtgtagagcctgcggagtcaattgtcacaagcagtgcaaggaccggctgtctgtggaatgccgccgaagggcgcagtcggtgtcattagagggaagcgccccctctcctagtcctatgcatagtcatcatcatcgagccttctctttctctctaccaaggcctggcagacggggctctaggccacctgcagaaattagggaggaggaagtgcaaacggtggaggacggggtctttgatattcacctgtag

SEQ ID NO: 202599 - DNA, 1830 bp, synthetic construct
  misc_feature 1..1830: note = Description of Artificial Sequence: Synthetic coding sequence
  source 1..1830: mol_type = other DNA
atggccggcaccctggacctggacaagggctgcaccgtggaggagttgctgagaggatgtattgaagctttcgacgattccgggaaagtgcgggatccacagctggtaaggatgttcctaatgatgcacccttggtacattcctagctcccagctggccgccaagctgctgcacatctatcagcaaagccggaaagacaatagcaactccctgcaggtaaagacttgccacctggtgagatattggatcagtgcctttcctgccgagttcgatcttaatcctgagctggctgaacaaattaaggagcttaaggccctgcttgatcaggagggaaacagacgacactcgtcgctgattgacattgatagtgtccctacgtacaagtggaagaggcaagttactcagagaaaccccgtgggccagaagaagaggaaaatgagcctcctgttcgaccatttggagcctatggagttagccgaacaccttacctatctggagtataggagcttctgcaaaatcctattccaggactaccactcttttgtgacacacggttgtaccgttgataaccctgtcctcgagcgctttatctccctattcaactccgtgtcccagtgggtccagctgatgatcctcagtaagccgaccgctccacagcgggccctggtaatcacccatttcgtgcacgtggctgaaaaactactacagctgcaaaattttaatactctgatggcagtggtcggaggcttgagtcacagtagcatctctcgcctcaaagagactcactctcatgtctcccctgagactattaaattatgggaggggctgacagagctagtcacggccacaggtaactacggaaattatcgaaggagactcgccgcctgcgtgggttttcgcttccctatcttgggcgtgcatcttaaggacttagtcgcactacagctggccttgccagattggcttgatccagctagaactcggctaaatggagccaagatgaagcaactgtttagcatcttggaggaactggctatggtgaccagtctccgcccacctgtccaggccaatccagaccttctttctctgttgaccgtctccctggaccagtaccagacggaggatgagctataccagttatctctacagcgagagccacgctccaagtcatcccccacaagtcctactagctgcacgcctcctccaagaccaccagtgctggaagaatggacttcagccgctaagccaaagttagaccaggctctggtagtggagcacattgagaaaatggttgaaagcgtgtttaggaattttgatgtggatggcgacggacacatcagccaggaagagttccagataatcagaggaaatttcccctaccttagcgcatttggagacctggaccagaatcaggacgggtgtattagtcgagaagagatggtgagctacttcttacggagctcgagcgtgttaggcgggagaatgggctttgtgcacaatttccaagagagcaactcactccgccccgtcgcatgtagacactgcaaagcgctgattctgggaatctataagcagggcttaaaatgtagggcatgcggtgtaaactgccacaagcagtgcaaagatcggctgagtgtggaatgccgcaggcgggcacaatccgtctcactcgaggggtcggcccctagcccctcacctatgcactcccatcaccacagagccttctctttctctctcccaagacccggccgaagaggctcccggccgccagagatcagagaggaggaggtgcagactgtggaggacggcgtcttcgacattcacctatag

SEQ ID NO: 202600 - DNA, 1830 bp, synthetic construct
  misc_feature 1..1830: note = Description of Artificial Sequence: Synthetic coding sequence
  source 1..1830: mol_type = other DNA
atggccggcaccctggacctggacaagggctgcaccgtggaggagctgctgaggggctgtatcgaggcctttgatgattcgggtaaggtacgagacccacagctcgtgagaatgtttctgatgatgcacccctggtacataccttctagccagcttgcagccaaactgctccatatctaccagcagagtcggaaggacaattctaattcactgcaagtgaagacctgccacttagtgcggtactggatttccgctttccctgccgaatttgacctgaaccctgagctggcagagcagattaaagagctcaaagccctgttggatcaggagggtaatcgaaggcactcttctcttattgacatcgactcggttccaacctacaagtggaaacggcaagtgacacagcgcaatcccgtcgggcagaaaaaaaggaagatgtcccttctgtttgatcatctggagcccatggaactggcggagcacctgacatatctggaataccgctccttctgcaagatcttgtttcaagattatcactcatttgtgacccacggatgcactgtggacaacccggtcctcgagcggttcatctccctttttaattcggtgtctcaatgggtccagcttatgatcctctcaaagccaacagccccccagagagcattagtaattacacatttcgtgcatgtcgcagagaagttgctacagcttcagaactttaataccctgatggccgtggtcgggggactctctcattcttccatctcgcgcttgaaggaaacgcacagccatgttagtcctgagaccataaagttatgggagggcctgactgagctggtcacagcaacaggaaactacggaaattacaggcgccgacttgccgcctgtgtgggtttcagatttcccattctgggcgtgcacctgaaggacctggttgcccttcagctcgctctgcctgactggctggacccagcacgaacacgcctcaacggagcgaagatgaagcagctgttcagcatacttgaagagctggcaatggtcacctccctaagaccacccgtgcaagccaacccagaccttttaagcctgctaacagtttctctcgaccagtatcaaacggaagatgagctatatcagctttccctgcaaagagagcccagaagcaagtcgagtcccacatcaccgacgtcgtgtacaccacctcccagaccacccgttctggaggagtggacaagcgccgcaaagcccaagctggaccaggccctcgtcgtagagcacatagagaagatggtggagagcgtgtttcggaattttgacgttgatggagatggacacatctcccaggaggaattccaaataatcagggggaattttccttacctgtccgccttcggcgacctggaccagaatcaggatggctgtattagcagggaggagatggttagttacttcctccggagctcatccgttctgggtggcaggatgggattcgtgcacaacttccaggaatccaactcattacgtcctgtggcatgccgccactgcaaggctctcattctggggatttataagcaggggcttaagtgtcgcgcctgcggggtcaattgtcacaaacagtgcaaagaccgactgagtgttgagtgtcggaggagagctcagagcgtctccttagagggttctgctcctagccccagtcctatgcactctcatcaccatcgcgccttctccttctcattaccccggcccgggcgccggggctctaggcccccggaaataagagaggaagaagtgcaaactgttgaggacggcgtttttgacattcatctgtag

SEQ ID NO: 202601 - DNA, 432 bp, synthetic construct
  misc_feature 1..432: note = Description of Artificial Sequence: Synthetic coding sequence
  source 1..432: mol_type = other DNA
atggccggcaccctggacctggacaagggctgcaccgtggaggagctgttgaggggttgtattgaggcatttgacgattcgggcaaagttcgggacccacagttggtgcgaatgtttctcatgatgcacccttggtatatacctagttctcagctggctgcgaaattgttgcacatctaccagcaatctcgaaaggacaactctaatagcttgcaggtgaaaacttgtcatcttgtccgctactggatttctgccttccccgctgaattcgacctcaaccccgagttggccgagcagattaaggagctaaaggctttgctagaccaagagggaaatcggcggcattctagtttgattgatatagactctgtttgtgtgggggaacatcgcggattgggaggacactcagttagttacaccatctgtgcctag

SEQ ID NO: 202602 - DNA, 1731 bp, synthetic construct
  misc_feature 1..1731: note = Description of Artificial Sequence: Synthetic coding sequence
  source 1..1731: mol_type = other DNA
atgaaccggaaggacagcaagcggaagagccaccaggagtgcaccggcaaaattggtggacgaggcagaccccggcaggtgcggaggcataagacctgtccatccccacgtgaaattagcaaagtaatggcaagtatgaatctggggctactgtcagagggagggtgtagtgaagacgagctgctggaaaagtgtattcagagctttgacagcgccggctcattatgtcacgaggaccatatgctcaatatggtcctcgcgatgcattcatgggttttaccaagcgccgatctcgccgcccgactgctgaccagttaccagaaggcgacaggggatactcaggaactgcgaaggctgcagatttgccacttagtccgttactggctcatgaggcatcccgaagtgatgcaccaggaccctcagctcgaggaagtgattggcagattctgggccacagtcgctcgcgaggggaactccgcgcagcggaggcttggcgacagcagcgacctcctctcccccggcgggccggggcccccattaccgatgtctagccccggcctgggaaagaagcgcaaagtgagcctgctgtttgatcatctggagaccggggagctagcacagcatctgacctacttagaattcagaagtttccaggccattacggcactcttagaactgaccgaactcttggcaagccacaacaactatgcgcggtacaggaggacctgggcggggtgtgctggctttaggttgcctgtgcttggagtgcatttgaaagacctggtctcgctccatgaagcacaaccagatcggcttcctgacggacggttacacttaccaaagcttaataatctctacctccgcctgcaggagttagtggctctccaaggccagcatcccccttgctccgcaaacgaggacctgctgcatctgctcaccctttctctggatctgttttacacagaggatgagatctatgaactgagctacgcgcgagaaccccgatgtccaaaaagcctgcccccgagccccttcaacgcccctctagtggtggaatgggctcctggcgtgacaccgaaaccagacagggttaccctcgggcggcacgtggagcagctcgtggagtctgtattcaagaattatgacccggaaggacgcggcactatctctcaggaggacttcgagcgactgagtgggaactttcctttcgcatgccatggcctgcacccgccacctagacagggtcggggctctttctcacgggaggagcttactgggtacctgctccgcgcttcagctatctgcagtaaactgggtctggcttttttgcatacttttcatgaggtcacattccgaaaacccaccttctgcgacagctgtagcggtttcctttggggagtgacaaaacaggggtaccggtgtcgggaatgcggcctgtgttgccataagcactgtagagatcaggtcaaagtggagtgtaaaaagcgtccgggcgccaaaggcgatgccggacccccgggcgccccagttcccagtactccagctccacacgcctcatgtggctctgaggagaatcactcttataccttgtccctggagcctgaaaccggctgccagctcaggcatgcatggacacaaactgagtcccctcatccaagctgggaaaccgacactgttccctgtcccgtaatggacccgccatccacggcttctagcaaactggattcttag

SEQ ID NO: 202603 - DNA, 1854 bp, synthetic construct
  misc_feature 1..1854: note = Description of Artificial Sequence: Synthetic coding sequence
  source 1..1854: mol_type = other DNA
atgaaccggaaggacagcaagcggaagagccaccaggagtgcaccgggaagattggaggcagaggccgccctcgccaggtccgcaggcataagacatgtccttcaccacgggagatctcgaaagtaatggcatctatgaatctgggcctcctttcggaaggcgggtgctcagaggatgaactgttagagaaatgcatccaaagctttgacagcgccggctcactctgccatgaagaccatatgctgaatatggtcctagccatgcatagctgggtgttaccctcagccgacttggcagcaagactactgacctcttatcagaaagcaaccggagacacccaagagctgcggcggttacagatctgccatcttgtcaggtactggctgatgcgtcatcccgaagtgatgcatcaggatccgcaacttgaagaggtcataggccggttttgggcaacagtggcaagggaaggtaactctgcgcagcggcgcctgggcgactcctccgacctcctttcaccaggcggcccagggccccctctgcctatgtcatcccctggactggggaaaaaacggaaggtatcgcttctgtttgatcacctggaaacaggcgagctcgcccaacacctcacatacctagagttcaggtcgtttcaggccataacgcctcaggacctcaggagctacgtcctgcagggatcagtcaggggatgtccagcactggagggttctgtgggattatcaaatagtgtatctcgatgggtgcaggtaatggtgctgagccggcctggccccttgcagagggcccaagttctcgacaaattcatacatgtcgctcaacgcttgcatcaactgcaaaattttaacactctcatggcagtcactggcgggttatgtcattcagcaatctctcgtctgaaagactcccatgcccacctgtcccccgattcaacgaaggccttgctggagttgactgaattgttggctagccacaacaactatgcccgctataggcggacgtgggccggatgcgcaggattccggctgccagtgctgggtgtccatctgaaggacttggtatcactacatgaggcccagcccgaccgacttcccgacgggaggctgcacctgcccaagctcaataacttatacttgaggctgcaggagctggttgcactgcagggacagcaccctccctgcagtgcaaacgaagatttactccacctgcttacgctgagcctggacctgttctatacagaggacgaaatctacgaactaagttatgccagagaaccacgatgccctaaatccttgcccccgtcacccttcaacgcccccctggttgtagagtgggcacccggcgtcaccccaaaacccgatagagtgacgctggggcggcacgtggagcagttagttgaaagcgtcttcaagaactatgaccctgaggggcggggcaccatctcccaagaagattttgagagattatcgggtaacttcccatttgcctgccacggcttgcatccgccacctcgacaagggagaggaagtttcagtcgagaggaactgacagggtacctgctgcgtgctagtgcgatttgcagtaaactggggctggccttcctgcacacgttccacgaggtcacctttcggaagcccaccttctgtgattcctgctccgggttcttgtggggcgttacaaaacaggggtaccgatgcagaggcgagtggggtgtgagcgagtgggagggctccctgggaccccaagccggtcgcatggacgataccgaccggacgcctgccgccgcgttccctcagtccgctggatgcgtggctacaaacacagcggagacaaggtag

SEQ ID NO: 202604 - DNA, 1455 bp, synthetic construct
  misc_feature 1..1455: note = Description of Artificial Sequence: Synthetic coding sequence
  source 1..1455: mol_type = other DNA
atgaaccggaaggacagcaagcggaagagccaccaggagtgcaccgggaagattggtggtcgaggcaggccaaggcaggtgagacggcacaagacctgtcctagtccacgcgaaatatccaaggtaatggcttcaatgaatttgggccttctttcagagggcggctgtagtgaagatgagctactggagaagtgcattcagtcgttcgacagcgccggatctttgtgccacgaagaccacatgcttaatatggtcctcgccatgcatagctgggtgctcccttcagcggatctggctgctcggctgctgacaagctaccagaaggccaccggcgacactcaagaattgcgccgccttcagatatgccatctggtccgttactggctgatgcggcaccccgaagtgatgcaccaggacccccagctggaggaagtgattggccggttctgggccactgttgccagggaggggaacagcgcccagagaagactgggagatagttctgatttgctaagccctgggggtcccgggccccccctgccaatgtcatccccgggactcggtaagaagcgaaaggtgtctctgctgttcgaccatctcgagacaggggagttagcccagcacctgacgtatctcgaattcaggagcttccaggccattaccctgtccctggacctgttttatactgaagacgagatctatgagctgtcctatgctcgggagcccaggtgcccaaagtctttgccaccctcgcccttcaacgccccgctagttgtggagtgggctcccggcgtaacacccaagcctgatagggtgacactgggtaggcatgtggagcagcttgtggaatccgttttcaagaattacgaccctgagggacggggtaccatatctcaagaagatttcgaaagactgtctggcaatttcccatttgcgtgtcacggcctgcacccgcctccacgacaaggacgtggttctttttctcgggaggaactgaccggctatttattacgggcaagcgctatatgctcaaagttaggcttggcttttctccacacttttcacgaagtaacatttcgaaaaccaaccttctgtgacagctgttccgggttcttatggggggttaccaagcagggctatcgatgcagggagtgtggcctgtgctgccataaacattgtcgggaccaggtcaaagttgaatgtaagaagcggcccggtgccaaaggcgatgccgggccccccggcgccccagttccaagtacacccgcaccccatgccagctgtggcagcgaggaaaatcactcctatacgttatctttggagccagagaccggatgtcaattgcggcacgcttggacacagacagaatctccacaccctagctgggaaaccgacactgttccctgtcctgttatggaccccccatctaccgccagtagtaaattagactcatag

SEQ ID NO: 202605 - DNA, 1746 bp, synthetic construct
  misc_feature 1..1746: note = Description of Artificial Sequence: Synthetic coding sequence
  source 1..1746: mol_type = other DNA
atgaaccggaaggacagcaagcggaagagccaccaggagtgcaccggtaagataggcgggcgaggcagacctcgtcaggttcgtaggcataagacatgtccgtcaccaagagaaatctccaaggtgatggccagcatgaatctgggactgctgagcgagggaggatgcagtgaggacgagcttctggagaagtgcatccagagtttcgactctgctggcagcctctgccacgaggaccatatgctgaacatggtgctcgccatgcactcttgggtgcttcccagcgcggatctggctgctcgcttactgacgtcttatcaaaaagcaaccggggatacccaagagctgaggaggctgcagatttgccacctggtacgctattggctgatgagacaccccgaagtgatgcaccaggatccccagctcgaagaggttattggccggttttgggccacagtggctcgggaaggaaacagcgcgcagcgcagacttggggattctagcgacctcctgtctcctggtggccccgggccccccctaccaatgtcttctcccggcttaggaaaaaagcggaaggtctcactgctgttcgaccatttggaaactggagaactggcacagcaccttacgtatttagagttccggtcttttcaagccatcaccccacaagacctgcgaagctacgtcctgcagggctcagtgagagggtgccctgcactggaagggagtgttgggcttagcaattccgtttcacgctgggtccaagtgatggtactgtcacggccgggccccctgcaacgagcgcaggtactagataagtttatccacgtcgctcaacgcctccatcagctgcagaatttcaatacattaatggccgtgacaggtggcctgtgccattctgcgatcagtaggctgaaagattctcatgctcatctgtctcccgattccactaaactatcgctggaccttttctatacagaggatgagatatatgagctgagctatgcccgcgagccacgatgccctaagagcctgcccccctctccattcaatgctccgctggtggtcgaatgggcccccggcgtgaccccgaagcccgatcgtgtgacattggggcgacacgtggagcagctggtggaatcagtctttaagaactacgatcctgaaggcaggggtactatctcccaggaagatttcgagcggttatccggcaacttccctttcgcatgtcatggcttgcacccacccccgagacagggccggggatcgtttagcagggaagagctcacaggatacttactgagagcatccgccatctgcagtaaacttggactcgcattcctgcacactttccatgaggttacattccgcaagcccacattttgtgacagttgttccggctttctatggggagtcactaagcaaggatatcgctgcagagagtgcgggctgtgctgccataagcattgcagagatcaagtgaaggtggagtgcaaaaaaagacctggcgccaaaggcgatgctggaccaccgggggccccagtgccctccactcctgctcctcatgcaagctgcgggtcggaagagaatcactcctataccttgtccctggaacccgagacaggatgccaactgcggcacgcctggacacagacagaatccccccatccttcttgggagacagatacggtgccctgcccagtgatggacccacctagcacagccagtagcaagttagattcctag

SEQ ID NO: 202606 - DNA, 2022 bp, synthetic construct
  misc_feature 1..2022: note = Description of Artificial Sequence: Synthetic coding sequence
  source 1..2022: mol_type = other DNA
atgaaccggaaggacagcaagcggaagagccaccaggagtgcaccgggaaaatcggaggcaggggaaggcctcgccaggtccgcagacataagacatgcccctctccaagagagatctcgaaggtgatggcttccatgaacctgggtctgctaagtgagggtggctgttcagaggatgagctcctggagaagtgcatccagtcattcgatagtgccgggagcctgtgtcatgaggatcatatgctcaatatggtgctggctatgcatagctgggtcctgccatctgcagatctcgccgcgcggctgctcactagttatcagaaggctactggggatacgcaggaattgaggcgcttacagatctgtcacctggtacggtactggctgatgcgacaccccgaggtgatgcaccaagaccctcagctggaggaagtgatcggccgcttctgggctacagtggccagagagggaaactctgcccagcggaggctgggcgactcctccgacctcctgtctcctggagggcctgggccgccactccccatgagctctccaggacttggaaaaaaaaggaaggtttctcttttattcgatcatctcgagaccggggaactggcacagcacctcacatatctggagttccgctccttccaggccatcacacctcaagacctgcgttcatacgtactccaggggtctgtacgtgggtgccctgctctggaaggcagcgtggggctctccaattctgtgtcccgatgggtgcaggtaatggtactatcgcggcccgggcccctgcagagagctcaggtcctcgataaattcatccatgtcgcgcagagactccatcaactgcagaatttcaatacactgatggccgtgactggcgggctgtgccacagcgctatttcaaggctgaaggacagtcatgcccacctctccccagacagtacaaaggcgctgctagagctaaccgagctgttggcctcccacaataattatgcaaggtacagacggacctgggcagggtgtgctggctttcgcctgccagttctgggggtgcatcttaaggatctggtgtcgcttcacgaagcgcagcccgataggttgcccgacggccggctgcacctcccgaagttgaacaacctctatttgaggctgcaggaactcgtagctttgcagggccagcacccaccttgcagcgccaatgaggacctgcttcatttgttgaccttgtctctggacctcttctacaccgaggacgaaatctatgagttgtcctacgccagagagcctcgatgccccaagagcttaccgccgtctcctttcaatgcacccctcgtggtcgagtgggcccctggggtgactcccaagcctgaccgggtgactttggggaggcacgtggaacagttggtggagtccgtgttcaagaattacgatccagaaggccgaggcaccatttcccaagaagacttcgagagattgtctgggaactttccttttgcttgccacggcctgcacccaccgccccgccagggcagaggatctttctctcgagaagagctgacggggtacctgctgcgagcatccgctatttgttctaagctcggcttagcattcctccacacctttcatgaagtcacatttcggaagccaaccttttgcgactcgtgttctggctttctctggggagtcaccaagcagggatatagatgcagagagtgcggcctctgctgccataagcattgtcgagaccaggtcaaggttgaatgtaagaaacgccctggggcaaagggggacgccggtccgccaggggctcccgtaccctctacccctgcaccacacgcttcctgcggctccgaagaaaatcacagctacaccctaagccttgagcccgagactggatgccaactccggcacgcttggacccaaacagaatctccacacccttcttgggagaccgatactgtgccctgcccagtgatggatcccccttcaacagcatcctctaagctggactcatag

SEQ ID NO: 202607 - DNA, 1980 bp, synthetic construct
  misc_feature 1..1980: note = Description of Artificial Sequence: Synthetic coding sequence
  source 1..1980: mol_type = other DNA
atgaaccggaaggacagcaagcggaagagccaccaggagtgcaccgggaagatcggcgggcggggccgtccccggcaggtgcgtaggcataaaacatgtcccagtccaagggaaataagtaaggttatggcctctatgaacctgggcctgctgagtgagggcggatgcagtgaagatgagctgttggagaaatgcatacaatcattcgatagtgctgggtcgctgtgtcacgaagatcacatgctcaatatggtattagccatgcactcttgggttctgccaagtgccgacctggcagcccggttgctaacttcataccagaaagcaacaggggatacacaggagctccggagactccaaatttgccacctcgtacgctactggctcatgaggcatccggaggtgatgcaccaggacccccagcttgaggaggtgatcggccgtttctgggcgaccgtagcaagagaggggaactccgctcagcgccggctcggagacagcagtgacctcccgggcctcggaaagaaacgcaaggtctccctgctttttgaccacttagagacgggcgagctagcccaacaccttacttacctagaatttcggagctttcaagccattactcctcaggatctgaggtcctacgtccttcagggtagtgtccgcggatgccctgcccttgaaggttcggtgggcctgtcaaattctgtcagcaggtgggtacaggtgatggtcctgtctcgcccagggcccttgcagcgtgcccaggtccttgataaattcattcacgttgcacagcgcctgcaccagctacagaactttaataccctgatggcagtgaccggcgggctatgccattccgccatctcacgccttaaggactcacatgcacatctgagtccggactcaaccaaagcgctgctagagttgacagaactcttggcaagtcataataattatgcacgctaccggcgtacttgggctggctgcgcaggtttcaggctgcccgtcctgggggtccacctgaaggatttggtgagcttgcacgaagctcaacccgacaggctgcctgatggtaggttacatctccccaagctgaataacctctacctgagactccaggaattggtagcccttcagggacaacatccaccttgctctgccaacgaagatttactccatctattaacactgagcctcgatttgttctataccgaagatgagatctatgaactgtcctacgcacgagaaccgcgatgcccaaagtccctgcctccttcccccttcaatgctcccctggtggtggagtgggccccaggtgtgacccccaagccagacagagtcacactggggcggcacgtagagcagctagtggagtctgtgtttaagaattatgacccagaaggaagaggcacaattagccaggaggacttcgagcgactctctggcaactttccatttgcctgtcatggtctccatccccctccacggcagggaaggggaagtttctccagggaggaactcaccggctacttgctgcgcgcatcagcaatttgtagtaaactaggactcgcattccttcacaccttccacgaagttacatttcggaaaccaaccttctgtgatagctgtagcgggtttctctggggcgttacaaaacagggctaccgctgccgggaatgcggcctttgctgccataaacattgcagagatcaggtcaaggtggaatgcaaaaaaaggccaggtgcgaagggagacgcagggcctcccggtgctccagttccttccactcctgccccccatgcatcttgcggctcagaagagaatcattcgtacacactttccttagagcccgagacagggtgtcagctcaggcatgcctggactcagacagagtccccacatcccagttgggaaacagatactgttccttgccccgttatggatccccctagcaccgcttcaagtaaactggactcctag

SEQ ID NO: 202608 - DNA, 1815 bp, synthetic construct
  misc_feature 1..1815: note = Description of Artificial Sequence: Synthetic coding sequence
  source 1..1815: mol_type = other DNA
atgaaccggaaggacagcaagcggaagagccaccaggagtgcaccggtaagatcggcggccgcgggagaccgagacaggtgcgccgacacaaaacctgcccaagtccacgagaaattagcaaagtcatggcttccatgaatttaggcttgctgtcagaggggggctgcagtgaggacgagctgctggaaaaatgtattcagagttttgattcagctgggtccctctgccacgaagatcacatgctcaacatggttcttgctatgcactcatgggtgctccccagcgctgatctcgcagcccgtcttctgacctcataccagaaagccacgggagacacacaggaactacgacgcctgcagatttgccatctggttcggtactggttaatgaggcaccctgaagttatgcaccaagacccgcagcttgaagaagtcatcgggaggttttgggctactgtggcacgagaagggaactctgcacagcgcaggctgggagactcctccgacctgcttagtccagggggaccaggaccacccctgcccatgagtagccctgggctgggcaagaaaaggaaagtgtcacttctgttcgaccacctggaaacaggggagctggcccagcatctgacctatcttgagttccggtcttttcaggcaatcacaccccaagatctgcgctcatacgtgcttcaagggagtgtgagaggttgccccgccctagaggggtccgtgggcctctccaattcagtgtcacggtgggtccaagtgatggtactaagcaggccgggtccactacagcgagcacaggtcctggataagtttatccacgtcgcccagcggctgcatcagctccaaaatttcaacactctgatggccgtcaccgggggactgtgtcactccgctatcagcaggctgaaagactctcacgcgcatttatctccagattcgaccaaggagctggtggcgctgcagggccagcatcctccctgcagtgctaatgaagacctgctgcatctgttgacactatctctggatctgttttatactgaggacgaaatttacgaactgtcgtatgcccgcgagccacgctgccctaagtccctgccaccctcaccattcaacgcacctctcgttgtcgaatgggcccctggcgtgacgccaaagcctgacagagttacgctgggaaggcacgttgagcagctggtggagtccgtgtttaagaattacgaccctgagggccgggggaccatatcacaggaagatttcgagcgattatctgggaactttccattcgcctgtcacggtcttcatccacccccccggcaggggagggggtctttttcgagagaagaacttacgggatatctgctgcgggcctccgcgatttgctccaaattgggcctggcattcctccataccttccacgaggttacattcagaaagccgaccttctgtgatagctgctccggctttctgtggggtgtgacaaaacagggttatcgctgtcgcgagtgcggactctgctgtcataagcactgcagagaccaagtgaaagtcgaatgcaagaaacggcccggcgccaagggggacgcgggacctccgggagccccagtgcccagcactcccgccccgcatgcgagctgtgggagcgaagaaaaccacagttacacgctatccctggagcctgagactggctgccagttgcggcacgcatggacgcagaccgaatctccccatccaagctgggaaactgataccgtgccctgccccgttatggatccgccatctactgcttcctcaaaactcgactcatag

SEQ ID NO: 202609 - DNA, 1857 bp, synthetic construct
  misc_feature 1..1857: note = Description of Artificial Sequence: Synthetic coding sequence
  source 1..1857: mol_type = other DNA
atgaagaaggacgtgcggatcctgctggtgggcgagccccgggtgggaaagacctccctgattatgtcgctggtctctgaggagtttcctgaggaggttcctcccagggccgaagagattacaatccctgccgacgtgacccctgagcgtgttcccacccacatcgtggactactccgaggccgagcagtcagatgaacaactgcatcaggagatctcccaagcaaatgttatctgtatcgtgtacgccgtgaacaataagcattcgatcgataaagtgaccagccggtggatccccttaatcaacgagagaaccgataaggactcccgcctccccctcattcttgtggggaacaaatctgatctggtggagtactcctcaatggagacgatcctgcccattatgaatcagtatactgaaatagagacctgtgtggagtgcagcgccaaaaacttgaagaatatcagcgagctgttctattatgcacagaaagccgtgctccatcctaccggccctctgtactgtcctgaggagaaagaaatgaaacccgcgtgcattaaagcgctcacccggatattcaagattagcgatcaggataatgacggaacgctgaacgacgcagagttgaactttttccagcggatttgtttcaataccccactggcacctcaggccttggaagacgtcaagaacgtggtgcgcaagcatatttccgacggggtcgcagatagtggactcaccctgaaggggtttctgtttcttcacaccctgttcattcaaagaggtcgacacgaaacaacgtggaccgtcctgagacggttcgggtacgacgacgacctagatctcactcccgaatatctctttccactgctcaagatccccccagattgtacaacagagctgaaccatcacgcctacctgtttcttcaatctactttcgataagcatgatctggaccgggactgcgccctgtctcccgacgaactgaaggacctctttaaagtgtttccatacattccctggggaccagatgtgaacaacaccgtgtgcacaaacgaacggggttggattacctatcagggattcctgtcacagtggaccctgaccacttatctagatgtacagagatgcctcgagtatttgggctatctgggctacagcattctgaccgaacaggaaagccaggcgtcggccgtgactgtgacgcgagacaaaaagattgatctccagaagaagcaaacacagaggaacgtctttcgatgcaacgtgattggggtgaaaaactgtggaaaaagcggcgtactgcaggctcttctgggtcgaaatcttatgaggcagaaaaagatccgggaagatcacaagagctactatgccataaatacagtatatgtttatgggcaggaaaaatatctgctgctccacgacattagtgaatcagagtttttgaccgaggccgaaataatttgtgatgtcgtatgcctggtgtacgatgtaagtaatcccaaatcatttgagtattgcgcacgaatcttcaaacagcacttcatggattcaaggatcccttgcctgattgttgcagctaaaagcgatttgcacgaggtgaaacaggaatactccatctctcccaccgacttctgtcgcaagcataagatgcctcccccccaggcttttacatgtaacaccgccgatgcaccctctaaggacatatttgtaaaactcacaacaatggccatgtacccccacgtgacacaagcggatttaaagtccagtaccttctggctgcgggcctcctttggggctacggtcttcgccgtgctgggcttcgcaatgtacaaagccctcctgaagcagcgctag

SEQ ID NO: 202610 - DNA, 1980 bp, synthetic construct
  misc_feature 1..1980: note = Description of Artificial Sequence: Synthetic coding sequence
  source 1..1980: mol_type = other DNA
atgaagaaggacgtgcggatcctgctggtgggcgagccccgggtggggaagacctctctcatcatgtctttagtaagcgaggagttcccagaggaagttcctcccagagctgaggaaatcacgatccccgcagacgtcacccccgagagggttccgacccacatcgtggattactcagaagctgagcagtctgatgaacagttgcatcaggagatctcacaagccaacgtcatctgtattgtgtacgcggtgaataacaaacacagtatcgataaagtaacctctagatggattccattgatcaacgagcgcacagacaaggactccagacttcctctaattttggtcggaaacaagtctgatttagtcgagtacagcagcatggagacaatcctgcccatcatgaatcagtatactgagatagaaacgtgcgttgaatgctcagccaaaaacctaaaaaatatctctgagcttttctactacgctcagaaagccgtacttcacccaactggccccttatactgccccgaggagaaggagatgaagccagcttgtattaaggcccttacccgcatcttcaaaatcagcgatcaggataatgacgggaccctcaacgatgctgaactaaactttttccagcgcatctgttttaacacgcccctggccccacaggcactggaagacgtgaagaacgtcgttaggaagcacatctccgatggggtggccgactctggacttacgctgaaaggtttcctcttcttgcatacgctgttcattcagagagggcgacacgaaaccacctggaccgttcttcggcgattcggctacgacgatgatctggaccttacccccgagtacctgtttcctctcctgaaaataccgccggactgcacaaccgaacttaaccatcacgcataccttttcttgcaaagcacttttgacaaacacgatctggaccgggattgtgccctgtctccggatgagctgaaggacttgttcaaggtttttccatacatcccctggggacctgacgtgaacaacactgtgtgtactaacgagaggggctggatcacttaccagggctttctgtcacaatggactctaaccacctatcttgatgtgcagaggtgtctggaatacctaggctaccttggctactctatcctcaccgagcaggagagtcaggccagcgcggtgactgtaacccgcgataaaaaaatcgatctccaaaagaaacaaacccaaagaaacgtcttccgttgtaacgttattggagtaaagaactgtggaaaaagtggtgtcttgcaagccttattgggccgcaatctgatgagacagaaaaagatcagggaagatcacaagagttactatgcaataaacactgtatacgtgtacgggcaagagaagtacctgttacttcacgatatctcagagtctgagttccttacagaagccgaaatcatatgtgatgtggtatgtctcgtctacgacgttagcaatccaaagtcctttgagtattgcgctaggattttcaaacaacatttcatggatagccgcatcccttgtctcatcgtggccgccaagagcgatctccatgaagtaaaacaggagtacagtatttctcctacagacttttgccggaaacacaagatgccccccccacaggcatttacttgcaataccgccgatgccccaagcaaggacatatttgtcaagctgaccacaatggccatgtaccctcatgctcgtctgcgctgcatgtgcacttgcaatcggtgtacgttctgtatttgccaaaacttcctgaattccgatcttctccagagcgtaaaaaacaaaattttcacggccgtgctgaataggcatgtcacacaggcagacctcaaaagctcgaccttctggctgagggcctcctttggcgcgactgtctttgcggtgttgggattcgccatgtacaaagctctattgaaacagagatag

SEQ ID NO: 202611 - DNA, 2076 bp, synthetic construct
  misc_feature 1..2076: note = Description of Artificial Sequence: Synthetic coding sequence
  source 1..2076: mol_type = other DNA
atgaagaaggacgtgcggatcctgctggtgggcgagccccgggtggggaagacctcgctgatcatgtcactggtctccgaggagtttccagaagaagtcccacccagggctgaagagattaccatccccgccgatgtcacacccgagcgggtccccacccacatcgtggactactccgaggctgagcagtctgacgagcaactgcaccaggaaatctctcaagctaacgtgatttgtatagtatatgctgtaaacaataagcacagtatcgacaaggtgacttcacgttggataccactgattaatgagagaacggataaagatagtaggctcccccttatactggttggcaacaagagtgaccttgtggaatactcaagcatggagaccattctgccaattatgaatcagtatactgaaattgaaacatgtgtggagtgtagcgctaagaatctgaaaaacatcagcgagctgttctattatgcccagaaggcagtgctccatccgacggggccattgtattgccccgaggaaaaggagatgaagcctgcctgcatcaaagcattaaccagaatttttaagatctccgaccaggataacgatggaacgttgaacgatgccgagttgaactttttccagcgaatttgctttaacacccctttggccccacaggcattagaggatgtcaagaacgtggtgcggaagcatattagcgatggtgtggcagatagcggcctgacactgaaagggtttctcttcctacataccctcttcattcagagaggacgacatgaaaccacgtggaccgtgctgagacggttcggatacgatgacgaccttgatcttaccccagagtacctgttccccttactgaaaataccacctgactgcaccacggaattaaatcaccacgcgtatctctttcttcagagtaccttcgataagcacgatctcgatcgcgactgcgccctgtcgccagatgagctgaaggacctcttcaaagtgtttccctacatcccctggggtcctgacgttaataatacggtctgcactaatgaacgagggtggattacttatcagggttttctttcccagtggaccctcaccacgtaccttgacgttcagcggtgtctagagtaccttggctaccttggatactcaatccttacagagcaagagtcccaagcctctgccgtgactgtgacaagggacaaaaaaatagacctgcagaagaaacaaacccagcggaacgtgtttcggtgcaatgttatcggcgtgaagaattgcggcaaaagcggagtgctgcaggcgctactggggagaaacctcatgaggcagaagaagattcgggaggatcacaaatcctactacgctatcaataccgtctacgtctacgggcaagagaagtacctgctgttgcatgacattagtgagagcgaattcctgacagaggctgagataatatgtgatgtggtatgcttggtgtacgacgtaagtaatcctaagtctttcgagtactgcgcgcgcatttttaagcagcactttatggactcgcgcattccttgtttgattgttgccgctaaaagtgatctgcacgaagtcaagcaggaatactccatatcgcctactgatttctgcaggaaacacaaaatgcctcccccgcaggcattcacctgcaatacagccgacgctccctcaaaagacatctttgtgaagctgacaaccatggccatgtatcctgaggaccattaccgtgaccggttaagtagggatatgggtcacaccgaccggatcgagaacttgcggaagatctgggttttcctaaaaaccgccttccatgccaggctgagatgcatgtgcacatgtaatagatgtacattttgcatatgccagaacttcctcaactctgatctcctccagtcagtgaaaaacaaaatttttactgccgtcctgaacaggcatgtcacccaggcggacctgaagagcagtacattttggctgagagcgagcttcggagctacagtttttgccgtcttaggattcgcaatgtataaggccttacttaagcagcgatag

SEQ ID NO: 202612 - DNA, 1953 bp, synthetic construct
  misc_feature 1..1953: note = Description of Artificial Sequence: Synthetic coding sequence
  source 1..1953: mol_type = other DNA
atgaagaaggacgtgcggatcctgctggtgggcgagccccgggtgggtaaaacatcgctgattatgagtctagtgtcagaggaattccctgaggaagttccgcctcgggccgaagaaattacaatacctgccgacgtgacccctgagcgcgtacctactcatattgtcgactactccgaggctgagcagagcgatgaacagttgcatcaggaaatttctcaggctaacgtgatctgcatagtgtacgctgtgaacaacaaacattctatcgacaaggttacctcccggtggatcccgctgataaacgagcgtacggacaaggatagccgccttccccttattctggtgggaaacaaaagtgacctcgtcgaatattcaagcatggagacgatcttgcccattatgaaccagtacacagagatcgagacgtgtgttgagtgcagtgcaaagaacctaaagaacatcagcgaactgttttactatgctcaaaaggctgttctgcacccaacaggaccgctgtactgtcctgaggagaaagagatgaaacctgcgtgtataaaggccctaaccaggatattcaagattagcgatcaggacaacgacggcacattgaatgacgcggagctgaactttttccagcggatctgcttcaacactccccttgcccctcaagctctcgaggacgtaaagaacgtggtgaggaagcatatctcagatggagtcgctgattcgggcctcaccttaaagggttttctgttccttcacacactgtttattcaaaggggacggcacgaaaccacctggacggtccttaggcggttcggatatgatgacgatcttgatctcactcctgaatacttattccctctgcttaaaattcctcctgattgtacaacggagctcaaccatcatgcatatctgttcctgcagtcgaccttcgacaaacacgacctggaccgggattgcgccctgtccccagacgagttgaaggatctcttcaaggtatttccttatattccatggggaccagatgtaaacaatacagtttgtaccaacgaaaggggttggataacctatcaggggttcctgagtcaatggaccctgacaacttacctcgacgtgcaacgctgtcttgaatatctcgggtacctgggctattcaatattgacagagcaagagagtcaagccagcgctgttactgtgactcgtgataagaaaattgacctccagaaaaagcagacccagcgcaacgtgtttagatgtaacgtgatcggtgtcaagaattgtgggaaatccggagttctgcaagcactgctgggccggaatctcatgagacagaagaagatccgggaagatcataagtcatattatgctatcaacacagtatatgtttacggacaggagaagtacctgctcctgcacgacatttcagaatccgagttcctaacagaagctgagatcatctgcgatgtcgtgtgccttgtctacgatgttagcaaccccaaatcttttgagtactgcgcccggatcttcaagcagcatttcatggactctaggatcccatgccttatcgtcgcagccaaatcggatctccatgaggtcaaacaggaatattccatctctccaactgatttttgcagaaaacataagatgcctccgcctcaggcttttacttgcaacaccgccgacgcccccagcaaggacattttcgtgaagcttacaacaatggcaatgtacccagaagaccattatcgcgatcgcctaagccgggacatgggacacacagatcgcatcgaaaacctgaggaagatctgggtgttcctgaaaacggctttgcatgtgacacaggccgacctgaagtcgtcaacattttggttgcgcgcaagttttggcgccaccgtctttgcagtgctggggtttgccatgtataaggccctcttgaagcagcgatag

SEQ ID NO: 202613 - DNA, 744 bp, synthetic construct
  misc_feature 1..744: note = Description of Artificial Sequence: Synthetic coding sequence
  source 1..744: mol_type = other DNA
atgaagaaggacgtgcggatcctgctggtgggcgagccccgggtgggaaaaacatctctgattatgtcgttagttagcgaagagttccctgaagaggtgcccccccgagccgaagagatcaccatccctgctgacgtaacacccgagcgcgtccccacgcacatcgtagactacagcgaggcggagcaaagtgacgaacagctgcaccaggaaattagtcaggcaaatgtcatttgcatcgtatatgccgtgaataacaagcattccatagacaaagtgacgtcccggtggatccctctgatcaacgagcggacggacaaggactctaggttacctttgatcctcgtcggcaataagtctgacctagtggagtactcctctatggagaccattctgcctatcatgaaccagtacacagaaattgaaacctgtgtggaatgctcagctaagaacctgaagaacatctctgagctcttttactatgcccagaaggcagtgcttcatcccactggtcctctctactgcccagaggagaaggaaatgaagcccgcttgcattaaggccttgaccaggatttttaaaatctcggatcaagacaacgatgggactctgaatgacgcagagcttaattttttccagcgaatctgttttaacacaccattggcaccaagatttgggttcgagcaggtgctagtgctgctgtttctgcagttttgggccctcctctgtactaaacactactag

SEQ ID NO: 202614 - DNA, 1857 bp, synthetic construct
  misc_feature 1..1857: note = Description of Artificial Sequence: Synthetic coding sequence
  source 1..1857: mol_type = other DNA
atgcggcgggacgtgcggatcctgctgctgggcgaggcccaggtgggtaaaacctctttgatcctcagcctcgtcggagaagagttccccgaagaagtcccaccccgggccgaggagattactatccccgcagacgtgactcctgagaaggttcccacccatattgtggattattccgaagcggaacagacggacgaggaattgcgagaggaaattcacaaggctaatgtggtgtgtgtggtgtacgacgtttccgaggaagctactatcgaaaaaatacgaaccaagtggattccacttgtcaatggcggaacaacccagggtcctagagtacctatcatcttggttgggaataaaagcgacctccgatcagggtcttccatggaggcagtgctgcctattatgagtcaatttccggaaatcgaaacgtgcgtggagtgctcagctaagaatctgagaaacatttctgagcttttttactacgcacagaaagcagtgctgcatccaacggccccactgtatgaccctgaggcaaaacagctgcgcccggcgtgtgcccaagccctcaccagaatcttcaggctctccgaccaggacctcgaccaggcactctctgacgaggaactgaacgcttttcagaaaagctgttttggccacccactggccccccaggcacttgaggacgtgaagaccgttgtttgccggaatgttgccgggggggttagagaggacaggcttaccctggacggctttctgttcctgaacacactcttcattcaacggggcagacacgagaccacctggaccatcctccgcaggttcggatatagcgacgcactggaacttacagccgattatctttctcccctcatccatgtgcccccaggctgctcaactgaactcaatcatctggggtatcagttcgttcagagagtctttgaaaagcacgatcaagatcgggatggtgctctgtcacctgtggagctacaaagtctgtttagtgtattccctgctgccccttggggacctgagcttccacgcactgtccggaccgaggcaggccgcctgcctcttcatggatatctgtgccaatggacgctcgtcacatacctggatgtaagatcctgtctcggacaccttgggtacctgggatatccaaccctgtgtgagcaagaccaggcacacgctataaccgtaacaagagaaaaaagactcgatcaggaaaaaggccagactcaacggtcagtgctgctctgcaaagtggtcggagcccggggtgtaggtaagtccgccttcttgcaggcttttctaggccgggggttgggccatcaagatacgagagaacagccccctggctacgcaattgataccgtacaagtgaatggacaggaaaagtatttaatcttatgcgaggtgggaaccgatggactcctcgccactagtttggatgccacgtgtgacgtggcctgcttgatgttcgatggttccgatccaaagtcattcgctcactgtgcctctgtgtacaagcatcattacatggatggtcaaacaccatgtctgttcgtaagctccaaggctgacttaccagagggagtggccgtttcaggtcccagcccggctgagttctgccggaaacaccgtctcccggctcccgtgcctttttcttgtgctggccctgcagagcccagcaccacaattttcactcaactggctaccatggcggctttccctcacctggttcacgctgaactccatccctctagcttctggctgcggggtctgcttggggtggtaggcgctgccgtggcagccgtcctatctttcagcctgtacagggtgctggtcaaaagccagtag

SEQ ID NO: 202615 - DNA, 777 bp, synthetic construct
  misc_feature 1..777: note = Description of Artificial Sequence: Synthetic coding sequence
  source 1..777: mol_type = other DNA
atgcccccccagcagggcgaccccgccttccccgaccggtgcgaggctccccccgtgccaccccggagggaacgcggaggtaggggcggacgaggcccaggagagcctggaggcaggggccgagctggaggggcagagggccggggagttaagtgtgtcctcgttggggatggcgcggtgggtaagacgagcttggtcgtgagctatactacgaatggctaccccacagagtacatccctacggccttcgacaatttcagcgccgtggtgagcgttgatggaagacccgtccgcctgcagctgtgcgatacggctggacaggacgagttcgacaagctacggcccctttgttataccaacactgacatcttcctcctgtgctttagcgtggtgtcacccagcagtttccagaatgtttctgagaagtgggttcccgagattaggtgccactgccccaaagccccgatcatcctcgttggcactcagtccgacctgagggaagacgtgaaggtgctgattgagctggataaatgcaaggagaaaccagttcctgaggaagctgccaagttgtgcgccgaggagattaaagctgcatcgtacatcgagtgttccgctctgacacagaagaacctgaaggaggtgtttgatgccgctatagtggccgggattcagtacagcgatacgcagcagcagccaaagaagagtaagagtcgcacaccagataagatgaaaaacttgagcaagagttggtggaagaaatactgctgcttcgtctag

SEQ ID NO: 202616 - DNA, 1527 bp, synthetic construct
  misc_feature 1..1527: note = Description of Artificial Sequence: Synthetic coding sequence
  source 1..1527: mol_type = other DNA
atggaccacctgggcgccagcctgtggccccaggtgggcagcctgtgcctgctactggccggggccgcatgggcccccccgcctaacctgccggaccccaaatttgaatccaaggcagcactgttagcagctcgcgggcccgaggagcttttgtgttttacagagaggctggaggatctcgtatgcttttgggaagaggccgcttcggccggagttgggcctggcaactattctttttcctaccagctcgaagacgaaccctggaagctgtgcaggctgcaccaggcacctacagcacgtggcgctgtgcgtttctggtgttcacttcccacagcagacacatcgagctttgtgcctctcgaactccgggtgaccgcggcaagcggagcaccaaggtaccacagggtgatccacatcaatgaggtggtgctgttggatgcaccagtgggcctcgtcgctcgcctggctgacgagtcaggccatgtggtcttgcggtggctcccgccgcccgaaactcctatgaccagtcatattcgctacgaagtggatgttagtgctggcaatggcgccggctctgtccaaagagttgagatactagaaggccgaaccgaatgtgtgttatctaacctacggggcaggacccggtacacatttgccgtgcgggcgcgcatggcagaacccagcttcggagggttttggagtgcatggagtgaacccgtgtcactgctgaccccttctgatctcgacccattgattctcactttatccctgatactcgtggttatcttggtgttgctgaccgttctcgctttgttgtctcaccgccgggctctgaagcagaaaatctggcccgggattccatccccagaatccgagtttgaaggcctgtttaccacccataaaggcaactttcagctgtggctctaccagaatgacggctgtttgtggtggtctccttgcactccgtttaccgaagatcctcctgcctcactagaagttcttagtgagcgatgttggggaaccatgcaagccgtggaacctggcacggatgatgaaggccctctattggaaccagttggctccgagcatgcccaggatacctatctggtgctggacaagtggctcctgcctagaaatccaccatctgaggatcttcctggcccaggcggcagtgtcgatatcgtagcaatggacgaggggtctgaggcctcctcatgcagttccgccctggcttctaagcctagccccgaaggtgcctctgctgcttcttttgaatacactattttggacccctccagccagttgctccgcccatggaccctatgtcctgaactcccccccaccccaccccacctcaaatacctgtacctggtggtcagcgactctgggatttcaacggattactcatcaggcgattcccagggcgcccagggtggactatctgatggcccatactcaaatccatatgaaaattctctgattcctgccgctgaacctctacccccctcgtatgtggcctgctcttag

SEQ ID NO: 202617 - DNA, 2550 bp, synthetic construct
  misc_feature 1..2550: note = Description of Artificial Sequence: Synthetic coding sequence
  source 1..2550: mol_type = other DNA
atggccgccgccgcccccgccgccgccgccgccagcagcgaggcccctgcagcgtcggcaaccgccgaacccgaggctggggatcaagacagcagagaggttcgggtgctacagtccctgcgcggcaaaatctgtgaggcaaagaacctcctgccttacctgggccctcataaaatgagagactgcttctgtacaattaacctcgaccaggaagaggtatatcgtactcaggtggtggagaagtccctgtcccccttctttagtgaggaattctactttgaaatcccccggacctttcagtacctgtctttctacgtttacgacaagaatgtcctgcagagagacctgcgaatcgggaaggtggcaatcaagaaggaggacttgtgtaatcactctggaaaggagacctggttctcgctccagcctgtggactctaatagcgaggttcagggcaaagttcatttggagctgaaactgaacgaacttattactgaaaacggaaccgtatgccagcagctggtcgtacacattaaggcttgccatggccttcctcttattaatggacagtcttgtgacccgtatgctacagtctcactcgtcggaccttccagaaatgatcagaaaaaaacaaaagtcaaaaaaaagacctctaacccccaatttaatgagatcttctactttgaggttacccgcagtagcagctacacaaggaaatcccagtttcaggtggaagaggaggacattgagaaactggagatccgcatagacctgtggaataacggaaatctggtgcaagacgtgttcctgggtgagataaaggtacctgtcaatgtcctgcgcactgactcttcacaccaggcttggtatctccttcagcctcgtgacaacggcaacaaaagttccaaaacagacgatcttggttcactacgactgaacatatgctacaccgaggattatgttctgccctccgagtactacggacctctgaagaccttgctgttgaagagcccagatgtacaacctatatctgcgagcgcagcctatattctgtcagaaatatgcagagacaagaacgatgcagttctacccctcgtacgactgctgctccatcacgacaaactagtaccttttgcaacagcagtcgctgagctggacctgaaggacacgcaggatgctaacaccatatttcgcggcaacagtctggctacacgctgcttagatgagatgatgaaaattgtgggtggacactatttaaaagtgactctgaagcccattttagacgagatttgcgactcttctaaaagctgtgaaattgatccaataaaactgaaggagggagacaacgttgagaacaataaggaaaacctgagatactacgtcgacaagctgttcaatacaatcgtcaagtccagtatgtcatgtcctactgtcatgtgtgacatcttttacagcctgaggcaaatggcgacccagcgattcccgaatgatccccacgttcaatattcagccgtgagcagctttgtgttcctgcggttctttgctgtggccgtggtgagtcctcacaccttccatctccggccgcaccatccagatgctcagacaattcggacccttaccctcatctcaaaaacgattcagaccctgggctcttggggctccctgtccaaaagcaaatccagctttaaagagaccttcatgtgtgagttcttcaaaatgtttcaggaagaaggctatatcattgctgtaaaaaagttcttggatgagatctcatccacagagacaaaggaatcatccggcacatccgaacccgtccaccttaaggaaggagagatgtacaagcgggcgcaggggcgaactaggatcggaaagaagaacttcaagaagagatggttctgcctgacttcacgggagttaacttaccacaagcaacccggcaaagacgcaatatatactatccccgtgaaaaatattttagcagttgagaagctggaggaaagttcattcaacaaaaagaatatgtttcaggtcatccacaccgaaaagcctctgtatgttcaggctaataactgcgtggaagcaaatgagtggatcgacgttctctgccgggtcagccggtgtaaccaaaatcggttatccttctatcacccctcagtttacctgaatggaaattggctgtgctgtcaagaaactggggagaatactctgggttgtaagccatgtaccgcgggggtacctgctgacatccaaattgacattgacgaggatcgcgagacggaaaggatttatagtctgttcacactttctttgttaaaattgcagaaaatggaagaagcatgcgggactattgccgtttatcaggggccccagaaggaacccgacgattatagcaacttcgttatcgaggactccgtaaccacttttaaaaccatacagcagataaagagtataatagagaaacttgacgagccacatgaaaagtaccggaaaaagcggagcagcagcgcaaaatacgggagcaaggagaatcctatcgtggggaaggcaagctag

SEQ ID NO: 202618 - DNA, 834 bp, synthetic construct
  misc_feature 1..834: note = Description of Artificial Sequence: Synthetic coding sequence
  source 1..834: mol_type = other DNA
atgatgaagatcgtgggcggccactacctgaaggtgaccctgaagcctatattagacgaaatttgcgatagttccaaaagctgcgaaattgatcctatcaaactgaaagagggtgataatgtggagaacaataaggaaaacttaaggtattatgtcgacaaactgttcaacactatagtgaaaagctccatgtcctgtccgaccgtgatgtgcgatatattttactctctgagacagatggcaactcagaggtttcctaacgatcctcatgtccagtatagcgctgtgagttcctttgtattcctgcgctttttcgccgtagccgttgtgtcaccccacaccttccaccttaggccgcaccatcctgacgctcagaccatcaggacgctgacccttatctctaagaccattcaaaccctggggagctggggatcgctgagcaaatctaagtccagcttcaaggagaccttcatgtgcgagtttttcaaaatgtttcaagaagaaggatacataatcgctgtcaagaaattcctggatgagatctcttccacagaaaccaaggagtcaagtggaacctcggaaccagtgcatctgaaggaaggggaaatgtacaaacgggcacaaggacgaacacggatcggcaagaaaaactttaaaaagaggtggttttgcctcacttcccgcgagcttacctaccacaagcagccaggatcctgtgtctacgccctcctgtggggcttttcttggttttctgtcaaagtaagcctccccctgatcgttactctggtgaacccattttctaacataacagtggtgtacgggttctctcattag

SEQ ID NO: 202619 - DNA, 2553 bp, synthetic construct
  misc_feature 1..2553: note = Description of Artificial Sequence: Synthetic coding sequence
  source 1..2553: mol_type = other DNA
atggccgccgccgcccccgccgccgccgccgccagcagcgaggccccagccgcctccgcaacagcagagcccgaggccggggatcaggattcacgggaggtccgcgtattacagtcgttgcgaggaaagatctgtgaagcgaaaaacctgttgccttatcttgggccccataaaatgcgtgactgtttttgcaccattaacctggatcaggaagaggtgtaccggacccaggtagttgagaaaagcctgagcccattcttttccgaggaattttattttgaaatcccccgcacctttcagtacctctctttctacgtctatgacaaaaatgttctgcagcgggaccttcggatcgggaaggtggctattaagaaggaggacctgtgcaatcatagcgggaaggagacatggttttcactgcaacctgtcgacagtaattctgaggttcagggaaaagtccacctagaactgaaactgaatgagctgattactgaaaacggcaccgtctgtcagcagctagtggtgcacatcaaggcatgccacggattaccgttaattaatggccaaagttgcgacccgtacgccaccgtaagccttgtcggcccctccagaaatgatcagaagaagactaaagttaagaaaaagacgtccaaccctcagtttaatgagatcttctactttgaggtgactcggagttcttcatacaccaggaagtcccagtttcaggtggaggaagaggacattgagaagctcgaaatacgcatcgacctgtggaataacgggaacctagtccaggacgtcttcctgggcgaaatcaaggtacctgtgaacgtgcttaggacggattcttcccatcaggcctggtatcttctgcagccccgggataacggcaataaatccagtaaaacagatgatctaggctctctgcggttgaacatctgttatactgaggactatgtgctgccatccgaatactacggtcccctgaagacactgctcctcaaaagcccagatgtacagcccatcagcgcatcagccgcctacatcctgagtgagatctgccgagataagaacgacgccgttctgcctctggtccgcttgctcctgcatcatgataagctggtaccgtttgcaacggccgtggctgagttggacctcaaggacactcaggacgccaatactatcttccgagggaactctcttgccactcgctgtctcgacgagatgatgaaaattgtaggcgggcattatttgaaggtgacattgaaacccattctcgatgaaatttgcgattcttccaaatcgtgtgagattgatccaattaagctgaaagagggtgacaacgttgagaacaacaaagagaatcttcgttactacgtggataagctgtttaacaccattgtcaaatcttccatgtcctgccccacagtaatgtgtgatattttctacagccttagacagatggctactcaacggttccccaacgacccccacgtgcagtactctgcagtttcgtcctttgtttttttacgattcttcgcagttgctgtcgtgagtccgcatacattccacttgcgtccccaccatcccgacgcccagaccatacggacactgacgcttattagcaaaactatccagactttaggaagctggggtagtttgagcaagtccaagagctccttcaaggaaacctttatgtgcgagttcttcaaaatgttccaggaggaaggatatataatcgcggttaaaaagtttttggatgagattagttcaaccgagaccaaggagagctcgggaaccagcgaaccggtgcacttgaaggagggggaaatgtataagcgggcgcaggggagaactaggataggcaaaaagaatttcaaaaagagatggttctgtctgacttcgagggagctgacctatcacaagcaacccggctcaaaggatgctatatacacaataccagtgaaaaacattctcgctgttgagaaactggaggagtccagctttaataaaaaaaatatgtttcaggtgattcacacagagaagcccctctatgtgcaagcaaacaactgtgtcgaggccaatgaatggattgacgttctctgtagggtgtcacgctgtaatcagaatagactgagtttttaccatccctccgtttacctgaacggcaactggctctgttgccaggaaaccggcgaaaataccttaggctgcaagccatgcacggctggagtcccagccgacattcaaatcgacatcgatgaagatcgcgagactgagaggatctattccctcttcacattgtcgctcctcaaattgcagaaaatggaggaggcctgcggtacaatcgcagtttaccaggggccccagaaggagcccgatgattatagtaactttgtgatcgaggattccgtcacaaccttcaaaaccatccagcagattaagtcgatcattgagaagctggatgaaccccatgaaaagtatcgtaagaaaagatcttcttctgctaagtatggctccaaggagaacccaatcgtgggaaaagcaagttag

SEQ ID NO: 202620 - DNA, 2505 bp, synthetic construct
  misc_feature 1..2505: note = Description of Artificial Sequence: Synthetic coding sequence
  source 1..2505: mol_type = other DNA
atggccgtggaggacgagggcctgcgggtgttccagagcgtgaagatcaagatcggagaagcgaaaaaccttcctagttatccgggaccttcaaaaatgcgcgattgctactgtacagtgaacctggaccaggaagaggtgtttaggacaaagatagtagagaagtccctgtgtcccttctatggcgaggatttttactgtgaaatccctaggtcctttcggcatcttagtttttacatattcgaccgcgacgtctttaggcgcgatagtattatcggaaaggtcgcgatccagaaagaagacctgcagaaataccacaatcgcgacacctggttccagctacagcatgtcgacgcagattccgaggtccagggaaaggtccacctggaattaaggctgtcagaagtgattacagatacaggggtagtgtgtcacaaactcgcgacgaggatcgtggagtgccaggggctgccaattgtgaacggccagtgcgacccttacgccactgtcactctggccggccccttccggagtgaagccaagaaaactaaagtgaaacggaaaacaaacaacccccagttcgacgaagtattctattttgaggtcaccaggccttgttcttactctaagaagtcacactttgattttgaggaggaagacgtggataagctagagataagagtcgacctgtggaacgcatccaacttgaaattcggggacgaatttcttggtgagctccggatcccgttaaaggtgctgcgtcagtccagcagctacgaagcatggtatttcctgcagccaagagacaacggcagcaaatctttgaagccagacgatctgggatccttgcgactcaatgtggtgtatacggaagaccatgttttctcttccgattactattctcctctcagggaccttctgctcaagtccgccgacgttgagcccgtgtctgctagcgctgcacacatcctgggggaggtctgtcgggaaaagcaggaggccgcagtgcctctcgtccgcttatttctacattacggccgggtggttccattcatctccgcaattgcatccgctgaggtaaagaggactcaggaccctaacacaatttttcgcggcaacagcctagcctccaagtgcatcgatgaaactatgaagctggctggtatgcattatctgcacgtgactttgaagccagcaattgaggaaatctgtcagtcccataagccctgcgagatcgatccagtgaagttgaaggatggcgagaaccttgagaacaatatggagaacttacggcagtacgtcgatagagtgtttcatgctataactgagagcggtgtgtcttgtcccaccgttatgtgtgacatatttttcagccttagagaggctgccgctaagaggttccaggacgacccggatgtccgctacaccgccgtctccagcttcatttttctgaggtttttcgccccggccattctgtctccaaatttgtttcaactcacacctcatcacacagacccccagacatcacgcacgctgacgctgatctctaagacggtgcagaccctggggagcctctcgaagagcaaaagtgcttcgttcaaagagtcatacatggccaccttctatgagttcttcaacgaacagaagtatgccgacgccgtcaaaaactttctagatctgatctcttcttcgggcagacgggatccaaagtctgtggaacagcctatagtgctgaaggagggttttatgatcaaacgagctcagggcagaaagcggttcggaatgaagaatttcaaaaagcggtggtttaggctcacaaaccatgaattcacctaccataaatctaagggtgatcaaccactctacagtatcccaattgagaacatcctcgccgtcgagaagctggaggaggagagcttcaagatgaagaacatgtttcaggttatccaacctgagagggctctgtacatccaagcgaataattgtgttgaagccaaagattggatagacatcttaaccaaggtgagccagtgcaaccagaagcggctgactgtatatcatccttccgcctacctgtctggacattggctttgttgtagagccccttctgactctgcccctggttgctcaccgtgcactggtggtctgcctgcaaacattcaactagatatcgatggcgatagagaaacggaacgtatttatagtctttttaacttatatatgagcaagctggagaagatgcaggaggcatgcggctccaagtcagtctatgacgggccagaacaggaagaatacagtacctttgttattgatgatcctcaggaaacgtacaaaacactcaaacaggtgatagccggggtaggtgctttggaacaagagcatgcccagtacaagcgggataagtttaaaaagaccaaatacggctctcaggagcatccaatcggcgacaaaagctttcagaactacatacgccagcaatcggagacatcaactcacagcatctag

SEQ ID NO: 202621 - DNA, 2409 bp, synthetic construct
  misc_feature 1..2409: note = Description of Artificial Sequence: Synthetic coding sequence
  source 1..2409: mol_type = other DNA
atgcgggactgctactgcaccgtgaacctggaccaggaggaggtgtttaggacgaagatcgtcgagaagtccctgtgcccattttatggagaagacttttactgcgaaatccctagaagctttaggcacctctcattctatatctttgacagggatgtattccggcgagactctatcattggcaaagtggcaattcagaaagaagacttgcagaagtatcacaaccgtgacacatggtttcagctgcagcatgtggatgcagattcagaagtacagggcaaggttcatctggagctgcggttatccgaggttatcacagataccggggtggtttgccataaactagccaccaggatcgttgagtgtcagggcctcccaattgtaaacgggcagtgtgacccctacgcaaccgtgaccctcgccggacctttcagatctgaagcgaagaaaacaaaagtcaagcgaaagactaacaaccctcagtttgacgaggtgttttactttgaagtaacccgaccatgttcatacagcaagaaatctcactttgactttgaggaggaagatgtggataaattggaaatccgggtcgatctatggaacgcctcaaatctcaagttcggtgacgaattcttaggagaactgcgaatacctctgaaggttctgcgccagtctagctcttacgaggcatggtactttcttcagccccgcgacaacggtagtaagtctctgaaacctgatgatttgggatccttgcgcttgaacgtggtatatactgaggaccacgttttcagtagtgactactactctccccttcgcgaccttctactgaaatcagcagatgtcgagccagtgtcggcttcggccgcccacatacttggtgaggtctgccgggagaaacaggaggccgctgtaccactcgtgcgactgttcttacattacggcagagtcgtcccattcatcagcgccatcgcctcagcagaggtgaaacggacccaagatccgaacaccatcttcaggggaaattcactcgcatccaagtgtatcgacgagaccatgaagctggctggcatgcattacctgcatgtgaccctgaagccagccatcgaggaaatttgccagagccataaaccttgcgaaattgaccccgtgaagctcaaagacggcgagaatctggaaaataatatggaaaatttgagacagtatgtggacagggtattccacgcaataactgaaagcggagtcagttgccccaccgtgatgtgcgatatattcttctcgctgcgggaggcagctgctaaaaggtttcaggatgatcccgacgtccgctacaccgccgtgtcctcatttatttttctgcgctttttcgcaccagctatcctgagtccgaatctgttccagctcactcctcatcataccgacccgcagacctcccgcacactgaccctgattagtaaaacagttcagaccctgggaagtctgtccaaaagcaaaagcgcttcgtttaaggaatcttatatggctactttctatgaattttttaatgagcaaaagtacgccgacgcggtgaagaactttttagatttaatcagctccagcggaaggcgtgaccctaagtctgtggagcagcccatcgtccttaaagaggggttcatgataaaaagggcccagggccggaagagattcggaatgaagaattttaagaagcgatggttccgcctgacaaatcatgaatttacataccacaaaagtaagggagaccaacccctgtacagcataccaatcgaaaatatccttgctgtcgagaaactggaggaggagtcgttcaagatgaaaaacatgtttcaagtcatccagcccgagcgtgcattatacatccaggctaataactgcgtggaggccaaagattggatagacatcctgacgaaagtgagtcagtgtaaccaaaaacggctaacagtctatcacccgtccgcctacctctcaggccattggctgtgctgtcgtgctccgtctgacagtgcacctggctgctcaccatgtaccggcggtctccccgccaacatccaactggatattgatggagatcgagaaaccgaacgaatttacagcctattcaacttgtacatgtctaagctcgaaaaaatgcaggaagcctgtgggtcaaagtcagtttatgatgggcccgaacaggaagaatattcaaccttcgttatcgacgatcctcaggagacctataaaactcttaagcaggtgattgctggggtcggggctctggaacaggagcacgcgcaatataagcgagacaagttcaagaaaacaaagtatgggtcgcaagagcaccccatcggagacaagtcttttcaaaactatataaggcagcaatccgaaacatccacccattcgatatag

SEQ ID NO: 202622 - DNA, 399 bp, synthetic construct
  misc_feature 1..399: note = Description of Artificial Sequence: Synthetic coding sequence
  source 1..399: mol_type = other DNA
atggccgtggaggacgagggcctgcgggtgttccagagcgtgaagatcaagatcggggaagcgaagaatcttccatcttaccctggtccatcaaagatgagagattgttactgtacggtcaatttggaccaagaagaggtcttcaggactaagatagtggagaaatccctctgccccttttacggcgaggatttttattgtgagatcccacgcagctttcgccatctgtcattttatatattcgatcgggatgtgtttcgcagggacagcataatcgggcaatctgctccaggtgctgccgccgaacgcggccaccatcggcactggggcagattgccacaggcccgacatacgcatcggcgtgtgcccggccctccccatagggaatgggccatgtag

SEQ ID NO: 202623 - DNA, 2412 bp, synthetic construct
  misc_feature 1..2412: note = Description of Artificial Sequence: Synthetic coding sequence
  source 1..2412: mol_type = other DNA
atggccaagcggagcagcctgtacatccggatcgtggagggcaagaacttacctgctaaagacattacgggctcttcagacccttattgcatcgtgaaagtggataacgagccaattatcagaacagctacagtttggaagacactctgccctttttggggagaggaataccaagtgcacctgccccctactttccatgccgtagccttttacgtcatggatgaggacgctctcagcagagacgatgtgatcgggaaggtatgcttgacccgggacaccatcgcatcccaccctaaggggttctcgggatgggcccacctgacagaggtcgacccggacgaagaggtgcaaggagagattcacttacgattagaggtctggcctggggcccgagcatgccggcttcggtgtagcgtactcgaggcccgcgatctggcccctaaagatcgaaatgggacgtctgacccttttgtacgggttcgatacaaagggaggacgcgtgagacttctatagtcaagaaaagttgttatccgcggtggaatgaaacattcgaatttgaactgcaagagggcgcaatggaggcactctgcgtcgaggcatgggattgggatctcgtgagcaggaacgacttcctgggtaaagtggtcatcgacgtgcagcgactgagggtcgtgcagcaggaagagggctggttcaggctgcagcctgatcaatctaaatcccggcggcacgatgaaggaaacctgggatccctgcagctcgaggtgcgcctgcgtgatgagaccgtcctgccgtcaagctattaccaacccctggtgcatctcctctgccatgaggtgaagctcggcatgcagggtcccggacagcttattccgcttatcgaagaaacgacgagtactgagtgtagacaggatgtggctaccaatctgctaaagcttttcctgggtcagggcctcgcgaaagatttcttggatctgctgtttcagctggagctgagtcggactagtgagactaatactctgtttcgatccaactcactggcttccaagagcatggagtcattcctgaaggttgccggaatgcagtacttgcacggcgttctgggccccattatcaacaaagtgtttgaagagaaaaagtacgttgagctggacccgtccaaggttgaagtgaaagacgtcggctgttccggcctgcaccgccctcagaccgaagccgaggttctggagcagtccgcccagaccctgcgcgcccatctcggcgctcttctcagtgccctatccagatccgtccgggcgtgtcccgccgtagtccgcgcgactttccggcaactgttccgtagggtgcgggagaggttcccaggtgcccaacacgagaatgtgcctttcatcgccgtgacttcctttctctgcttacgcttcttctcccccgcaatcatgagccctaagcttttccaccttcgcgagcggcatgccgacgcccggacatccagaaccctgcttcttttggccaaagctgtgcagaatgtaggcaacatggatacgcctgctagcagggccaaggaggcatggatggaaccccttcagcctacagtccgtcaaggggtggcccaactgaaagattttattacaaagctcgtggacatcgaggagaaggacgagctggacttgcaacggacactgtctctgcaggcgccccctgtaaaagaaggccccttgtttatccacaggacaaagggaaaagggccattgatgagctcatcctttaaaaagttgtatttcagtctgacaaccgaggccctctcattcgcaaaaaccccgtcttccaagaaaagcgcgctgatcaaactggcaaacattagggctgcagagaaggtggaagaaaagtccttcggaggcagccatgtgatgcaagtgatctatacggacgatgcagggcgtcctcagaccgcctatctccagtgtaaatgcgtgaacgagctcaatcagtggctctctgctctgagaaaagtgtccattaataataccgggttgctcggaagttaccacccaggggtattcaggggtgataagtggagctgttgccaccagaaggaaaaaaccggccaggggtgcgataaaactaggagtagagtgaccctgcaggagtggaatgacccattagaccatgatttagaagctcagctaatttaccggcacctcctgggtgtggaagccatgctgtgggaaaggcatcgggagctatccggaggtgcagaggctgggaccgtaccaacttctccgggcaaggtccccgaagacagcttagcccgcctgctgagggtgctgcaggacttaagggaggcacattcttccagtcctgctggatctcccccctccgagccaaactgtcttctggaactccaaacctag

SEQ ID NO: 202624 - DNA, 2274 bp, synthetic construct
  misc_feature 1..2274: note = Description of Artificial Sequence: Synthetic coding sequence
  source 1..2274: mol_type = other DNA
atggccaagcggagcagcctgtacatccggatcgtggagggcaagaaccttcctgctaaggatatcactggctcttccgatccatactgtatcgtgaaggttgataacgaacctattatccgaaccgcgacagtttggaagaccctctgccctttttggggtgaggagtatcaggtgcatttgcccccaacattccatgctgtggcattctacgttatggatgaggatgccctgtcccgggatgacgtgattggaaaggtctgcctgaccagagacaccattgcctctcaccccaagggcttttccggctgggctcatctgaccgaggttgaccccgacgaggaagtgcagggagaaatccatctcaggcttgaagtatggcccggcgcacgggcctgtaggctcagatgctccgtgctggaggctcgcgacctcgccccaaaggaccgcaacggcacctccgatccctttgtgagagttcgctataagggacggacccgcgaaacatcaattgtgaaaaaatcatgctatcctcggtggaacgagacatttgagttcgagctccaagaaggagctatggaggccctgtgcgtagaagcttgggattgggacttggtgtcacggaatgacttcctgggaaaggtcgtgatagatgtgcaacggctgagggtggtgcagcaagaagagggctggtttaggttacagcccgatcagtctaagtcacggcggcacgatgagggaaacctcggtagtctgcaactggaagtgcggctccgcgacgagactgtgctcccaagctcgtactaccagccactggtccaccttctttgccacgaggtcaagctcggtatgcaggggcccggccagctcattccgctgattgaggagacaacttcaaccgagtgtaggcaggatgtggccactaatctcttaaagctgttcctaggacaaggactggccaaggattttttggaccttctgtttcagctcgagctgagtcggacttcagagacaaacactctgttccgatcaaacagcctcgcctcaaagtctatggaatccttcctaaaggtagcgggcatgcagtacctgcatggagtattaggccctatcatcaacaaggttttcgaggaaaagaagtatgtagagctcgacccttccaaagtggaggtgaaggacgtggggtgctctggtctgcatagaccccagacagaagcggaagtgctcgaacagtccgcacagacacttcgagcccatctgggtgccctgttgtccgcgttaagtaggtcagtgcgagcttgtcccgcagttgtccgcgctaccttccgccagcttttccgtagggtcagagaaaggttccctggagcccagcacgagaacgtgcctttcattgccgtgaccagctttttgtgcctgagattcttcagcccagccatcatgagtcccaagctctttcacctgcgggaaagacacgctgatgccaggacatccaggacattattattactggctaaggcagtacagaacgtaggtaatatggatacccctgcatcccgggctaaagaggcttggatggagccactgcagccaaccgtgcggcagggggtagcccagctaaaggactttataacgaagttagtggacattgaggaaaaagacgaactggatctgcagagaaccctttccttacaagctcccccagtcaaggagggccctctcttcatccatagaacaaaggggaagggcccactaatgtcatctagctttaaaaagctttacttctcgctcacgaccgaggcacttagcttcgcaaagactcctagttccaagtgtgtgaatgaactgaatcagtggctttccgcattgcgcaaagtgagcatcaacaataccgggttgcttggaagctatcacccgggcgtgtttaggggcgataagtggtcctgttgccatcagaaagagaagacaggacaaggttgcgataagacccggagccgtgttacccttcaggaatggaatgatcccctcgatcacgatttggaggctcaattgatatatcgtcatttactgggcgtcgaggctatgttgtgggaacggcacagagaactcagtggtggagctgaagctggcaccgttcccacctcaccaggaaaggttcccgaggactcccttgccagactgttgagagttctccaggacctgcgcgaggctcactcgagcagtcccgccggaagccccccctccgagccgaactgcctgctggaactccagacctag

SEQ ID NO: 202625 - DNA, 2196 bp, synthetic construct
  misc_feature 1..2196: note = Description of Artificial Sequence: Synthetic coding sequence
  source 1..2196: mol_type = other DNA
atggacgaggacgccctgagccgggacgacgtgatcggcaaggtgtgtttgacccgggacaccattgcttcccaccctaagggatttagtggttgggctcacctgaccgaggttgaccctgacgaggaggtccagggggagatccatctgagactggaagtgtggccaggtgcaagagcctgtcgattgaggtgctcggtactggaagcacgggacctcgcacccaaggaccgcaatggaacctccgacccatttgtccgagtacggtacaaaggccgtacgcgcgagacctctattgtaaagaaaagttgttatccacggtggaatgagactttcgagtttgagttgcaggagggcgcgatggaggcgctgtgtgtcgaggcatgggactgggatcttgttagtcgtaacgacttcctgggcaaagttgtcatagacgttcagcgcttgcgcgtggtgcagcaagaggagggatggtttagactgcagcccgaccagagcaagtccagaaggcatgacgagggtaatctgggatccctccagctcgaggttagactccgagacgaaacagtgctgccctccagctactaccaacctttggtgcacttgctctgccatgaggtgaaactgggtatgcagggccccggtcaactaatccccctgattgaggagacgacttcaacagagtgccgccaggatgtcgcaacgaaccttctgaagctgttcctcggacaggggctggcgaaggattttctggacctgctgtttcagctagaactgagccgaactagcgagaccaacaccctttttagatccaactctctcgcctcgaagagcatggaaagctttctcaaggtcgcagggatgcagtatctccacggcgtcttaggacccatcatcaacaaggtgttcgaagaaaagaaatatgttgagttggatcctagcaaagttgaagtcaaagacgtggggtgtagtggacttcatcgcccacaaaccgaagccgaagtcctggagcagagcgctcagactctgcgtgcccacttgggcgcgctgctgtctgcgctgtcacgttccgtgagagcctgccccgcagtggtgcgggcaacatttcgtcagctttttcggcgtgtgcgagaacgatttccaggagcacagcatgagaacgtgcctttcattgcggtcacctcatttttgtgcttgaggttcttcagccctgccattatgagtcccaagcttttccaccttagggaacgacacgctgatgcaagaacttcccgaaccctactgttgctggccaaggccgtgcagaacgtgggtaatatggacactccggcttcaagggctaaggaagcctggatggagcccctgcagcctacggtgaggcagggcgtggcccagctgaaggacttcattacgaagctggttgacatcgaagaaaaagatgagctcgatctccaacgaactctctcccttcaggccccacctgtaaaagaggggcctctgttcatccatcggactaagggtaagggtcccttaatgtcatcttccttcaaaaagctgtacttctcgctgactacagaggccctaagtttcgcaaagactccctcatcaaagaagagtgcactgatcaaactggcaaacataagggctgctgagaaagtcgaagaaaagtccttcggaggttctcatgtgatgcaggtgatttacactgatgacgcggggagaccacagacagcttacctccagtgcaagtgtgtaaacgaactgaaccagtggctgtctgctttgcgtaaagtgtcaattaataacaccggcctcctcggatcataccacccaggcgtgttcaggggggacaagtggtcttgctgccaccagaaagaaaaaacagggcagggatgcgataaaacacgcagccgggtaacactgcaggaatggaatgacccgctcgaccacgacctcgaggcacaacttatttatagacacctgctcggagtcgaagctatgctctgggaacgtcatagagagttgagcggcggcgcggaagccggcactgtccccaccagtccggggaaggtgccagaggactctttagcccgcctgctcagggtcttgcaagacctgagagaagcccactcaagttcaccagccggaagccccccctccgagcctaattgtcttctggaactgcagacctag

SEQ ID NO: 202626 - DNA, 2415 bp, synthetic construct
  misc_feature 1..2415: note = Description of Artificial Sequence: Synthetic coding sequence
  source 1..2415: mol_type = other DNA
atggccaagagcagcagcctgaacgtgcgggtggtggagggccgggccttgcccgccaaggacgtgagtggttcaagcgacccatactgcctcgtaaaggtcgatgacgaggtggtggcacggacggcaacagtctggcgtagtctcggtccgttttggggcgaggaatacactgtgcatctcccgctggattttcaccagttggcgttctatgttctggacgaggatactgttggacacgatgatattatcggtaagatcagcctcagccgagaggcaatcaccgctgacccccgcggcattgatagctggattaacttatccagggtcgaccctgatgctgaagttcagggcgagatttgcctgtcagttcaaatgttggaagatggccagggaagatgtctacggtgtcatgtcctgcaagcgagggacctcgctcccagggatatttccggcacgtctgaccctttcgcaagagtcttttggggttcccagagtctggagacgagcacaattaagaaaaccaggttcccgcattgggacgaggtcctcgaactgcgagaaatgccgggtgcgccatctccattgcgtgtggagttatgggattgggacatggttggcaagaatgatttccttggcatggtggaatttagccccaagaccctgcagcagaaacctcccaaggggtggttcagactccttccgtttccccgggcagaagaagatagtggcggcaatttgggcgcccttagggtgaaggtacgactgattgaagaccgcgtgttgccttctcagtgctatcaaccactcatggagctcctgatggagagcgtccaaggcccggcagaggaagacaccgccagtccacttgccctgttagaagagctgactttgggtgactgcaggcaggacctggctacgaagctggtgaagctgtttctggggagaggacttgcaggtcggttcctagattacctcacaaggcgtgaagtggctaggaccatggaccctaacacactgttcaggtccaacagtcttgcaagcaagagtatggagcagttcatgaaactggtgggaatgccctatctccatgaggtgttgaaaccagtaataagtagggtgttcgaagaaaagaaatatatggagctcgacccttgtaaaatggaccttggaagaactagacggatctcttttaagggcgctttaagcgaggagcaaatgcgcgagaccagccttggactactcaccggctaccttggccccatcgtcgacgccatagtgggatctgtgggacggtgcccccccgcaatgcggctcgccttcaaacagctccaccgtagggttgaagaacggtttcctcaagctgagcaccaagacgtcaagtacctggcaatctccgggttcctgttccttagatttttcgccccggctattttaacgccaaaactgttcgaccttagggaccagcacgcagacccacagacatccagatctctcctgctgctggctaaggcggttcagtctatcggcaacctgggccagcagctgggccaggggaaggagttatggatggctccccttcacccctttctccttcagtgtgtatccagagttcgggatttcctggatagactcgtggacgtcgatggagatgaggcaggggtccctgcaagggctctcttccccccctctgccatcgtgagagagggttatctgctcaaacgcaaggaagaaccagcagggttggcaacccgttttgcattcaaaaagagatacgtctggctgtccggagagacgctgagcttttccaaaagcccagaatggcagatgtgtcactccatccccgtttcgcatatccgcgccgtggaacgggttgatgaaggggccttccagttgccccacgttatgcaggtagtcactcaggatggcacaggggcgttgcacacaacttatctgcaatgtaaaaacgtaaatgaactgaatcagtggttgagcgccctgaggaaggctagcgccccgaaccctaacaagctggctgcatgtcaccctggcgccttccgctccgctcgttggacttgctgtttacaggcagagcggtcagccgccgggtgcagccggacccacagtgccgtcactttgggagactggtccgatcccctggacccggatgccgaggcccaaaccgtgtacaggcagcttctcctgggccgggaccaactcaggctaaaactgctcgaggatagcaacatggatacaaccctagaagccgacacaggagcctgtcctgaggtcctcgctagacagcgggccgccaccgcaagactgctagaagttctagctgacctggaccgagcccacgaggaattccaacaacaggagagagggaaggcagcactcgggccattgggaccctag

SEQ ID NO: 202627 - DNA, 2331 bp, synthetic construct
  misc_feature 1..2331: note = Description of Artificial Sequence: Synthetic coding sequence
  source 1..2331: mol_type = other DNA
atggccaagagcagcagcctgaacgtgcgggtggtggagggccgggctctaccagcaaaggatgtgagcgggtcaagcgacccctattgtctggttaaagtggatgatgaggtcgttgctcggactgctacagtgtggcgatccctgggcccgttctggggcgaggagtatactgtgcacctccccctcgacttccaccagctggctttctatgttctcgatgaagacaccgtcggtcacgatgatatcatcggtaaaatcagtcttagcagggaggccattacggctgatcctcgcgggatcgactcatggataaatctatccagggttgatcccgatgccgaagtgcagggtgagatttgtttaagcgtgcagatgctggaggacgggcagggacgctgtctcagatgtcacgtactgcaggcccgcgatctcgcccccagggatataagtggtacctcagaccctttcgccagagtcttctggggtagtcaaagtctggagaccagcacaatcaagaaaacaagatttccacattgggatgaagtcctcgagctacgggaaatgccaggcgccccttcgccccttagagtcgagttgtgggactgggatatggtgggcaaaaacgattttctggggatggtggagttcagcccaaaaaccctgcagcaaaaaccacccaaaggctggtttcggctgttgccatttccacgcgccgaagaagactcaggcggaaacctcggggcgttgagagtgaaagtgcggctaattgaagatcgagtgctaccctcccagtgttatcaacctcttatggagctgctcatggaatccgtccagggccctgccgaggaggataccgcttcacccctagctctcttagaagagctcacactgggcgactgtcggcaagatttagctaccaagttagtgaagctattcctcgggagaggacttgccgggcggttcctggactacctgacaaggcgtgaagtcgcccgtactatggatcccaacacactattcaggagtaattctttagcatcgaaatctatggagcagtttatgaagttggtgggaatgccctacttacatgaggtgcttaaaccggtgattagccgtgtattcgaggagaaaaagtacatggagttggacccatgcaaaatggacctggggaggacaaggcgcatcagcttcaagggggccctgtctgaagaacagatgagagagacctcattggggctactgacgggatatctgggcccaattgtcgacgcaatcgtggggtcggtcgggcggtgcccaccagccatgaggctggcgttcaaacagctgcatcgccgggtagaggagcggttcccacaagcggagcaccaggacgtaaaatatctggcaatatctgggttcctgtttctgcgcttcttcgctcccgcaattctcacaccgaagcttttcgacctccgcgatcagcatgcagatcctcagacttcacgttcactgctgctcctggcaaaagccgtgcagtccataggcaacctgggccagcagcttggccagggcaaggaactctggatggctcctttacaccctttcctcctgcagtgtgtgtcacgtgtccgtgatttcctggaccggcttgtggacgttgatggcgacgaggccggagtgcctgccagagctctattcccaccctctgccattgtccgagagggctatctcctcaagcgcaaagaagagccggcaggattggccacgagattcgcgttcaagaaacgttatgtatggttatctggcgagactctgagcttcagtaaaagccccgagtggcaggttgtaactcaagatgggactggggcgctacacacaacctaccttcagtgtaagaatgtgaatgaactaaaccagtggctttctgccctgcggaaggcttccgccccaaatcctaacaagttggccgcttgtcaccccggggcctttagatcggcgagatggacttgctgtctgcaagccgagcgctcggctgcagggtgtagccgcacccactctgcagtgaccctgggcgattggtcagacccgttggacccggacgcagaagctcagactgtctacagacagctactcctggggcgtgaccagctcagattaaaattgttagaggactcaaatatggataccaccctcgaggccgacaccggggcgtgcccggaggtgctggctaggcagcgcgccgccacagcgagacttttggaagtgcttgcagacttagacagggcccacgaggaattccagcagcaggaacgggggaaagccgcattaggacctctcgggccttag

SEQ ID NO: 202628 - DNA, 2421 bp, synthetic construct
  misc_feature 1..2421: note = Description of Artificial Sequence: Synthetic coding sequence
  source 1..2421: mol_type = other DNA
atggccaagagcagcagcctgaacgtgcgggtggtggagggccgggcccttcctgcaaaggacgtcagtggctctagcgatccttactgcctcgtaaaagtcgacgacgaagtagtggcaaggacggccactgtgtggcgttcacttggccccttttggggcgaggaatataccgttcatcttccgctggacttccaccagctggctttctacgtattggacgaagatacagtgggtcacgacgatatcatcggcaagataagcctgtcccgcgaggctattacggcagacccgcgcgggattgattcctggataaacctgagccgtgtggaccctgacgcagaggtgcagggcgagatttgtctgtccgtgcagatgttggaggacggccagggccgctgcttgcggtgtcacgtgctacaggcacgagatctggccccgcgcgatataagcggtacatctgatcctttcgctcgggtgttctgggggtcccagtcccttgagacatctacgattaagaagacacggtttccccactgggacgaggtgttggagctgcgcgaaatgcccggagcgccgtcccccctgagggtagagctgtgggactgggatatggtcggcaaaaatgattttctcggtatggttgagtttagtcctaaaactttgcagcaaaaaccccctaagggttggtttcggctgctgccatttccacgggccgaggaggactctggtggtaatctgggcgcattacgggtgaaagtaaggttgatcgaagacagagtactgccctcacagtgctaccagccactcatggagttgctgatggaatcagtccaaggccctgcggaagaggatacagcaagtcctctggctctgttggaggaactgacacttggtgattgccgacaagacttggccaccaagctcgtcaaattgttcctgggtaggggtttggccggtagatttctcgattacctcacacgacgagaagtggcccggacaatggacccaaacaccttgtttcggagcaactccctggcttcaaaatcaatggagcagttcatgaagttagtcgggatgccttacttgcacgaagtccttaaaccagtcatctccagggtgttcgaggaaaagaagtacatggaattggacccatgcaaaatggatctcggaaggacgagaaggatcagctttaaaggagcactgtcagaagagcagatgcgcgagacctctctgggccttttaaccgggtatctggggcctatcgtcgacgcaattgtcgggagtgttggccgctgcccccctgccatgcggcttgcattcaaacagcttcataggagagtggaggagaggttcccccaggctgaacatcagcaggacgtcaagtatttggccattagcggattcctgtttctgcgcttttttgcccccgccatcctaacccccaagctgtttgacctgcgagatcaacatgctgatccccagacaagccgttctctgctattgcttgccaaagcagtacagagtattggcaacctgggccaacagctaggtcagggaaaagaactctggatggcgccgctgcaccctttcttactgcagtgcgtatcaagagtcagagatttcctagacaggctagttgacgtcgatggcgacgaggaagccggagttccagcacgagcactgtttcccccctctgccatagttcgggaggggtatctcctgaagcgtaaggaggaacccgccgggctggccacacggttcgcctttaagaagcgttacgtctggttgtccggagagacgctttcattttcaaaatctccagagtggcagatgtgtcattcaatccctgtctcacatataagagctgtggagagggtggatgagggagccttccagctacctcacgtaatgcaggtggtgacccaagatggcactggcgccctccacacaacatatctccagtgcaagaacgtaaacgaattaaaccagtggctgagcgcacttaggaaagcctcagctcccaatcccaacaagctggccgcctgtcaccctggggcttttcggagcgcccgctggacctgctgccttcaggctgagcgaagtgccgctgggtgctcaaggacccattctgcagttactctgggagactggtcggacccgttggacccagacgcagaggcccagactgtctaccgtcagttgttactgggcagggaccagttgaggctaaagcttctcgaagactcaaacatggacacaacattggaggctgacaccggagcatgcccagaggtgttggcccgccagagagcggctacggcccggctgctggaggtcttagctgatttggatcgcgctcacgaggagtttcaacaacaagagagaggtaaagcagcccttggaccactggggccgtag

SEQ ID NO: 202629 - DNA, 3714 bp, synthetic construct
  misc_feature 1..3714: note = Description of Artificial Sequence: Synthetic coding sequence
  source 1..3714: mol_type = other DNA
atgcagaagagcgtgcggtacaacgagggccacgccctgtacctggcttttctggccaggaaggagggtacaaaacgtggcttcctgtcaaaaaaaaccgctgaagcctcgcgctggcatgagaaatggttcgcactgtaccagaatgtactgttttacttcgaaggtgaacagtcctgtcggcccgccgggatgtacctgttggagggatgtagttgcgagaggactccggccccaccacgcgcaggcgccgggcagggcggagtccgagacgccctggacaagcagtattattttacagtgttgttcggccacgaaggtcagaagcccctggaactgcgttgcgaggaggagcaggatggcaaagagtggatggaggccatacaccaagcctcctacgccgacatcttgattgaacgggaagttttaatgcagaagtatattcatcttgtccagatcgttgagaccgaaaagatcgccgccaaccaattacggcaccagctggaagatcaggataccgagatcgagcggctgaaatcagagattatcgctcttaataagaccaaagagaggatgagaccgtaccagtcgaatcaggaagatgaagaccccgacataaagaaaattaaaaaggtgcagtcctttatgcgtggctggctgtgccgacggaaatggaaaactattgtccaagattatatctgttcaccccacgccgagagtatgaggaaacggaaccagatagtctttacaatggtggaggcagaatccgagtacgtgcaccagttgtacatcctggtcaatggatttctgcgccctctgaggatggcggccagtagcaagaaaccacctatatcacacgacgacgtttcgagcatatttttaaacagtgagactatcatgttcttacatgaaattttccatcagggcttgaaagccaggatcgcgaattggccaaccttgatcttagcggacttattcgacatcctgttgccaatgctgaatatttaccaggaatttgtgaggaatcatcagtactctctgcaggtccttgccaactgcaagcaaaatcgcgacttcgataagcttctgaagcaatatgaggctaaccctgcctgtgagggacggatgctggaaacatttctgacctatcctatgttccagatccctcgctacataattactctgcacgagctgttggctcacacaccacatgagcacgtggaaagaaagagtttagaatttgccaaaagtaagctcgaggagctctccagggtcatgcatgatgaagtgtccgacaccgagaacatccgaaaaaatctggctatcgaacgaatgatagtggagggctgcgacatactgttagacacctcccaaacattcatccgccagggtagcctgatccaggtcccatcagttgagagaggcaaactttctaaagtgaggctcggttctctgagcctgaaaaaggaaggagaacgtcaatgctttttatttaccaagcacttcctgatatgtactcgttcaagcggaggcaagctacacctcctcaaaacggggggcgtgctcagtctgatcgattgtaccctcatcgaagaacccgacgcctctgatgacgattcaaagggttctgggcaggtgtttggtcatttagactttaagatcgtcgtggagccaccagatgcagccgctttcacagtggttctcctggcaccttctcggcaggaaaaggcggcctggatgagcgatatttctcagtgcgtggataacattaggtgcaacggcttaatgaccatcgtttttgaggaaaactcaaaggttacagtgcctcacatgatcaaaagtgacgcccggctccataaggatgacaccgacatctgcttttccaagacgttaaattcctgcaaggtaccccagataaggtacgcctcagtggagaggcttctcgagcggctgacggatctccgctttctctcaatcgacttcttaaacacatttctgcacacatatcggatctttaccacggctgccgtggtactcgggaaactgtccgacatttataaacgcccctttacctcgatccccgtgcggtccttagaactgttctttgcaacaagccaaaacaataggggtgagcacctggtggatggaaaaagtccacgcctgtgtagaaagttctcaagtcctcccccactggctgtttcccggaccagctctcccgtgcgcgctaggaaattgagtcttacatcccctctgaactctaaaatcggagcactggatttaacaacgtcttctagtccgacaaccacaacacagtcaccagccgcatcccctcctccgcacaccgggcagatcccactcgatctttcaaggggactgtcgtcaccagaacagtctccaggcaccgtcgaggagaatgtggacaacccaagagtcgacctgtgtaacaagttaaagcggagcattcagaaagcagtactggagtccgctcctgccgatcgcgccggagttgagtccagcccagcggctgacaccaccgagctgtccccttgtagatcaccgagcacccccaggcatctgcggtaccgccagcccggagggcagacagctgacaacgcgcactgctcagtctcaccagcctccgcattcgctattgctaccgctgccgccgggcatggatcccctccaggattcaataataccgagcgcacctgcgataaagaatttattattcgacgtaccgccaccaaccgtgttttgaacgtgctcaggcactgggtgagcaaacacgcccaggacttcgagctgaacaacgagctcaaaatgaacgttcttaatttgcttgaagaagtcttgcgcgaccctgatctcctacctcaagaaaggaaggccgctgccaatattttgagggccctgtcccaagacgaccaggatgacattcacctgaagctcgaggatattattcaaatgaccgattgtatgaaagcagaatgtttcgaaagtctgagtgccatggaattagctgaacagatcactctactcgaccatgtaatattccgaagcatcccttacgaagaatttctggggcagggatggatgaaactcgacaaaaatgagcgcacaccttatataatgaagacttcccagcattttaatgacatgagcaacctggtcgcctctcaaattatgaattacgcagacgtgagctcaagagccaatgcaatcgaaaagtgggtagccgttgctgacatatgccgatgcctgcacaactataatggagttctggagatcacgagcgcgctgaacaggtccgcaatctaccggttgaagaagacctgggccaaagtttccaagcaaacaaaggctctgatggacaaactgcaaaaaaccgtgagcagtgagggacgttttaagaacctgagggaaaccctgaaaaattgcaacccccctgctgtaccctatctgggtatgtatctaactgacctggctttcattgaggaggggactcccaattttactgaggagggcctggtgaacttcagcaaaatgaggatgattagccacatcattagagaaatcaggcagttccagcagacgagctatcgcattgaccatcagcccaaggtcgctcaatatctgctcgacaaggacctcattatcgacgaagacaccctgtatgaactgagtttaaaaattgaacctcgcctccccgcctag

SEQ ID NO: 202630 - DNA, 4431 bp, synthetic construct
  misc_feature 1..4431: note = Description of Artificial Sequence: Synthetic coding sequence
  source 1..4431: mol_type = other DNA
atgaccagcagcagccccgccggcctggagggcagcgacctgagctccattaacactatgatgtccgcggtgatgagcgtgggaaaagtgacggagaacggcggatcgccccagggtatcaaatcgccaagcaaacctccgggtcctaaccggatcggccgtcggaaccaggaaactaaagaggaaaagtcaagctataactgcccactctgtgaaaagatttgcactacccagcaccagctcacaatgcacatcagacagcacaacaccgatactggcggggccgatcactcttgttcaatctgcggcaaatcgttatcctccgcaagcagtctggacaggcatatgctagttcactccggcgaaagaccttacaagtgcactgtctgcggacagtcctttactaccaatggcaacatgcacagacacatgaagatacacgagaaggacccaaatagtgctaccgccacagcacctccaagccctctcaagcggcgcaggttgagctcaaagcgaaaattgtctcacgacgcagagagcgagagagaggatccggctccagccaaaaaaatggttgaagacgggcagtctggggacctggagaagaaggcggacgaggtgtttcactgccctgtgtgtttcaaggaatttgtgtgtaagtatggactggagacccacatggaaacccattcagataatcccttgagatgcgacatttgctgcgtgacgtttcggacacatagaggcctgctccgacacaacgcgttggttcacaagcagctgcctagagatgccatgggaaggccgtttatccagaacaacccttccattcctgccgggtttcatgacctcggatttaccgatttctcttgtaggaaatttccacgtatctcacaagcctggtgcgagactaatctaagaaggtgcatttcagagcagcatcgatttgtgtgcgacacttgcgacaaagcatttcctatgctgtgctccctggccctgcacaaacagacacacgtcgctgctgaccagggacaagagaagccccaggccactccactgccgggagacgctctggaccagaagggattcctcgctctgctcggccttcagcatactaaggacgtcaggccagcgccggctgaggagccactgcctgatgacaaccaagccattcaacttcagaccctgaaatgccagttgccccaggatccaggatgcacaaacctcctatccttatccccgtttgaagccgcatccttgggggggagcctgactgtgctccccgctacgaaagacagcatcaagcacctcagccttcaaccctttcagaaggggtttatcatccaaccagactcaagcattgtggtcaagcctatatccggtgaaagtgccatagaacttgccgacatccagcagatcttgaagatggcagcatcagcacccccacagatatcactcccccctttttccaaagcgcctgccgctcctctgcaggccatatttaagcacatgcctccattaaaacctaagcctctggtcactcctaggaccgtcgttgcaacctcgactccacctcctcttatcaatgcgcaacaggctagcccaggttgcatctccccatctcttccgcctccccctctgaagctgctaaaaggcagcgtggaagctgcctccaatgcccacctgctgcagtctaagagcggaactcagccacacgcagcaacgaggctttcactgcaacagcctcgcgccgagctgcccggtcagccagagatgaagactcagcttgaacaggatagtattatagaagcactgctacctctgagcatggaagccaaaattaaacaggagataacagagggggaactcaaggccttcatgactgccccggggggaaaaaagacccccgcaatgaggaaagtgctctacccctgtcgcttctgcaatcaggtgtttgccttttccggcgtcctgagagcccatgtgaggtcccacctgggcatatccccgtatcagtgtaacatctgcgattatatcgccgccgataaggcagctctgataaggcaccttcggacacattccggggaaagaccgtacatctgcaaaatatgtcattaccctttcacggtgaaggctaattgcgagaggcatttgaggaaaaaacacttaaaagctacacgaaaggatatcgaaaagaatatagaatacgtgagctccagtgctgcggagctcgtcgacgctttctgcgcacccgatacagtgtgccgcctttgcggagaggatctcaagcattatcgggccctcaggatccacatgagaacccactgtggtaggggactgggcggcgggcacaagggcaggaagccgtttgaatgtaaagagtgcagtgccgctttcgctgctaagcgtaattgtatccatcatatcctgaaacaacacctgcacgtgcctgagcaggacattgagagttacgtgttagctgctgacggactcggtccagccgaggcccccgcggctgaggcaagtggtcggggcgaagactccggctgcgcagcactcggggattgcaaaccactgaccgcatttctggagcctcagaatggattccttcaccgaggtccaacccagcctccaccaccccatgtctccattaagctcgaaccagcctcctcatttgccgtggatttcaatgagccactcgatttttcccagaagggcttagcactggttcaggtgaagcaggagaatatcagctttctttcaccttccagtctggtaccttatgattgttccatggagcccatcgacctctcaatccctaaaaatttccggaagggtgacaaggatctggcaacaccatctgaagcaaagaagcctgaagaggaagctggctcaagtgagcaaccctccccgtgcccagctcccgggccgtccctcccagtcactctcgggccatctggcatactcgagtcacccatggcacccgcgccggctgctactcccgagcccccggcccagcccctgcaaggaccagtgcagctggccgtgcccatttattcttcagcgttagtctcgtctccaccactcgtcggcagctccgcactcctgtccggcacagcactgctgaggccactgagacccaaaccccccttgctgctccctaaacctcctgtgaccgaggaattgccacccctggcatccatcgctcagattatttcgagcgtgtccagcgcacccaccttgcttaagacaaaggtcgctgacccaggccccgcttccacaggctctaataccacggctagtgactcactgggcggatccgttcctaaagccgcaacaacagcgaccccagctgctaccaccagtcccaaggaatcttcagagccgccagcgcctgcatctagtcctgaagctgcttcacccaccgaacaggggcccgctgggactagcaaaaaaagaggtcggaaaagaggaatgagatcgaggcccagagccaattcaggcggcgtagacctagactcaagcggagagtttgccagcatagagaagatgcttgctaccaccgatacgaacaagttctccccttttttgcagactgccgaagacaatacacaggatgaagtggctggggcccctgccgatcatcacgggccatctgacgaggagcagggaagcccccccgaggataaattactcagagcaaaaaggaattcctatacaaattgcctccagaaaattacttgcccgcattgtcctagagtcttcccatgggcgagctccctgcagcgtcacatgctaacccacaccggccagaaacccttcccctgccagaaatgtgatgcttttttcagtactaagagcaattgtgaacggcaccaacttcgaaagcacggcgttacaacatgtagcctccgccgtaatggtcttatcccacagagcaaggagtctgacgtgggatcacatgattctacgggcgagagaccttacaagtgtcagacatgcgaacgcaccttcaccctgaaacattctctggtgcgtcatcagaggatccaccaaaaggctaggcatgctaagcaccatggaaaagacagtgataaggaggaacgaggcgaggaagacagcgaaaatgagtctacccacagcgggaacaacgccgtgagcgagaatgaggccgagttggcaccgaacgcgagtaaccacatggccgttacccggtctaggaaggaaggcctggctagcgccaccaaggactgcagtcatcgcgaggagaaggtgaccgctggttggccttctgaacctggtcagggtgaccttaaccctgagagcccagctgccctcggacaggacctccttgaacctcgcagtaaaaggcctgcccacccaatccttgccacagctgatggagcttcccagctggtcggaatggagtag

SEQ ID NO: 202631 - DNA, 5064 bp, synthetic construct
  misc_feature 1..5064: note = Description of Artificial Sequence: Synthetic coding sequence
  source 1..5064: mol_type = other DNA
atgaccagcagcagccccgccggcctggagggcagcgacctgagcagcatcaacactatgatgtccgccgtgatgtcagtgggcaaggtgactgaaaacgggggttcaccccaaggcatcaaatccccctctaaacctccggggcctaacagaatcggccgaaggaatcaggaaaccaaggaggagaagtcatcatataattgtcccctgtgtgagaagatatgtaccactcagcaccaactgacaatgcatatccgccagcacaatacagacacaggtggggcagatcactcctgcagtatttgtgggaaatcattatcctccgcttcttccctcgacagacacatgctcgtccactccggcgagaggccttataagtgcaccgtgtgcgggcagagctttacaaccaatggaaacatgcatcggcacatgaagattcatgaaaaagacccaaattcggcgacagctaccgcgccgccttcaccccttaagagacgccggctaagttcaaaaaggaaattaagccacgacgctgaatccgaacgcgaagaccctgcacccgcgaagaaaatggtagaggatggccagtctggagatctggagaaaaaagctgacgaggtgtttcactgtcctgtatgcttcaaagagtttgtttgcaagtatggcctcgagactcatatggaaacccatagcgataaccctctgcggtgtgacatctgctgcgtgacattcaggacacataggggtttgctgcggcacaacgccctagttcataaacagctgccacgcgacgcaatgggccgccccttcattcagaacaacccctctataccagccggcttccacgatttaggattcaccgattttagctgccgtaagttcccccgaataagccaggcttggtgtgaaacaaaccttagaagatgtatcagtgagcagcatagatttgtctgcgatacatgtgataaagccttcccgatgttgtgttcactggcactccataaacagactcatgtcgccgccgatcaggggcaagaaaagccgcaggccactcctctgccaggagatgctctcgatcagaaaggattcctcgccctgctgggcctgcagcacactaaagacgtgcgtcccgcccccgccgaagaaccacttccagacgataaccaagcgattcagctccagacgttgaaatgtcagcttcctcaggacccagggtgcacaaatcttctctctctgtccccctttgaagctgcctcactaggcggcagtctgacggtgctccccgctaccaaggatagcattaagcacctgagcctgcagccattccagaaggggtttatcattcagccggattcctctatcgtggtgaaaccgatttccggagaaagcgccattgaattggcagacattcagcaaatactcaagatggccgcctcagcaccacctcagatatcactgccccctttttccaaggcgccagccgcccccctccaagccatatttaaacacatgcctcccctgaagccaaagccactcgtgacacctcgaaccgttgtagccaccagcacacccccacctctgatcaacgctcagcaagcgtctcctgggtgcatctcgcctagcctgccgccaccgcccctgaagctgcttaaaggatcagtcgaggctgccagcaatgcccatctgttacagagtaagtccggcacccaaccccacgctgccaccagactgtccttacagcagccccgggccgagcttcctggtcagccagaaatgaaaacacagctggagcaggattccattatcgaggccctgcttcctctgagcatggaagcaaagatcaagcaagaaatcaccgagggcgaactcaaagccttcatgaccgcccctggcggtaagaaaaccccagcaatgcgcaaggtgctctatccttgtagattctgcaaccaggttttcgctttctctggagtcctgcgggctcacgtacggtcacacttggggatcagtccataccagtgcaatatctgtgactacatcgctgccgacaaggccgcccttataaggcatctgcgcacccattccggggaacggccatatatctgcaagatatgtcattacccattcactgtcaaggcgaattgcgagcggcacctccgcaaaaagcatctcaaggcaacccggaaggatattgagaagaatatcgagtatgtgtcttcttctgccgcagagctcgtagatgcattttgtgcacccgataccgtgtgccgactgtgcggggaggatctgaaacactatagagcccttagaatccacatgcgcacacactgcggtagaggtttagggggtggccataaaggacgaaaaccatttgagtgcaaggagtgcagcgctgcctttgccgcaaagcgaaattgcattcatcacattcttaagcaacacctgcatgtcccggagcaagatattgaaagttacgtactggctgccgacgggctgggaccagccgaggctcctgctgctgaagcaagtggcaggggagaggattccggctgcgctgcactgggagactgcaaaccactgactgccttcctggagccccagaatgggtttctgcacagaggacctacccagccacctcctccacatgtttccatcaaactggaaccagcatcctcctttgcagtggactttaacgagcctctggactttagccagaagggcctagccctagttcaagtcaagcaggagaacattagctttctcagcccctcctcactggtcccatacgactgctctatggaacccatcgacttgagcattcccaagaattttcggaaaggggacaaagaccttgctacaccctccgaggccaagaagcccgaagaagaagctgggtcatctgaacagccctccccatgtccagcgcccggaccatccctgccagtcactcttggcccatctggcattcttgaaagccctatggcccccgctccagctgccacccccgaacctccagcgcaacccttgcaggggcccgttcaacttgccgtaccaatctattcatccgctttggtgagctctcctccactcgtgggctcgtctgctctgctgagcgggaccgccctgctcaggcccttgcgccccaagccccctctattactgcctaagcccccagtcacagaggaactgcccccgcttgcgagcatcgctcagatcattagctctgtgtccagcgctcctactctgctgaagaccaaagtcgcagaccctggacctgccagcactgggtccaataccactgcaagtgacagcttgggaggaagcgtacctaaggcggccactactgccacaccagccgctacgacgtcacctaaggaaagctccgagccccccgcgccggctagctccccagaagctgcttcgcccacagagcagggtcccgctggcacctcaaagaaacgtggcagaaagcggggaatgagaagccgaccccgggcgaactcaggcggcgtcgacctggattcatccggcgagttcgcaagcattgagaagatgctggccacgacagatactaataagttctcgccctttttacagaccgctgaggataacacacaggatgaggtggccggagcccccgctgaccatcatggccccagtgatgaggagcaagggagccctcctgaagataagcttctgcgggctaagcgcaactcttacaccaactgtctgcagaagattacatgcccccattgccccagggtgttcccgtgggcctcttcccttcagaggcatatgctgactcacaccgattctcagagtgacgcagagacagccgctgcagcaggcgaggtgctggatttaaccagcagagatagagagcagccttccgaaggggcaaccgagctgcgacaggttgccggcgatgcacctgtggaacaggctacggcggagacagccagccccgtccatcgcgaggaacatgggagaggggaatcacatgaaccagaagaggaacacggaaccgaggaaagcaccggcgatgcagacggcgctgaggaggatgcgagttccaatcaaagtttggacctggacttcgctacaaagctgatggacttcaagctggccgagggcgacggagaagctggagctggaggtgctgcctcccaggaacagaagctggcctgcgacacctgtggaaagagttttaaattcctaggtaccctctctcggcatcgcaaagctcatggcagacaggaaccaaaggatgaaaaaggtgacggagcctccactgccgaagaaggacctcaacccgcccccgagcaggaagagaaacctcccgaaactcccgcagaggtggtggagtctgccccgggggccggagaggctccagccgagaagctcgctgaggagacagagggaccgtccgacggggagtcagctgctgagaagcgaagctcagaaaagtctgacgatgacaagaagcccaaaaccgactcacctaagtcggtagcttcgaaagccgataagaggaagaaagtttgctcggtttgtaacaagcggttctggagcctacaagaccttacccgtcatatgcgctctcacacaggtgagagaccctacaaatgccagacctgcgaacgaaccttcactctgaaacatagtcttgtacggcaccagcggattcaccaaaaggccagacacgccaaacatcatggcaaagacagtgacaaggaggaacggggtgaagaagactctgagaatgaaagtactcattctggcaataacgctgtgtccgaaaacgaggccgagttggcaccaaacgctagcaatcacatggccgtgactagaagccggaaagaaggcctggcctctgccactaaggactgttcgcatagggaggagaaggtaacggctggatggccgagtgaaccagggcagggggacttgaatcccgagtcacctgcagctttgggacaggatctgctggagcccagatccaaaaggccagcacatcccatactggcaacggccgacggggcatcgcagctggtgggcatggagtag

SEQ ID NO: 202632 - DNA, 5064 bp, synthetic construct
  misc_feature 1..5064: note = Description of Artificial Sequence: Synthetic coding sequence
  source 1..5064: mol_type = other DNA
atgaccagcagcagccccgccggcctggagggcagcgacctgagcagcatcaatactatgatgagtgcagtcatgtccgtggggaaagtgacagagaatggcggcagtccgcaaggcatcaaaagcccatcgaaacctcccggtcccaatagaatagggagaaggaaccaggaaacgaaagaagaaaaaagcagttacaactgcccgctgtgtgaaaaaatctgtacaacccagcaccagcttacaatgcacatccgacagcacaataccgacacaggaggtgcagatcactcttgctctatatgtggcaagtcgctgtcctctgcgagttccctggacagacatatgttagttcactccggagagcgcccctacaagtgcacggtgtgcgggcaaagctttacaacgaatggaaacatgcatcgacatatgaagattcatgaaaaggatccaaattccgcaactgccaccgcaccacctagtcctctgaaaaggcgtagactgagctcaaaaaggaagttatcacatgacgccgaatctgaacgggaagatccagcaccagccaaaaagatggtcgaggacgggcagagcggagaccttgaaaagaaggcagatgaggtgttccattgcccagtgtgcttcaaagagtttgtgtgcaagtatggtcttgaaacccacatggaaacccattcagacaatccccttagatgcgacatctgctgcgtcacctttagaacgcaccgcgggttgttgcgccacaatgctctcgtgcacaagcagttgccgcgtgatgccatgggccgacctttcatacaaaacaatccctccatccccgccgggtttcatgacttggggtttaccgacttcagttgtaggaagttccccagaatttcacaggcctggtgcgaaactaatctccgtcggtgtatttctgagcagcaccgatttgtgtgtgacacatgcgacaaggccttccccatgttatgttcactggcattgcacaaacagacccatgtcgcagcagaccagggccaggagaaaccccaggccactccactgccgggagacgccctcgatcagaagggatttctggcgctgcttggcctgcagcatacgaaggatgtccggccagcccctgccgaagagcctttacctgatgacaatcaggcaatccagctgcagaccctgaagtgtcagctgccccaggatccaggctgtacaaacctgctgtccctcagtccgttcgaggcggctagcctggggggttcattgacggtgctgccagctacaaaggattccatcaaacatctgtcactgcagccattccagaaaggcttcatcattcagcccgatagctccatcgtagtgaagccgatctctggcgagtccgccattgaacttgccgatattcaacagattcttaagatggccgcgagcgcgcctccccagatctcactgcctccattctcaaaagccccagccgcccctctccaggccatttttaagcacatgcctcctctaaaaccgaagcccctggtcacacccagaaccgtcgtggccacatcaactcctcctccacttatcaatgcacaacaggcctcacccggttgcatctctccgagtctcccaccacccccgctaaaattgctgaaagggtcagttgaggctgctagtaacgctcatctcctgcaatcaaagtctggcactcaacctcatgcggcaacccggttaagcctccagcagccccgcgccgagctacccgggcagccagaaatgaaaactcagttggagcaggacagcatcatcgaggcgctgcttccactttctatggaggcaaaaataaagcaggaaataactgaaggtgagctgaaagcattcatgacagctcccggcggcaaaaaaacacccgccatgcggaaggtgctttatccctgcaggttctgtaaccaggtcttcgcctttagtggagtcctgagagctcacgtgaggtcccacctcggcatttctccttatcagtgtaatatctgtgactacatcgctgcagataaagcagctctcattcgccacctgaggactcactccggcgagcgaccctacatctgtaagatatgtcattatcccttcacagtaaaagccaactgcgaacgccacttgcgcaagaagcacctgaaagcgacacgtaaggacatcgagaagaatatcgagtacgtgtcgagctcagccgctgaactggtagacgctttttgcgcgccagatactgtctgcaggctgtgcggcgaagatctgaagcactacagagctcttaggattcatatgcgcacccattgcggtaggggtctgggcggcggccataaggggcgaaaaccttttgaatgcaaggagtgcagcgctgcatttgctgccaagcgtaactgtattcaccacatcctcaagcaacacctgcacgtgcccgaacaggatatcgaatcatacgttcttgccgctgatgggttgggccctgccgaggcacctgcagccgaggccagtggtagaggggaggacagcggttgcgcggctctgggtgattgcaagccccttaccgccttcctcgagccccaaaacggatttcttcaccgggggccgactcagcctccgccaccacatgtgtcaatcaagctggaacccgcctcttcctttgccgtggatttcaatgaaccattggacttctctcagaaagggttagcactggtccaggtcaaacaggagaacatctctttcttgtctccatctagtttagtcccctatgattgtagcatggaaccaattgatctgtcaattcccaaaaacttcaggaagggagacaaagacttagcgacgccatcagaagccaaaaaacctgaagaagaggcgggatccagcgagcagccctctccctgcccagcccccggaccctcactgcccgttaccttggggccttctggaatactggagtctcctatggctcctgctccagctgccacaccagaacctccagcacagcccctgcaaggtccagtgcaactagcagtgcccatctactcttccgccttggtttcctcccctcctctggtaggcagttctgccctccttagcggcacagctcttcttagaccattaaggcctaaaccgccactgctcttgccgaaaccacctgtgaccgaagagttaccccccctggcctcaattgctcagataatcagctctgtgtcaagtgcaccgaccctgctcaagaccaaagtggctgaccccggccctgcatcaaccggctccaatacgaccgcatccgactcccttggtgggagcgtgccaaaagcagccacaaccgccacacctgccgcaactacaagtcctaaagaaagctccgaaccacccgcccccgcaagtagcccggaagcagcctcacccactgaacagggaccggccggaacctccaagaagcgcggccgcaaacgggggatgaggtcccgtcctagggctaatagcggcggtgtggacctcgattcatctggtgagttcgcttctatcgaaaagatgctcgccacaaccgataccaataagttttctccttttctacagactgccgaggacaacacacaagacgaagtcgccggagcgccagccgaccaccacggaccctcggatgaagagcaggggtccccgcctgaggacaagcttcttcgtgctaagcggaatagctacacgaattgtctgcaaaaaattacttgtccccactgcccccgtgtgttcccgtgggcttctagtctgcagcgccacatgctgactcacactgattcccagagcgacgccgagacagcggcggccgctggtgaagtcctcgatctcacatccagagatcgcgaacagccgtcggaaggcgccacggaactgaggcaggtagccggggacgctcctgtggagcaggcgactgccgaaacagcttctcctgtccaccgggaggaacatggccgcggagagtcacatgagcctgaagaagaacatggcacagaagagtccacaggggatgctgacggcgcagaggaggatgcatcttccaaccagtctctggacctagacttcgccaccaagctgatggattttaagctcgctgagggcgacggtgaagccggagccggtggcgcggcgagtcaggagcagaagttggcatgtgacacatgtgggaaatctttcaagtttctgggtaccctgagccgccacagaaaggctcacggtagacaggagccaaaggacgagaaaggagatggagcctctactgctgaagagggtccccaacccgctcctgaacaggaggaaaaacctccggaaacccccgccgaggtggtcgaaagcgcccctggcgccggcgaagcccccgccgagaagctcgccgaagagacagagggacctagcgatggcgagtccgcggctgaaaagagatcttccgagaagagtgacgatgataagaagcctaagacagatagccctaagtccgtggcctctaaggctgataagcgtaaaaaagtgtgcagtgtatgtaacaaacgcttttggagcctgcaagacctcactagacatatgaggtcccacacaggtgaacggccatacaaatgccagacttgtgaacgcaccttcacacttaagcattccctggtgcgccatcaacgtatccaccagaaggcaagacacgccaagcaccatgggaaagattctgacaaggaagaacgcggagaagaggatagcgaaaacgaatcaacccacagcggcaacaatgcagttagcgagaacgaggccgagctcgccccaaatgcaagcaaccacatggccgttaccagatcccgaaaggaggggcttgccagtgctaccaaggattgcagtcatcgcgaggaaaaggttactgccggatggccgtccgagccgggacagggcgatctgaacccagagtcgcctgctgccctcgggcaggatctcctggaaccgcgttccaagcggccagcacacccaattttggccacagcagacggcgcttcccaactggtggggatggagtag

SEQ ID NO: 202633 - DNA, 5229 bp, synthetic construct
  misc_feature 1..5229: note = Description of Artificial Sequence: Synthetic coding sequence
  source 1..5229: mol_type = other DNA
atgaccagcagcagccccgccggcctggagggcagcgacctgagctccataaataccatgatgagtgcagtgatgtccgtcggtaaagtgactgaaaacgggggatctcctcaaggcatcaagagcccaagcaagcctcccggtccaaacaggattgggcgcagaaatcaagagacaaaggaggagaaatccagctacaattgccctctttgtgagaagatttgtacaacccagcaccagcttaccatgcacatcaggcagcacaacaccgatacagggggtgctgatcattcttgttcaatctgcggaaaatcgttaagtagtgcctcctccctggacagacatatgctcgttcattctggagagaggccatataagtgtaccgtgtgtggacaaagctttaccactaatgggaacatgcacaggcatatgaagatccatgagaaagatcctaatagcgccaccgcaacggcgccaccttctccattgaaaagacgccgtctttcaagcaagcggaagctttcccatgatgccgagtccgagagagaggaccctgcccctgctaaaaagatggtagaggacgggcagagtggagacttagagaaaaaggccgacgaagtattccattgccccgtctgtttcaaagaattcgtatgcaagtatgggctggagacacacatggagacacattcagacaatccactacggtgtgatatttgctgcgtaacttttcgtactcacaggggccttttacgccataatgccttggttcataagcagctgccacgtgacgccatgggtcggccctttattcaaaataacccctcaatcccggctgggtttcatgacctgggttttactgattttagctgcaggaaatttccacgaatttcgcaggcttggtgtgaaaccaacctcagaaggtgtattagcgagcaacaccgatttgtgtgcgatacttgcgataaagctttcccaatgctgtgctcattagccctccacaaacagacacatgtggcagctgaccaaggacaggagaaacctcaggcgacacccctgccgggtgacgcactcgaccagaaaggctttctcgccctgctcggcctccagcacacaaaagatgtgcgccctgcacctgccgaggaacctctccctgacgacaatcaagctattcaactccagacgctcaaatgccagttgcctcaagaccccggctgtactaacctgcttagcctgagcccatttgaggccgcatctcttggaggctcactgaccgtgctgccagctacaaaagattctatcaaacatctgagtctgcagccctttcagaagggattcattatccagcccgacagtagcattgttgttaagcccataagcggtgagagtgcgattgagcttgctgatatacagcaaatcctgaaaatggccgcctcagccccaccgcagattagtctgcctccattcagtaaagctcctgcagcacctctgcaagctatctttaaacacatgccccccttaaagccaaaacctctggtgactccacgtaccgtagtcgctacctcaaccccacctccactgatcaatgcacagcaggcttctcctgggtgcatttcaccttcactgccgcccccaccactgaaactcctgaagggctccgtggaggccgcttcaaacgctcatcttctgcagtctaagtctggcacgcaaccacacgcggccaccagattgtcgttgcagcagcccagggctgagttgcctggccaacccgagatgaaaacccagttagaacaggactccattattgaagcacttctgccactcagcatggaagccaagataaagcaggaaattaccgagggggaattaaaagccttcatgactgcacctggcgggaagaagacacctgcaatgaggaaagtgttgtatccgtgtcgattttgtaatcaggtcttcgccttctccggcgtgctaagggcccacgtgcggagccatctgggaatctctccttaccaatgcaacatttgcgactacattgctgctgataaagccgccctcattagacacctaagaactcactccggagagaggccatatatttgtaaaatatgccattacccattcaccgtgaaggccaactgcgagcgacacctgcgaaaaaaacaccttaaagccacacggaaagacatcgaaaaaaacattgaatatgtctcttcctctgccgctgaactggtcgatgctttttgtgcgcccgatactgtatgtcgtctttgcggcgaagacttaaaacattatagggctctgagaatacatatgcgcacacactgcggaaggggcctcggagggggacacaaagggagaaaaccctttgagtgcaaggagtgttcagccgcgtttgctgccaagaggaattgcattcaccatatacttaaacaacacctgcacgtgccggaacaggacatcgagagttatgtgcttgctgcagatggattagggcctgccgaagcccctgccgccgaggctagcggtagaggtgaggacagcgggtgtgcggctctaggcgattgtaaacccttgactgctttcctggaaccccagaatgggtttttgcatcgcggcccaacccagccccctccccctcacgtctctattaagttagaaccagcctcaagctttgccgtggacttcaacgagccactcgattttagccagaaaggactcgccctagttcaggttaaacaagaaaacataagttttctgtcgccctctagtctcgttccatacgactgctccatggaaccaattgatctgtctattcccaaaaattttcgtaaaggagacaaggacctcgcaactccatcagaagcaaagaagcccgaagaggaggctgggtcttctgaacagccatctccttgtccagctccaggcccctccctgccagtgactctcggcccatctggcatcctcgaaagtcccatggcccccgccccggctgcgacacctgaacctcctgctcaaccacttcagggccccgtacagctcgctgttcccatttactctagcgccttggtaagcagccccccactggttggctcgagcgcccttctttcggggacggcacttcttcgacccctgcgccccaaacctccccttctgttgcccaaacccccggtgactgaggagctgcctccattggcgagtattgcccaaatcatcagctcggtatcatctgcaccaacgcttttgaaaacgaaagtcgctgaccctggacccgcctctaccgggtccaacactaccgccagcgacagtctaggcgggagcgtaccaaaggctgcgaccaccgccactccagcagccactacaagcccaaaagagtccagcgaaccccctgcacctgctagttctcccgaggcagcatcccctacagaacagggaccagcagggacttcaaaaaaacgagggcgaaaacggggaatgcggtcccggcccagagcaaattcggggggagtggatctggatagctctggagagttcgcatccatcgagaaaatgctggctacgactgacacaaataaatttagcccctttctgcagaccgcagaggataacactcaggatgaagttgctggtgctcccgcggaccatcacgggccctccgatgaggaacaggggtcgcctcctgaggataaactgctgagagccaagagaaatagttatacaaattgcttgcagaaaattacttgcccacattgtcctagggtcttcccttgggcaagctccttgcaaagacatatgctcacccatacaggccagaaaccttttccatgccagaagtgcgatgctttcttttcaactaagtccaactgtgaaaggcaccaactgcgaaaacacggcgtgacaacatgtagcctgcgacgtaacggcctcatcccccaatcaaaggaaagcgatgtgggaagtcatgattcgacagattcccaatctgatgccgaaaccgctgcggcagcaggggaagtgctggatcttacctccagagaccgagagcagccatccgaaggtgctaccgagcttcgtcaagtcgctggggatgctccggtcgaacaggcaacagcggagaccgcctctcccgtccacagggaagaacacggtcgcggtgaatcacacgagcccgaggaagagcatgggacagaagagagcaccggagacgcagacggcgccgaagaagacgcctcctctaatcagtctctcgatctggattttgctactaaacttatggatttcaaactcgcagaaggagacggagaggccggggccggaggcgccgcttcacaagaacagaagcttgcttgcgacacgtgcggcaaaagttttaaatttctgggtaccctgagccgacatcgcaaggcccatggacgtcaagagcccaaggacgaaaagggggatggcgcctcaaccgccgaggagggcccccaaccggccccggagcaggaagaaaagccacctgagacacctgcagaagtggtcgaatcagcacccggggccggcgaagcccctgcagaaaaactcgctgaagagacagaaggcccttctgatggggaatccgctgctgaaaagcgctcgtctgagaagtcggatgatgacaaaaaacccaaaactgactcaccaaagagtgttgcctcaaaggctgacaagaggaaaaaggtctgctcagtgtgtaataagcggttctggtccttgcaggatctaaccagacacatgcgcagccacacaggagaaagaccgtataagtgtcagacctgtgaaaggacattcaccctgaaacactcactcgttcgacaccagagaattcatcagaaagcccgccacgcgaagcatcacggcaaagactccgacaaagaggagcgaggggaagaggacagtgagaacgagtcaactcatagcgggaacaacgctgtgtcagagaatgaggctgagctcgcccctaatgcaagtaaccatatggcagttactagatcccggaaggaagggcttgcatcggccaccaaggactgcagtcaccgggaagaaaaagtcaccgcaggctggccatccgagcctggtcagggggatctaaatcccgagtcaccggcagctctcggacaggacctcctcgagcccagatctaagcgtcccgcccacccaatactggccacagccgatggagcatcccagctcgtcggtatggaatag

SEQ ID NO: 202634 - DNA, 15 bp, synthetic construct
  misc_feature 1..15: note = Description of Artificial Sequence: Synthetic coding sequence
  source 1..15: mol_type = other DNA
atgaccagcagctag

SEQ ID NO: 202635 - DNA, 495 bp, synthetic construct
  misc_feature 1..495: note = Description of Artificial Sequence: Synthetic coding sequence
  source 1..495: mol_type = other DNA
atgaccagcagcagccccgccggcctggagggcagcgacctgagcagtatcaacaccatgatgtctgccgttatgagcgtgggcaaagttactgaaaatggcggcagtcctcagggcataaagtcccccagcaagccccccggcccgaacaggataggaaggcgcaaccaggagactaaggaggaaaaaagcagctacaactgtcctttatgcgagaagatttgcaccacccagcatcaattgacaatgcatatcaggcagcataacactgataccggaggagcagatcacagttgttccatctgtgggaagagtttgtcctctgcgagcagtttggaccgtcacatgttggtacattcaggtgaacgaccatataaatgtactgtctgcggccagagttttacaaccaatgggaatatgcacaggcacatgaaaattcatgaaaaggaccctaactctgcaaccgcaactgccccgccatcccctctgaagtag

SEQ ID NO: 202636 - DNA, 2337 bp, synthetic construct
  misc_feature 1..2337: note = Description of Artificial Sequence: Synthetic coding sequence
  source 1..2337: mol_type = other DNA
atgaccagcagcagccccgccggcctggagggcagcgacctgagctctattaacaccatgatgtccgctgtaatgagcgttgggaaggtgaccgagaacgggggctcccctcagggtatcaagtcccctagcaagccccccggtccaaatcgaataggtcggcgtaaccaggaaactaaagaagagaagagtagctataattgcccgttgtgcgaaaagatatgcacaacccagcaccagctgactatgcacattaggcagcacaacaccgacaccggcggcgccgatcacagttgctctatttgtggaaaatctctgagcagcgcctcctccctcgaccgccacatgcttgttcatagcggagagcgtccctataagtgtacagtttgtggacagagcttcactaccaacggcaacatgcatcgccatatgaaaattcacgaaaaggaccctaattctgcaactgctacagcacccccaagtcctcttaagcggaggcgcctcagcagtaagcgaaaactgtcgcatgatgcagagagtgagagagaagatcccgccccagctaaaaagatggtggaggacggacagtctggagacctcgagaaaaaggccgacgaagtgttccattgccccgtgtgctttaaggagttcgtttgcaaatacgggcttgagacccacatggagactcattctgataatcctctcagatgcgatatttgttgcgtaacatttcgaacacacaggggactgttgaggcacaacgcattagtgcacaagcagctgccacgtgatgccatgggcagacccttcattcagaacaatccgagcataccggcaggcttccacgacctgggatttaccgatttttcctgtaggaaattccctcgcataagccaggcatggtgtgaaacaaacctgcgtcgatgcatatcagagcagcacagatttgtgtgcgacacctgcgataaagcttttccaatgctgtgcagtttagccctgcacaagcaaacgcatgtagccgctgatcaagggcaggagaaacctcaggccactcctctccccggcgacgctctggaccagaagggctttctcgctctgttgggcctgcagcacaccaaggatgtaagacctgccccagcagaagaacctctgcccgatgacaaccaggccattcaactgcagacgttaaaatgccagctccctcaggaccctggttgcacaaatctgttatctctgagcccgttcgaggcagcatctctgggaggatctcttacagtgcttcctgctaccaaagactccattaagcatctgtccctccagccttttcagaaaggatttatcatccagccagactcttccatcgttgtgaagcctatctcaggcgaaagcgccattgagctcgcagatatccagcagatattgaagatggctgcaagtgcaccgccgcaaataagtctgccccctttttccaaggcaccagccgctcctctccaagcgatctttaaacacatgccccccctgaaaccaaaaccactggtgactccccgtactgtcgtggcgacaagcacgccacctcctctaatcaacgcccagcaggcaagcccagggtgcatctctccttctttgccgccacctcctctcaaactgctgaaaggcagtgtggaggccgctagtaacgctcacctcctgcagagcaaaagcggcactcaaccacatgccgcaactcggctgagcctgcagcaacccagggctgagctgcctggtcagcccgaaatgaagacacagttggagcaggattccatcattgaggccctgctgcccctgtccatggaggcgaagatcaagcaagagatcacagaaggcgaactaaaggcctttatgaccgcaccagggggaaaaaaaacacctgcaatgcgaaaagtcctgtacccctgcaggttctgtaatcaggtgtttgctttctcaggcgttctgcgcgctcatgttcggtcgcacttggggatttcaccttaccagtgtaatatttgcgattatattgctgctgataaggccgctttgataagacatttgagaacacattccggggaaagaccctatatctgtaaaatttgtcattacccattcacagtgaaggctaattgcgaacgtcacctccgcaaaaagcacctgaaggctacccgtaaagatatagagaagaacatcgagtatgtatcctctagcgcagcggagctcgttgacgcgttttgtgctccagacacagtctgtaggctctgcggagaggacctgaagcattatcgagccctaagaatccacatgcggacgcactgcggacgatag

SEQ ID NO: 202637 - DNA, 411 bp, synthetic construct
  misc_feature 1..411: note = Description of Artificial Sequence: Synthetic coding sequence
  source 1..411: mol_type = other DNA
atgaccagcagcagccccgccggcctggagggcagcgacctgagctccataaatacgatgatgagcgctgtcatgtccgtcgggaaggtgaccgaaaatggcggatctccccaggggataaagtctccttcgaaaccgcccgggcctaatagaattgggaggcgaaatcaagagacaaaggaagagaaatccagctacaattgccccctgtgcgagaaaatctgcactacacagcatcagttgactatgcacattaggcaacataataccgacacaggcggagcagaccattcgtgttcgatctgcggcaagtctctctcctctgcatctagtcttgatcgccacatgctggttcacagcggggaaaggccttataagtgtacagtttgcggacagtccttcacgacttag

SEQ ID NO: 202638 - DNA, 189 bp, synthetic construct
  misc_feature 1..189: note = Description of Artificial Sequence: Synthetic coding sequence
  source 1..189: mol_type = other DNA
atgaccagcagcagccccgccggcctggagggcagcgacctgagctccatcaacactatgatgagtgcagtgatgagcgttgggaaggtgaccgaaaacggtggatcacctcaaggcataaaatctcccagcaaacctcctggccccaatcgaatcggccgcaggaaccaagtcagtgtacacacatag

SEQ ID NO: 202639 - DNA, 834 bp, synthetic construct
  misc_feature 1..834: note = Description of Artificial Sequence: Synthetic coding sequence
  source 1..834: mol_type = other DNA
atgagcaagagcctgaagaagctggtggaggagagccgggagaagaaccaaccagaggtggatatgtcggatcgcggcattagtaacatgttggacgtaaacggcctttttacattgtcacacatcacgcagctggtgctaagtcataacaaacttacaatggtacctcccaatatcgcagaactgaagaatttggaggtcctcaattttttcaataatcaaatcgaagagttgcctacacaaataagcagcttgcagaagctgaagcacttgaatctggggatgaataggcttaatacccttcctcgcgggtttggctcactgccagctctagaagtgttagatttgacctacaacaacctgtccgagaattcattgcccggtaacttcttttatcttacaactctgagagctctgtacctctctgataatgactttgaaatacttccacccgacatcggcaagctgacaaagctgcagatattgtccctccgggataatgacttgatatccctgcccaaggagatcggagagctcacacagttaaaagagttacatatccagggtaacaggctgacagttctaccgcctgagctcggcaacctggatctcaccgggcagaaacaagtctttaaggccgagaacaacccctgggtgacaccgatagcagatcagtttcagctgggcgtcagccatgttttcgagtacatccggtccgagacttacaagtatctgtatgggcgtcatatgcaggcgaatcccgagccccccaaaaaaaataacgacaagtccaagaaaatcagccggaaacccctcgcagccaagaaccgctag

SEQ ID NO: 202640 - DNA, 675 bp, synthetic construct
  misc_feature 1..675: note = Description of Artificial Sequence: Synthetic coding sequence
  source 1..675: mol_type = other DNA
atggtgccccccaacatcgccgagctgaagaacctggaggtgctgaattttttcaataaccagatcgaggaactcccaacccagatttccagcctccagaaactcaaacatttaaaccttggaatgaatagacttaatacattgcctcgtggatttggctcactgcccgcattagaggtgctggatcttacctacaataacctgtctgagaacagcctgcccgggaactttttctatctgaccaccttgagggcactgtatctgtccgacaatgatttcgagattctgcctccagatataggaaagctcaccaagctccagattctgagcctgagagacaatgatttgatctccctgcccaaggaaatcggcgaactcacacaactgaaagagctgcacatccagggtaaccggcttacagtcctgcccccagaacttggaaatttggacttgacaggccaaaagcaggttttcaaagccgagaataacccctgggtgaccccaatcgcagatcagttccaactgggagtctctcacgtgttcgagtatattaggtcagagacctataaatacttatacggacggcacatgcaggcaaaccccgagccgcctaagaagaataacgacaagagcaaaaaaatatcacggaagcctcttgccgccaagaatagatag

SEQ ID NO: 202641 - DNA, 834 bp, synthetic construct
  misc_feature 1..834: note = Description of Artificial Sequence: Synthetic coding sequence
  source 1..834: mol_type = other DNA
atgagcaagagcctgaagaagctggtggaggagagccgggagaagaaccagcccgaggtggatatgtctgaccggggaatttctaatatgttagatgtcaacgggttgttcactcttagtcacatcactcaactcgtgctgtcccacaataagttgaccatggtgccccccaacatcgctgagctgaagaatctcgaagtgctaaacttctttaacaaccagattgaggaactgcctacccagatctcttctttgcaaaaactcaaacacctgaacttggggatgaaccggctgaataccttgccacgtggctttgggtcactgccagcactcgaagtcttagatttgacatataacaacctttctgagaatagtctaccgggaaacttcttctacctgaccacactccgtgcgctgtacttatccgacaatgacttcgagattcttccgcctgacattggcaaactgactaagctccagatactgtcactgcgcgataatgatcttatctctttgcccaaagagatcggagagctgactcagttaaaagagttgcacattcagggaaatcgtctgacggtcctgccccccgaattagggaaccttgacctgacgggccagaagcaggtgttcaaagcagagaataacccttgggtaacaccaatcgccgatcaatttcaactcggtgtgagccacgtgtttgagtacattcgatccgaaacttacaaatacctctatggcaggcatatgcaggcgaaccccgaacctccaaagaagaataacgacaaaagcaaaaaaattagcaggaaaccactcgccgcgaagaatagatag

SEQ ID NO: 202642 - DNA, 945 bp, synthetic construct
  misc_feature 1..945: note = Description of Artificial Sequence: Synthetic coding sequence
  source 1..945: mol_type = other DNA
atggccgccaccgccagcgccggcgccggcggcatcgacggcaagcccaggacctcaccgaaatcggtcaagtttctgttcggaggactcgcgggcatgggcgcaactgtatttgtccaacctctggatctggttaaaaataggatgcagttgtccggcgaaggagccaagactcgggaatacaaaacctccttccatgctctcacatcgatcctgaaggctgaagggctgcgggggatctatacaggactgtccgctgggctcctacgccaggccacgtacactactacgaggttagggatctacacagtcctgtttgaacggctgaccggcgcggatggaaccccacctgggttcttgctgaaggcggtaatcgggatgactgcaggcgccacaggcgccttcgttggaacacctgccgaggtcgctctgatcagaatgaccgctgatggccggctccccgccgaccagcgccgtggctataagaacgttttcaatgccctaatcaggatcacacgagaggagggcgtgttgactttgtggcggggctgcattcctactatggctcgcgccgtggtggtgaatgcagcccagctggcttcctacagccaatccaagcagtttttgctggactcaggatatttttctgacaatatcttgtgtcacttttgcgccagcatgatcagtggcctggtcacaaccgctgccagtatgcctgtcgatatcgcaaagactagaattcagaacatgcgaatgatcgacggcaagcccgagtacaagaacggactcgacgttcttttcaaagtcgtgagatatgaaggctttttttcactctggaaggggtttactccgtattacgcccggctgggtccacacacagtgctgacctttatcttccttgaacagatgaataaggcctataaaaggctcttcctgtctgggtag

SEQ ID NO: 202643 - DNA, 1530 bp, synthetic construct
  misc_feature 1..1530: note = Description of Artificial Sequence: Synthetic coding sequence
  source 1..1530: mol_type = other DNA
atgagcatgggcgccccccggagcctgctgctggccctggccgccggacttgctgttgcgcggccacccaacatagtccttatctttgccgacgacctcgggtatggggatctgggatgttacggccaccctagcagcaccactccaaatctcgatcagctggcagccggcgggctcaggttcacagatttttatgtccccgtgagtctgtgcacgccatcccgggcagcgctgctgaccggccgtctgcccgtgaggatgggtatgtaccccggggttctggtgccttcaagtcgaggaggactgcctcttgaggaggtcacagtggctgaggtactggctgcccgtgggtacctcactggtatggctgggaaatggcacctgggggtgggacctgagggagcatttttacccccccaccaaggcttccacagattcctggggattccatactcccacgaccagggcccgtgccagaatctgacttgtttcccccccgcgactccatgtgacggcggctgcgatcaaggacttgtccctatcccactgctggcaaatctgtctgtggaggcccagcccccttggctccctggactagaggctcgctacatggccttcgcacacgatctcatggccgatgcccagcgccaggacaggcctttttttttgtactacgctagccaccacacacattaccctcagttttcaggacagtcttttgcagagagatcaggcaggggcccatttggagactctttaatggaattggacgccgccgtagggaccctgatgaccgctatcggtgacctcgggctgctcgaggagactctcgtgattttcacagccgataacggcccggagactatgcggatgtctaggggcggctgcagcgggctgctgcgttgtgggaaaggcacaacctacgagggaggtgtgcgggaaccagcccttgccttctggcctgggcacatcgcaccaggggtaacccatgagctcgctagttccctggacctattacctacactggcggctttggctggggcacccctgcccaatgtcacacttgacgggttcgacctgagcccactcttgcttgggaccggtaagagcccacgccagagtctctttttttacccctcctaccctgacgaggtgagaggcgtttttgccgtacggactgggaaatataaggcacacttttttacccaaggttcagcccatagcgataccaccgccgatcccgcatgtcacgcatcctcgtctctcaccgcacatgagccacctctgctttacgacttgtcaaaagaccccggagaaaattataatctactaggcggtgtggccggagctaccccagaagtactgcaggctttgaagcagctgcagctccttaaagctcaattagatgcagcagtcacttttggccctagtcaggtagcacgaggcgaagaccctgcccttcagatctgttgccaccctggatgtacaccccggcctgcgtgttgccattgccccgatccccacgcatag

SEQ ID NO: 202644 - DNA, 600 bp, synthetic construct
  misc_feature 1..600: note = Description of Artificial Sequence: Synthetic coding sequence
  source 1..600: mol_type = other DNA
atggccaagagcgccgaggtgaagctggccatcttcggccgggccggggtgggcaagagtgctttagtggtgagattcctcaccaagaggtttatctgggaatatgatcctacccttgaaagtacctatcgtcaccaggcaacaatcgacgacgaagttgtcagcatggaaatactggacaccgccggtcaggaggacaccatacaaagagaggggcacatgaggtggggggagggttttgtcctcgtgtacgatatcactgacagagggtctttcgaggaagtgctacccctgaagaatatcttggacgagattaagaaacccaagaacgtcacacttatcttggtggggaataaagcagatctggaccattccaggcaagtgtccactgaagagggcgaaaagttggcaaccgaattggcgtgtgccttctacgaatgtagcgcgtgcaccggagagggcaacataactgagatcttttacgagctgtgccgggaggtgcgccgacggaggatggttcagggcaaaacccggcggagatctagcaccactcacgtcaaacaggccatcaacaagatgctgaccaaaatctcctcatag

SEQ ID NO: 202645 - DNA, 120 bp, synthetic construct
  misc_feature 1..120: note = Description of Artificial Sequence: Synthetic coding sequence
  source 1..120: mol_type = other DNA
atggccaagagcgccgaggtgaagctggccatcttcggccgggccggcgtgggtaaatccgccctggtggtgaggtttctgaccaaacgatttatttgggaatacgatcccacattatag

SEQ ID NO: 202646 - DNA, 600 bp, synthetic construct
  misc_feature 1..600: note = Description of Artificial Sequence: Synthetic coding sequence
  source 1..600: mol_type = other DNA
atggccaagagcgccgaggtgaagctggccatcttcggccgggccggagtgggcaagtctgccctcgttgttcgattcttaaccaagcgcttcatctgggaatacgatccgactctggagagcacatatcgtcaccaagccactattgacgatgaggtggtttccatggagattctggataccgcgggacaagaggataccattcaacgcgaggggcacatgcgctggggcgaaggattcgttctggtctatgatatcacagataggggttcctttgaggaagtactcccactgaagaacattcttgacgaaatcaaaaaaccaaagaacgtcacccttatcctggttggaaataaggctgatctggaccactcaagacaggtgtctaccgaagagggcgagaagctcgccactgaattagcctgcgctttttacgagtgttctgcctgtaccggtgaggggaacattaccgagattttttacgagttatgccgggaggtgagaagacgccgtatggtgcagggtaagacccggagaaggagcagcacgacacacgtgaaacaggcaattaataagatgctaacaaagatcagttcgtag

SEQ ID NO: 202647 - DNA, 600 bp, synthetic construct
  misc_feature 1..600: note = Description of Artificial Sequence: Synthetic coding sequence
  source 1..600: mol_type = other DNA
atggccaagagcgccgaggtgaagctggccatcttcggccgggccggggttggtaaaagcgcccttgtcgtgaggttcctgacaaagcgattcatctgggagtatgacccgaccctcgaatccacttaccggcaccaggcgacgattgacgatgaggtagtcagcatggagatccttgacaccgctggccaggaggataccattcaaagggagggccacatgcgatggggcgagggattcgtactcgtgtacgatataacggatcgaggaagctttgaggaggttctgcctcttaagaacatactggatgaaattaagaaaccaaagaatgtgaccctcatactggtggggaataaagcagacttggaccattccagacaagtctcaactgaagaaggcgagaaactcgccacagaacttgcttgtgcattctatgagtgttccgcctgcacaggggagggcaacatcacagaaattttctatgaactctgtagggaagttcgccggcgcagaatggtacagggaaaaacacgtagaaggtcatccaccacgcatgtgaaacaggcgattaacaagatgcttacaaagatttcaagttag

SEQ ID NO: 202648 - DNA, 543 bp, synthetic construct
  misc_feature 1..543: note = Description of Artificial Sequence: Synthetic coding sequence
  source 1..543: mol_type = other DNA
atggccaagagcgccgaggtgaagctggccatcttcggccgggccggggtgggtaagtccgaaagcacatatcgccaccaagcgacaatcgacgacgaggtggtttcaatggaaatcttagacaccgccggccaagaggatacgatccagcgcgaaggccacatgcgatggggtgaagggttcgtcctcgtgtacgatataactgaccgtggatcgttcgaagaagtcctgccactgaagaacattttggatgagataaagaagccaaaaaacgtcaccctgatccttgtgggcaataaggcagatttagatcacagtaggcaagtgtccactgaggagggagagaagctggccacagagctggcatgtgccttttatgagtgttctgcatgcactggcgaaggcaatatcactgaaatcttttatgagctgtgccgcgaggtcagacggcggagaatggtgcagggcaagactagaaggcggtcaagtaccacacatgtgaaacaagccatcaataagatgctgactaaaatctctagttag

SEQ ID NO: 202649 - DNA, 612 bp, synthetic construct
  misc_feature 1..612: note = Description of Artificial Sequence: Synthetic coding sequence
  source 1..612: mol_type = other DNA
atggtgagcacctaccgggtggccgtgctgggcgcccggggcgtgggcaagagcgctatagtgcgccaattcctctacaatgaattttctgaggtttgtgtgcccaccaccgctcggcgcttgtacttgccagccgttgtgatgaacggccacgtgcatgacctgcaaatcttagactttccccctatttctgctttccctgtcaacaccctgcaggaatgggctgatacgtgttgccggggattgcgaagcgtgcatgcatatatcctggtgtatgatatctgttgtttcgattccttcgagtacgtgaagacaataagacagcagattttagaaaccagggtgattggcacaagcgaaacgcccattatcatagtgggaaataaaagagacctgcagcgaggacgcgtcattccaaggtggaatgtatctcacctggtgcggaagacctggaaatgtgggtacgtggagtgttccgcaaagtacaactggcatatattattgctgtttagcgaactcctgaagtccgtcggttgcgcccgttgtaaacatgtccacgccgccctgagattccagggggccttgcggaggaacaggtgtgccataatgtag

SEQ ID NO: 202650 - DNA, 729 bp, synthetic construct
  misc_feature 1..729: note = Description of Artificial Sequence: Synthetic coding sequence
  source 1..729: mol_type = other DNA
atgcggcccctgagcatgagcggccacttcctgctggcccccatcccagagtcctcctctgactaccttctgcctaaggatatcaaacttgctgtccttggcgccgggagggtaggcaagagtgcaatgatcgttcgattcctcactaagaggttcattggcgattatgagccaaacacaggaaagctgtactcaaggcttgtatacgttgagggtgatcaactgtcactccagatccaagataccccaggcggcgtccagatccaggactctctgccccaggttgtggattctctgagcaaatgcgttcaatgggcagagggctttttgctcgtgtatagcatcactgattacgattcatatctgagcattcgccctttataccagcacatccgcaaggtgcatccggacagtaaggcccccgtgatcatcgttggtaataagggcgacttgttgcacgcgcgccaggtccagactcaggatgggatccagctcgccaatgaattgggatccttgttcctggaaatctccacctctgaaaactacgaggatgtttgtgacgttttccagcacttgtgtaaagaggtctccaaaatgcacggcctgagcggggagagacgaagggcgtctatcatcccacggcctaggtcccccaacatgcaagatctgaaaaggagattcaaacaggcactgtctcccaaggtcaaggcaccctccgccctcggatag

SEQ ID NO: 202651 - DNA, 747 bp, synthetic construct
  misc_feature 1..747: note = Description of Artificial Sequence: Synthetic coding sequence
  source 1..747: mol_type = other DNA
atgcggctgatccagaacatgtgcaccatcgccgagtaccccgccccaggcaacgctgctgcctctgattgttgcgtgggggctgccgggaggagattggtgaaaatcgccgtcgttggagcatctggagttggcaagaccgcgcttgtggtgaggttcctcaccaaacgtttcatcggtgattatgagcggaacgctggaaatttgtatacacggcaagtacagatcgaaggagagaccctagcactgcaggtgcaggacaccccaggcattcaggtgcatgaaaactccctctcgtgctctgaacagctcaatagatgcatccggtgggccgatgcagtggttattgtgttctcaataacagactacaaatcatatgaactgatcagtcaacttcatcagcacgtgcagcagctccatctcgggacgcggctgcctgtggtagttgtagccaacaaagccgatttactgcacattaaacaggtggatccacagctaggcttgcagcttgcaagtatgttagggtgcagcttctatgaagtgagcgtgtccgagaactataatgacgtgtattctgcattccatgtattatgcaaagaagtatcccataaacagcagccgtcctcaacaccggagaaacgcaggacaagcctcatcccccgtccgaagagcccgaacatgcaggatctcaaaagacggttcaaacaggctctatcagcaaaagttagaaccgttactagcgtttag

SEQ ID NO: 202652 - DNA, 927 bp, synthetic construct
  misc_feature 1..927: note = Description of Artificial Sequence: Synthetic coding sequence
  source 1..927: mol_type = other DNA
atgaccctgaacggcggcggcagcggcgccggcggcagccggggcggcggtcaggaaagggaacgcaggcggggctctaccccttgggggcctgcccccccactgcaccggaggagcatgccagtggacgagagggaccttcaagccgccctgactccaggagctctgacagccgctgccgctggaaccggtactcaaggaccaagactcgactggcccgaagatagcgaggatagtctatcctccggagggagcgacagcgatgaatctgtctataaggtacttttgctgggagcccccggagtcggtaagagtgccttggcccgcatttttggcggggtcgaggatgggcccgaggctgaagccgcaggccatacatacgaccgatccatcgtggtggacggggaagaagcctccctgatggtctatgacatctgggaacaggacggggggcggtggctgcctgggcactgcatggccatgggggacgcttacgtaatcgtgtacagtgtgactgacaaggggtcttttgagaaggcctcagagctgagagtccagcttcgccgtgcgcgccagaccgacgacgtgcccattatcttggtgggcaacaagtcagacctcgtgcgaagcagggaagtaagcgtggacgaggggcgtgcatgcgccgtcgtgtttgactgcaaatttatcgagaccagcgccgccttacaccataatgtgcaggccctcttcgaaggcgtcgttcgacagattagactgaggagagattctaaggaggcgaacgcccgtaggcaggccggcacccgaagacgggagtcgctgggcaagaaagccaagcggtttctcggccggattgttgcaagaaatagcaggaaaatggcattcagagccaagtccaagagctgccacgacttgagcgtactttag

SEQ ID NO: 202653 - DNA, 927 bp, synthetic construct
  misc_feature 1..927: note = Description of Artificial Sequence: Synthetic coding sequence
  source 1..927: mol_type = other DNA
atgaccctgaacggcggcggcagcggcgccggcggcagccggggcggtggacaagaacgtgaacgccgccgcggcagcacaccttggggaccggctccccccctgcaccgccgctcaatgcctgtcgacgagcgggacctgcaggccgctcttactccgggagcgctgaccgctgccgcagccggcactggcacgcagggccctaggctcgactggcccgaggatagtgaggactctctgagctcaggcgggtcagacagcgatgaatctgtgtataaagtgctgttgctgggtgcccctggcgtcgggaaaagcgcactggcacggatttttggcggggtggaggatggcccggaggccgaggcagcagggcatacttacgaccggagcatcgtggtggatggagaggaagcatccctgatggtatatgatatctgggagcaagatggaggaagatggctccccgggcactgtatggctatgggggatgcctatgtgatcgtttactcagtgacggacaaaggatctttcgagaaggcatctgagctgcgggtgcaattgcgtcgtgctcgccagacagatgacgtcccaataattctggtaggtaataaaagcgacctggtgagatctcgggaagtcagtgtggatgagggaagggcctgcgccgtcgtgttcgattgtaaattcatagagacatccgcagcgcttcaccataacgttcaggctctgttcgagggcgtggtgaggcagataaggttacgcagggattcgaaggaggccaacgctcgacggcaggcagggactcggcggagagaatccttaggaaagaaagctaaacggttccttgggaggattgtcgcgagaaattcccggaagatggcttttcgcgccaagtctaagtcctgccacgacctttctgtgctctag

SEQ ID NO: 202654 - DNA, 579 bp, synthetic construct
  misc_feature 1..579: note = Description of Artificial Sequence: Synthetic coding sequence
  source 1..579: mol_type = other DNA
atgcaggccatcaagtgcgtggtggtgggcgacggcgccgtgggcaaaacctgccttctgatctcttatacgacaaacgcgtttccaggagaatacattccaaccgtgttcgacaactattccgcgaatgtgatggtagacgggaagcctgtgaatctgggattgtgggacactgccggacaagaggactacgacaggttgcggcccctttcctacccccagaccgacgtgttcttgatctgttttagtcttgtttcacccgccagctttgagaacgtgcgcgcaaaatggtacccagaggtaaggcaccactgtccccacacacccatacttctggttggtacaaagctagaccttcgagacgacaaagacacgatagagcgcctcagagataaaaaactggccccaatcacttacccacaaggtctggccatggcccgggagatcgggagcgtgaagtacctggagtgtagcgccctgacacagagaggcttgaaaacagtgtttgacgaagcaatcagggccgtcctatgcccacctccagtcaagaagcctggcaagaagtgtacagtcttctag

SEQ ID NO: 202655 - DNA, 942 bp, synthetic construct
  misc_feature 1..942: note = Description of Artificial Sequence: Synthetic coding sequence
  source 1..942: mol_type = other DNA
atgcccaacaccgccatgaagaagaaggtgctgctgatgggcaagtctgggtcaggaaagacaagcatgagatcaattatctttgcgaactacattgcccgcgacactcggagactaggcgccaccatcgatgtcgaacactcccacgtccgcttcctggggaacctcgtgctcaatctgtgggattgtgggggccaggacaccttcatggagaactatttcacaagccaacgcgacaacattttccgcaatgtagaggtccttatttacgttttcgacgtcgaaagccgggaactggagaaggatatgcactactatcaatcttgcctggaagcaatcttgcagaatagcccagatgctaaaatcttttgcctagtgcacaagatggatctcgttcaggaagaccagcgggacctcattttcaaggagcgagaagaagacctccgccggctgtcgaggcctcttgaatgtgcatgtttccgaacctccatatgggacgagactctgtataaggcatggagctccatcgtgtatcagctcatcccaaatgtccagcagctggagatgaacttaagaaattttgcacagatcatagaagctgatgaggtgttgctgttcgagcgtgccacgtttctcgttatctctcactaccagtgcaaggagcaaagggatgtgcacagattcgagaagatctccaacatcatcaaacaattcaaactctcgtgttccaagctcgcagctagctttcagagcatggaggtgcgcaattccaattttgctgcttttatagacattttcactagcaatacatatgtaatggtggttatgtccgatccttctatcccctcagccgctacactgataaacatacggaacgcccggaagcacttcgagaagttggagagagtcgacggtccaaaacattcactactgatgagatag

SEQ ID NO: 202656 - DNA, 1125 bp, synthetic construct
  misc_feature 1..1125: note = Description of Artificial Sequence: Synthetic coding sequence
  source 1..1125: mol_type = other DNA
atggaggagagcgacagcgagaagaccaccgagaaggagaacctgggcccccgtatggacccccccctgggagagcccgaggggtcactcggatgggtgctacccaatactgctatgaaaaagaaggtacttctcatgggcaagagtggcagcgggaaaacatccatgcgatctatcatttttgcgaactacatcgcccgggatacacggcggctcggggcaacaatcctggaccgtatccactccttacagattaactcttctcttagcacctacagtctagtggactccgtggggaacaccaagacattcgacgtggagcatagtcatgtgagattcctgggaaatcttgtactcaatctgtgggactgtgggggccaggatactttcatggagaattattttacctcgcagcgggacaatattttcaggaacgtagaggtgcttatttatgtcttcgatgtcgaatcgcgggagctcgagaaggacatgcattactaccagtcttgcctggaggcaatccttcagaactcccccgatgccaagattttctgtctcgtccacaaaatggacctggtccaagaagatcagcgagaccttatattcaaagaacgagaggaggatctgagacgcctgtctcggcctctggagtgctcttgcttcaggacaagcatatgggacgaaacactctacaaagcctggtcctcaatcgtgtaccaattaatcccgaatgtgcaacaactcgagatgaatttgcgcaactttgccgaaatcatagaggccgatgaagtccttctattcgaaagggccacatttttagtcatttcacactaccagtgcaaagagcagcgggatgcccatcgtttcgagaagatttctaatattatcaagcaatttaaactctcctgctcgaagcttgctgccagcttccaatccatggaggtgcggaattcaaacttcgccgcattcatcgacatcttcacatccaacacctacgttatggtggtgatgagcgacccgagcatcccttctgccgctactttaattaacattcggaacgctcgtaagcacttcgagaaactggagagagtggacggtcctaagcagtgcttactgatgcgctag

SEQ ID NO: 202657 - DNA, 1041 bp, synthetic construct
  misc_feature 1..1041: note = Description of Artificial Sequence: Synthetic coding sequence
  source 1..1041: mol_type = other DNA
atggaggagagcgacagcgagaagaccaccgagaaggagaacctgggcccacgaatggaccccccgctcggagaaccggagggaagtctagggtgggtcctgcccaacaccgcgatgaagaagaaggtcttattgatgggcaaatctggatctggaaaaactagtatgcgctcaattatctttgcaaattatatagcacgggatactcggagactaggggccactatcgacgtcgagcattcgcatgttcgctttctggggaatttagttctgaatttgtgggattgcggaggccaggacacttttatggagaactacttcacttctcagagggataatatcttccgcaacgtggaggtactgatttacgtcttcgacgttgagagccgggagctcgagaaggatatgcattactaccaatcgtgcctggaggctatcttgcagaactcaccggacgctaaaattttttgtctggtgcacaagatggatctggtgcaggaggatcagcgtgacctaatctttaaggaaagggaagaagatcttcgacggcttagcaggcctttggaatgtagttgctttagaacttctatttgggacgagaccctttacaaggcctggagtagcattgtctatcagcttatcccaaatgtccagcaactggaaatgaacctgcggaacttcgctgaaatcatcgaagcagacgaagtgctccttttcgaaagggcaacctttttagttatctctcactaccaatgcaaagaacagcgagatgcacaccggttcgaaaagatatcaaatataattaagcagtttaaactgagctgtagcaaattagcagcttctttccaatcaatggaggtgagaaacagcaattttgcagccttcattgacatcttcacatcgaacacatacgtaatggtggtcatgtctgatccctccatcccgtcagcggccaccttgataaacatacgtaacgctcgtaaacactttgagaaacttgagagggtggacggacctaaacagtgtctgctgatgaggtag

SEQ ID NO: 202658 - DNA, 585 bp, synthetic construct
  misc_feature 1..585: note = Description of Artificial Sequence: Synthetic coding sequence
  source 1..585: mol_type = other DNA
atgaagaagaaggtgctgctgatgggcaagagcggcagcggcaagaccagcatgcgctccattatatttgcaaattatatagccagagatacccgtcggttgggcgcaactatcgacgtggaacacagccatgtccgcttcctgggtaacctggttctcaatctctgggactgcggcggacaggacaccttcatggaaaattacttcacctcacagagggataatatttttcgcaacgtcgaggtgctcatctacgtcttcgacgtggaaagtagggagctggaaaaggatatgcactactatcaatcatgcctcgaagctatcctccagaatagcccagatgctaagatattttgcctggttcacaaaatggatcttgtgcaggaggaccagcgggacttgatattcaaggagcgggaagaggaccttcggagactaagccgacctttggaatgttcttgcttcagaactagtatttgggacgagaccctgtacaaagcgtggtctagcatcgtttaccaactgatccctaatgtgcaacagctggagatgaatctgaggaattttgcggaaattatcgaatag

SEQ ID NO: 202659 - DNA, 1200 bp, synthetic construct
  misc_feature 1..1200: note = Description of Artificial Sequence: Synthetic coding sequence
  source 1..1200: mol_type = other DNA
atgagcctgcagtacggcgccgaggagacccccctggccggcagctatggggcggccgatagtttcccaaaagattttggatacggggttgaagaggaggaggaagaagccgccgccgctggaggcggggtgggagcaggggccggcggaggttgcggccccgggggagctgactcatccaaacctcgtatattgctgatgggacttcgtagatctggaaagtcttccattcagaaggttgtttttcacaaaatgagtccgaacgaaacgctgtttctggagtcaacgaacaagatctacaaagacgatatctccaactccagcttcgtcaattttcaaatatgggactttcctggacagatggacttctttgatccaactttcgactacgagatgatattcagggggaccggggctctgatatacgttattgatgctcaggacgattacatggaagcattaactcgactccatatcaccgtttctaaagcatacaaggtgaacccggatatgaactttgaggtgtttattcacaaggtagacggcctttctgacgatcacaagatcgagactcagcgggatattcatcagagagccaacgacgatctggctgatgcaggtctggagaaactgcaccttagtttctacctgacatctatctacgaccattcgatattcgaggcgtttagtaaggtggtccagaagctgatacctcagcttcctacgttggagaacctcttgaacatattcataagtaacagcggtatcgaaaaagcgttcctgtttgatgtggtgtccaagatctacattgctaccgattcgtccccggtggacatgcaatcttacgaactatgctgtgatatgattgatgtggtaatagatgtaagttgcatctatggtcttaaagaggacggttccggtagtgcttacgataaggaatcaatggccatcatcaagctgaacaataccaccgtcctctatctgaaggaggttacgaagttcctggccttggtgtgcatccttcgggaggaaagctttgagcggaaaggcttgatagactataacttccactgtttccgtaaagctatccatgaggtgtttgaggttggtgtgacaagccatagatcatgcggacaccagacgagtgcctcctcactcaaagccctgacccataatgggaccccccgaaacgccatatag

SEQ ID NO: 202660 - DNA, 750 bp, synthetic construct
  misc_feature 1..750: note = Description of Artificial Sequence: Synthetic coding sequence
  source 1..750: mol_type = other DNA
atggaggccctggcccggctgcacctgaccgtgacccgggcctacaaggttaacactgacattaattttgaggtgttcatacacaaagtcgacggactgagcgacgatcacaaaattgagacccagagagatattcatcagagggccaatgacgacttagccgatgccggactcgaaaaaatccacctctccttctacctcacaagtatttacgatcactccattttcgaagctttttcaaaagtcgtccagaaactgatcccccagctgcccaccttggaaaatttgcttaacatatttatctccaactcaggaatcgaaaaggcgtttctgtttgacgtagtcagcaagatctatattgctacggactccacccccgtcgacatgcagacctacgagctctgctgcgatatgattgatgtagtcattgatatatcttgcatctacggcttgaaggaagatggtgccggaaccccatacgacaaagaatccaccgccatcattaaactcaacaataccactgtgttatacctgaaggaggtgactaaattcctcgctctggtgtgctttgtcagagaggaatcattcgaacggaagggccttatcgattacaatttccactgttttcgaaaagctatacacgaggtcttcgaggtcagaatgaaagttgtgaaatccagaaaagtccagaatcggctgcaaaagaaaaagagggccacccctaacgggacgcctcgcgtgttgctgtag

SEQ ID NO: 202661 - DNA, 1203 bp, synthetic construct
  misc_feature 1..1203: note = Description of Artificial Sequence: Synthetic coding sequence
  source 1..1203: mol_type = other DNA
atgagccaggtgctgggcaagccccagccccaggacgaggacgacgctgaggaagaagaagaggaggatgagctggtgggactggccgactacggtgacggacctgacagcagtgatgcagatcctgacagcggcaccgaagagggggtgctcgacttttcagatcctttttccacggaggtgaagccacgaatcttgctgatgggtctgcgcaggtcaggcaaatcttctatccaaaaggtggtcttccacaagatgtctcctaatgagacacttttcctagagtcaacaaacaaaatttgccgggaggatgtctcgaattctagtttcgtcaattttcagatttgggacttccccggacagatcgactttttcgaccccacctttgactacgagatgatttttcgcggaactggagcactgattttcgtgatagacagccaggacgactatatggaagcactggcgcgcttgcaccttacagtcacgagagcatataaagtgaacacggatattaattttgaagtctttatccacaaagtggacggcttaagcgacgatcataagattgagacccagagggatatccaccaaagagcaaacgatgatctggctgatgccggtctcgagaagattcacctctccttttatctgacctctatctacgaccatagcattttcgaggcgttcagcaaggtggttcagaagctaatcccacaactccccacgctggaaaatcttcttaatatcttcataagcaattctggtattgaaaaggccttcctatttgacgtagtatccaagatctacatagcaacggattctacacccgtagacatgcagacctacgagctgtgttgtgacatgatagatgtggtcatcgatatttcctgcatctatggcctgaaggaagacggggcaggaaccccttacgacaaagaaagtacggctattattaagctcaataacaccacagtcctgtatcttaaagaagtgaccaagttcctcgccctggtttgctttgtgagggaggaaagtttcgagaggaaagggctgatcgattataacttccactgttttagaaaagccatccatgaagtgtttgaggtgcgaatgaaggtagttaagtcacggaaggtccaaaaccgattacagaagaaaaaaagagccacacctaatgggaccccccgcgtcctactgtag

SEQ ID NO: 202662 - DNA, 348 bp, synthetic construct
  misc_feature 1..348: note = Description of Artificial Sequence: Synthetic coding sequence
  source 1..348: mol_type = other DNA
atgctgcgggacaccatgaagagctggaacgacagccagagcgacttgtgcagtactgaccaggaggaggaggaggaaatgatttttggggagaacgaagatgaccttgacgaaatgatggatctcagtgacttgcccacgtcactctttgcctgttccgtgcatgaggccgtcttcgaggcgcgagaacagaaagagagaaatatgaattttactagagagcagtctcgacatcctgcctggtggttcatgagcgttaaagttaaacttaagcgcaagaaacgccaaaaaactccaaaccgtaagcttcccagaagaggagctccgactctccggccccagagatag

SEQ ID NO: 202663 - DNA, 726 bp, synthetic construct
  misc_feature 1..726: note = Description of Artificial Sequence: Synthetic coding sequence
  source 1..726: mol_type = other DNA
atgctgcgggacaccatgaagagctggaacgacagccagagcgacctctgttctacagaccaagaggaggaagaagaaatgattttcggggagaacgaagacgatctggacgagatgatggaccttagtgatctgccaaccagcttgttcgcgtgctcggtccacgaagccgtgtttgaggcccgggaacaaaaggaaaggttcgaggccctgttcaccatctacgacgaccaagtcacatttcagctcttcaagtcttttcgtcgtgtgcggatcaactttagcaaaccggaagctgctgctcgcgcccggatcgagctgcacgagaccgatttcaacgggcaaaagctgaagctctactttgcacaggtgcagatgtccggggaggtgagggacaaaagctacctccttcccccacagcctgtgaaacagtttctcatctcgccgccagccagccccccagtgggctggaagcagtctgaagatgcaatgcccgtcattaactatgatttgctgtgtgctgtgtccaagttggggcctggagaaaaatacgaacttcatgccggaactgagagtactccttccgtagtcgtccacgtgtgcgagtccgaaaccgaagaggaggaagagactaagaaccctaagcagaagatcgcgcagacgaggcggcccgatccaccaactgcggcacttaacgaaccccagaccttcgactgcgccctgtag

SEQ ID NO: 202664 - DNA, 522 bp, synthetic construct
  misc_feature 1..522: note = Description of Artificial Sequence: Synthetic coding sequence
  source 1..522: mol_type = other DNA
atgctgcgggacaccatgaagagctggaacgacagccagagcgacctgtgctcgaccgaccaggaagaagaagaggaaatgatttttggggaaaacgaagacgatctggacgagatgatggacctgagcgacttacccacatccctgtttgcatgcagcgttcatgaggccgttttcgaagccagggaacaaaaggaaaggtttgaggctttattcactatttacgacgaccaggttactttccaactcttcaaatcgtttcggagagtgaggatcaacttctctaaacctgaggccgcagcccgcgcccgcattgagctgcacgagactgattttaatggtcagaaactcaagctctacttcgcccaagaaaggaacatgaacttcacgagggagcagtcccgacaccctgcttggtggttcatgagcgtaaaggtgaagctgaagcggaaaaagcggcagaagacccccaatcgcaagctccctcgaagaggggcccctaccctcaggccccaaaggtag

SEQ ID NO: 202665 - DNA, 198 bp, synthetic construct
  misc_feature 1..198: note = Description of Artificial Sequence: Synthetic coding sequence
  source 1..198: mol_type = other DNA
atgctgcgggacaccatgaagagctggaacgacagccagagcgacttgtgttccactgaccaagaggaagaagaagaaatgatcttcggggaaaacgaagatgatctagacgagatgatggacctatcggatctgccaacatctctgtttgcttgtagtgtccacgaagccgtgttcgaggctcgcgaacaaaagtag

SEQ ID NO: 202666 - DNA, 696 bp, synthetic construct
  misc_feature 1..696: note = Description of Artificial Sequence: Synthetic coding sequence
  source 1..696: mol_type = other DNA
atgctgcgggacaccatgaagagctggaacgacagccagagcgacttgtgtagcaccgaccaagaagaggaggaggaaatgatctttggggaaaacgaggacgatttggacgagatgatggatctctccgatcttcctacctcactgtttgcctgctccgttcacgaagcggttttcgaggccagagagcagaaggagcgtttcgaagcactctttaccatctacgatgaccaggtgacatttcagctgtttaagtcatttcgtagagtccgtattaacttcagcaagcccgaagccgcagcacgagccaggatagagcttcacgaaacagacttcaacggacagaagcttaaattatactttgcgcagtcctatctgctgcctccacagccagtcaaacagtttcttatcagtcccccggcctctcctcctgtaggttggaaacagtctgaggatgctatgccagtcatcaactacgacctcttatgtgccgtctccaagctggggcctggcgagaagtatgagctccatgcaggtaccgaatctactccctcagtcgtggtgcatgtgtgcgagtctgagacagaggaggaagaggagactaaaaacccaaagcaaaagatcgctcagactcgccggcccgatccacccaccgctgccctcaacgaaccccagaccttcgactgcgcgttgtag

SEQ ID NO: 202667 - DNA, 552 bp, synthetic construct
  misc_feature 1..552: note = Description of Artificial Sequence: Synthetic coding sequence
  source 1..552: mol_type = other DNA
atgctgcgggacaccatgaagagctggaacgacagccagagcgacctctgctcaactgaccaggaggaggaggaagagatgatctttggggagaatgaggatgacctcgatgaaatgatggatctgtccgaccttccgacatctttgttcgcatgcagtgtgcacgaggcagttttcgaagcccgtgaacagaaagttcagatgagtggcgaggtcagggataagagttatctgctgcctccacagcctgtgaaacaattcctgatttcacccccggcgtccccaccagtaggatggaagcagtccgaagatgccatgcccgtgatcaattatgatttactgtgcgctgttagcaagcttggccctggggagaagtacgagctgcatgctggaaccgaatccacaccttcagtagtggtccatgtctgcgagtccgaaactgaagaggaggaggagactaagaaccctaaacagaaaatcgcccagaccagaaggccagatccaccaaccgctgcacttaacgagccccagaccttcgactgcgctctgtag

SEQ ID NO: 202668 - DNA, 900 bp, synthetic construct
  misc_feature 1..900: note = Description of Artificial Sequence: Synthetic coding sequence
  source 1..900: mol_type = other DNA
atgcacagcctggccaccgccgcccccgtgcccaccaccctggcccaggtcgatcgcgagaagatttaccagtggataaacgagctctcatctcccgagacccgggagaatgccctgctcgaattgtctaagaaaagggagtcggtccccgatctcgctcctatgctgtggcactccttcggaactattgccgccctgctgcaggagatcgtgaatatctatccatcaatcaaccccccgaccctgaccgcacaccagtcaaaccgagtgtgcaatgccttggccttactacagtgcgtcgctagccatccagagacaaggagtgccttcctcgctgcgcatatccccctgtttctctacccatttcttcacactgtgtctaagacccgacctttcgagtacctcaggctgacgagtctcggtgttatcggagctcttgtcaagacagacgagcaggaggtgataaacttccttctgacaactgagattatccccctgtgcctgcggattatggaaagtgggagcgagctgtcgaagaccgtcgctacattcatactgcagaagatcctgcttgatgatactggtctcgcttatatctgccagacttatgaaaggttctcgcacgtcgctatgatcctgggaaagatggtcctgcaacttagtaaggagccctctgccagacttctgaaacatgttgtgcggtgttacctgaggctaagtgataaccctcgcgctcgggaggccctgcggcagtgtctccctgaccagttgaaagacacaacttttgctcaggttcttaaagacgacaccacaacaaaaaggtggcttgcgcagctggtgaagaatctccaggaagggcaagtgaccgacccacggggaatcccactgcctccacagtag

SEQ ID NO: 202669 - DNA, 996 bp, synthetic construct
  misc_feature 1..996: note = Description of Artificial Sequence: Synthetic coding sequence
  source 1..996: mol_type = other DNA
atgcacagcctggccaccgccgcccccgtgcccaccaccctggcccaggtggaccgggaaaagatctaccagtggatcaatgaacttagcagcccagagacaagagagaacgccctgctggaactgtcaaagaaacgcgagagtgtccccgatctggcgcctatgctgtggcactcttttgggaccattgctgcccttcttcaggagattgtgaatatttacccatccatcaatcctcccacactaaccgcccatcagagtaatcgggtatgtaacgcgctcgcactgctccagtgtgtagctagccacccagagacgcgcagcgcctttctggctgcccacattccactctttctttacccttttttacacaccgtaagtaaaacccggccctttgagtatcttagattgacatctctcggtgtcatcgtagagactgggttccaccatgtgggacaagccgatctcgaactgcctactagctctgacctacccgcatcagccagccagagtgctggaattacgggcgcactggtgaagaccgatgagcaggaggtgattaattttctccttactactgagattatcccactgtgcttgcgaattatggaaagcggttcagaactgtctaagaccgtagcaactttcattctacaaaagatcctgctggatgataccggacttgcatacatctgccagacatacgaaaggtttagccacgttgctatgatccttggcaagatggtccttcaactaagcaaagaacccagcgccagactgctgaagcatgttgtccgatgctacctgcgcctgtcggacaaccctagagctcgggaggccttgagacagtgtctccctgaccaactgaaagataccacattcgcccaggtcctgaaagacgatactactactaaacgttggctagctcagttagtgaaaaacctccaagaaggccaggtgactgaccctcgggggattccactccccccacagtag

SEQ ID NO: 202670 - DNA, 900 bp, synthetic construct
  misc_feature 1..900: note = Description of Artificial Sequence: Synthetic coding sequence
  source 1..900: mol_type = other DNA
atgcacagcctggccaccgccgcccccgtgcccaccaccctggcccaggtggaccgcgagaagatttaccagtggataaacgaacttagctctcccgagaccagagagaatgctctgctggaactgtccaaaaaaagagaatctgtccctgacctagcgcctatgctgtggcatagcttcggtacaatcgccgcactcctgcaagagatcgttaatatctacccctccataaatccacccaccctcaccgcgcaccaaagcaacagggtctgcaatgccctggcattactgcagtgcgttgccagtcatcccgaaactcgatcagccttcttggctgctcatatccccttattcctctacccctttctgcacacagttagtaagaccagaccctttgaatacctgcgcttgacttctctgggcgtgattggcgccttggtcaagaccgacgaacaggaagtgattaatttcctgttgacaacggaaattataccactttgtttgcggattatggagagcggctccgagctgtctaagaccgtcgcgactttcatcttacagaaaattttgctggacgacaccggcctcgcttacatttgccaaacctatgaacgttttagccatgttgccatgattctgggaaaaatggtgctgcagctgagtaaggaaccatccgcacgtttgctgaaacatgtcgtgagatgttatctgcggctgagtgacaacccccgggctagagaagcgctgaggcagtgtttgcctgatcaactgaaggatacaacctttgcacaggttctaaaggacgatacaacgaccaagcgttggctggcacaattggtcaaaaacttgcaggaaggacaggtgacggaccccaggggcattcctctcccgcctcaatag

SEQ ID NO: 202671 - DNA, 777 bp, synthetic construct
  misc_feature 1..777: note = Description of Artificial Sequence: Synthetic coding sequence
  source 1..777: mol_type = other DNA
atgcacagcctggccaccgccgcccccgtgcccaccaccctggcccaggtcgaccgggagaaaatctaccagtggataaacgaactaagttccccagagacacgcgagaatgccttactagaactctccaaaaagcgcgaaagcgtgcctgacctggcccccatgctgtggcactctttcggcaccattgccgccctgctccaagagatcgtcaatatatatccttcaattaacccgccaacactgactgcccatcaatctaacagagtctgtaacgctctcgccttattgcagtgcgtcgcgtcacatccagagaccaggtctgcttttctggcggcacacatccccctgttcctctacccttttctgcacaccgtctccaaaacacgccctttcgagtatctacggctgacatcactgggcgtcattggtgccctggtgaaaactgatgaacaagaggtcattaattttctgctgacaacagaaattattccgctgtgcctaaggataatggaatcgggttcagaacttagcaaaaccgttgcaacctttattctgcaaaagattctcctcgacgacaccggtctggcttatatatgtcagacatacgaacgatttagccacgtagctatgatcctgggcaaaatggtgctgcagctgtcaaaggaaccttccgctaggctccttaaacatgtggtgcggtgctacctgcggctgtcagacaacccaagattttctgacctgaccttctgctggagcagttttcagcggaaatag

SEQ ID NO: 202672 - DNA, 990 bp, synthetic construct
  misc_feature 1..990: note = Description of Artificial Sequence: Synthetic coding sequence
  source 1..990: mol_type = other DNA
atggccgccctgggcggcgacggcctgcggctgctgagcgtgagccgtccagagcgtccccccgagtcagccgcccttgggggccttggaccaggcctgtgctgttgggtgagcgtgttttcatgcctctctctggcatgtagctatgtgggctcattgtacgtctggaagtccgaactccctagagatcaccccgctgtgatcaagagacgctttacctccgtcctggtggtctcttccctcagcccgctctgtgtcctgctgtggcgggagctcacagggattcaacctgggacctcattactgaccctgatgggctttcgactcgagggaatcttccctgcggctctgctgccactgctactgactatgatactgttcctgggtccccttatgcagctgagcatggactgcccttgcgaccttgccgacggactaaaggtggtgctggcgccacgaagttgggcccggtgcttaaccgatatgagatggttgcgtaaccaggtgatagcaccgcttacagaggagttggtatttcgagcctgtatgctccccatgttggctccctgcatgggactcgggcccgccgtgttcacatgtcctctattttttggcgtggcgcactttcaccatatcatagagcaattacggtttcggcaatcttcagtaggtaatatcttcctgagtgcagcctttcaattttcttatactgctgtgttcggcgcctataccgcctttctctttattcgaaccggacatttgatcggaccagtgctttgccacagtttctgcaattatatgggatttcccgcagtctgcgctgcattggaacacccccagagaagaccactgttggctgggtacgctttaggcgtgggtctgtttttgctactgttgcaaccactgacagatcccaagctgtacggaagcctgccattatgcgtcctactcgagagggcgggtgattcagaggctccattatgttcatag

SEQ ID NO: 202673 - DNA, 927 bp, synthetic construct
  misc_feature 1..927: note = Description of Artificial Sequence: Synthetic coding sequence
  source 1..927: mol_type = other DNA
atggccgccctgggcggcgacggcctgcggctgctgagcgtgagccggcccgagcgaccgcccgagtcagccgcactggggggattaggcccgggcctatgttgctgggtgagcgtcttttcctgtctgtccctggcatgtagttacgttgggtccctttacgtttggaaaagtgagctcccacgggaccaccctgccgttatcaagcggcggttcacaagcgtccttgtggtatctagcctctcaccgctgtgtgtgttactctggagagagctgacgggaattcagccgggtacaagcctcctcacccttatgggtttccgcctggaaggcattttcccagcagctctgctgcctctactgctcacgatgattttgttcctgggccctctcatgcagctgagtatggattgcccgtgcgacctagccgacggactgaaggtggtgctggctcctagatcatgggcaaggtgccttacagacatgaggtggcttcgcaatcaggtgatcgctccactgacagaggaattggtattccgggcctgtatgcttcccatgctggctccttgcatgggactgggccctgcagtctttacatgtcccttgttcttcggcgttgcgcatttccatcacataatcgagcagttgcgtttccggcagagcagcgtcggtaatattttcctcagtgccgggcacctgatcggccctgttctttgtcacagtttctgtaactacatgggcttcccagctgtgtgtgccgctcttgagcatccccagcgccggcctctccttgctggctatgctctcggggtcggactgtttttgctactgcttcagcctctcacagacccaaagctctatggatctctcccgctgtgcgtcctgctcgaacgggctggcgattccgaagcaccgctgtgtagttag

SEQ ID NO: 202674 - DNA, 1164 bp, synthetic construct
  misc_feature 1..1164: note = Description of Artificial Sequence: Synthetic coding sequence
  source 1..1164: mol_type = other DNA
atggtgcccaagggcgccaccatgctggtgatcccccccggcctgtctgaagaagaggaagcactgcagaagaagttcaataagctgaagaaaaaaaaaaaggccctgctcgcgctgaagaagcagtcttccagttctactacttcccaagggggagtgaaacgatctctgagcgaacagcctgttatggacactgccaccgcaaccgagcaggctaagcagctcgtaaaaagcggggccatatctgcaattaaggccgagactaagaattccggcttcaaacggagcagaacgttagaggggaagctaaaagaccccgaaaagggcccagtgccgaccttccaacctttccagcgatctataagtgcggacgacgaccttcaggaaagctcccgacgtccacagagaaaatctttgtacgagagtttcgtatccagtagtgatcgcctgagagagcttggtcccgatggtgaagaagctgaaggtcctggcgctggggacggaccgcccaggagtttcgactggggatacgaagagcggtcaggggcccatagcagtgctagccccccacgttcgaggtctcgtgatagatcccatgaacgcaatcgagacagagatcgcgaccgcgagagagaccgggatcgggatcgagatcgcgacagagaaagggaccgcgacagagatcgcgatcgcgatagggacagagaaagggaccgcgatcgggagagagatcgcgatcgcgacagggagggtcctttccggagaagtgactctttcccagagcgcagggctccgcgcaagggtaataccctttatgtctacggggaagatatgacgcccactctgcttcggggcgccttctcccccttcggcaatattatagatttaagtatggaccctccgcgcaactgtgccttcgttacttatgagaagatggaatcggcggatcaggccgtggctgagttgaacgggacccaggtcgagagcgtgcaactgaaggttaatatcgccagaaagcagccaatgctcgacgccgccacaggaaaaagcgtgtgggggtcactggccgtacaaaattcgccaaaagggtgtcatcgggataagaggacccagatcgtctactcagatgacgtctacaaggaaaacctggtcgatggattttag

SEQ ID NO: 202675 - DNA, 1143 bp, synthetic construct
  misc_feature 1..1143: note = Description of Artificial Sequence: Synthetic coding sequence
  source 1..1143: mol_type = other DNA
atgctggtgatcccccccggcctgagcgaggaggaggaggccctgcagaaaaaattcaacaagcttaaaaagaagaagaaggcactgctggctctcaagaaacaaagtagttcgtctactacctcacagggaggcgtgaagcgatctctgagcgagcaacccgtgatggatacagctacggccacagaacaggctaagcagctagtgaagtccggagcaataagtgccatcaaagctgagactaaaaattctggattcaagagaagtagaacgctggaaggaaaacttaaggaccccgaaaaggggccggtgccaacattccagcctttccaaaggtccatctctgcagacgacgacctacaggagtcttcaaggcggccacaaaggaagtcgctttacgagagcttcgtctcctcatccgataggcttcgggaactgggacccgatggcgaagaggctgagggcccaggcgccggggacggaccccccagaagttttgattggggttacgaagagcggtctggcgcccactcctctgcatcccccccacgatcaaggtcccgggacaggtcccatgaaagaaacagagaccgggatagagacagggagagggaccgagatcgggaccgggacagagatcgcgaaagagatcgggatcgcgaccgggatcgtgaccgcgaccgtgagcgggatcgcgacagggagcgcgaccgtgaccgggatcgcgagggacccttccgccgctccgactctttccccgagaggagagcccctagaaaaggaaataccctttacgtgtacggcgaggacatgacacccacgcttctgcggggggcgttcagtccgtttggaaacatcatcgatttatctatggaccctcctagaaactgtgcctttgttacttacgaaaagatggagtccgcggaccaagccgtggctgagttgaatgggactcaggttgagagtgtacagcttaaggtgaacattgctcgcaaacagcccatgctagatgcggccaccggaaagagtgtgtggggctcccttgcggtgcaaaacagccccaagggctgccatcgagacaaacgcacccagatagtgtattccgatgacgtgtataaggagaacctggttgatggcttctag

SEQ ID NO: 202676 - DNA, 1143 bp, synthetic construct
  misc_feature 1..1143: note = Description of Artificial Sequence: Synthetic coding sequence
  source 1..1143: mol_type = other DNA
atgctggtgatcccccccggcctgagcgaggaggaggaggccctgcagaaaaaatttaacaaactgaagaagaagaagaaggccctgctcgctcttaaaaagcaaagctctagcagcacaaccagccaaggcggtgtgaagcgatccctttcagaacagcccgtcatggacaccgcaaccgcaactgagcaagccaagcagcttgtcaaatccggcgcaatttccgccatcaaagccgaaactaagaacagcggtttcaagagatcccgtaccctggaaggcaagctcaaggaccctgaaaagggccccgttcccacttttcagccctttcagcgcagcatatctgccgacgatgatcttcaggaatcatcacgaaggcctcagcggaaaagtctttatgagagttttgtgtcatcttccgatcggctaagagagctgggtcctgacggggaagaggccgaagggccaggtgcaggtgacggccctccacgaagtttcgactggggctatgaagagcgctccggagctcactcttccgcatccccgcctcggtcacgatcgcgcgatcggtctcacgaaaggaaccgggatcgcgatcgggatcgcgagagggaccgagacagagatcgggatcgagatcgagagcgcgacagagatcgagatcgagacagggaccgcgaccgcgagcgggaccgcgatcgtgagagggaccgtgaccgggaccgggagggcccctttcgccgcagcgactctttccccgaaagacgggcaccacggaagggtaacactttgtacgtgtacggcgaagacatgactcctaccctcttgaggggagccttctcccccttcgggaatataattgatctgtcaatggaccctccccgcaactgcgcattcgtgacctatgagaagatggaatccgctgatcaggcggtagccgagctgaacggaacccaagtggagagcgttcagttaaaggtgaatattgccaggaagcagccaatgctcgacgcagccacaggtaagtcagtgtggggctccctggctgtgcagaactcgccgaaaggatgccatcgggacaagaggacgcagatcgtttactccgacgacgtatacaaggaaaacctggtcgatggtttctag

SEQ ID NO: 202677 - DNA, 1143 bp, synthetic construct
  misc_feature 1..1143: note = Description of Artificial Sequence: Synthetic coding sequence
  source 1..1143: mol_type = other DNA
atgctggtgatcccccccggcctgagcgaggaggaggaggccctgcagaagaaattcaacaagctaaagaagaagaaaaaggcactgcttgcccttaagaagcagagtagttcctcaaccacctcgcagggaggggtcaagcgatcactgtccgaacaacccgtgatggataccgccactgcgaccgaacaggccaagcagctggtcaagagcggagccatctccgccatcaaggccgagaccaagaacagcggcttcaagcggtcccggaccctggagggtaaactcaaggatccagaaaagggccccgtgccaaccttccagcctttccagagatcaatctcagctgatgacgacctgcaggaatcttcccggcgcccacagcggaagtcgttatacgagagctttgtgagttcatctgatagactgagagagttggggcctgacggagaggaggctgagggacctggcgccggagacggtcctcctcggtcctttgattggggatacgaggagaggtccggagcccacagcagcgcctcgcctccacggtcacgcagtcgcgaccgctcccatgaacggaacagggatcgggatagagaccgggagcgcgaccgagaccgggatagagacagggacagagagcgcgaccgcgaccgcgatcgcgatcgagatcgtgaccgcgagcgcgatagagaccgggaaagggaccgagatcgcgacagggagggtccatttaggaggagtgattccttccctgagaggcgagcccctcggaaaggcaacactctctacgtgtatggtgaggacatgacacccaccttgctgagaggtgcttttagcccttttggcaatatcatcgatctgtccatggacccccctcgcaactgcgcgtttgtgacgtacgagaaaatggagtctgccgaccaggctgtcgccgagttgaacgggacgcaggttgagtctgtgcagctgaaagtcaacatcgcacgcaaacagcctatgcttgacgctgctaccgggaagagcgtgtggggcagccttgccgtccaaaatagtcccaaggggtgtcacagggacaaacgtacccagatcgtgtactccgacgatgtatacaaggagaacctcgttgatggcttttag

SEQ ID NO: 202678 - DNA, 885 bp, synthetic construct
  misc_feature 1..885: note = Description of Artificial Sequence: Synthetic coding sequence
  source 1..885: mol_type = other DNA
atgctggtgatcccccccggcctgagcgaggaggaggaggccctgcaaaagaagtttaataaactcaagaagaagaagaaagcattgctggctctgaaaaagcaaagttcctcatcaactacatcccaggggggggttaagaggagcttgagcgaacagcccgtgatggacactgctaccgccaccgagcaggctaagcagctggtcaagagtggcgcaatttcagctatcaaggcagagacaaagaatagtggcttcaaacggtctcggacactcgaaggaaagctcaaagaccctgagaagggccccgtccccacttttcaaccctttcaacggagcataagcgcggatgacgatttgcaagagtcatcacggcgcccgcagcgcaagtctctctacgagagcttcgtctctagcagcgatcgcttacgcgagctagggcctgacggagaagaggctgagggtccaggcgctggcgacgggccaccccgaagcttcgattggggatatgaggagcgaagcggggctcattccagcgcatcgccccctcgaagtcggagtcgggaccggtcccatgaaagaaaccgggatcgtgaccgagaccgcgaacgcgacagagatagggacagggaccgggatcgcgagcgggaccgggatcgggatcgcgatcgggaccgcgaccgggagagagatcgggatagggaacgggacagggacagggatcgcgagggcccttttaggaggtccgattccttccccgagagacgcgcccctaggaaggggaacaccttgtatgtgtacggcgaagacatgactcctactcttctaagaggggcattcagccctttcggtaatattatcgatctgtcaatggacccaccttag

SEQ ID NO: 202679 - DNA, 480 bp, synthetic construct
  misc_feature 1..480: note = Description of Artificial Sequence: Synthetic coding sequence
  source 1..480: mol_type = other DNA
atgctggtgatcccccccggcctgagcgaggaggaggaggccctgcagaaaaagtttaataagctcaagaaaaaaaagaaagcactcctggccctgaaaaagcagtcaagctcctctactacttcccaggggggggtgaagcggtccctctctgagcagccagtgatggacacagctactgccaccgaacaggcaaaacagctggtcaaatcaggtgccattagcgccattaaagccgagaccaaaaattccggttttaagcggagccgcactctggagggaaaacttaaagatccggagaagggcccagttcccacattccagcctttccagaggagtatttcagcggatgatgatctgcaagagtcctcacggaggcctcagcgaaagagcctgtacgaatctttcgtgagttcaagcgacaggttgcgggagcttggacccgatggcgaggaagcggaagggcccggggctgggtag

SEQ ID NO: 202680 - DNA, 723 bp, synthetic construct
  misc_feature 1..723: note = Description of Artificial Sequence: Synthetic coding sequence
  source 1..723: mol_type = other DNA
atgctggtgatcccccccggcctgagcgaggaggaggaggccctgcagaagaaattcaataaactgaagaaaaagaaaaaggctctgttggctttgaaaaaacagagctcatcctcaactacttcgcagggaggtgtgaagcggagcctctctgagcagcccgtaatggatacagctacggccaccgagcaggccaagcagctagtgaaatctggagccatctccgcgataaaagccgagacaaagaacagcggatttaagcgatccaggactctcgagggcaagctgaaagatcctgagaagggaccagtccctacttttcaacccttccagcgtagtatatcagcagatgatgacctgcaggaatcttcacgaagacctcagagaaagtccctgtacgaaagcgaccgactccgggagctgggacccgacggcgaggaagcagagggtcctggtgctggggatggacctccaaggtcattcgactggggatacgaagagagaagcggtgcccattccagcgcctctccacctcgcagtcggtcgcgggaccggtcacatgagagaaaccgagaccgcgatagggaccgagaacgggaccgggatagggatcgggatagagaccgggagcgcgatcgcgatcgcgaccgcgaccgggaccgagacagagaaagagacagagaccgagaacgggacagggatagggaccgcgaaggtccttag

SEQ ID NO: 202681 - DNA, 480 bp, synthetic construct
  misc_feature 1..480: note = Description of Artificial Sequence: Synthetic coding sequence
  source 1..480: mol_type = other DNA
atgctggtgatcccccccggcctgagcgaggaggaggaggccctgcagaaaaagttcaataagttgaagaagaagaaaaaagcccttctggctttgaaaaaacagagtagttcttctacaacatcccaaggaggggtcaagcgctccctgtcagagcagccagtcatggacaccgccacagccacagagcaggctaagcaactcgtgaagagtggggccatatctgccataaaggccgaaacgaaaaactcggggtttaagcgctcccgcaccttagaaggaaaactgaaagaccctgagaaagggccggtccccacatttcagccattccagaggagcattagtgcggacgacgacttacaggagtctagccgccgcccccagaggaagtctctttacgagtcttttgtcagcagtagtgaccggctgagggagcttgggccagacggggaggaggccgagggccccggcgctggatag

SEQ ID NO: 202682 - DNA, 480 bp, synthetic construct
  misc_feature 1..480: note = Description of Artificial Sequence: Synthetic coding sequence
  source 1..480: mol_type = other DNA
atgctggtgatcccccccggcctgagcgaggaggaggaggccctgcaaaagaagttcaacaagctcaagaagaagaagaaagcgcttcttgcccttaagaaacagagctcttcaagcacaacatcacagggcggcgtaaagcggtccctctcagagcagccagtgatggacacagcgaccgcaactgaacaggcgaagcagctcgtgaagtctggcgcaatttccgccattaaggccgagacaaaaaattccggcttcaagcgttcacggaccctagagggaaaactcaaagatccagaaaagggcccagtccctacttttcaacctttccagcgctctattagcgccgacgacgatctgcaggagtccagccgtcgcccccaaagaaaaagtctctatgagtcttttgtgtctagctcggaccgcctgagggaactcgggcccgatggcgaagaggcggaggggcccggcgccggctag

SEQ ID NO: 202683 - DNA, 1005 bp, synthetic construct
  misc_feature 1..1005: note = Description of Artificial Sequence: Synthetic coding sequence
  source 1..1005: mol_type = other DNA
atgctggtgatcccccccggcctgagcgaggaggaggaggccctgcagaagaaattcaataagctcaagaaaaagaagaaggctctgctagcgttgaagaaacagtcctcctcaagcacaacatctcaggggggggtgaagcggagtttgagtgaacagcccgttatggacaccgccacggcaacggaacaggccaaacagttggtgaagagcggggcgatttccgccatcaaggccgagactaagaacagtggattcaagagatcacggaccttagaaggcaagctcaaggaccccgagaaagggcctgtgccgacctttcaaccctttcagagatcaatttctgccgacgatgaccttcaggagtcaagcagaaggccccagcgcaagagtctgtatgagagtgacaggctgagagagttggggcccgacggcgaggaagccgaggggcctggagccggcgacgggccaccaaggtccttcgactggggatatgaggaaaggtcgggagcccattctagtgcaagcccacccagatcccgctcacgcgacaggtctcatgaacggaatagagacagagatcgtgacagagaacgcgaccgggaccgcgatcgcgatagggatagggagcgggacagagaccgggaccgggaccgcgatagggacagggaacgggatcgggatagggaaagggaccgtgaccgggacagagaaggaccttttcgtcgcagtgactcatttccagagcgtcgggcacccagaaagggtaacactttatatgtttacggagaggatatgactccaaccttgctacgcggggcatttagcccattcggaaatattatcgatctttctatggaccccccccgcaactgcgccttcgtcacctacgaaaaaatggaaagcgctgaccaggccgtggctgaactgaatggcacacaggtggaatccgtacagctgaaggtcaacattgcccgcaagcaacctatgctggatgcagcatag

SEQ ID NO: 202684 - DNA, 723 bp, synthetic construct
  misc_feature 1..723: note = Description of Artificial Sequence: Synthetic coding sequence
  source 1..723: mol_type = other DNA
atgctggtgatcccccccggcctgagcgaggaggaggaggccctgcagaaaaagtttaataaactgaaaaaaaagaagaaggccctccttgccttgaaaaagcagagctcctcttccaccacctcccaaggcggagtgaagcggtctctcagcgagcagccagtgatggatacggccacagctactgagcaggctaaacaactggtgaaatccggagctatcagtgcgataaaagccgagacaaagaactctgggttcaaacgcagccgcacccttgagggaaagctgaaggaccctgaaaagggccctgtccccacttttcaaccattccagaggagcatttccgccgacgatgacttacaggagtccagccgaagaccccaaagaaagagcctctatgaatcagacagactacgcgagctagggcctgacggcgaggaagccgagggtcccggggccggggacgggcctcctcgctcttttgactgggggtatgaagagcggagcggcgcacactcctctgctagtccaccccgctcacggtccagggatcgcagccacgaacgaaatcgggatagagatcgtgaccgtgagcgggaccgcgatcgggatagggatcgggatcgtgaacgggatagagaccgcgaccgggaccgcgacagggaccgggagcgggacagggaccgagagagagatagggacagggacagagagggaccatag

SEQ ID NO: 202685 - DNA, 480 bp, synthetic construct
  misc_feature 1..480: note = Description of Artificial Sequence: Synthetic coding sequence
  source 1..480: mol_type = other DNA
atgctggtgatcccccccggcctgagcgaggaggaggaggccctgcagaagaaatttaataaattaaagaaaaagaagaaggcgttgttagcattaaagaagcagtcatcatccagcaccactagccaaggaggcgtgaaaagatccctgtctgagcagccggtgatggacactgcaacagctacggagcaggccaagcagctggtgaaaagtggggcgataagcgcgattaaggccgagaccaagaactccggattcaagcgctcccgcaccctcgagggcaagcttaaggacccagagaaagggccagtgcctacctttcagccatttcaacgttctatctctgcggacgatgatttgcaggaatcttcccgccgcccacagcgcaaatccctgtacgagagcttcgtcagcagctcagaccgactgcgggaacttgggccagatggtgaagaggctgaagggcccggcgccggctag

SEQ ID NO: 202686 - DNA, 1005 bp, synthetic construct
  misc_feature 1..1005: note = Description of Artificial Sequence: Synthetic coding sequence
  source 1..1005: mol_type = other DNA
atgctggtgatcccccccggcctgagcgaggaggaggaggccctgcagaagaagtttaacaagctgaaaaagaaaaagaaagccctgctggctctcaaaaagcaatcttcaagttctacaaccagtcaggggggtgtgaagcgctctctatcagaacaaccagttatggacaccgctacagcaacagagcaagcaaaacaactggtcaagagtggcgcaatctccgccatcaaagctgaaacgaagaactcgggcttcaagcggtcccgcacactcgaaggcaagttgaaggaccccgagaaaggacccgtcccaacctttcagccatttcagaggagcatctcagccgacgacgatcttcaggagtcttccaggaggcctcagcgtaaatcgctttatgaatcagatcggctgagagaattgggccctgacggagaagaagcagaaggtccgggagccggcgacggccccccccgctcttttgactggggatacgaagagcggagtggtgcacattcctccgcctcaccccctagatcacgtagtagagaccgctctcacgagagaaatcgggacagagatagagaccgggaacgtgatcgagaccgagacagggatagagatagagaaagggacagagaccgagaccgtgatagagaccgcgatcgggagcgcgaccgagatagagaaagagatagagatagagatagggaagggccgttccgtcgcagtgatagcttcccagaaaggagggcgccacggaaaggcaatactctctacgtgtacggcgaggacatgaccccaactctgctgaggggagctttttctccattcgggaacattattgatctttccatggatcctcccagaaattgcgctttcgtcacctacgagaagatggagtctgccgatcaggctgtcgccgaattgaatggtactcaggtcgagtctgtgcaactaaaagtcaacattgccagaaaacagccgatgctggatgcagcctag

SEQ ID NO: 202687 - DNA, 480 bp, synthetic construct
  misc_feature 1..480: note = Description of Artificial Sequence: Synthetic coding sequence
  source 1..480: mol_type = other DNA
atgctggtgatcccccccggcctgagcgaggaggaggaggccctgcaaaagaaatttaacaagttaaagaagaaaaaaaaagcactgcttgccctgaaaaagcagagctcgtccagcacgacctcacaaggaggcgtgaagcgcagcctctcagaacaaccagtgatggacacagctaccgcaactgaacaagctaaacagctggtgaaaagcggggctatcagcgccatcaaagcagaaacaaaaaatagtggattcaagcggtctcggactttagaaggcaaactgaaagatccagagaagggcccagtccccacttttcagcctttccaacggtctatttccgccgacgacgacctgcaggagagctctagaagaccccaacgtaagagcttgtatgaaagcttcgtctcatcctctgatcgtctcagggaactcggaccagacggagaagaggccgagggccctggggccggttag

SEQ ID NO: 202688 - DNA, 1143 bp, synthetic construct
  misc_feature 1..1143: note = Description of Artificial Sequence: Synthetic coding sequence
  source 1..1143: mol_type = other DNA
atgctggtgatcccccccggcctgagcgaggaggaggaggccctgcaaaagaagttcaataagctgaagaaaaagaagaaagctctccttgccctgaaaaagcagtcttcatcctcaacaacctcgcaagggggtgtgaagcgcagcctgagtgagcagccggtcatggacacagcgaccgccaccgagcaggccaaacagttggtaaaaagcggcgccattagcgcaatcaaggccgagacaaagaactctggattcaagaggtccagaacactcgagggcaaacttaaggatccagagaaaggaccagtgccaacattccagcccttccagcggtctatcagcgctgatgatgacctgcaagagtctagccggaggccacagcgcaagtcgctgtacgagtcttttgtatccagttcggatcgccttagggagctcggccctgacggagaggaggccgaagggccaggcgccggggatggcccacctcgatcatttgactggggctacgaggagcgctccggagctcattcaagcgcctcgccaccccgtagccgttctcgagataggagccatgagaggaaccgtgatcgggatcgcgaccgcgagcgggatagggatcgggacagggatcgcgacagagagagagacagagatcgagatcgggatcgtgacagagaccgggagcgcgatcgggatagagaacgggatcgggaccgggaccgcgaaggtccgttccgcaggagtgattcttttcctgagcggcgcgcgcccaggaagggaaataccctctatgtgtatggcgaagatatgacacccaccctcctgagaggagccttttcccccttcgggaatataattgatctgtcgatggaccctccccgtaattgcgcatttgtgacatacgagaaaatggagtctgccgaccaagctgtcgcggaattgaatggcacccaagtggagtctgtccagctcaaggtgaatatcgccagaaaacagcctatgttggacgcggcaacaggcaaaagtgtttgggggtcacttgccgttcagaacagtcctaaaggctgccaccgggacaagcggactcagatcgtctacagcgacgacgtgtacaaagaaaaccttgtggatggtttttag

SEQ ID NO: 202689 - DNA, 885 bp, synthetic construct
  misc_feature 1..885: note = Description of Artificial Sequence: Synthetic coding sequence
  source 1..885: mol_type = other DNA
atgctggtgatcccccccggcctgagcgaggaggaggaggccctgcagaagaagttcaataagcttaagaagaagaaaaaagcgctgctggcactgaaaaaacagtccagtagcagtaccacctcccagggaggcgtgaaacgcagcctgtctgagcagccagtcatggacaccgcgacagcaaccgagcaggccaagcagttagtgaagtcaggcgccatcagcgctattaaagccgagactaaaaattccggcttcaagcggtcccgtacgttggagggcaagttaaaagatccagaaaaaggccctgtccccacgtttcagcccttccagcggagtatcagtgccgatgacgacttacaggagagctccagaagaccacagcggaagtccctctatgagtcgttcgtctcttcctccgaccgtctgcgtgagctgggcccagacggagaagaggcagagggtccgggtgctggagacggaccgccccgctctttcgattgggggtacgaagaaagatcgggagctcattcgtccgcctccccgccccggtccagatctagggacaggtcccatgaaagaaatagagatcgggatagggacagagaacgagaccgcgaccgagacagggatcgggacagggaaagggaccgcgaccgggatagggaccgcgatcgagacagggagagggatagggatagagagagggatagggacagagaccgggaaggccccttcaggcgtagcgattcatttccggaacggcgtgccccccgtaaggggaacaccctgtacgtgtacggtgaggatatgactccaacgttacttcgtggcgcctttagtccttttggcaacatcatcgacctgagtatggatccgccctag

SEQ ID NO: 202690 - DNA, 723 bp, synthetic construct
  misc_feature 1..723: note = Description of Artificial Sequence: Synthetic coding sequence
  source 1..723: mol_type = other DNA
atgctggtgatcccccccggcctgagcgaggaggaggaggccctgcaaaagaaattcaacaaactcaagaagaaaaaaaaagccctgttagcactgaagaaacaatcaagttcctccactacatcgcaaggaggcgttaagcgctcactgagcgagcagcccgtcatggacactgcgaccgctaccgaacaggctaagcagctggttaaaagcggggcaatcagcgctatcaaggctgagactaaaaacagcggattcaaacgttcacgcaccttagaaggaaagctgaaggaccccgagaaaggacccgtaccaacgtttcagcctttccagcgatcgatcagtgccgatgacgacctacaagaatcgagccgtcggccacagcgaaaatcattatacgagagcgacaggcttcgcgagctgggacccgatggcgaggaagccgaaggacctggggccggcgacggaccccctcgttctttcgactgggggtatgaggagcggtcaggagcccactcctctgcaagcccaccccggagtcggagccgtgaccgcagccatgagaggaatcgagatcgtgatagggatagggaacgtgatcgagatcgcgatcgcgatagggaccgcgagcgggatagagatagggatcgcgatcgggatcgcgacagagaaagagacagggaccgagaaagagaccgcgatagggacagagagggcccttag

SEQ ID NO: 202691 - DNA, 885 bp, synthetic construct
  misc_feature 1..885: note = Description of Artificial Sequence: Synthetic coding sequence
  source 1..885: mol_type = other DNA
atgctggtgatcccccccggcctgagcgaggaggaggaggccctgcagaaaaagttcaataagttgaagaagaagaagaaagcactgctcgcactgaaaaagcagagtagctctagcaccacatcccaagggggcgtaaaaagaagcctgtcggagcagccagtgatggacacggcaacagcgacagaacaagctaagcaacttgtcaaatccggagcgattagcgccatcaaagccgaaaccaagaattcaggattcaaaaggtccaggacactggaaggcaagttaaaggaccccgaaaagggccccgttcccactttccagccctttcagagatctatctcggcagatgatgacctgcaggagagctctcggaggccccagagaaagtcactgtatgagtctttcgtttccagcagtgaccgtctccgcgagttaggccctgatggcgaagaggccgagggccctggggccggagacgggcctcctagaagttttgactggggctacgaagaacgatcaggtgcacacagcagcgcttcccccccccgatcccggagtcgtgatcgaagtcatgagcggaatcgcgatcgcgatagagacagagagcgtgacagggatagagatagggaccgcgaccgggaacgtgaccgagacagggacagggacagagaccgcgacagagaaagagaccgggatagagaaagggatagagatcgagatcgagaagggccatttagaagaagtgactccttcccagaacggagagcgcctaggaaaggcaacaccctttacgtctatggagaagatatgacccccacccttctccgtggcgctttttcacccttcggtaatatcatagacctgagcatggatcctccctag

SEQ ID NO: 202692 - DNA, 1005 bp, synthetic construct
  misc_feature 1..1005: note = Description of Artificial Sequence: Synthetic coding sequence
  source 1..1005: mol_type = other DNA
atgctggtgatcccccccggcctgagcgaggaggaggaggccctgcagaagaagtttaataagctcaaaaagaagaaaaaagccttgctggccctgaaaaaacaaagcagttccagcactacttctcagggtggggttaaacgctcattgtccgagcagcccgtcatggacacagcaacggcaactgagcaggcaaaacagctggtgaagtccggggctataagcgctattaaagctgagacaaaaaactcaggcttcaaacggtcccgtactctggaaggaaaactgaaagatccggagaagggaccagtgccgacatttcaacccttccagagatcaatctctgccgacgacgacctacaggagagctcaaggagacctcaacggaaatctctgtatgagagcgaccgactgagggagctgggcccagatggagaagaggcagaaggacccggggccggggatggacccccaaggagcttcgattgggggtatgaggagcggtccggggcacattccagcgctagccctcctaggtcccgctccagagaccgatcccacgagcgtaatcgagaccgggacagggacagggaaagggatcgcgaccgcgaccgtgaccgggatcgggagcgtgatagggacagggatagggaccgggatcgcgacagggaacgcgatagagatcgcgaaagagatagggatagggaccgcgaaggacccttccgccgctccgacagttttccagaacggagagccccacggaagggaaatacgctctacgtgtacggcgaagacatgacaccaacgctgctgcggggcgcctttagcccattcggcaacattatcgatttatccatggatccaccacgaaattgcgcatttgtaacatacgaaaagatggaatccgcagatcaggccgtagcagaactcaacgggacccaagttgaatcagttcagctgaaagtgaacatcgctcggaaacaaccaatgctggatgccgcatag

SEQ ID NO: 202693 - DNA, 1005 bp, synthetic construct
  misc_feature 1..1005: note = Description of Artificial Sequence: Synthetic coding sequence
  source 1..1005: mol_type = other DNA
atgctggtgatcccccccggcctgagcgaggaggaggaggccctgcagaaaaaattcaacaagctgaagaagaagaaaaaggccctcctagccctgaaaaagcagtcgtcaagtagcacaacgtcacaggggggggttaaacgtagcctttcagagcagcctgtgatggacaccgctactgccacagaacaagcgaagcagctggtcaagtcaggcgcaatctctgctatcaaagccgaaactaagaattccgggtttaagagatccaggacgttagaggggaagttgaaagacccagaaaaaggccccgtgcctacattccagcccttccaaaggagcatttcagccgatgacgacctgcaggaatcatcccggaggccccagcggaagtctctttacgagtctgaccgacttagagaacttggacctgatggcgaggaagccgagggcccaggggctggtgacggacctcctcgctctttcgattgggggtatgaggagaggagcggagcacatagctctgcctccccacctaggtccaggagcagggataggtctcatgagaggaatcgggaccgcgacagagaccgtgagagagatagagacagggatagggaccgcgaccgcgaacgcgaccgagaccgtgaccgcgaccgggatcgggaccgtgaacgggacagagacagggagagggatcgcgaccgggatcgtgaagggccgttcaggagaagcgactctttcccagagaggcgcgccccgcggaaggggaatacactatatgtctatggcgaggacatgacccctaccttactcaggggcgcattctctcctttcggaaatatcatagacttaagcatggacccccccagaaactgtgccttcgtgacctacgaaaaaatggaatcagcagatcaggctgtagccgaactgaacggaacccaagttgagtccgtgcagcttaaggtaaacattgcgaggaagcaacccatgcttgacgccgcctag

SEQ ID NO: 202694 - DNA, 1005 bp, synthetic construct
  misc_feature 1..1005: note = Description of Artificial Sequence: Synthetic coding sequence
  source 1..1005: mol_type = other DNA
atgctggtgatcccccccggcctgagcgaggaggaggaggccctgcagaaaaaatttaacaaactgaagaagaaaaagaaggcccttctggcccttaaaaagcaatcatcatccagtactacctcccaaggcggtgtaaagcgaagtctgagcgagcaacccgtgatggacactgcaactgcaactgagcaggcgaagcagctggtgaaatctggggctatctctgctatcaaggcggagactaagaacagcgggtttaagaggagtcggactcttgagggcaaactcaaagatccggaaaaaggcccggtgcctacctttcagccctttcaaagatctatctcagcagacgacgatctgcaggaaagcagcagaaggccacagagaaagtctttatatgaatccgatcgcttaagggagctgggtcccgatggagaagaagccgagggtcctggagctggggatggcccacctcgatcattcgattggggatatgaggaacgctctggggcgcactctagcgctagccccccccggtccagatcacgagatcgctcccatgaaaggaacagagaccgagacagagaccgtgagcgggacagggatcgggatcgagaccgcgatagggagagggacagggacagagacagagatagagatagagaccgcgaacgggatcgggacagggagcgggatagggatcgagatcgggaagggccttttcgccggtcagacagcttccccgaacgccgggccccaagaaaaggaaataccctgtacgtatacggtgaggacatgacacctacactgttgcgcggggcgttcagcccatttggcaatattattgacctgagtatggacccgccaagaaattgtgctttcgttacctatgaaaaaatggagagcgccgaccaggctgtcgcagagctgaacggaacccaggttgagtcagtccagttgaaggtgaacatcgcccgaaaacaacctatgctagacgctgcatag

SEQ ID NO: 202695 - DNA, 1053 bp, synthetic construct
  misc_feature 1..1053: note = Description of Artificial Sequence: Synthetic coding sequence
  source 1..1053: mol_type = other DNA
atgctggtgatcccccccggcctgagcgaggaggaggaggccctgcagaaaaagttcaataaactgaaaaaaaagaagaaagccctactagctttgaagaagcaaagctcttcttccaccacgagtcaggggggagttaaacgctccctatcggagcagccagttatggacacagctaccgcaacagagcaggccaaacaactggttaagtcgggagccatttcagccatcaaagctgagacaaagaattctgggttcaaaaggtctaggacccttgagggaaagttaaaagaccctgaaaagggccccgtgccaaccttccaaccttttcagcgctccatctccgctgatgatgatcttcaggaatcttctcgcaggccccaacggaagtcattgtacgaatctttcgactggggatacgaggagcgtagtggagcccacagctctgcgagtcctcctagaagccgttcccgggatcgtagccacgaacgcaaccgtgaccgagatcgcgatcgcgaacgggatagggatagggaccgggatcgggacagagagcgagatagggaccgggaccgtgacagagacagagatagagagcgcgatcgggaccgcgagcgggatagggatcgtgatagagagggcccgtttcggagaagtgactcgttccccgagagacgggctcccaggaaaggaaatactctgtacgtctacggcgaagatatgactccaacattgctgagaggcgccttcagcccttttgggaacattatcgacctgtctatggatccacccaggaattgtgcctttgttacttatgagaaaatggaaagcgcggatcaggccgtcgcagagcttaacgggacgcaggtcgagtccgtgcagctgaaagtaaatatcgctagaaagcagcctatgcttgatgcagccactggaaagtcagtctgggggtctttggcggtgcaaaattctccaaaaggatgtcaccgcgataagaggacgcagatcgtctacagcgacgatgtatataaggagaatctcgtggacgggttttag

SEQ ID NO: 202696 - DNA, 1143 bp, synthetic construct
  misc_feature 1..1143: note = Description of Artificial Sequence: Synthetic coding sequence
  source 1..1143: mol_type = other DNA
atgctggtgatcccccccggcctgagcgaggaggaggaggccctgcagaagaagttcaataaactaaaaaaaaagaagaaagctctcttagctctgaagaaacagagctcttcgtccaccacctcccaaggcggtgtgaagcgatctttaagtgaacagccagtcatggatacagccactgctacagagcaggccaagcaactagtgaaatctggcgctatttcggctattaaggcagagaccaagaacagcggattcaaaaggtccaggacgctggaaggcaaactgaaggatccagaaaagggccccgtccccaccttccagccatttcagcggagtatttctgcagacgatgacctgcaggaatcgagcaggcgtccacagcgcaaatccctgtatgagtcgttcgtcagctcaagtgatcgcctccgagagctgggacccgatggcgaggaagccgaggggcccggcgccggagatgggccgcccagatccttcgattgggggtacgaggagaggtccggcgctcactcaagcgcctcacctcccaggtccagaagtcgcgatcgctcacacgagaggaaccgggatcgggatagagatagggaaagagaccgcgacagagaccgagatagggaccgggagcgagacagggatagggatcgcgacagagatcgtgatcgggaaagagatcgcgaccgggaaagagaccgcgatcgtgaccgcgaaggacccttccgcagatcagacagcttccctgagagaagagctccgcgcaagggcaatacactctacgtgtacggggaggacatgactcccaccctcctgagaggcgcgttttccccattcggcaacattatcgacctgtctatggatccacccagaaactgcgccttcgtgacctatgagaagatggagagcgctgaccaggccgtggccgaactgaatggaactcaggttgagagtgtgcagctaaaagtgaatatagctcgaaaacagccaatgctcgatgccgcaacaggtaagtccgtctggggatctctcgccgtgcagaacagtcctaaaggatgtcaccgcgacaaacgaacacagatagtctacagcgatgatgtctataaggagaatctcgtggatggcttttag

SEQ ID NO: 202697 - DNA, 723 bp, synthetic construct
  misc_feature 1..723: note = Description of Artificial Sequence: Synthetic coding sequence
  source 1..723: mol_type = other DNA
atgctggtgatcccccccggcctgagcgaggaggaggaggccctgcaaaaaaaatttaataaactaaagaaaaagaaaaaggctctactggctttgaaaaaacaatcatctagcagcacaacctctcaaggaggagtcaaacgcagtctgagcgaacagcccgtgatggacacagctaccgccacagaacaggcaaagcagctggtgaagtcaggggccatatccgcaatcaaggcggaaaccaagaactccggatttaaaaggtcacggaccttagaaggcaagctaaaagacccggagaagggacccgtacccacattccagcccttccaacggagcatttctgccgatgatgatctacaggaatcctcacggcgaccccagagaaagtctctgtatgagtccgatcggttacgcgagctggggcccgacggggaggaagccgagggacccggagccggtgacggccctccaaggtcttttgactgggggtatgaagagcggagtggagctcattcctctgctagccctcctcggagccgatcccgcgatcgtagccacgaaaggaaccgcgaccgcgaccgagaccgtgagcgggatcgggatagagacagggaccgggatcgggaaagagacagagaccgggaccgcgatcgagaccgcgatcgcgagcgagatcgtgatagagagcgcgacagggaccgggaccgcgaggggccctag

SEQ ID NO: 202698 - DNA, 1005 bp, synthetic construct
  misc_feature 1..1005: note = Description of Artificial Sequence: Synthetic coding sequence
  source 1..1005: mol_type = other DNA
atgctggtgatcccccccggcctgagcgaggaggaggaggccctgcagaaaaagtttaataaactgaagaaaaagaaaaaggcgctgctcgcattaaagaagcaatctagcagtagcaccacctcgcaggggggtgtgaaacggagcctctctgagcagcccgtgatggacaccgccacagccactgaacaggcaaagcagctggtcaaaagtggagccatttctgccatcaaagccgagaccaaaaactccggttttaagaggtctagaaccctagaggggaaattgaaggatccggaaaaaggaccagtgcctaccttccaacccttccagcgttctatcagcgcagacgacgatctgcaggaatcaagtagacggccacagcggaaaagcctttacgagtccgatagactgagggagctgggacctgacggagaagaagctgaggggccaggagccggtgatgggccgccacggagcttcgattggggatacgaggagcgctccggcgcgcacagtagcgcttctcccccacgcagccgctctcgcgatcggagccacgaaagaaacagagatcgcgatcgggatcgcgaaagggatcgggacagagatagggatagggacagagaaagagatcgcgaccgagatagagatcgtgaccgggatcgggaacgggatagggatcgtgagcgagatcgcgatagggacagagaaggacctttcagaaggtccgacagtttcccagagagacgcgccccacggaaagggaatacattatatgtgtacggcgaggacatgacccccaccctgctgcgcggtgccttcagcccatttggcaacattattgatttgtccatggacccgccaagaaactgtgctttcgtgacttacgagaaaatggagagtgccgaccaggccgtggctgaactaaacggcacgcaggtcgaatcggtgcagctgaaagtgaatattgcacgcaaacagccaatgctggacgcagcctag

SEQ ID NO: 202699 - DNA, 885 bp, synthetic construct
  misc_feature 1..885: note = Description of Artificial Sequence: Synthetic coding sequence
  source 1..885: mol_type = other DNA
atgctggtgatcccccccggcctgagcgaggaggaggaggccctgcagaagaagttcaataagctcaaaaagaagaagaaggccttgttagctctcaaaaagcagagcagttcctctacaacctcacagggaggcgtgaaacgctcgctgagtgagcagccagtgatggacaccgctactgccaccgaacaggccaaacagcttgtaaaatccggagctatatccgctattaaggcagagactaagaattccggctttaagcgctcccggactctggaaggaaaactaaaggatcccgagaaaggccccgtgccaacatttcaaccctttcagagaagcatctccgcagatgacgatctgcaggagagttccaggcggccacagagaaagtcactctacgaatcatttgtcagctcatccgaccgcctgcgtgagttgggtcccgacggtgaggaggcggagggtccgggggctggcgacggtccacccagatcctttgactgggggtatgaggaacgatcaggcgctcactcctccgcatctccaccaaggagccgttctagagatcgctcacatgagcggaatagagacagggatagggaccgggagcgagaccgcgatcgagaccgcgatcgagacagagaaagggatagggaccgggatcgcgaccgggatcgggaccgcgagcgtgatagggaccgggagcgcgatagggatcgcgaccgggaggggccgttcaggagatcggacagttttcctgagagaagggctcccagaaagggcaatacactgtatgtctatggcgaagatatgacccctaccctcctgcgaggtgccttttccccttttggtaacataattgatttaagtatggatcccccttag

SEQ ID NO: 202700 - DNA, 885 bp, synthetic construct
  misc_feature 1..885: note = Description of Artificial Sequence: Synthetic coding sequence
  source 1..885: mol_type = other DNA
atgctggtgatcccccccggcctgagcgaggaggaggaggccctgcagaaaaaattcaataaactcaagaaaaaaaagaaagccctcctggcccttaaaaaacagtcctcgtcttccactacctcccagggcggagtaaaacggtcgctttctgaacagccggttatggataccgccacagccacggaacaggctaagcagctggtgaagtctggagctataagcgccataaaggccgaaactaagaacagcggctttaagcgcagtcgcaccctagaagggaagctgaaggatcctgaaaagggccccgtacctaccttccaacccttccagcgatctatttccgctgatgacgacttacaggagtctagcagaaggccacagcgaaagtcgctctatgagagctttgtctcttcttctgaccggctgagggaactcgggcctgacggcgaggaggctgaggggcctggggccggagatgggcccccacgctcctttgactggggctacgaagagcggtctggtgcccacagtagtgccagtccacctaggagtcgaagccgcgacagaagccacgaacgcaatcgggacagggaccgggatcgagagagagacagggacagggatcgggatcgtgacagggagcgtgatcgcgacagagacagagaccgtgatagggatcgagagcgggatcgcgacagagagagagatcgcgatagggatcgcgagggtccttttcggcgaagtgacagtttcccggaacgacgggctccccgtaagggaaacacactttatgtctatggcgaagacatgacacctacgctccttaggggagccttttccccctttggtaacattatcgatttatccatggaccctccctag

SEQ ID NO: 202701 - DNA, 885 bp, synthetic construct
  misc_feature 1..885: note = Description of Artificial Sequence: Synthetic coding sequence
  source 1..885: mol_type = other DNA
atgctggtgatcccccccggcctgagcgaggaggaggaggccctgcagaagaaatttaacaaattgaagaaaaagaagaaagctctgttggctttaaaaaagcaaagcagcagcagcacaaccagccagggtggagtcaaacgcagtctttccgagcagcccgtgatggatacagctactgcaaccgaacaagcgaagcagctggtcaagtctggcgccatcagcgccattaaagccgagaccaagaattcaggcttcaaaagaagtcggaccctcgaggggaagctgaaggaccctgagaaaggtcctgttccgacatttcagccttttcagcggtccataagtgctgacgatgacttacaggaatcatcaagacggccgcagagaaaaagcctgtatgaatcctttgtcagttctagtgaccgcttgcgtgaacttggcccagacggggaggaagctgagggcccaggcgccggagacgggccgccgcggagcttcgactggggatatgaagagcgttcgggagcccactcctccgcctcaccgcccaggagccgctcccgggatagatcccacgagagaaaccgtgaccgggaccgcgatcgcgaacgagatagggatcgcgacagggaccgagacagggagagagacagagatagagatcgggaccgcgatagagaccgggagagggatagagatcgggagcgggaccgcgaccgggaccgcgagggccccttcaggagaagcgattcttttcctgagagaagggcacccagaaagggaaacaccttatacgtctacggggaggatatgactcccacccttctgagaggagccttcagcccatttgggaatattatagacctaagcatggacccaccctag

SEQ ID NO: 202702 - DNA, 723 bp, synthetic construct
  misc_feature 1..723: note = Description of Artificial Sequence: Synthetic coding sequence
  source 1..723: mol_type = other DNA
atgctggtgatcccccccggcctgagcgaggaggaggaggccctgcagaagaagttcaataaacttaagaagaagaagaaggccttgctggcactgaaaaagcagtcaagtagctcaactacatcccaaggcggggtgaagcgatcactctctgagcagccagtgatggacacggccactgccactgagcaggctaagcaattagtcaagtcaggcgccattagcgccatcaaggccgagacaaaaaattcaggcttcaaacgctcacggactctggaagggaagctgaaggacccagaaaagggaccagttcccacatttcagcccttccaaaggtcgatcagtgccgacgacgacctgcaagagtcaagtcgacgcccacaaaggaagtctctgtacgaaagcgaccgcctgcgggagctggggcccgatggagaggaagctgaaggcccaggagctggcgatggccctccccgcagtttcgattggggatatgaggaaagatcaggcgctcattcaagcgcctccccacctcggtctaggagccgggatcggtcgcacgaacgcaatcgagaccgggatagagatcgggaaagagatcgcgatcgtgatcgtgaccgtgaccgcgaacgagatagagacagagacagagatagggatagggaccgagagagggacagagatcgggagcgggaccgggaccgggaccgggagggcccttag

SEQ ID NO: 202703 - DNA, 1143 bp, synthetic construct
  misc_feature 1..1143: note = Description of Artificial Sequence: Synthetic coding sequence
  source 1..1143: mol_type = other DNA
atgctggtgatcccccccggcctgagcgaggaggaggaggccctgcaaaagaaatttaataaactgaaaaagaagaagaaggcattgctcgccctgaagaagcagtccagttcctccacaacatctcaagggggagtgaagcgaagtctgagcgagcagccagtgatggacaccgctaccgctactgaacaggccaagcagctcgtcaagagcggtgctatctctgcaataaaagccgaaacaaagaattccggcttcaagcgctctagaactctggaaggcaagctgaaggatcctgagaaggggcctgttccaacctttcagccgttccagaggtccattagcgccgacgacgacttgcaggagagcagcagacggcctcaaaggaagagtctgtatgagtcctttgtgtcttcctcagacaggctacgggaactgggcccagatggtgaagaagctgagggccccggggctggtgacgggccaccacggtctttcgactgggggtacgaggaaagatctggggctcatagttcagcctctccgcccaggtcccgttcacgtgatagatcacatgagcgtaatagagacagggacagggacagggaaagggatcgcgatcgtgaccgggatagggatagagagcgggaccgagatagggatagggacagggatagggacagagaaagagatcgagaccgagagcgtgatagagaccgggatcgggaggggccattcagaagaagtgacagcttccctgagaggagagcgcctaggaaagggaatactctttacgtttacggtgaagatatgacccccactctcttaagaggagcgttctcaccatttggaaatatcatcgacctgagtatggatccaccccgaaattgcgcctttgtcacctacgaaaagatggaatccgcggatcaagcagtggcggagctaaacggaacccaggtcgaaagcgtccagctgaaagtgaacatcgccagaaagcagccaatgttagacgccgcgaccggtaagtcagtgtggggatctttagcagtgcagaatagtcccaagggctgtcaccgggacaagcgcacccagatcgtatattcggatgatgtatacaaggagaacctcgtggatgggttctag

SEQ ID NO: 202704 - DNA, 480 bp, synthetic construct
  misc_feature 1..480: note = Description of Artificial Sequence: Synthetic coding sequence
  source 1..480: mol_type = other DNA
atgctggtgatcccccccggcctgagcgaggaggaggaggccctgcaaaaaaaatttaacaagctgaagaaaaaaaaaaaggcgctgcttgcactgaagaaacagtcatctagctccacgaccagtcaggggggggttaagcgttctctgagcgagcaaccggtgatggacacagccaccgcaacagagcaggctaaacagctggtgaaatcaggagctatctctgctattaaggcggagaccaagaacagtgggttcaagcggtcccgtacgcttgaggggaaacttaaggatcctgaaaaagggccggtccccaccttccagcctttccaaaggagtatctctgcagacgacgacttacaggagtcatccaggcgccctcaacgaaaatctttatatgaatcattcgtctcttcatcggaccgcctgagggaactaggtcccgatggagaggaagccgaaggccctggagccgggtag

SEQ ID NO: 202705 - DNA, 1164 bp, synthetic construct
  misc_feature 1..1164: note = Description of Artificial Sequence: Synthetic coding sequence
  source 1..1164: mol_type = other DNA
atggtgcccaagggcgccaccatgctggtgatcccccccggcctgtccgaggaagaagaggctctgcagaagaagtttaataaactgaagaagaagaaaaaggccctgctggctctgaagaaacagagttcctccagcacaacgagtcagggaggggtgaaacgatcattatctgagcagcctgttatggatactgccactgcaaccgagcaagctaagcaactggttaaatctggagccatctccgctattaaggctgaaaccaagaattctggattcaagagatctagaacgctggaaggaaagttgaaggatcccgaaaagggccctgttccgactttccaaccattccaaaggtctatttcggcagatgatgacctccaggagagtagcaggcgccctcagaggaagtctttgtacgagtcctttgtgtccagctcagaccggttgcgcgaactgggacctgacggcgaagaggctgagggacctggcgcaggcgatggcccacctcggtctttcgattgggggtacgaagaacggagcggagcccactcatccgcctctccccctagatctaggagcagggataggtcacacgagcgcaacagagatcgcgatagggaccgcgagagagaccgtgatcgggatcgggaccgggacagagagagagatagagatcgtgatagggatcgggatagagaccgggagcgagatcgcgatagggagagggaccgagacagggatcgcgaaggcccctttcggaggtcagattcctttccagagcgcagggccccccgcaagggcaatacgctctatgtctacggtgaagatatgacacctaccttgttacggggcgcatttagcccttttgggaacattattgacttaagtatggaccctccgagaaactgcgcatttgtgacctatgaaaagatggaatcagcagaccaggctgtggctgaactcaacggtacccaggtcgagtccgtgcagctcaaggtcaacatcgcccgtaagcagcctatgttagatgccgcgaccggaaaaagtgtttgggggtcccttgccgtgcagaactctccaaagggatgtcaccgcgacaaacggacgcagatagtgtacagcgatgacgtttacaaagagaacctggtcgacggtttctag

SEQ ID NO: 202706 - DNA, 1164 bp, synthetic construct
  misc_feature 1..1164: note = Description of Artificial Sequence: Synthetic coding sequence
  source 1..1164: mol_type = other DNA
atggtgcccaagggcgccaccatgctggtgatcccccccggcctgtccgaggaagaggaggccctccagaagaagttcaacaagctcaaaaaaaagaaaaaggcactgttagcacttaaaaaacaatccagctcgtctactacaagccagggcggagtcaaacggtccctcagcgaacagccagtcatggacaccgcaaccgcaaccgagcaagccaaacagctagtaaagtccggggcaatctccgccattaaagccgagaccaaaaactccggatttaagcgcagtcgcacactggaggggaagctgaaagatccagaaaagggccccgtgcctacattccagccttttcaacggagcatatcagccgatgacgacctgcaagagagttcccgcagacctcagagaaagtccttgtatgaatccttcgtcagcagttcagatcggttgagggaactgggacctgacggggaggaagccgaagggcccggcgccggcgatggacctcccaggagcttcgactggggttacgaagaacgcagcggcgcacacagttctgcctcccctccccggagtaggagccgtgaccgatcgcacgagaggaaccgcgacagggaccgggatcgcgaacgcgaccgagatagggatagggaccgagatcgggagcgagatagggaccgggatcgggacagagatcgtgatcgggaacgagacagggatagagagcgcgatagggatagagatcgtgagggcccctttaggagatcagactcctttcccgagcgacgagctcctagaaaagggaataccctgtatgtatacggagaagatatgactcccaccttattgcggggggccttcagtccattcggaaatataatcgatcttagcatggaccccccgaggaactgcgcattcgtgacctatgagaaaatggaaagtgcagatcaggccgtggcagagctcaacggtacacaggtcgagagcgtgcaactgaaagtcaacatcgcccgaaaacagcccatgctcgacgccgctaccggcaagagcgtgtgggggagcctggctgttcagaacagtcccaaagggtgccaccgggacaaacgtacgcagattgtttacagcgacgatgtgtacaaagagaatcttgttgatggtttttag

SEQ ID NO: 202707 - DNA, 1164 bp, synthetic construct
  misc_feature 1..1164: note = Description of Artificial Sequence: Synthetic coding sequence
  source 1..1164: mol_type = other DNA
atggtgcccaagggcgccaccatgctggtgatcccccccggcctgagcgaggaagaggaggcgctccaaaaaaagttcaataagctcaaaaagaagaaaaaggctttgcttgctctgaagaaacagagcagttcaagcacaaccagccagggcggagtgaagcgcagcctgtccgagcagcctgtgatggacactgcaacagctactgagcaggctaagcaattggttaaatccggagccatctcagccataaaagcagagaccaagaatagcggttttaaacgatctaggacattagaagggaaactcaaagaccctgagaaagggcccgtgcccacctttcaaccctttcagagatccatttctgcagatgacgacttgcaggaatcttcacggcggccccagcgcaagtccctgtatgagagtttcgtaagtagcagcgacaggctcagagaactgggtcccgacggcgaggaggctgaagggccaggagcgggtgacggccccccaagaagtttcgattggggctatgaagaacgctcaggggcgcatagctcggcatcgccacctcggtcaaggtcccgggacagatcacatgaaagaaacagggatcgcgaccgggacagggaacgcgacagagacagagatcgtgatagagatagggaacgggaccgcgatagggatcgtgaccgcgacagagatcgagagcgcgatcgggatcgcgaaagggaccgtgacagagatagggaagggccttttcggcgctcagattcatttcccgagcgccgggcaccaaggaagggcaataccctgtatgtgtatggcgaggacatgactcccacactgcttaggggcgctttctcgcctttcggaaacattattgatctatcaatggatcccccaaggaactgtgcttttgtcacttatgaaaagatggaatcggctgatcaagccgtagctgagcttaatggtacgcaagtggaaagcgtgcagctgaaggtcaacatcgccagaaaacagcctatgttagatgccgcaacgggaaagagcgtctgggggtcccttgccgtgcagaatagtccaaaggggtgccacagggacaagaggacccaaatagtttactcggacgatgtgtataaagagaacttagtggacgggttctag

SEQ ID NO: 202708 - DNA, 1164 bp, synthetic construct
  misc_feature 1..1164: note = Description of Artificial Sequence: Synthetic coding sequence
  source 1..1164: mol_type = other DNA
atggtgcccaagggcgccaccatgctggtgatcccccccggcctgagtgaggaagaggaggccttgcagaaaaagtttaacaaactcaaaaaaaaaaagaaggccctcctggcgttaaagaaacagagtagctcatctacgacctcccagggcggcgttaaacgcagcctttcagaacagcccgtgatggacacagcgacagcaacagagcaggctaaacagctggtgaagtccggtgccataagcgctattaaagctgagacaaaaaactctgggtttaagcgtagcagaaccctcgagggaaagctgaaggatccggagaagggtcccgttcctacatttcaaccatttcagcgtagcatctccgcagacgacgacctgcaggaatctagtaggcggccacaaaggaaatcactgtatgagtcctttgtctccagttctgataggttacgggagctggggcccgacggtgaggaagctgagggacctggcgccggcgatggcccacctcgctctttcgactggggctacgaagagcgaagtggtgcacatagctcggcctctccaccaagatccagatccagggaccgcagtcacgaacgcaatcgggaccgcgaccgggacagggagcgggaccgcgaccgagatcgtgatagagatagagaacgggatagggaccgagatcgcgaccgagaccgcgacagagagcgggaccgagaccgggagcgtgatcgggaccgggatcgcgagggtccttttcgtagatccgacagttttcccgagcggcgcgcacctcggaaagggaataccttgtacgtgtacggtgaggacatgacccctacccttttgcggggggccttctcacccttcggtaacattatagacttaagcatggaccctcctagaaattgtgcgttcgttacttacgagaagatggagtccgcagaccaggctgtggccgagcttaatggaacgcaggtagagtctgtgcagctaaaggtcaatatcgcgaggaaacagcccatgcttgatgctgcgactggaaagtcagtttggggtagcctcgccgttcagaactcccccaagggatgtcacagggacaaacgaacacagatcgtatacagcgatgatgtatataaggagaatttagtcgatggattttag

SEQ ID NO: 202709 - DNA, 1164 bp, synthetic construct
  misc_feature 1..1164: note = Description of Artificial Sequence: Synthetic coding sequence
  source 1..1164: mol_type = other DNA
atggtgcccaagggcgccaccatgctggtgatcccccccggcctgagtgaggaggaggaggctttgcagaaaaagtttaacaagctcaaaaaaaaaaagaaggccttactcgccctgaagaaacagagttcatccagtacgaccagccaaggtggggtgaaaaggtccctgtctgagcaaccggtgatggatacagcaactgctacagagcaggcaaaacagcttgtcaagtctggggcaatctccgccatcaaagccgaaactaagaacagcggatttaagcgcagtcggacattggagggaaagttgaaagatcccgaaaagggcccagttcccactttccagccctttcaaaggtcgatttccgctgatgacgacctccaagagagctctaggcgacctcagcggaagagcctctatgaaagcttcgtctccagtagtgatcgactgagggaactgggcccagatggagaagaggctgagggccctggcgcaggggatgggccccctcgctcattcgattgggggtacgaagagcggagtggagcccactcttccgcttcacctccaagaagccggagccgggatcggagccatgaacgcaacagggacagagatcgggatagggagagagacagagatcgtgaccgggatcgggacagagagagagatagggacagagaccgggacagagaccgagaccgcgagagagatagggacagggagcgggaccgtgatcgggacagggaaggacctttccggcgctctgactccttcccagagaggcgggctcccagaaagggaaacacgctctatgtgtatggagaggacatgaccccaacactgctacggggggcattttcaccgttcggcaatatcattgacctctccatggatcctccaagaaactgcgcatttgttacctatgaaaagatggaaagcgcagaccaggccgtagccgaactgaatggtactcaagtcgagtccgttcagcttaaggtcaacattgcgcggaagcagcctatgctggatgccgcaacaggcaaatctgtctggggatctttagctgtgcaaaacagtccaaaaggatgccacagagataaacggactcagatagtgtacagcgacgacgtttataaggagaacctcgtagacggattctag

SEQ ID NO: 202710 - DNA, 3294 bp, synthetic construct
  misc_feature 1..3294: note = Description of Artificial Sequence: Synthetic coding sequence
  source 1..3294: mol_type = other DNA
atggccacccaggtgatgggccagagcagcggcggcggcggcctgtttacctcttcaggcaacatcggaatggccttgcccaatgacatgtacgacctgcacgacctcagcaaggcagagctggcagcaccacaactgattatgctagcgaatgtggcccttactggagaagtgaatggctcctgttgcgattatcttgtaggtgaggagcgccagatggccgaattaatgcctgttggggacaataattttagtgactctgaagagggggagggacttgaagagtcagccgacataaaaggcgagccccatggccttgagaatatggagctgaggtcactggaactgtcagtcgtggagccccagccagtgttcgaagcctctggcgcaccagacatctacagtagcaataaggaccttccccccgagactcctggcgcagaggataaaggaaagagcagcaaaacgaagccgttcaggtgtaagccctgccagtacgaggccgagtcagaagaacagtttgtccaccacatcagggtccactcagctaaaaaattctttgtggaggagagtgcggagaaacaggcaaaggctagggagagtgggtcaagcacagctgaagagggcgatttctccaaagggcctattcgttgtgacagatgcgggtacaacaccaaccgatatgatcactataccgctcacttgaagcatcacacgagagctggggataacgagcgagtgtacaaatgtattatttgtacatataccaccgtctcagagtatcactggcgaaagcatcttcgcaaccattttccccgcaaagtttatacctgcgggaaatgcaactatttttctgataggaagaataactatgtgcagcatgtacgaactcacacaggcgaaagaccatacaagtgcgagctatgcccatattcttcaagccaaaagactcatctgaccaggcatatgcgcacccactccggagagaagccgtttaaatgtgatcagtgtagctacgtggcctccaaccagcacgaagtgacacggcacgccagacaggtgcacaatggtccaaagccattaaactgcccccactgtgattacaagaccgccgacagatccaactttaagaagcacgttgaactgcacgtgaacccgcggcagtttaactgccccgtatgtgattacgccgcttcaaaaaaatgcaatttacagtaccacttcaaatcaaaacaccctacatgcccaaataaaacaatggatgtaagcaaagtaaaacttaagaagactaaaaaaagagaagcggaccttcccgacaacattaccaatgagaaaacagagattgaacagactaagatcaagggggatgtggccggcaaaaagaacgaaaaatccgtcaaagccgagaagcgggacgtctccaaggaaaaaaaaccctcaaacaatgtgtccgtcattcaggtgactaccaggaccagaaagtcagtgactgaggtcaaagagatggacgtgcacacaggaagcaatagtgaaaaattcagcaagaccaagaagtcaaagcggaaacttgaggtggactcccattccctacacgggcccgtaaatgatgaggagtcaagtacaaagaagaagaaaaaagtggagagtaagtccaagaataacagtcaagaggtgcccaaaggggacagcaaggtggaagaaaataaaaagcagaacacttgcatgaaaaagagcaccaaaaagaagacccttaagaacaaatccagtaaaaagagctccaagcccccgcaaaaggaaccagtcgagaagggatctgctcaaatggatccgccccaaatggggccagcccccaccgaggccgtacagaagggccctgtgcaggtcgagcctccaccaccaatggagcatgctcagatggagggcgctcagatcagacctgcccccgatgagccggtacagatggaggtggtgcaggaagggccagcccagaaggagctgctcccccccgtcgaacctgcacagatggtcggggcacaaattgtactggcacatatggagctgccaccgcctatggaaaccgctcagacagaggtggctcagatgggtcccgccccgatggagcctgcccaaatggaggtggcgcaggtagagtcagccccaatgcaggtggtgcagaaagagcccgtgcaaatggagctgagtccccccatggaagttgttcagaaggaacccgtacagatcgagctctctccgccaatggaagttgtgcaaaaagaacccgtgaaaatagaactgtcccccccaatcgaagtggtgcaaaaggagccggtgcaaatggagttgtcgccccccatgggcgtcgtgcagaaggagcctgcccagcgggagccaccccccccaagagagcccccacttcacatggagcctatttctaaaaaaccacccctgcggaaggacaagaaagagaaaagtaacatgcagtccgagcgcgcgcggaaggagcaggtactgatcgaggtagggctcgttcccgtcaaagactcctggttgttgaaagagagcgtgagcacggaagatctgtcccccccgtcccctcccttgccaaaggagaacctgcgtgaagaggcgagtggcgaccagaaactcctgaacaccggcgaaggcaataaggaagctcccctgcagaaggtgggagccgaagaggccgatgagtccctgcccggcttagctgcgaatataaatgaaagcactcacattagttcttcaggccagaacttaaatactcccgagggtgagacactcaatgggaaacatcagactgactcgatcgtgtgtgagatgaagatggatacggaccagaatactagagaaaatttaacaggcattaactctactgtggaagagcctgttagcccgatgctgcccccttccgccgtggaggaacgagaggcagtgagcaaaacggcattagcatccccgcctgcgacaatggccgccaatgaaagccaggagattgacgaagatgagggtattcactcccacgaggggtccgacctcagcgataatatgtccgaaggaagtgacgactctggcctccatggtgctcgacctgtgccacaggaatcttcccgtaagaacgctaaggaggcactcgccgtaaaggcggccaaaggcgattttgtttgtatcttttgtgaccggtccttccggaagggaaaggactatagtaagcatctcaataggcacttagtaaatgtgtattacttagaggaagctgcacagggccaggaatag

SEQ ID NO: 202711 - DNA, 3225 bp, synthetic construct
  misc_feature 1..3225: note = Description of Artificial Sequence: Synthetic coding sequence
  source 1..3225: mol_type = other DNA
atggccacccaggtgatgggccagagcagcggcggcggcggcctgtttacttcatctggaaacatcggcatggctctgcctaatgacatgtacgacttgcatgacctgagtaaggccgagttagccgccccacagttgatcatgttagcgaacgtcgccctaaccggcgaagtgaatgggtcctgctgtgactatctcgtcggcgaagagcgccagatggccgaactgatgccagtcggcgacaacaacttttcagactccgaagagggcgaaggactggaagagtccgcagacatcaagggtgagccgcacggtcttgaaaacatggaattgaggtctctggaactatccgtggtagagccacagcccgtattcgaagcctctggtgcaccagacatttactcttctaacaaagacttaccaccagagactcccggggcggaggacaagggcaagtctagtaaaaccaagccctttcgctgcaagccatgccagtatgaggccgaatctgaggagcaatttgtgcaccacatccgagtgcactcagccaagaagttcttcgtggaagaatccgctgaaaagcaggctaaagcccgggaaagcggatctagcacagctgaggagggagatttctctaaaggccccatccggtgcgatcgttgtggctataatactaataggtacgatcattacacggcccatcttaagcaccacacacgggcgggagacaatgagagagtctacaagtgtatcatctgcacttacacaacagtgagcgaatatcactggagaaaacacctgcggaatcattttcctcgaaaagtgtatacgtgtggtaagtgcaattacttcagcgataggaagaacaattatgttcagcatgtgagaacccataccggaaaaagaccctctggagagaagccgttcaagtgtgaccagtgttcgtacgttgcatccaatcaacacgaggtgaccaggcacgctcgccaggtgcacaacggccctaaaccgcttaactgcccacactgtgattataaaaccgccgatcgtagtaattttaaaaaacacgtcgagctgcatgtaaacccaagacagtttaattgtccagtctgtgactacgctgccagtaagaagtgcaatctccagtaccacttcaaatccaagcaccctacctgcccgaataagactatggacgtgtcaaaagtgaaactgaagaaaaccaagaaacgcgaagccgaccttcctgataacataacaaacgagaagaccgaaatcgaacagaccaagatcaaaggtgatgtcgctggaaaaaagaacgaaaagtccgtgaaagcagagaagagagacgtatccaaagagaaaaagccaagtaacaatgtgagtgttattcaggttacgacccgcactagaaagagtgtcacagaggtgaaagaaatggacgtccatacaggcagcaacagcgaaaagtttagcaagacgaagaagtccaaacgcaagttggaggtcgatagtcactctctgcacggcccagtcaacgatgaagaatcatcaacgaaaaagaagaaaaaggtcgaatcaaaaagcaagaataacagtcaggaagtccccaagggagacagtaaagtagaggagaacaagaagcagaatacgtgtatgaaaaagagcactaagaaaaaaaccttaaaaaataaatcgtccaaaaagagttcaaagcctcctcaaaaagaacctgtcgaaaaggggtccgcccaaatggatccaccccagatggggcccgcaccaaccgaggccgtgcaaaagggccctgttcaggtagagcctcctccacccatggagcatgctcagatggagggagcccaaattcgtcccgccccagacgagccagttcagatggaagtcgtccaggaaggaccagctcagaaagagctcctgccccctgtagagccggctcagatggtgggcgcgcaaatcgtgctggcccacatggaactgccacctcccatggagaccgcccagacagaggtcgctcagatggggcctgctccaatggagcctgcacagatggaagtggctcaagtcgagagcgcaccaatgcaggtggtgcaaaaggaacctgtgcagatggagctgtccccccctatggaggtggtccagaaggagccggtacagattgaactgtccccccctatggaggtggtgcagaaggaacccgtgaagattgaattgtcccccccaatcgaggtggtgcaaaaggagccagtgcagatggaactgtcaccacccatgggagtggtgcaaaaggaaccggcacagcgcgagcctcctcccccccgcgagcctcctttacacatggagcctataagtaagaagccacctttgcggaaggataaaaaagaaaagtccaacatgcagtccgaacgcgcaaggaaggagcaagtgctcatcgaggtgggcctggtgcctgtaaaggactcctggctcctgaaagaaagtgtttctaccgaggatcttagccctccaagcccacctctgcctaaggaaaacctccgcgaagaggcttcaggggaccaaaaattgctgaatacaggggagggtaataaagaggcaccattacaaaaggtgggcgcagaagaagcagacgagtcgctgccggggctagctgccaacatcaacgaatctactcacatctcaagcagcggacagaatctgaatactcccgagggggagacccttaatggcaagcaccaaacagacagcattgtctgcgagatgaaaatggatactgatcagaatactcgcgaaaatctgaccgggatcaattccaccgttgaggagccagtgtcccctatgctcccaccctctgccgtggaggaaagggaagcagtgagcaaaactgcattggcctctcccccagctactatggccgccaatgaatctcaggaaatcgatgaagatgagggtatacattcccacgagggctcagatctgtccgacaacatgtccgaaggctcagatgatagtgggttgcacggtgcaagaccagtcccccaagaaagcagccgtaagaatgccaaggaggccctggccgtgaaggctgctaagggagacttcgtttgtatcttctgtgatcgatcatttcggaagggcaaggactattccaagcaccttaatagacacctggttaatgtgtattacttggaggaagcagcacaaggccaggaatag

SEQ ID NO: 202712 - DNA, 1383 bp, synthetic construct
  misc_feature 1..1383: note = Description of Artificial Sequence: Synthetic coding sequence
  source 1..1383: mol_type = other DNA
atggccacccaggtgatgggccagagcagcggcggcggcggcctgttcacctcctccggcaatattggtatggcattaccgaacgacatgtatgatcttcacgatttaagtaaggctgagctggccgctccacagcttatcatgctggctaacgtggcattgaccggtgaagtcaatggtagctgctgcgattacctcgtcggcgaagagaggcaaatggctgagctcatgcctgtgggtgataataacttctctgatagcgaggagggcgaggggttagaggagtctgccgacatcaaaggcgagccccatggattggagaacatggagcttcgcagtctcgagctgagtgtggttgagccacaacctgtcttcgaagccagtggcgcgcccgacatttattcttcaaataaggacctgccacctgagactccaggggcagaagataaaggaaagtcgagcaagacgaaaccctttagatgcaaaccatgccagtacgaggcagagtccgaagaacagtttgtccaccacatcagagtgcactccgctaagaagtttttcgtcgaggaatccgccgagaagcaggctaaggcgcgggaaagtggctccagcacagcagaggaaggggacttctcaaagggccccatccgatgcgatcggtgcggctataacactaatcggtacgaccactatactgcccatttaaaacatcatactagagccggcgacaacgaacgagtctacaaatgcatcatttgtacctatactacagtgagcgagtatcactggcgcaaacacttacggaaccactttccgaggaaagtgtatacatgcggtaagtgcaattacttttcagatcgcaaaaacaattatgtgcaacatgtgaggacccataccggagaacgaccttacaaatgcgaactttgcccttacagctccagccagaagacacaccttacccgccatatgcgaacgcactccggcgaaaaaccttttaagtgcgatcaatgtagttatgttgcctcgaaccaacatgaagtgacccgccatgctcgccaggtgcacaacggcccaaaaccactgaactgtccacattgtgattacaagacagctgacaggagcaattttaaaaagcacgtggagttacacgtgaatccacgccagttcaattgccctgtgtgcgactatgcagcttctaagaagtgcaatctccagtaccactttaaatctaagcatccaacctgcccaaacaaaaccatggatgtcagcaaggtgaagcttaaaaagactaagaaaagggaagcggatctacccgataacattaccaatgaaaaaactgagatcgaacagacaaagaaaaagaaaaagaagaaaaaaaaatag

SEQ ID NO: 202713 - DNA, 5745 bp, synthetic construct
  misc_feature 1..5745: note = Description of Artificial Sequence: Synthetic coding sequence
  source 1..5745: mol_type = other DNA
atggccgacggcaagggcgacgccgccgccgtggccggcgccggcgccgaggcgccggccgtggctggcgccggcgatggcgtcgagactgagagcatggtacgaggccacaggccggtctcacccgcgcctggagcgtccgggctgaggccttgcctgtggcagctcgaaacagagctaagggaacaggaggtgtccgaagtgtcatctctgaattattgcaggagcttctgtcagacactcttacagtatgcctcgaacaaaaatgccagcgaacatatcgtatacctgctggaagtataccgccttgccattcagtcgtttgcaagcgcaagaccatatttgaccacagagtgtgaagacgttttattagtgctcggcaggctcgtgttgtcttgcttcgaactattactgagtgtgtccgagagcgagctcccatgcgaagtctggctgccatttctgcagtctcttcaggaatcccacgacgcacttctggagtttggcaacaacaacctgcaaatcctggtccacgtgaccaaggagggcgtgtggaagaacccagtgctgctgaagatcctgagccagcagcctgtggagacagaagaagttaacaagctgatcgctcaggaaggccctagctttttgcagatgcggattaaacacttgctgaaaagtaattgtatccctcaggccacagcactcagcaaattgtgtgctgaaagcaaagagatctcaaacgtctctagtttccaacaggcgtacatcacctgtttatgtagtatgctgcccaacgaagacgccataaaggaaatagcaaaagtcgactgtaaggaggtgcttgacatcatctgtaatctcgagagcgagggacaggacaacacggcattcgtcttgtgcaccacatacctgacccagcagctgcagaccgcaagtgtctattgttcctgggagttgacactcttctggtcaaaactgcagaggcgcattgacccttcattggatacctttctcgaacgctgcaggcagttcggagtgatcgcgaagactcagcagcacctcttctgtctcatacgagtaatccagacagaggcgcaagacgccggccttggcgtatcaatcctgctttgtgttagagcactccaactccgaagtagcgaagatgaggagatgaaggcttctgtttgtaagaccatcgcatgtctactaccagaggatctggaagtacgccgggcttgccagcttacagaattcttaatcgagccttctttagatgggttcaatatgttggaagaactttatttgcagcctgatcaaaagttcgacgaagagaacgctccggtccccaactccttgaggtgcgaattattgttagctttaaaggctcattggcccttcgatcctgaattctgggattggaaaacactgaagcgccactgccatcaattgctaggccaggaagcctccgacagtgatgatgacctgagcggttacgagatgagcattaacgacacagatgtgttagagtcattccttagtgactatgatgaggggaaagaggataagcaatatagacggcgggacttgactgaccaacataaggagaaacgggacaaaaagcccattggatcctccgaacggtaccagaggtggttgcagtataagtttttttgcttgctttgcaagagagaatgcattgaagcacgaatactgcaccattccaaaatgcacatggaagatggaatctatacttgtcccgtctgcatcaagaagtttaagcgtaaggaaatgtttgtaccccatgtaatggagcatgtcaaaatgcctccatctagacgggatcggtctaagaagaagctcctacttaaaggctctcaaaaaggaatctgcccaaagagccctagtgctatcccagaacaaaaccatagtctcaacgatcaggccaagggtgagagccacgagtatgtgactttctctaagctggaggactgccacctccaagatcgcgatctctacccttgccccggaaccgattgttctcgggttttcaagcaattcaaatacttgagcgtacatctcaaggccgagcaccagaataatgacgagaacgcaaagcactacctggacatgaaaaatcgacgcgaaaagtgtacctactgtcgccgccacttcatgtctgcttttcacctgcgggaacacgagcaggtccactgcggcccacagccgtatatgtgcgtcagtatcgactgttacgccagatttggctccgttaatgagctgctcaatcacaagcagaaacacgatgacttacgatataaatgcgaactcaacgggtgcaatatcgtgttctccgacttgggccagctttatcaccacgaggcccagcattttcgggatgctagctatacgtgcaactttctcgggtgtaagaaattctactacagcaaaatcgaataccaaaatcatttgtccatgcataacgtcgagaactctaatggcgacatcaaaaagtcagttaaattggaagagtcagcaaccggggaaaaacaggactgtatcaaccaaccgcacctcctaaatcagactgataagtcgcatctcccagaagacctcttctgcgctgagagcgccaattcacaaatagataccgagactgccgagaacctgaaagaaaatagcgatagcaattcttctgaccaactcagccactcttcatccgcctccatgaacgaggagttaattgacaccctagatcattcagagaccatgcaggatgtgcttcttagcaatgaaaaggtctttggtcccagcagtttgaaagagaagtgctccagcatggccgtgtgctttgacggaacaaagttcacttgtggattcgacggttgtggctctacttacaagaatgctcgaggcatgcaaaagcatctgcgcaaggtgcacccttaccactttaagccaaaaaagatcaagactaaagatttattccccagtctcggaaacgaacataaccagactaccgagaagcttgacgctgagcctaaaccgtgctctgacacgaactcagatagcccagatgaaggcttagatcacaacatccacattaagtgtaagcgcgagcatcaagggtattctagcgaatctagcatttgcgcaagcaaaagaccctgtacagaagacaccatgttagaactgctgcttagattgaagcacctgtctttgaagaactcaattacccatggtagtttcagcggatccctgcaaggatacccatcttcaggggccaaatctctgcagtctgtgtcaagcatctctgatctgaattttcaaaatcaggacgagaatatgccaagtcagtatctcgcccagcttgctgccaaaccatttttctgtgagttgcagggatgcaaatacgaattcgtgacgcgcgaggccctgctgatgcactatctgaagaagcataactattccaaagaaaaggtcctgcaactgaccatgtttcaacaccggtattctcctttccagtgccacatttgccagagatccttcacgagaaagactcatcttcgaatccactacaaaaataagcaccagatcggcagtgacagagcaacacacaaactgctcgacaacgagaaatgtgatcatgagggaccttgctcagtggaccgcctgaaaggcgattgctccgccgagttagggggcgatccctcttcaaactcagaaaagccacactgtcatccaaaaaaggatgagtgttcatcagaaacggatcttgaatcatcctgtgaggaaacagagagcaaaacttctgacatttccagccccatcggttcgcatagggaggaacaggaaggccgtgaaggacgcggctccagaaggactgtggccaagggtaacctttgttacatcttgaacaagtaccataagcctttccactgcatacataaaacatgtaacagctcatttacaaatctgaaaggcctgatacggcattacagaactgtccaccagtacaataaggaacagctttgtctcgaaaaagacaaggctagaaccaaacgggagctagttaagtgcaagaagatctttgcgtgcaagtataaagagtgcaacaaaagatttctctgctcgaaggccctggcgaagcactgtagcgacagtcacaacctcgatcatattgaagaacctaaggtgctgagtgaggccgggagcgccgcgagattctcttgtaaccagccccaatgtcctgccgtgttttacacattcaacaaactcaaacaccacttaatggaacagcataacatagagggagaaatacatagcgattacgagatccactgcgatctgaacggatgcgggcagattttcacgcaccgttcaaactactcgcaacacgtgtattacagacacaaagattactatgacgatctttttagaagccagaaagtggctaatgagcggctgctgcggtctgaaaaagtctgtcagacggcagacacacaaggacacgaacaccagaccacaagaagatccttcaacgccaaatcaaagaagtgcgggttaatcaaagaaaagaaggcgcctatcagctttaagactcgcgcagaagctctgcatatgtgtgtagaacatagcgaacatacccagtatccctgtatggtccaaggatgcttgagcgttgttaagttggaaagcagcatcgtgagacactataagaggacccaccaaatgtcaagcgcatacctcgaacagcaaatggaaaatctcgtagtctgcgtgaagtatggcactaaaatcaaggaagagcctccgtctgaagcagacccttgtataaaaaaggaggagaatcgatcttgcgagtcagaaaggacagaacacagccatagtccaggagactcatccgcgcctatccagaataccgattgctgccattctagcgagcgtgacggggggcagaagggctgtattgaatcctcctcagtgttcgacgcagacacccttctctacagaggcacgttaaaatgtaaccactcatctaaaactacaagcctggaacagtgtaatatcgtgcagcctccccctccctgcaaaatcgagaactctattcctaaccccaacgggactgaatctggcacttactttacctcattccaactgcctctgcctcgcatcaaggagtccgagactcgtcaacactcttctggccaggaaaataccgtgaaaaaccccacccacgtgcccaaggagaacttccgaaagcacagccagccccgaagctttgatctgaagacgtataaacccatgggatttgagagctccttcctcaaattcattcaggagtctgaggagaaggaggacgatttcgatgattgggagccatccgaacacctgacactctctaattcttcccaatcttcaaacgacttgacaggcaacgtggtggccaacaacatggttaacgactctgagcctgaggttgacatcccccattcaagttccgactccaccatccacgagaacctgacagctataccaccactaattgtcgctgaaacaactactgtgccttctctggagaacctcagggtggtacttgacaaagcgctcaccgattgcggcgagctggcactaaaacagcttcactatcttagaccagtagtggtgcttgaaaggagcaaattctcaactcccatcctggacctgttccccactaagaagactgacgaactatgtgtgggaagttcctag

SEQ ID NO: 202714 - DNA, 4824 bp, synthetic construct
  misc_feature 1..4824: note = Description of Artificial Sequence: Synthetic coding sequence
  source 1..4824: mol_type = other DNA
atgttctaccacgacctgttctaccgggagctgaccctgttctggagcaaacttcagcggcgcattgatccctcactggacacatttctagagcggtgtcggcagtttggtgtcattgcaaagacacagcaacacttgttctgtctgattagggttattcagactgaggctcaggatgcaggcctgggggtgtctattctgctgtgtgtgcgggcgctgcagctgagaagctctgaggacgaggagatgaaggcttctgtatgtaaaactatagcctgtttgctgccagaggacctagaggtccgcagagcttgccaactgaccgagttcctgattgagccaagtctggacggtttcaacatgctggaggaactttacttgcagcctgatcagaagtttgatgaggagaacgctccagtacctaattccctcagatgtgaactgctgctagcgttgaaagcccactggccttttgatcctgaattctgggactggaagacattaaaaagacattgccaccaactgctgggtcaggaggcctccgattccgatgatgatctgtcaggttatgaaatgtccatcaacgatacagacgtgctggagtcgtttttgtctgactacgacgaaggtaaggaagacaaacagtatcggagaagagatctgacagaccaacacaaggaaaagcgcgataaaaaaccgattggctccagtgaacgttatcagagatggctgcaatacaaattcttctgtctgctgtgtaaaagggaatgtatcgaggcccggatccttcatcattccaagatgcatatggaggatggtatatatacctgtcctgtctgtattaaaaagtttaaacgcaaggagatgtttgtccctcatgtgatggagcatgtcaaaatgcctccaagtcgccgcgacagatccaaaaaaaagctgttgcttaagggctctcagaagggcatttgtcctaagagcccctcagcaatccctgaacagaaccactcactgaatgatcaggccaagggtgaaagtcatgagtatgtcacgttttccaaattagaggactgccatcttcaagatcgggacctgtacccatgccccggtacagattgttctcgggtgtttaagcaattcaaatacctgagtgtgcacctgaaggccgagcaccagaacaatgacgaaaacgctaagcactacctggacatgaagaatcggcgggaaaagtgtacctattgtcgtcggcactttatgagcgccttccacttgcgcgagcatgaacaggtccattgtggcccacagccctatatgtgcgtatccattgattgttacgcgagatttggaagcgtgaatgagctcctgaaccacaaacaaaagcacgacgacctacggtacaaatgtgagctaaatggttgcaacatagtcttctcagacctgggtcaactttaccaccacgaagcccagcacttcagggacgcatcatacacctgcaacttcctgggctgcaaaaaattctactactccaagattgaataccagaaccatctgtctatgcacaacgtggaaaacagtaacggagacatcaaaaagtccgtgaaactggaagagtccgctacaggagagaagcaggactgcataaatcagcctcacctgctcaaccaaacagacaagagccatctgccggaggacttattttgtgccgaaagcgctaattcccagattgacacggagactgcggagaacttgaaggaaaattctgacagtaacagttccgatcagctgagccacagcagctcagcctccatgaacgaagagctgatagatacccttgatcacagcgagaccatgcaggatgtgctgctcagtaacgagaaggtgttcggccctagctccctcaaggagaagtgcagttctatggctgtgtgctttgatggaacgaagttcacatgtggatttgacgggtgtggatctacctacaagaacgcaagggggatgcagaagcacctgagaaaagtccacccgtatcacttcaaacccaagaagattaagaccaaagacctcttcccttcactgggtaatgagcataatcagactactgagaagctagacgcggagcctaagccatgcagtgacaccaattctgactccccagacgagggcctggatcacaatatccacataaaatgtaagagagagcaccaggggtactctagtgagtcctctatctgtgcgagtaagaggccatgcacggaggataccatgctggagctgcttttgaggctgaagcatttgtccctcaaaaatagcattacccacggtagcttttcaggctctttgcaagggtacccttcatcaggtgctaagagcctgcagtccgtcagctctatttctgatttgaactttcaaaatcaggacgagaatatgccatcccagtatctggctcagcttgcagcaaagcccttcttctgcgagctccagggctgtaaatacgagtttgtgacgagggaggcacttctgatgcactatcttaaaaagcacaattattcaaaggaaaaagtgctgcaactgacaatgttccagcaccggtactcaccttttcagtgccacatctgtcagagaagcttcactagaaagacacacttgaggatccactacaaaaataaacaccagatcggctccgatagggccacccataaactgctcgataacgaaaagtgcgatcatgaaggaccatgcagcgtcgacagacttaaaggggactgttcggctgagctcggaggagaccccagcagtaacagcgaaaaacctcactgtcatccaaagaaggatgaatgctcctctgagacagacctcgagtcgtcttgtgaggagaccgaatctaagacaagcgatattagctccccaataggatcccatagggaagaacaggaagggcgtgagggaagaggttcaagaagaacagtcgccaagggcaatctgtgttacattttaaacaaataccacaagccttttcattgtatccataagacgtgtaacagcagtttcaccaacttgaagggacttattcgacactacagaactgtgcatcagtacaataaggagcagctctgcctggagaaagacaaagctagaactaaaagagaactggtgaaatgtaaaaagatctttgcctgcaagtacaaagagtgcaataaaaggtttctgtgtagtaaggccctcgcgaaacactgctctgatagccacaatttggaccatatcgaagagcctaaggtgctgtcagaggcgggttctgcagctcggttttcgtgtaaccagccccagtgccctgccgtcttctacacctttaacaaactgaagcatcatcttatggagcagcataatatcgaaggagagattcatagcgactatgagatccactgcgacctgaacggctgcggtcagattttcacccaccggtcaaactatagccagcacgtgtattatcgccacaaagactactacgacgacctgttcagatctcagaaggtggcaaatgagagactgctccgctcagagaaagtctgtcaaacagcagatacccagggccacgagcaccaaaccactcggagatcgtttaatgcgaaaagcaaaaagtgcggactgatcaaagagaagaaggcccctattagcttcaagacacgggccgaggcactgcacatgtgcgtcgagcacagtgagcacactcaatatccctgtatggtccagggttgcctctctgtggtgaaactcgaatccagcattgtccgccattataaacgcacacaccagatgagctcagcatatttggagcagcagatggagaatttggtggtctgcgtaaaatacgggacgaaaattaaagaggaacctccaagtgaggcagacccctgcatcaaaaaagaagagaaccgatcctgcgagtccgaacgtactgagcacagtcattcgcctggcgattcgtcagcaccaatccagaacactgactgttgtcattctagcgagagagatggggggcaaaagggatgcattgaatccagcagcgtttttgatgctgacactctgctgtatcggggcaccttgaaatgcaaccacagctctaagaccacttcacttgagcagtgtaacatcgtgcagcctcctccgccatgcaagatcgagaactccatcccaaaccccaacgggacagaatccgggacatattttacttcctttcagctgcctctgccccgaataaaagagtccgaaacccgacagcacagctcaggccaggaaaatactgtgaagaatcctacccacgttcccaaggaaaatttccgtaaacatagtcagccaagaagcttcgacctaaaaacatacaagccaatgggatttgagagctcgtttctgaagttcatacaggaatcagaggaaaaggaggatgactttgatgactgggaaccctccgagcacctgaccctgtccaactcctcccagtccagcaatgacctaaccgggaatgttgtcgccaacaacatggtgaacgatagcgagcctgaagtggatattcctcattctagctcagactctaccatccacgagaacctgactgccatccccccccttatcgtggccgaaaccacgacagtgccttccctggaaaacctcagggtcgttctggacaaggccctcacagactgcggtgaacttgcactgaagcagctgcactacctcagacctgtagtagtgctggagaggagtaaatttagcactcccatattggacttgtttcccacaaaaaagactgacgagctgtgcgtaggatcctcatag

SEQ ID NO: 202715 - DNA, 1641 bp, synthetic construct
  misc_feature 1..1641: note = Description of Artificial Sequence: Synthetic coding sequence
  source 1..1641: mol_type = other DNA
atgttctactaccccaacgtgctgcagcggcacaccggctgcttcgcaacaatctggcttgccgccacgcgaggcagccggctcgtgaagcgagagtatcttagggtcaatgtcgtgaagacttgcgaggaaatcttaaactatgtactagtacgcgtccaaccccctcagcccggtctccccaggccaaggttttctctgtaccttagtgcccagctgcagatcggggtcatccgcgtgtacagtcagcaatgccagtacctggttgaggatattcagcatatcctcgagcgtctgcatcgcgcccagttgcagattcggatcgacatggaaaccgaattaccatcccttttactgcccaaccaccttgccatgatggagaccctagaggacgcccccgacccctttttcggaatgatgtctgtagacccacggctgcccagcccgtttgatattcctcagatacgacacttactcgaagccgctatcccagagcgagtggaggaaatacccccggaggttccaacggaaccccgggagccagaacggattccggtgacagtcctgccgcccgaggccataacaattttggaggctgagccaatccgtatgttggaaatagagggtgagagagaactgcctgaagtgagcagaagagaactggacctgttaatagcagaggaagaggctatcttgctcgagattccccgcctgcccccaccagcaccagccgaggttgagggcataggcgaggcgcttgggcctgaagaactgcgcttgactgggtgggaacctggcgccctcctgatggaggtgactccccccgaggaactgaggctgcctgcccctccaagtcccgaaagaaggcctccagtgcctcctccacctcgcaggcgcaggcggcgacggctgcttttctgggacaaagagacgcaaattagtcccgagaaattccaggaacagttacagactagggcacactgttgggagtgtcctatggtgcagccacccgagcgcactatcagaggtccagcagaattgtttcgcacaccaacgttgagtggctggttgcctccggaacttctcgggctctggacacactgcgcgcagcccccccctaaggcgctgcggcgagagctgccagaagaggccgcggcagaggaagagcgcagaaagatcgaggtacccagcgagatagaggttcccagggaagcactcgaacctagtgtgcctcttatggtgagcctagagattagtctggaagctgccgaagaagaaaagtcaagaatttctcttatccctcccgaggagcgctgggcgtggcccgaggtggaagcgcccgaggcaccagctctccctgtggtgcctgagctgcccgaggtcccaatggaaatgccacttgtgctgccacctgagttagagctgctttcactagaagctgtgcaccgcgccgtcgctcttgagcttcaagccaaccgcgaaccggatttctcctctttagtgtcacccctcagcccaaggcggatggctgctagggttttttatttgctgctggtgttgtcagcacaacaaattcttcacgttaagcaggagaagccctatggcaggctactgatccaacctgggccacgtttccactag

SEQ ID NO: 202716 - DNA, 1590 bp, synthetic construct
  misc_feature 1..1590: note = Description of Artificial Sequence: Synthetic coding sequence
  source 1..1590: mol_type = other DNA
atgttctactaccccaacgtgctgcagcggcacaccggctgcttcgccaccatatggcttgcagctactaggggctcaagactggttaagcgcgaatatcttcgggtcaatgtcgtcaaaacctgcgaagagattctgaactacgtcctggtccgggttcagccgcctcagcccggactacctaggcccagattttcgttatacctttccgcgcagctgcagattggggtcatccgtgtgtacagtcaacagtgccagtatctggttgaggacatccagcacatcctggaacgcctgcatagggcacaactgcagattaggatcgacatggaaacagagctgccctctttgctcctgcctaaccatttagcaatgatggagacccttgaggatgcgccagacccattctttggcatgatgtcagttgatccaagacttccttcaccattcgacatccctcagattagacacctcctcgaggccgctatccccgagcgggtggaagagattcctcccgaggtgccaacagagccgcgggagcccgagcggataccggttaccgtactgcctcccgaagcaatcacaattctggaagctgaacctattagaatgctggagatagagggcgaaagagagctaccagaggtgtcccggcgagaactggacctcctgatagcagaagaagaggctattctcctcgagattcctcgcctgccgccccctgcccccgctgaggttgagggaattggcgaggcactggggcctgaggagcttcgcctgaccggatgggagcctggtgccctcctgatgcggaggccacctgtcccacccccgccacgccggcgtaggcgacgcagactcctgttctgggataaagagacccagatttcacctgaaaaatttcaggagcagctgcagacacgggcccactgttgggagtgcccaatggtacaaccgccagagagaacgatacgggggcccgctgaactcttcaggacccctaccctgagtggatggctcccgccggagctgctcggactgtggactcattgcgctcaaccccctccaaaggctctgcggcgggagctccccgaggaagccgccgccgaggaggaacgtagaaagatagaggtgcctagcgagatagaggtcccacgagaggctctggaacccagcgtacctttaatggtctccctggagatctcactggaggcggccgaagaggaaaagtccaggatctcactcattccccctgaggaacgctgggcttggcccgaggttgaggccccggaggctcctgcgctgccagtagttccagagctgcctgaggttccaatggaaatgcctctcgtgcttccacctgaactggaactgttgtctctagaggcagtccacagggccgttgcgctcgaactgcaggctaacagagaaccagacttctcaagcttagtatcacctttgtccccccgcaggatggccgctcgcgtgttctatctgctgcttgtcctgtccgctcagcagatcctccatgtgaagcaggagaagccctacgggcgactgctgattcagccaggccctagatttcactag

SEQ ID NO: 202717 - DNA, 225 bp, synthetic construct
  misc_feature 1..225: note = Description of Artificial Sequence: Synthetic coding sequence
  source 1..225: mol_type = other DNA
atgttctactaccccaacgtgctgcagcggcacaccggctgcttcgccaccatatggctggcagctactcgcggatctcgtctggtgaagagagaatatctacgcgttaatgtggttaaaacctgtgaggagatcctgaactacgtgctggtgcgcgtccagccgccacagccaggtttaccccgccccagattcagcctttacctttccgcacagctacagtag

SEQ ID NO: 202718 - DNA, 1641 bp, synthetic construct
  misc_feature 1..1641: note = Description of Artificial Sequence: Synthetic coding sequence
  source 1..1641: mol_type = other DNA
atgttctactaccccaacgtgctgcagcggcacaccggctgcttcgctacgatctggctcgccgcgaccaggggcagccgtctagtcaaaagggagtacttgcgtgtcaacgtggtgaaaacctgcgaagaaattctgaattatgtgttagtgcgcgtgcagcccccacaaccaggtctcccccgccctaggttctctctttacctgtccgctcagctccagataggcgtcattagagtgtatagccaacaatgccaatatctagtcgaggatatccaacatatcctggagcgcctacaccgggcccagttgcagattcgcatagacatggagactgagctgcccagcctgctgttgccaaatcacttagcaatgatggaaacactcgaggatgcccctgatccgttctttgggatgatgtccgtggacccacgcttgcccagccctttcgacataccacagattcgacatttactcgaagcggccatcccagaacgagtggaggaaattcctcctgaggtgcctacggaaccacgggaacctgaacgtattcccgtgactgtcctgcctcccgaagctattaccatactggaagcggagcccatcaggatgcttgagatagagggagagagagaactccccgaggtgagtcgcagggaacttgaccttctgatcgctgaagaagaagcaattttgctggaaataccccgcctaccaccacctgcccccgccgaggtggagggcatcggggaagctttagggcccgaggagctccggttgacaggctgggagccgggcgccctcctgatggaggtaactccacccgaagagctgcggctgcccgctcctccttctcctgaaaggaggcccccggtgccacctcccccccggcgtcgccggcggagaaggttgttgttttgggataaagaaacccagatttcacctgagaagtttcaggagcaattacagacccgggcccattgttgggagtgccccatggtgcaaccacctgaacggaccatcagaggcccagcggagcttttccgcacaccaactctgagtggttggctgccccctgagctgctcgggctttggactcactgcgcacagccccccccaaaagcgcttaggcgagagctccctgaagaagccgcagctgaagaggaacgcaggaaaatagaggtcccgagcgagatcgaggttcctcgggaggccttggaacctagtgtacccctcatggtcagtcttgaaatttccctggaagcggcggaagaggagaagtcccggatcagcctgatccctccggaagagaggtgggcttggccagaagtcgaggctccggaggcgcccgctcttcctgtggttcccgagctgcctgaggtgccaatggagatgcctttagtgttgcctcctgaactggaactactttccttggaagccgtgcacagggctgttgcactggaattgcaggctaatagggaaccggatttctcatccctggttagccccctttccccaaggcggatggcagcccgtgttttttatctgctgctcgttctttcggcacaacagatcctccatgtgaagcaggaaaaaccatatggacggctgctcatccagcccggtcctcgattccattag

SEQ ID NO: 202719 - DNA, 699 bp, synthetic construct
  misc_feature 1..699: note = Description of Artificial Sequence: Synthetic coding sequence
  source 1..699: mol_type = other DNA
atggccggcgacaccgaggtgtggaagcagatgttccaggagctgatgagagaagtcaagccctggcaccgctggacactcaggcccgacaagggactgttgcccaatgtgctaaagcctggatggatgcagtaccagcagtggacttttgcccggttccagtgtagtagctgttcgcgaaactgggcctcagcacaggtgctggtactgtttcatatgaactggtcggaggagaagtccagagggcaagttaagatgagagtatttacacaacggtgcaagaaatgtccgcaaccacttttcgaggaccccgaatttacccaggagaacatttctagaatcttaaaaaatctggtgtttaggatactgaagaaatgctaccgtggtaggttccagctgatcgaagaggtcccgatgatcaaagacatctcgctggagggcccgcataattcagataactgtgaagcctgtcttcagggcttctgtgccgggccaattcaggttacctctctgccaccttcacagaccccgcgagttcattctatatacaaggtcgaggaggtcgtgaagccatgggcctctggtgagaacgtttactcctatgcttgccaaaaccatatatgtagaaatctgagtattttctgctgctgcgttatcctcattgtgatcgtggtaattgtagtgaaaaccgcaatctag

SEQ ID NO: 202720 - DNA, 741 bp, synthetic construct
  misc_feature 1..741: note = Description of Artificial Sequence: Synthetic coding sequence
  source 1..741: mol_type = other DNA
atggtggtggacttctggacctgggagcagaccttccaggagctgatccaagaagctaagccaagggcgacatggaccctgaagcttgatggtaacctgcagctagattgtcttgcccagggatggaaacaataccagcagagggcctttggatggtttcggtgtagctcctgccagagatcttgggcttcagcccaagtccagattttgtgtcacacatattgggagcactggacatcccaaggtcaggtccgcatgcgcctcttcggccagagatgtcagaaatgctcttggtcccagtacgagatgcccgagttttctagcgactccacaatgagaatcctgagcaatctggtgcagcatatcctgaagaaatactacggaaacggcacgaggaagagccccgagatgcctgtgattctggaggtctctctggagggttcccacgatacagccaattgcgaagcctgcactttaggtatctgtgggcagggtttaaagtcttgtatgactaagccatccaaatccctcttaccacaccttaagacggggaactcatctccgggaatcggcgctgtgtacctcgccaaccaggcaaagaatcaatcagctgaggctaaagaggctaaggggtcagggtacgagaagctcgggccatctcgtgacccagaccctcttaatatttgtgtgttcatcttgctcctggtgtttatcgtggtgaagtgcttcacctcagaatag

SEQ ID NO: 202721 - DNA, 447 bp, synthetic construct
  misc_feature 1..447: note = Description of Artificial Sequence: Synthetic coding sequence
  source 1..447: mol_type = other DNA
atggcccgggccctgtgccggctgccccggcggggcctgtggctgttactcgctcaccacctttttatgactacggcatgccaggaagctaactacggcgctcttctgagggaactctgcttgacccagttccaggtcgatatggaggccgtcggcgaaactctctggtgtgattggggtagaacaatccggagctatagagagttggctgactgcacctggcacatggccgagaagctgggatgcttctggcccaatgccgaggtggatcgcttcttccttgcagtgcatgggcgctattttaggagctgtccaattagtgggcgagcagtcagggatcccccgggatcaatcctgtaccccttcatcgtggtacccatcaccgtgacactgctggtcactgcccttgtggtttggcagtctaaaagaacggaaggaattgtgtag

SEQ ID NO: 202722 - DNA, 381 bp, synthetic construct
  misc_feature 1..381: note = Description of Artificial Sequence: Synthetic coding sequence
  source 1..381: mol_type = other DNA
atgaccaccgcctgccaggaggccaactacggcgccctgctgcgggagctgtgtttgacccagtttcaggttgatatggaagcagtcggcgagaccctgtggtgcgattggggcaggaccattcgcagctatcgtgaattagctgactgcacttggcacatggccgagaagttgggttgcttttggccaaatgcagaagtagaccgcttctttctggctgttcacggccgctacttccggtcttgtcccatcagcggacgcgctgtacgtgatccacccggtagcatcttataccccttcatcgttgtccccatcaccgtgacactgctggtgactgcgctcgtggtgtggcagagtaaacgcaccgaaggtattgtctag

SEQ ID NO: 202723 - DNA, 381 bp, synthetic construct
  misc_feature 1..381: note = Description of Artificial Sequence: Synthetic coding sequence
  source 1..381: mol_type = other DNA
atgaccaccgcctgccaggaggccaactacggcgccctgctgcgggagctgtgcctgacccagtttcaggttgacatggaagcagtgggggagaccctctggtgtgactggggcaggacaattcgctcctaccgcgagttggctgactgtacgtggcacatggcagagaagctggggtgcttctggcctaacgcagaggtggaccgtttctttttagcagtgcacggccgatacttccgttcctgtcctatcagcgggagggccgtgcgcgatccgcctggctctatattatacccttttatagtggtacctatcaccgtcaccttgttagtgactgcactggtggtgtggcaatcaaagaggactgaaggaattgtctag

SEQ ID NO: 202724 - DNA, 381 bp, synthetic construct
  misc_feature 1..381: note = Description of Artificial Sequence: Synthetic coding sequence
  source 1..381: mol_type = other DNA
atgaccaccgcctgccaggaggccaactacggcgccctgctgcgggaactgtgtctgactcaatttcaggtggatatggaggcggtcggtgaaaccttgtggtgcgattggggaagaaccatacggtcctatcgggagctggcggattgcacttggcacatggcggaaaagttagggtgcttttggcctaacgctgaggtggacaggttctttctcgctgtgcacggtcgatattttagaagctgtccaatatccggcagagcagtgagggatccaccgggatcaatcctgtatcccttcattgtggtcccaataaccgtcactttacttgtaaccgctctggttgtttggcagagtaagagaacggaggggatcgtgtag

SEQ ID NO: 202725 - DNA, 528 bp, synthetic construct
  misc_feature 1..528: note = Description of Artificial Sequence: Synthetic coding sequence
  source 1..528: mol_type = other DNA
atggccagcctgcgggtggagcgggccggcggcccccggctgcccagaactcgggtgggtaggcccgctgccctccggcttttgctcctgttgggcgccgttctcaatccccacgaggccctggcacagcccttgccaacaaccggtactccaggatcagagggtggcaccgtcaaaaattacgagactgccgttcaattttgctggaatcactataaggaccagatggacccgatcgagaaggattggtgcgactgggctatgatttcaagaccttattccactcttcgcgactgcttagagcacttcgctgagctttttgatctgggcttccctaacccactcgcggagcgtataattttcgagacccatcagattcactttgccaattgctctttggttcagcccactttttcagacccgcctgaagacgtgctgttggcgatgatcatcgccccgatctgcctaattccttttctgataaccctggtggtgtggcggtccaaagactcagaggcacaggcctag

SEQ ID NO: 202726 - DNA, 447 bp, synthetic construct
  misc_feature 1..447: note = Description of Artificial Sequence: Synthetic coding sequence
  source 1..447: mol_type = other DNA
atggagaccggcgccctgcggcggccccagctgctgcccctgctgctcctgttgtgtggaggttgtccacgtgctggcgggtgcaacgaaacgggtatgctcgagagactgcccctctgcggaaaagcgttcgcagatatgatgggaaaagtcgacgtctggaaatggtgcaatctgtcggaattcatcgtctactacgaatccttcacaaactgcaccgaaatggaagccaacgtggtggggtgctactggccaaacccactagctcagggattcatcacaggaatccatcgacagtttttttccaattgcacagttgatagagtgcatctcgaagatccgccagatgaggtgctcataccgctgatagtgatacctgttgtgttaaccgtcgctatggccggtctggtcgtgtggaggtccaagcgaaccgatacgctgctgtag

SEQ ID NO: 202727 - DNA, 447 bp, synthetic construct
  misc_feature 1..447: note = Description of Artificial Sequence: Synthetic coding sequence
  source 1..447: mol_type = other DNA
atggagaccggcgccctgcggcggccccagctgctgcccctgctgcttcttctgtgtggcggatgcccgagggccgggggatgtaacgaaacagggatgctggaaagactgccgctctgtggtaaagcctttgccgatatgatgggtaaggtggatgtgtggaaatggtgcaatctgagcgagttcatagtctattatgaaagctttacaaactgcactgagatggaagccaatgttgtcgggtgttattggcctaaccccctggctcaggggtttattactgggatccaccggcagttttttagcaactgcaccgtggatcgggtgcacctggaggatccccctgacgaagtgctgatacccctaattgtaatcccggtggtgctcaccgtggccatggccggactggtcgtatggcggagtaagcggacagacactctcctgtag

SEQ ID NO: 202728 - DNA, 456 bp, synthetic construct
  misc_feature 1..456: note = Description of Artificial Sequence: Synthetic coding sequence
  source 1..456: mol_type = other DNA
atggagaccggcgccctgcggcggccccagctgctgcccctgctgttgctcctgtgtggtggatgccccagggctggcggctgtaatgagacaggcatgctggagagactgcccctttgtggcaaagcttttgcggatatgatgggaaaggtcgacgtatggaagtggtgtaacttatccgaattcattgtgtactacgagtccttcacgaactgtactgaaatggaagctaacgtcgtgggttgctactggccaaaccccctcgcacagggtttcattacaggcatccatcgccagttctttagcaactgtactgtcgatcgggtgcacctagaggatccgcctgacgaagttctgattccactcatcgtgattccggttgtgctgaccgttgctatggctggtctggtagtctggaggagcaagaggacagacaccctcttatgtggtaactag

SEQ ID NO: 202729 - DNA, 606 bp, synthetic construct
  misc_feature 1..606: note = Description of Artificial Sequence: Synthetic coding sequence
  source 1..606: mol_type = other DNA
atggtgagctggatcatcagccggctggtggtgctgatcttcggcactctgtacccagcctactactcgtacaaggctgtgaagagcaaggatatcaaggagtacgttaaatggatgatgtactggattatttttgcactgtttacaaccgcagaaacctttaccgatatttttttgtgttggttccctttctactatgaactgaaaatagcatttgttgcttggctgctcagcccctataccaaggggagttcactgctttaccgcaagtttgttcacccaacactcagctctaaagagaaggaaattgacgattgccttgtccaagctaaggatcgctcctacgatgccctcgtccacttcgggaagagaggccttaacgttgccgctacggcggccgttatggctgcctcgaaaggacagggtgccttgtccgaacgcctcagaagtttctccatgcaggatctgaccacgattcgaggtgatggggcccctgcccccagtggcccaccaccgccgggctccggtcgggcgagcgggaagcacggacagcccaaaatgtctcgttcagcttccgagtcggcttcttcgagtgggacagcttag

SEQ ID NO: 202730 - DNA, 525 bp, synthetic construct
  misc_feature 1..525: note = Description of Artificial Sequence: Synthetic coding sequence
  source 1..525: mol_type = other DNA
atggaccacctgcaggccggcggcgtgaagtggatgatgtactggataatctttgccctgttcaccactgctgaaaccttcactgatatctttttgtgctggtttccattctactatgaattgaaaattgccttcgtcgcttggctgctttccccatatacaaaagggtcttccctgctttatcgtaagttcgtgcatccgactttgtcctctaaagaaaaggagattgacgactgtttggtgcaagctaaagatagaagctacgacgcgctcgtgcactttggcaaacgcggactcaatgtagctgccactgctgcggtgatggctgcgagtaagggccagggagccctcagcgagaggctgcggtcctttagcatgcaggatctgaccaccattaggggtgatggtgccccagcaccttcgggccctcctcccccaggctctggtcgcgcatcgggtaaacatggacagccaaagatgagccggagcgcctctgagtcagcttctagcagtggcactgcctag

SEQ ID NO: 202731 - DNA, 627 bp, synthetic construct
  misc_feature 1..627: note = Description of Artificial Sequence: Synthetic coding sequence
  source 1..627: mol_type = other DNA
atgcagaaggtgctgagcaacggccagaccgaggaggtgcggagcggtagccggctcattttcggaaccctgtatccagcatattactcctacaaggcagtgaagtccaaggacattaaagaatatgtaaaatggatgatgtattggattattttcgctctgttcacaactgctgagaccttcactgatatttttctctgctggttccctttttattatgagctgaagatcgcttttgtagcctggctcctgtcaccgtacacaaaggggtcaagtttgctgtatagaaagttcgtgcacccgactctcagtagcaaagagaaagagattgatgactgtctcgtccaggccaaggatcgctcctacgacgcactagtccatttcggcaagcgtgggctcaatgtggccgctacagccgccgtcatggccgcaagcaaaggacagggcgctctgtccgagaggttgaggagcttttcaatgcaggacttaactaccattcggggtgacggagcccccgcaccctcggggcctcctccccctgggtcaggtcgggcctcaggcaaacatggacaacccaaaatgtcaagatctgcaagcgagagtgcatcctccagcggaaccgcgtag

SEQ ID NO: 202732 - DNA, 543 bp, synthetic construct
  misc_feature 1..543: note = Description of Artificial Sequence: Synthetic coding sequence
  source 1..543: mol_type = other DNA
atgagcctgcacccctgccggctgaacaacctgcccaaccaggtgaagtggatgatgtattggatcatttttgcgctctttacaactgctgaaactttcacagatatatttctgtgctggtttccgttctactatgaactgaaaattgcatttgtggcttggctgctgtctccgtatacaaaggggtcttcactcttataccgtaagttcgtgcatccaacgctttccagcaaagagaaggaaatcgacgattgcttggtccaggccaaggaccgaagttacgatgcccttgtccactttggcaaacgcggtctcaatgttgcagctaccgcagcggtgatggctgccagcaagggtcagggcgctctctctgagagactgcggtccttttccatgcaagacctcaccacgattagaggtgatggcgcacctgctccaagcgggccccccccccccggctcaggccgggcatccgggaagcatggacagcccaagatgagtcgatcagccagtgagtctgcaagttcttcaggcaccgcgtag

SEQ ID NO: 202733 - DNA, 432 bp, synthetic construct
  misc_feature 1..432: note = Description of Artificial Sequence: Synthetic coding sequence
  source 1..432: mol_type = other DNA
atggtgagctggatcatcagccggctggtggtgctgatcttcggcactctctatcctgcctattacagctacaaagcagtgaagtcaaaggacatcaaagagtacgtgaaatggatgatgtactggataatttttgctctctttacgaccgcagagaccttcacagacatttttctgtgctgggatcgtgtgccctatagacgtgactgcggtgcctctgcttgccggactagtcccccatcgggcgagaccgcccctctgctgccccgggccccacatcatagagggcttggcggccctgccgcaaacaccgcgtccctacgatgtccgggtgttctgctccgcgctcttgctgcccaggctcctcccaggattttgagaagccgcttcagaaagaagtcgacatcttcatccgcaacagagacgacttag

SEQ ID NO: 202734 - DNA, 759 bp, synthetic construct
  misc_feature 1..759: note = Description of Artificial Sequence: Synthetic coding sequence
  source 1..759: mol_type = other DNA
atggtgagctggatcatcagccggctggtggtgctgatcttcggcacgttgtaccccgcctactcgagctacaaggctgtgaaaaccaagaatgtaaaagaatatgttaagtggatgatgtattggatcgtgttcgctttttttaccactgccgagaccctcacagacatcgtgctcagctggttccccttttactttgaactgaagatcgcattcgtaatctggcttctatctccatacactaaggggtctagtgtgctatatcggaaattcgtccaccccaccttgagcaacaaggagaaagagatcgacgagtacatcactcaggccagggataaatcttacgagacaatgatgcgcgtgggaaagcggggactgaatttagccgctaatgctgccgttacggccgcagcaaagggggtgctcagcgagaaactcaggagcttcagcatgcaggatctgactctgatccgcgatgaggatgccctcccactacagaggcccgacggtagactgcggccttctcctgggagtttgttggacacaatcgaggatttaggtgatgaccccgcacttagcctgcggagcagtacaaatccagccgacagtagaaccgaagcatctgaagacgacatgggtgacaaagctcccaagagggccaagcccattaagaaagcgcccaaagccgagccacttgctagcaaaacacttaagacacgacccaagaagaagacatctggcgggggcgacagcgcctag

SEQ ID NO: 202735 - DNA, 765 bp, synthetic construct
  misc_feature 1..765: note = Description of Artificial Sequence: Synthetic coding sequence
  source 1..765: mol_type = other DNA
atggtgagctggatcatcagccggctggtggtgctgatcttcggcaccctgtaccctgcgtattcctcatacaaggccgtgaaaacaaagaatgtcaaggagtatgtgaagtggatgatgtactggatagtgttcgctttctttaccactgccgagaccctaaccgatatcgtcctaagttggtttcctttctattttgagcttaaaattgcttttgtgatctggctgctgagcccctatactaagggctcctccgtcctgtaccggaagttcgtgcaccccactctgtcaaacaaggagaaagagatcgacgagtacatcacccaggctagggacaagtcctatgaaacaatgatgagggtcggtaaacgcggtcttaatttagccgccaacgccgccgtgacagcagccgccaaagggcagggcgtactgtcagaaaagctgaggtcattctcaatgcaggaccttacactgattagagacgaggatgcactacctctccagaggcccgatggaagactgcgcccttcccccggatccttactggacacaatcgaggacctgggggacgacccggccctgtcccttagatcgtctactaatcctgcagacagtcggactgaggccagcgaggatgacatgggggataaagcccctaaacgagccaagccaatcaaaaaggcccccaaagccgagcctctggcatccaaaaccttgaagactcggccgaaaaaaaaaacctccgggggaggcgacagcgcatag

SEQ ID NO: 202736 - DNA, 723 bp, synthetic construct
  misc_feature 1..723: note = Description of Artificial Sequence: Synthetic coding sequence
  source 1..723: mol_type = other DNA
atgctgtaccccgcctactacagctacaaggccgtgaagaccaagaatgtgaaggaatatgtaaggtggatgatgtactggatcgtctttgcactgtatacagtaatagagaccgtagcggaccagaccgtcgcctggttccctctgtactacgaattgaagatcgcgtttgtgatctggctgctcagcccctatacaaaaggagcctcgctgatctatcgtaagttcctgcatcctctcctgtcgagcaaggagagggagattgatgactatattgtccaggctaaggaaagaggatatgaaaccatggttaactttggacgacagggtctaaacctggccgccacagctgctgttaccgcagccgttaagagccagggggccataaccgagaggctgcgctcgttcagcatgcatgacttaactaccatacagggagatgaaccagtcgggcagcgtccctaccagcctctcccggaggccaagaaaaagtctaaacctgccccatctgagagcgccggatacggcattcccttgaaggacggcgatgaaaaaactgacgaagaggctgaggggccttactctgacaacgagatgctcacacataaaggactgcggcgaagtcagagcatgaaatctgtgaagacgacgaaagggcgcaaggaggtgcggtacggctccctgaagtacaaggtgaagaagaggccacaggtatacttttag

SEQ ID NO: 202737 - DNA, 768 bp, synthetic construct
  misc_feature 1..768: note = Description of Artificial Sequence: Synthetic coding sequence
  source 1..768: mol_type = other DNA
atggtgagctggatgatcagccgggccgtggtgctggtgttcggcatgttgtatccagcatattattcctacaaagccgtgaaaacaaaaaacgtgaaggaatacgtgaggtggatgatgtactggatcgtgtttgcactctatacggtgatagaaaccgtggcggatcaaacagtggcttggttccctctctactacgagctgaagattgcgtttgtcatttggttactgagcccttatacaaagggtgctagtctgatttaccgaaaatttctccacccattactgtcttctaaggagcgagaaatcgatgactacatcgttcaggccaaagaaagaggatatgagacaatggtgaactttggtagacagggcctcaacttagccgctaccgcagccgtcactgcagccgtgaaatctcagggagccatcaccgagagactgagatctttcagcatgcatgacttaaccacgattcagggagacgagcccgttggccagaggccctaccagccactgcctgaagcaaagaaaaaatccaaaccggctccgtccgagtccgccgggtatggcatcccactgaaagatggagatgagaaaaccgacgaggaagctgaagggccttattcagacaatgaaatgctcactcataaaggactaagacggtcgcagtccatgaagtctgtgaaaactactaaaggaaggaaggaagtacgctacgggtcattaaaatacaaggtcaagaagcggcctcaggtgtacttttag

SEQ ID NO: 202738 - DNA, 774 bp, synthetic construct
  misc_feature 1..774: note = Description of Artificial Sequence: Synthetic coding sequence
  source 1..774: mol_type = other DNA
ctgatgatgtggctgctggtggagcgggccctgatccagctggtgttcggaatgctctaccctgcttactatagctacaaggcggtgaagacaaagaacgttaaagaatacgtaagatggatgatgtactggatcgttttcgccctctacaccgttatcgaaactgttgccgatcagactgtggcatggttccccctgtattatgaactgaagatcgcattcgtgatctggctgctgtctccttatacgaagggagcctccctgatttaccggaagttcctgcacccactactgtcaagcaaggagagagagatagacgattacatagtacaagctaaagagagaggctacgaaaccatggtgaattttggtcgacaaggtctgaacctcgctgcaacagctgcagttactgccgccgtcaagtctcagggggccattacagagcgacttcgatccttcagtatgcatgacctgacaacaattcagggagatgagcctgtcggccagaggccatatcagcctctgccagaagctaagaagaagtcgaaacccgcgccttctgagagcgcaggctatgggattcctctgaaagacggcgatgaaaaaacagatgaggaggcagaggggccttactcagacaacgaaatgctgacccacaagggactccggaggtcccagtccatgaagagtgtgaagaccacaaagggcaggaaagaggtcaggtatggctccttgaaatataaggtgaaaaagcggccccaggtatacttctag

SEQ ID NO: 202739 - DNA, 774 bp, synthetic construct
  misc_feature 1..774: note = Description of Artificial Sequence: Synthetic coding sequence
  source 1..774: mol_type = other DNA
atggtgagctggatgatctgccggctggtggtgctggtgttcggcatgctgtgcccagcatatgcttcctacaaggcagttaaaactaagaatattagagagtacgtgaggtggatgatgtactggattgtgttcgccctgttcatggccgctgagattgtaactgacattttcataagctggtttccattttactacgagatcaagatggcgttcgtcttgtggctcttatcaccttataccaaaggcgctagcctcctgtatcgtaagttcgtacacccttccttgtccaggcacgaaaaagaaatcgacgcctatatcgtgcaggccaaggagagaagctacgagactgtgttgtctttcggcaagagaggactgaatatcgccgccagcgcggcagtgcaggcggcgacaaaatcacagggagccctggccggccgcttgcgctccttctcaatgcaagacttaagatccatttcggatgctccagccccagcttaccatgaccctctgtatctagaggatcaggtatctcacaggcggccccccatcggatatagagcaggaggtctgcaggatagcgacaccgaggacgagtgctggtccgacacagaggctgttcccagagctccagctcgcccccgtgagaaacctttaatcagatcccagagcctgcgcgtcgtcaaaagaaaaccaccggtgcgagaaggaacaagccggagtctgaaggttagaacacggaagaagacggtgccatcggacgtcgactcatag

SEQ ID NO: 202740 - DNA, 522 bp, synthetic construct
  misc_feature 1..522: note = Description of Artificial Sequence: Synthetic coding sequence
  source 1..522: mol_type = other DNA
atggtgagctggatgatctgccggctggtggtgctggtgttcggcatgctttgccccgcgtacgcttcttacaaagccgtgaagaccaaaaacatccgagagtacgtccggtggatgatgtactggatcgtatttgccctattcatggccgcggagatagtgacggacatttttatctcgtggtttccattctactacgagatcaaaatggcctttgtgctgtggctgctgtccccctacacgaaaggtgcatctctgctatataggaagtttgttcatccctcactcagtcggcacgaaaaagagatagatgcctatattgtacaggccaaagagcgttcctacgaaactgtgctatcctttggtaagcgtggattgaatatcgcggccagcgccgctgtgcaggcagctacaaaagggacgggacccggcgcttgtcgaacagcaactccgcgcatgtccgttgggcagatcctccggcagtcgccagggcgtcaacccggtcctgagaggtcaccctag

SEQ ID NO: 202741 - DNA, 570 bp, synthetic construct
  misc_feature 1..570: note = Description of Artificial Sequence: Synthetic coding sequence
  source 1..570: mol_type = other DNA
atgagcgccgccatgcgggagcggttcgaccggttcctgcacgagaagaactgcatgactgacttgctcgctaagctggaggctaaaacaggcgtcaatcgctcattcatcgccctcggtgtgatcgggctagtggcactgtacctggtcttcggatatggggcctccctcctgtgcaatcttattggctttggttaccccgcgtatataagcattaaggccatcgaatctcccaataaggaagatgacactcagtggctgacatattgggttgtttatggggtgttcagcatcgcggaatttttttccgatatttttttgagttggttccccttctattacatgctcaagtgcggtttcctgctgtggtgtatggctccatcaccctctaacggtgctgaactgctgtataaaaggattattcggccattttttctgaagcacgagtcacaaatggactcagtggtgaaggacttgaaagacaaggcaaaggaaacagctgatgccataaccaaagaagccaagaaggctacggtgaacctgctgggtgaagagaagaaatcaacatag

SEQ ID NO: 202742 - DNA, 396 bp, synthetic construct
  misc_feature 1..396: note = Description of Artificial Sequence: Synthetic coding sequence
  source 1..396: mol_type = other DNA
atgagcgccgccatgcgggagcggttcgaccggttcctgcacgagaaaaactgcatgactgacttactagcgaaactcgaggccaaaacaggagtcaacaggtcctttatcgccttgggcgtgatcggtctggtggccctgtatttagtgttcgggtatggggcaagcctgctgtgcaacttgattgggtttggatatcctgcctatatctccattaaggccattgagtctccaaataaagaggatgacacacagtggctcacttattgggttgtgtacggagtatttagtattgctgagttttttagcgacatattcctgtcttggtttcctttctactatatgcttaaggtgtggtcagggctgggtttcctacttccacgctgcttattatag

SEQ ID NO: 202743 - DNA, 1413 bp, synthetic construct
  misc_feature 1..1413: note = Description of Artificial Sequence: Synthetic coding sequence
  source 1..1413: mol_type = other DNA
atgcacttcagcatccccgagaccgagagccggagcggcgacagcgggggatccgcctatgttgcctataatattcatgtgaatggggttctgcattgcagagtccggtactcccagctcctcgggttacacgagcagctgaggaaagagtacggggccaatgtgctccccgcgtttcctccaaaaaagctgtttagcctgacacccgcggaggtggagcaaaggagggagcaactggagaagtacatgcaagcagtccgccaggacccactgctcggcagttcggagacattcaatagctttctcagacgtgcacaacaggagacccaacaggtgcccacagaggaggtcagcctagaggtcttgcttagtaatgggcagaaggtcttagttaatgtactgacatccgaccagaccgaggatgtcctagaggcagtggctgcaaagttggatctgcccgatgatctaataggctattttagcctgttccttgttcgtgaaaaagaagatggcgcgttctccttcgttaggaaactccaggagtttgaattaccttatgtttcagtcacttccctgcgcagccaggagtacaaaatcgtgctgcgaaagagctattgggactcggcatacgatgatgatgtcatggagaatcgcgttgggcttaacctcctgtacgcccaaaccgtgtccgatatagaacgagggtggattctggtgacgaaagagcagcacagacagctgaaaagcctccaggagaaggtctctaagaaagaattcctgaggctggcacagacactgaggcactacggttatctgaggttcgacgcgtgtgtggcggatttcccagagaaagactgccccgtcgtggtcagtgcagggaatagcgagttgtctcttcagctgcggctgccaggccagcaacttagagaaggatcatttcgtgtcacacgcatgcgatgttggcgggtgacctcaagtgtacctttgccctcaggatctactagctctccaggtagaggcaggggcgaagtcagactcgaactggctttcgaatatttgatgtctaaggaccgacttcagtgggttacaatcacatcaccacaggcgataatgatgagcatttgcttacagagcatggtcgacgagttaatggtcaagaagagcgggggcagtatacgcaagatgctaaggcgcagggtaggaggtacgctaaggcgatccgatagccagcaggcggtaaagagtccacctcttctcgaatccccagatgccactagagaatctatggtgaaactctcctctaagttaagcgcagtttctctacgagggataggctcaccctctaccgacgcttccgccagcgatgtgcatgggaactttgccttcgaagggataggtgatgaagacctttag

SEQ ID NO: 202744 - DNA, 2814 bp, synthetic construct
  misc_feature 1..2814: note = Description of Artificial Sequence: Synthetic coding sequence
  source 1..2814: mol_type = other DNA
atgcaccggccccggcggcggggcacccggccccccctgctggccttgttggccgccctgctgctggcagcccggggtgctgcagctcaagaaactgagttgagtgtaagcgctgagctggttccaacctcctcttggaacatctcttcagagctgaacaaagacagctacctgacgctggacgaacctatgaacaatattaccacatcccttggacaaaccgcagagttgcattgtaaagttagtggaaaccctccacctacaattagatggttcaagaacgacgctcccgttgttcaggaaccaaggcgtctttcttttaggagcactatttacggaagcagacttcggattcgaaacctggacacaactgacacaggctacttccaatgtgttgccacaaatggaaaggaggtggtttctagcacgggcgttttgtttgtcaaattcgggcctcctcccacagcgagccccggatactctgatgaatatgaagaggatggcttttgccagccttatagaggtatcgcttgcgctcgcttcataggaaatcgcacagtgtatatggagtccctgcatatgcagggagagattgaaaaccagatcacagcagccttcactatgatagggacatcgtcccatctgagcgataaatgttctcagtttgctattccttccctttgtcattacgccttcccttactgcgacgagacatcttccgtcccgaagcctagggacctgtgtcgcgatgaatgtgagattctggagaatgtgctgtgccagacagaatatattttcgccaggagcaaccctatgatcttaatgagactaaaactgcccaactgcgaggatctaccccagcccgagtccccagaggctgccaactgtattaggatcggaatccccatggccgacccgatcaacaaaaaccataaatgctataactcaacaggcgtcgactaccgcgggacagtgagtgtgacaaaatcagggcgacagtgccaaccttggaattctcagtacccccatactcatacctttaccgccttgcgattcccggagttaaacggcgggcactcatactgtcgcaacccaggaaatcaaaaggaggccccctggtgtttcacccttgatgaaaattttaagtccgatctctgcgatataccggcctgcgacagcaaagactccaaagagaaaaataaaatggagatcctgtatatcctcgtcccatctgtagccatccccctggctattgctctgctgttcttttttatttgcgtctgtaggaataatcagaagtcatccagcgcccctgtgcagcgccaaccaaaacacgtgagaggccagaatgttgaaatgtccatgctaaatgcttataaacccaaatcaaaagctaaagaactgccgctctctgcagtgcggttcatggaagagctgggggagtgcgcttttggaaaaatatataagggacacttatatttaccgggcatggatcatgcgcaattggtcgccattaaaacactgaaggattataacaatccacaacaatggacagaattccagcaggaggcgtcactcatggcagagctgcaccacccgaatattgtgtgtctgttgggagccgtcacccaggagcagcccgtctgcatgttattcgagtacataaaccagggggacctgcacgagttcctcatcatgagatcaccacacagtgacgtgggatgctccagcgacgaagacggcacagtcaaatcaagtcttgatcacggggattttctgcacattgctatccagattgcagccggaatggaatacctgtcttcacacttttttgtccacaaggaccttgccgcccgcaacatcctcatcggtgagcagctacacgtcaagatctccgatctgggactgtctcgcgagatatacagcgccgactattacagagtccaatccaagagcctgctacccatacgatggatgccccccgaagctatcatgtatggcaaatttagctctgattcagatatttggtctttcggggtcgtcctttgggagatattctcattcggactccagccatattatgggttctctaaccaggaggtaattgagatggtgcgcaaaagacagctactgccttgctcggaagattgtcctcctcgaatgtatagtctcatgactgaatgctggaatgagataccttcgagaagaccccggttcaaggatatccacgttcgactgcgctcttgggagggtctttcttctcacaccagctctaccacacctagtggtggaaacgctacaacccagactaccagcctcagcgcctccccagtatcgaatctgagcaaccccaggtatcctaattacatgtttccctcccaaggtataaccccacaggggcaaatcgcaggctttattgggccacccataccacagaaccagcgctttattccgatcaatgggtatcctatcccccctggctacgctgcctttcccgccgcgcactaccagccaactgggcctccgagggtaatccagcactgtcccccgcctaagtcaagatcaccatccagcgccagtggtagcacaagcactggacatgtgacttccctccccagtagtggcagtaaccaggaagccaatattcctctcctcccgcatatgtccatccccaatcatccaggggggatgggcatcaccgtttttgggaataagtcacagaaaccttacaaaatcgactccaagcaggcgagccttctcggggatgcaaatattcatggacacaccgagagtatgatctccgctgagctttag

SEQ ID NO: 202745 - DNA, 1182 bp, synthetic construct
  misc_feature 1..1182: note = Description of Artificial Sequence: Synthetic coding sequence
  source 1..1182: mol_type = other DNA
atgcaccggccccggcggcggggcacccggccccccctgctggccttgcttgcagcactcctgctcgccgcacgcggggcggcggcccaggagactgaactgagtgtgtcagccgaactggtgcctaccagtagctggaacatctcttcagaactgaacaaagacagctatttgacactggacgagcccatgaacaacataacaacaagtttgggccagaccgccgagctgcactgcaaggtctcaggcaatccaccgcccacgattcggtggtttaagaatgatgctcccgtcgtgcaagaaccaagacgcctgagcttccgttcgaccatctatgggtcaaggttgcgcatccgcaacctggacacgacggatacggggtacttccaatgcgtcgccactaacggtaaggaagtcgtttccagcactggcgtgctctttgttaagttcggaccgccccctactgcctctcccgggtacagcgatgaatacgaggaggacggcttttgtcagccttatcgcgggattgcttgcgcacgctttattggcaataggacagtgtatatggaaagcctacatatgcagggggagatagaaaaccaaattacagccgctttcaccatgattggaacatcctcccatctgtctgacaagtgctctcagttcgcaataccctctctgtgtcactacgccttcccctattgcgacgagacttccagcgtgcctaagccacgggatctgtgtagagatgaatgcgagatcctggagaacgttttgtgtcagaccgaatatatctttgccagaagcaatcctatgatactgatgcgcctcaagttgcccaattgtgaagatctcccccagcctgagtccccagaggccgccaattgcatccggatcggtataccgatggctgatccaattaataaaaaccacaagtgctacaacagtacaggcgttgactatcgcggtaccgtttctgttaccaagtccggtagacaatgccagccttggaactcccagtatcctcatactcacacctttacagcccttaggttccccgagcttaatggagggcattcctactgccggaatccgggaaatcagaaggaggctccatggtgtttcacacttgatgagaatttcaagtccgacttgtgcgacatcccggcttgtggaaagtag

SEQ ID NO: 202746 - DNA, 2823 bp, synthetic construct
  misc_feature 1..2823: note = Description of Artificial Sequence: Synthetic coding sequence
  source 1..2823: mol_type = other DNA
cgggcccggggctgcagcgcccggcggcggggcacccggcccccccttttagccctgcttgccgccctcttgctggccgcccggggcgccgccgcacaagagactgaattatccgttagcgccgaactggtgcccacttccagttggaacatatcttccgaactgaacaaggattcctaccttacgctggatgagccaatgaacaacatcaccacctccctgggccagaccgctgagctccactgcaaagtctctggaaacccaccacccactatcaggtggtttaagaacgatgcacctgtggtgcaggagcccagacgattgagcttccgctccacgatctacggcagcaggctgagaataaggaacctagacactacggacactggttatttccagtgtgtggccacgaatggcaaagaggtcgtcagtagcaccggcgtgctatttgttaagtttggacctccccccaccgcatcccccggttatagtgacgaatacgaagaggacggattctgccaaccgtaccggggcattgcttgtgccagattcatcgggaaccgaactgtctacatggaatctttgcatatgcaaggggagatcgagaaccaaattaccgccgcattcacaatgatcggcacatcctctcatctgagcgataaatgcagccagttcgcaatcccaagcctatgccactacgcattcccatactgcgatgagacgagctctgtgcccaaacctcgagacttgtgccgggatgagtgcgagatcttggaaaatgtgctgtgccagaccgagtacatctttgcgagatccaacccgatgattttgatgcgtttgaagcttccaaactgcgaggacctgccccaaccggagagccccgaggccgcaaattgtatccgcattggcataccaatggctgaccctattaacaagaaccataaatgctacaactccaccggagtcgattatcgcggcactgtgagtgtgacaaagtcaggccgccagtgtcagccttggaactcccaatatccacatacacacacatttacggccctccgttttccggagctgaatgggggccattcctactgccgcaatccagggaaccagaaagaagctccgtggtgttttaccctggatgagaactttaagagtgatctgtgcgacattccggcatgcgacagcaaggatagcaaggagaagaacaaaatggaaatactttatattctcgtgccgtccgtcgccattccgcttgcaatcgctctgttattctttttcatctgcgtttgtaggaacaaccagaagtccagttccgcaccagtgcagcgccagcccaagcacgttcgcgggcagaacgtggaaatgtccatgcttaatgcctacaagccaaagagtaaggctaaagaactcccactgagcgcagtaaggtttatggaagagctgggagaatgcgcgttcggaaaaatatataaggggcatctgtatctgcccgggatggatcacgcccagctggtagctattaaaacactcaaagactacaataatcctcagcagtggaccgagtttcagcaagaagcgtctcttatggcagagctccaccatcctaacatcgtctgcctgctcggcgctgtgacacaggaacagcccgtgtgcatgctcttcgaatacatcaatcaaggagacctccacgagttcctgattatgcgctcccctcactcagatgtgggttgcagttccgatgaggatgggacagtcaagtcaagtctggaccacggagactttctgcatatcgccattcagatcgctgccggcatggagtatctcagttctcacttcttcgtgcataaggacctggctgctagaaacatcctgattggagaacagctgcacgtgaaaataagtgatctcggattgtctcgggaaatctacagtgccgattattaccgcgtgcaatcgaagtctttgctgcccataagatggatgcccccggaggcaatcatgtacggcaaattctcatctgactccgatatctggagcttcggcgtagtgctctgggagatcttctctttcgggctgcagccttactacggctttagcaatcaggaagtgatcgagatggtgagaaagcgccaattattaccctgcagtgaggactgtccccctagaatgtattctttaatgaccgagtgttggaatgagatccctagtcgtaggccaaggtttaaagacatccacgtgcgcctgcgttcgtgggaaggtttatcttcccacacgagctctacaacgccttctggtgggaatgcgacaacacagaccacatcactttctgcgtcaccagtgtctaatttgagcaacccacggtacccaaactacatgtttccatctcaaggcattactccccagggacagattgccggattcatcggaccaccgattccccaaaatcagcgctttattccaattaatggataccccattcccccagggtatgctgctttcccggccgctcactatcagccaaccgggccgccacgagtgattcaacactgcccaccccccaagtcacgctcaccctcaagtgcatctgggtctacctccactggtcatgtgactagtttgcctagcagcggatccaatcaggaggcgaacatacctctgctgcctcatatgtccatacccaaccaccctggcggtatgggcatcacggtcttcggcaataaaagccagaaaccctacaagatcgattcgaagcaggcgagcctgcttggcgatgcaaacatccacggacacaccgagagcatgatctccgccgaactctag

SEQ ID NO: 202747 - DNA, 1167 bp, synthetic construct
  misc_feature 1..1167: note = Description of Artificial Sequence: Synthetic coding sequence
  source 1..1167: mol_type = other DNA
atgctgttcgagtacatcaaccagggcgacctgcacgagttcctgataatgcgctcaccacattcggatgtcggatgttccagcgacgaagacggtaccgttaaaagtagcctcgatcatggtgactttcttcacattgcaattcagatagctgccggaatggagtacttgagttctcatttctttgttcacaaggacctcgcagctcgaaacatcctaattggcgaacaactgcacgttaaaatttcggatctgggcctgtcccgagagatatacagtgcagactattatcgagtccagagtaaaagcctcctcccaattagatggatgccgccagaggctatcatgtacggcaagttctcctcagatagtgacatctggtcatttggcgtcgttctctgggagatcttttccttcggcttgcaaccctattatggattttccaaccaggaggtcatcgagatggtgagaaagcgccagctgctgccctgctccgaggactgccctccgagaatgtactctctcatgaccgagtgttggaacgagatccccagtcgccgcccacgattcaaagatatccatgtgaggttgcgctcctgggaaggactttccagccacacttccagtaccaccccctccgggggaaacgcgactactcagaccacttcattaagtgcttctccagttagcaatctcagcaatccccgatatccgaattatatgttccccagccagggcatcactccgcaaggacagatcgcagggttcattggaccacctattccccagaaccagcggttcatccccatcaacgggtacccaataccaccaggatatgcagcattcccggccgcacactaccagcccacaggaccccccagagtaattcagcactgcccgcctcccaaatccaggtcaccctcgtctgcatccggaagtacctccacggggcatgtcacgagcctacccagcagtgggtcaaatcaagaagccaacatccctctgctaccccatatgtcgatcccaaatcatccaggtggaatgggaatcactgtgttcggcaataagtcacagaagccctacaagatcgactccaagcaagcctctcttcttggggacgcgaatatccacggtcataccgaatctatgattagcgcagagctctag

SEQ ID NO: 202748 - DNA, 2832 bp, synthetic construct
  misc_feature 1..2832: note = Description of Artificial Sequence: Synthetic coding sequence
  source 1..2832: mol_type = other DNA
atggcccggggcagcgccctgccccggcggcccctgctgtgcatccccgccgtgtgggccgcagcagcattgctcctgtcagtttcacggacctccggcgaggtcgaggtgctcgaccccaacgatccactcggccccctggatgggcaggacggacctattcccacccttaagggatactttctaaattttctcgaacctgtgaacaacatcactatcgtccaaggacagactgcgattctgcactgcaaagttgccggtaatccgcccccgaatgtacgctggcttaagaacgatgctcccgtggtgcaagagccccggagaatcattatccgcaaaaccgaatacggatccaggctgaggattcaggaccttgataccacagacaccggatattaccagtgcgtcgccaccaacggaatgaaaaccataactgctacaggggtcctatttgtccgactgggccccacccattcccccaatcacaactttcaggatgattaccacgaagacgggttttgccagccttataggggaatagcttgcgcgaggtttattggaaatcggacaatctacgttgacagcctgcaaatgcagggggaaatagaaaatcgaatcactgcagcctttacgatgatcggtacatctacccacctatccgatcagtgttctcaatttgccatcccatctttctgtcactttgttttccctctctgcgatgctcgatcacggacgcctaagccccgtgaactgtgccgcgatgagtgtgaagtcttagagtccgacctctgcagacaggagtacaccatcgccagatccaatccactcatcctgatgaggttgcagcttccaaagtgtgaagctctgccaatgccagagagccctgacgctgctaattgtatgaggataggcattcccgctgagcgacttggtagataccaccagtgttataacgggtccgggatggactacagggggaccgcatctaccacaaagtccgggcaccagtgccaaccctgggccctgcagcacccacattcacaccatttgagctcgacagatttccccgaattgggcggtgggcatgcttattgccggaatccgggagggcagatggaggggccctggtgctttacacagaataagaatgtgcgcatggagctgtgtgatgtcccttcatgtagccccagagacagcagcaaaatggggattctgtatatattggtcccttctatcgcaatcccactggtgatcgcatgtttattcttcttagtgtgcatgtgtcggaataaacagaaggctagtgcctctaccccacagcgccgtcagctgatggcgagtccttcccaagacatggagatgcctctgatcaatcaacacaagcaggctaagcttaaggagataagtctctccgccgttcggttcatggaagaactgggcgaggacaggtttggtaaggtgtacaaaggtcacctatttggcccagcaccgggagaacaaactcaagccgttgccatcaaaaccctcaaagacaaggctgaaggccctctccgggaagagttccggcatgaagcaatgctgagggccagactgcagcacccaaatgtggtttgcctgttaggagtggtcaccaaagaccagcccctgtctatgatattctcatactgtagccatggggacttacacgagtttttggtgatgcgctcgccacactccgatgtgggctctacagacgatgatagaactgtgaaaagcgccctcgagcctcctgatttcgttcatctggtggcacaaatcgccgccggtatggaatatctgagttctcaccacgtagtgcacaaggatctggccacccgcaacgtgttggtgtatgataagctgaatgtgaaaatctcagacctagggctattccgagaggtgtacgcagcggattattacaagctgctgggtaattccttgctgcccattcgttggatggcccccgaagccatcatgtacggcaagttttcaatcgatagcgatatttggagttatggcgtcgttctgtgggaagtgttctcttacggccttcagccttattgtgggtactctaaccaagatgttgtggagatgattagaaaccgacaagtgctgccatgtcccgatgactgccctgcttgggtgtacgcactaatgattgagtgttggaatgagtttccaagtcgtcgaccccgtttcaaagatatccactctcgcctccgcgcttgggggaatctgagcaattataattctagcgctcagacctccggagcttccaacacaacccagacttccagtctctctacttcacccgtgtccaacgtctccaacgcccgctatgtggggcccaagcaaaaggctccacctttcccacagcctcagtttatcccaatgaaaggacagatacgtccaatggtgcccccaccccagctgtatgtgccggtgaatgggtaccaacccgtgccagcatacggggcctatcttccgaacttttatcccgtacagattcccatgcagatggcacctcaacaggtcccccctcaaatggttcctaagccaagctcccatcactccgggtctggatctacatcgaccgggtatgtaactacagcgcccagtaacacaagcatggctgatcgtgccgcattgctcagtgagggcgcggatgatacccagaacgcccctgaagatggggcgcagagcaccgttcaggaagcagaggaagaagaagagggatctgtgcccgaaaccgagctgctaggcgactgtgacaccctccaggtcgatgaagcccaggttcagctcgaggcttag

SEQ ID NO: 202749 - DNA, 1239 bp, synthetic construct
  misc_feature 1..1239: note = Description of Artificial Sequence: Synthetic coding sequence
  source 1..1239: mol_type = other DNA
atgggccaggaccagaccaagcagcagatcgagaagggcctgcagctgtaccaatcaaatcagactgaaaaggctctccaggtgtggaccaaagtgctcgaaaagagtagcgatctcatgggacggtttcgcgtgctaggttgtctggtgactgcccacagcgagatgggccgatacaaagagatgctcaagtttgccgtggtgcagatcgacacggcccgcgagctggaagacgccgactttctcttagaaagctatctgaacctcgctcggtctaacgaaaagttgtgcgaatttcacaaaaccatttcatattgtaagacatgcctcggcctgcccgggacgagagccggggcccaactcgggggacaggtttctctgtcaatgggtaatgccttcttgggcttgtccgtgttccagaaagcgctggagtctttcgaaaaggcgctcaggtacgcccacaacaatgatgacgccatgttggaatgtcgcgtttgctgtagcctaggctccttctacgcccaggtgaaggattacgagaaagctcttttttttccatgtaaggcagcagaactcgttaacaattacggcaaggggtggagtctgaagtatagggctatgtctcagtaccatatggctgtggcgtatagactactgggaaggttgggtagtgctatggagtgttgcgaagagagcatgaaaatcgcattgcaacatggagaccggcccctgcaggctctctgcctgctatgcttcgctgatatccaccgttctagaggagaccttgaaactgccttccctagatatgattctgccatgagcatcatgacagagatcggcaatcggctggggcaggtgcaggccctgcttggcgtggccaagtgctgggttgcccgtaaggccctcgataaagcgctggacgctatagagagggctcaggacctggccgaagaggttgggaacaaattgtcccagctgaagcttcattgcttaagtgagagcatctataggtctaaggggcttcagagagaattgcgagcacatgtggtaagattccatgagtgcgttgaagagaccgaactgtactgtggcttgtgcggggagtcaataggagagaaaaacagccgactgcaagctcttccttgcagccacatttttcacctgagatgtctgcagaataatggcacaaggagttgccctaactgccgccggtcatcaatgaagcctggtttcgtctag

SEQ ID NO: 202750 - DNA, 1062 bp, synthetic construct
  misc_feature 1..1062: note = Description of Artificial Sequence: Synthetic coding sequence
  source 1..1062: mol_type = other DNA
atgggccaggaccagaccaagcagcagatcgagaagggcctgcagttgtatcagagcaatcagaccgagaaggccctccaggtttggacgaaagtgctcgagaagtcttcggatttgatgggcaggtttagggtcctgggatgtctggtaactgcccactcagagatggggcgatacaaggagatgctcaagtttgccgtggtgcaaatcgacacagctcgtgaactggaggatgcagatttcctcctagagagctatctgaacctggccaggagcaacgaaaaactttgtgagttccacaaaaccatctcgtattgcaagacatgcctaggactgccaggaacccgggcgggcgcccagctggggggccaggtgagcctctcaatggggaatgcatttctcgggctttccgtgttccaaaaagctttggaatccttcgagaaggccctgaggtacgcacacaataacgacgatgccatgctggagtgcagagtgtgttgcagcttaggaagtttttatgctcaagttaaagactacgagaaggccttattctttccgtgcaaggcggccgagttggtcaacaattacggtaaaggctggagcctgaaatatcgcgcaatgtcccaataccacatggccgtagcgtataggctattgggtcgccttgggtctgctatggagtgctgtgaggaatccatgaagattgctttacagcacggagacaggccgctgcaggccctttgccttctgtgtttcgcagatatacaccggtctagaggcgatctcgagttgtcccagcttaaacttcactgtctttcagagagtatttaccggagtaagggactccagcgcgaactgcgtgcacatgttgtcagatttcacgaatgcgtggaggaaaccgaactctactgtgggctgtgcggagagtccattggcgagaagaatagccgcttgcaggcgcttccctgtagccacatctttcacctccgctgtctccagaataacggaacgaggtcttgcccaaattgcagacgatctagtatgaagccgggatttgtgtag

SEQ ID NO: 202751 - DNA, 2010 bp, synthetic construct
  misc_feature 1..2010: note = Description of Artificial Sequence: Synthetic coding sequence
  source 1..2010: mol_type = other DNA
atgggcaccgccctggtgtaccacgaggacatgaccgccacccggttgctgtgggatgaccccgaatgcgagatcgagcgcccagagaggctgacagcagcgcttgaccggctgcggcagcgaggtctcgagcagaggtgcctgcgactcagcgccagagaagcttcagaggaggagctgggccttgtccatagcccggagtatgttagtctcgtgagagagacccaagtgttgggcaaggaggaactgcaagcattgagcggacagttcgacgccatatactttcatccgtccacctttcattgtgcccgcctcgccgctggagctggtctgcagcttgtggacgcagtgctgacaggagctgtacagaacggtctagcacttgtacgtccaccagggcaccatgggcaaagggcagccgccaacggtttctgtgttttcaacaatgtcgctatagcagcagcccatgccaagcagaaacatgggctccacagaatacttgtggtcgactgggatgtgcatcacggccagggcatccagtatctttttgaggacgaccctagcgttttatatttcagctggcaccgctatgagcatgggagattctggcccttcctgcgcgagtcagatgccgacgccgtggggcgaggtcaggggctcggctttaccgtgaatctaccatggaaccaggtcggaatggggaatgctgactacgtcgcggcattcttgcacttgctgctcccactggcgttcgagttcgatcctgagttggtcctggtgagtgcgggatttgactcggcaatcggggacccagagggacagatgcaagctactcctgaatgttttgcccaccttacccagctcctgcaggtgttggccggaggaagagtttgcgcagtactagagggcgggtatcatctagagagcctggcagagagtgtctgcatgacagtacaaactctcctgggcgaccccgctccacccctgtccggccctatggccccctgtcagtctgctctagagagtatacaatctgctcgggccgctcaggccccccattggaaaagcctgcagcaacaggatgtcaccgcagtgccaatgagcccatccagccatagtccagagggacgaccaccacccctcctgccgggaggcccagtttgcaaggccgcagcctctgctccgtcgtctctgctggaccaaccttgtctctgcccagccccatctgttcggaccgcggttgcactgactacccctgacataacccttgttctcccacccgatgtcattcagcaagaggcctccgcattgagggaagagaccgaagcctgggcccggccccatgaatcactcgcccgcgaagaagcgttgacagctctcggaaagctgctctacctcctggacgggatgcttgacggccaggtgaattctggaatcgctgcaacacctgccagcgccgcagcagcaaccttagacgtggccgttcggcggggccttagtcacggcgcccaacggttactatgtgttgcgctggggcaattggacagaccccccgatctggctcatgacggaaggagcctgtggctcaacatccgcggtaaggaagctgcggctctgagtatgttccacgtctcaactcccctgcctgttatgaccggtgggttcctctcatgcatattgggattggtcctccctctcgcttatggatttcagccggacctggttctcgttgctctaggacctgggcacggactgcaaggaccccacgctgcgcttcttgccgctatgctaagaggcctggccggcggacgcgtgctggcacttctcgaggagaacagtacaccacagttggcaggtatattagcgcgcgtgcttaatggggaagcacctccgtcactgggccccagctcggtagcttcgcccgaggacgtgcaagccttgatgtacctacgcgggcagcttgagccacagtggaagatgctgcaatgccacccccaccttgtagcctag

SEQ ID NO: 202752 - DNA, 1206 bp, synthetic construct
  misc_feature 1..1206: note = Description of Artificial Sequence: Synthetic coding sequence
  source 1..1206: mol_type = other DNA
atgcagcggtgctggcagggcgacccccgggtgcggcccaccttccaagagatcacatccgagaccgaagacttgtgcgagaagcccgacgatgaagtgaaagaaaccgctcatgatttagatgttaagtcacctcccgagccacgcagcgaggttgtaccggcgcgcctgaagcgagcaagcgccccaaccttcgataatgactactctttgagcgagctcctgagccaactagacagcggtgtcagccaggcggttgaaggccctgaggaactctctcgtagctccagcgagtcaaaacttccttcctccggctccggtaaacggctgtcgggcgtgagttctgtggactcggcattttccagtagaggctccttgagcctatcgtttgagagggaaccttccacaagtgacctgggaacaactgatgtgcagaagaaaaagttggtcgacgccattgtcagcggcgatacttccaaactgatgaagatcctccagccacaggatgtcgacttggccctggattccggagcttcactgcttcacctcgccgtcgaggctggccaggaggagtgcgcgaagtggttattattaaacaacgcaaaccccaacttgtccaatagacgaggatccacccctctacacatggcagtggaacggagggtcagaggtgtcgtagagctgctgctggcaaggaagatctcagtgaatgctaaggacgaagatcaatggactgccttacatttcgcggcccagaatggtgacgaatcgtctactaggctgttacttgagaagaacgccagtgttaacgaggtcgacttcgagggccgcactccgatgcatgtggcatgccagcacggccaggaaaacatcgtgcggattctgctgcgccgaggggtggacgtgagcctgcaaggcaaggatgcatggcactgtaccaccctagcggggccccctgcccataggcaagctgctggtcaggctgctggtggagagtgcgagcgaccggacgccggttgggaagatgcaattgcccccggccgaacggcccgagcgttaccgaggggaccccacccccatagacccgtgctcagacgccaaaggctgcagccagccggcacggacacccccgcccgacctcgccgtaggggaaccagagccctgcctggatgctcttgcattggagcacttgcccgtaggccgtag

SEQ ID NO: 202753 - DNA, 2355 bp, synthetic construct
  misc_feature 1..2355: note = Description of Artificial Sequence: Synthetic coding sequence
  source 1..2355: mol_type = other DNA
atggagggcgacggcggcaccccctgggccctggccctgctgcggacattcgatgctggagaattcactggttgggagaaagtgggaagtggtggattcggacaggtgtataaagtgaggcatgtccactggaaaacctggctggccattaagtgcagtccctccttacacgtggatgacagggagaggatggaattgctggaagaagctaaaaagatggagatggcgaagtttcgatacattctacccgtatacggaatttgcagggagcccgtgggcctcgtgatggaatatatggaaactggctcactggaaaaactccttgcctccgagcctttgccttgggatctgcgctttagaatcattcatgaaacggctgttggaatgaactttctgcactgcatggccccccctctgctgcatttagatctgaagcccgcaaacattctgctggacgcacactaccacgtcaagatctctgacttcggactggcaaagtgtaacggcctgtctcacagtcacgatctcagtatggatggcctgttcggtactattgcatacttgcccccggagcggatccgagagaagagcaggttgttcgacacaaaacatgacgtttatagtttcgctattgtgatctggggcgtacttacccagaagaaaccatttgcggatgaaaaaaatattctccacatcatggtgaaggtggttaaggggcacaggccagagttgcctccagtgtgcagggctagaccccgggcctgtagtcatttgatccgcctgatgcagcggtgctggcagggggatccgcgggtacggccaacattccaagagattaccagtgagacagaagatctctgtgagaagccagatgacgaagtgaaagaaaccgcccatgacctggatgtgaaatcgcctccagagccaagatccgaagtcgtgcctgctagactgaaacgcgccagcgctcccacgtttgacaatgactatagcttatctgagttgctctcacagctcgattcgggcgtgagtcaggctgtggaaggccccgaagaattgtctcgttccagtagcgaatccaaactgccatcttctggttcgggaaagcgactgagcggagtgtcatctgtggacagtgcatttagcagtagaggctccttgtccctgagtttcgaaagagagccatccacctccgacctgggcacgaccgatgtacagaagaagaagctggtggacgccatcgtgtctggggatacgagcaaactgatgaagatcttgcagccacaggatgttgacctcgcacttgattctggtgccagtcttttgcacctcgctgtcgaggccggacaggaggagtgcgctaaatggctgctgcttaacaacgctaatcctaacctcagcaatcgccgcgggtccacccccttacacatggccgtggagcgtcgggtgcggggggttgtggagctgctactggctaggaagatcagcgtcaacgctaaggacgaagaccagtggaccgccctgcacttcgctgctcagaacggtgacgagtcatcgactagactattactggaaaaaaatgcctcggttaatgaggtggatttcgagggccgaacccccatgcacgtggcctgccaacatggacaggaaaacatcgtcaggatcctgttacggcgtggcgtagacgtaagtctgcagggcaaggacgcttggcttcctctccattatgccgcctggcagggtcacttgcctatcgtgaaattgctagctaagcagccaggcgtgtccgtgaacgctcagaccctagatgggagaacccctctccacctggctgcccagcgcggccactatcgtgtggcgagaatcctgatcgatctgtgctcagacgtgaatgtctgttctctcctcgcccagaccccactgcatgttgcggcagagacggggcacaccagtaccgcccgactgttactgcatagaggagccgggaaggaagctatgacctccgacggctatacagccctgcacctggccgccagaaacggacatctcgccaccgtaaaactgttggtagaagaaaaggccgatgtgctcgccagggggcccttgaaccagaccgcccttcatctggccgcagcacacggccacagcgaagtcgttgaggaactggtttctgcagacgttatcgatctcttcgatgaacagggtctatctgccctccatctggccgcccagggacgacatgcccagaccgtggagacccttctcaggcacggagctcacattaatctgcagtccttgaagtttcagggcggccacgggcccgccgccacactgctccgaaggtctaagacatag

SEQ ID NO: 202754 - DNA, 2499 bp, synthetic construct
  misc_feature 1..2499: note = Description of Artificial Sequence: Synthetic coding sequence
  source 1..2499: mol_type = other DNA
atggagggcgacggcggcaccccctgggccctggccctgctgcggaccttcgatgccggtgaattcactggatgggagaaggtgggctcaggagggttcgggcaagtgtataaggtgcgccatgtccactggaagacttggctagccatcaaatgttctccaagtttacatgtggatgaccgagaaagaatggaactcctggaagaagctaagaaaatggaaatggcaaagtttcggtacatcctcccagtctatggtatttgtcgcgagcccgtcggtctggtgatggaatatatggagacggggtcgctggaaaagctgctggcttcagaaccacttccctgggacctgaggtttcgtataattcatgagacagccgtgggcatgaatttcctacactgcatggccccacccttattacacttggacctgaagcctgctaacattctgctagacgcccactaccatgtaaaaattagcgatttcggcctggcaaaatgcaatggcctttcccactctcacgacttgtccatggatggcctgtttgggacgatcgcatacctaccacccgaacgcataagggagaagtcccgactgttcgacaccaagcacgatgtttactccttcgcaattgtcatctggggcgtactgacccagaaaaaaccatttgcagacgagaagaacatcctacacatcatggtgaaggtggttaagggacaccggcctgaactgccaccagtctgccgagcccggccaagagcctgtagccatttgatccgattgatgcaacgctgctggcagggagaccccagggtcagaccaacctttcagggtaacggactaaatggggagctcataagacaggttctggccgctctgctacctgtcaccggccgatggcggtcacctggagagggattccgtctggaaagcgaggttattattagagtgacctgccccctaagcagtccccaggaaattacgtccgagacagaagacctgtgtgagaagccggatgacgaagtaaaagagactgctcatgatctcgacgttaaatcccctcctgagcccagaagtgaagtggtgccagctcggctgaagagagccagtgccccaacatttgacaacgattatagtctttccgaactgcttagtcagctcgactctggtgtgagccaggcagtcgaaggtcctgaagaactctcccgtagttctagtgaatcgaagctgccttcctctggcagcggtaaaagactctccggggtcagttcagtcgattctgctttctcctctaggggatccctgagccttagtttcgaacgggaaccaagcacctctgatctaggaaccacagacgtacagaagaagaaacttgtcgacgccatcgtgagcggagatacaagtaagttaatgaaaattttgcagccccaggatgtggacctcgctcttgactcgggcgccagcctcctccaccttgctgtcgaagctgggcaggaagaatgcgcgaaatggctgctgcttaataacgctaacccgaatctcagcaatcgacgcgggtctaccccactgcacatggccgtggagagacgggttcgcggcgtggtcgaactacttttggcgagaaagatttctgtcaatgctaaagatgaagaccagtggacagcacttcactttgcagctcagaatggcgacgaaagctctacccgcttgctgctggagaaaaacgcatccgttaacgaggtggactttgaggggcgcaccccaatgcacgttgcttgccagcatggacaggagaacattgtccgcatcctgcttcggagaggtgtggatgtctccctgcagggcaaagacgcctggctgccactgcactatgcggcctggcaggggcacctccctatagtcaagctgcttgcgaagcagccaggcgtcagcgtgaacgctcagaccctggacggcagaacgccccttcacctggcagcacagcggggacactaccgagtggccagaatcctaattgacctgtgttccgacgtgaatgtgtgtagcctgctggcccagacccctctgcacgtcgcagcagagaccggccacaccagtacggcgcgcctgctattgcatagaggcgctggtaaagaagccatgaccagtgacgggtacactgctttacatttggcggctcgcaacggtcacctggcgactgtcaagttactggtcgaggaaaaagccgatgtcctagcccgcggaccgttgaaccaaaccgccctacatctcgcggctgcccatggccactccgaagttgtggaggagctcgttagcgcggacgtgattgatctttttgacgagcaagggttgtctgctctacacctcgcggcgcaagggcgacatgctcaaacggtggaaaccttgctgaggcacggggcccatatcaacctccaatccctgaagtttcaaggggggcacggccctgccgctactttgctgcggcgctctaagacttag

SEQ ID NO: 202755 - DNA, 2166 bp, synthetic construct
  misc_feature 1..2166: note = Description of Artificial Sequence: Synthetic coding sequence
  source 1..2166: mol_type = other DNA
atggagctgctggaggaggccaagaagatggagatggccaagttccgatacatcctacctgtgtatggaatctgcagggaacctgtgggactcgtgatggaatacatggaaaccggatcgctggagaagctgttagcgtcagagcctctcccttgggatttgcgcttccgcattatccatgaaacggctgtgggtatgaattttttacactgcatggcaccacccctgctgcatctcgatctgaagcctgcaaacattttgctggacgctcactaccatgtcaaaatcagcgacttcgggcttgccaagtgtaacggtctgtcacatagccacgatctgagcatggatggtttgttcgggactatcgcctacttgccaccggagaggatccgggagaaatcccggctgttcgacacaaagcacgatgtctattccttcgcgatcgtgatatggggtgtgctgacacagaagaagccttttgccgatgagaagaatatactgcatattatggtcaaagtcgtgaagggccacaggcccgaactccccccggtgtgccgagccaggcccagggcgtgtagtcacctcattcgattgatgcaacgttgctggcagggtgaccctcgagtgcggccaaccttccaggagattacttcagagacagaggatttatgtgagaagcctgacgacgaggtgaaagaaacggcccatgacctggacgtaaagtcaccccctgagcctagatctgaggtcgtgcctgcacgtctaaaaagagcctctgcgccgacgttcgataacgattatagtctgtcagagttactaagccagctcgacagcggtgtttcacaggcggttgagggaccagaagagttgtctcggtcatctagcgagagcaagttacctagcagtggttctggtaagagattgagtggtgtctcatccgtcgactctgcattcagcagcagggggtcactatccctcagttttgaacgggaacccagcacgtctgacttgggcaccacagacgtgcagaaaaagaaactggttgacgccatagtgtctggcgatacctcaaagttaatgaaaatcttacagccacaggacgttgacctggccctagatagcggagcctcattgctgcatctggccgtcgaagctggtcaggaggaatgtgccaagtggcttctcctcaataacgccaatccaaacctaagcaatcgacgcggatccacaccactccacatggcagtggaaaggagggttaggggcgttgttgaactcctgcttgccagaaagataagtgtgaatgcgaaggatgaggaccagtggactgcactacattttgccgcccagaacggggatgaatcctcaacaaggctgctcctggaaaaaaacgcgagtgtgaacgaggtagactttgaagggcgtacccccatgcacgtcgcatgccagcatgggcaagaaaatatcgtgcgcatcctgctgagaaggggagtggatgtgagtctccagggtaaagatgcatggctccctctgcactacgctgcctggcaaggacacttgcctatcgtgaagctgttggcaaagcagccaggcgtgagtgtcaatgctcagactctagatggccgaaccccactgcacctggcagcccagaggggacattaccgagtggcccggatcctcatcgatctgtgtagtgatgtaaatgtgtgctccctactggcacagactccactgcatgtagcggctgaaacggggcacacatccaccgctaggctgctgctccatcgcggggcagggaaagaggccatgacgtccgacggctacacggcgcttcatctggccgctagaaacgggcatttagcaacggtgaaattgctggtggaggagaaggccgatgtcctcgcacgtggccccttgaaccagactgccctgcacctcgccgcagcacatggacattccgaagttgttgaggaactggtgtcagccgatgtcattgatctgtttgacgagcaggggctgtccgctctgcatctggcagcccaaggaaggcacgctcagacagtcgagaccctccttcggcacggggcccacattaacctacagtccctgaagtttcagggcgggcatgggccagccgccaccctgctcagacggtcaaaaacctag

SEQ ID NO: 202756 - DNA, 2166 bp, synthetic construct
  misc_feature 1..2166: note = Description of Artificial Sequence: Synthetic coding sequence
  source 1..2166: mol_type = other DNA
atggagctgctggaggaggccaagaagatggagatggccaagttccgctacattctcccagtctatggcatttgcagagagcctgtgggactagtgatggaatacatggaaactggttccctcgagaagctgctggcctctgagccgctgccgtgggatctccggttcagaatcatacacgaaaccgctgtggggatgaactttcttcactgcatggcaccacccctgctacacctggaccttaagcctgcaaatattctcttggacgcccactaccacgttaagatatctgattttgggctcgcgaagtgcaacggactttcacacagtcacgatttaagtatggacggcttatttggaactattgcctacctgcctcccgagcggattcgcgagaagagtcgactcttcgacaccaaacatgacgtctactcctttgcgatcgttatttggggggttctcactcagaagaaacctttcgctgatgaaaagaacattctgcatatcatggtgaaggtggtgaaggggcacagacctgaactgccccctgtgtgtcgggccagaccaagagcatgctcccacctgatcagacttatgcaacgatgttggcagggcgatccccgagtcaggccaacatttcaggaaattacgtctgagacagaggatctctgtgagaagccagatgacgaagtaaaggagacagcccatgatcttgacgtgaaatctccacccgagcctaggagtgaggtggtcccagcccggctgaagcgggcatcagcacccacattcgataatgactactcactgtcagaacttctctcgcaactggactcaggtgtttcgcaagccgtcgagggaccagaggaactctcccgaagttccagcgagagcaagctgccatcgtctggcagtggtaaaaggttatccggtgtatcttccgtagactcggcgttctcatctaggggatccctgtccctgtccttcgagagagaaccatccacttcagatctaggtactaccgatgtccagaagaaaaaattggtggatgcaatcgtgtctggagacacatccaaattgatgaagatcctccagccccaagatgtggacttagcacttgacagtggagcaagtcttctgcatcttgcagtggaagccggtcaggaggagtgtgcaaaatggcttctgctgaacaacgcaaatccaaacctttcaaacagacgtggatccacccctctccatatggccgtagaaagacgcgtgcgcggggtggtggagttgcttctggcccgcaaaatcagcgtgaatgcaaaagacgaagaccaatggaccgccctgcacttcgcggcccagaatggcgacgagtcctctacccggctgctgctggaaaaaaacgcgagcgttaatgaagtagatttcgagggacgcacaccaatgcacgtggcttgccagcacggccaagaaaatatcgtgaggattcttctgaggaggggggttgacgtttccctgcaggggaaagacgcctggctacctctgcattacgcagcttggcaaggccacctgcccatagtgaagcttctggcaaagcaacccggtgtatcggtgaacgctcagactctggacggccgcactcccttacatttggccgcccagagggggcattaccgagtcgccagaattttaatcgacctgtgctctgatgtaaatgtctgctccctgcttgcccagacaccgctgcacgtcgccgctgagaccggccatacgtccacggctcgattgttactccaccgcggagctggcaaggaggccatgacatctgatgggtatacagctttgcatcttgcggctcgcaatggccacctagcaacagtgaaattgctggtggaggagaaagccgatgttctggcccgcggccccctgaaccagactgccctccatctggccgccgcacacgggcactccgaagttgttgaagaactagtctctgctgacgttatcgatctttttgacgaacaggggctttccgccttgcacctagccgcacagggtcggcatgcccagaccgtggaaaccctgctccgccacggggctcatattaacctccaaagcttaaaatttcagggcgggcatggccctgccgccactttgttacgacgaagcaagacttag

SEQ ID NO: 202757 - DNA, 3132 bp, synthetic construct
  misc_feature 1..3132: note = Description of Artificial Sequence: Synthetic coding sequence
  source 1..3132: mol_type = other DNA
atggccgccagcttcccccccaccctgggcctgagcagcgcccccgatgaaattcagcaccctcatatcaaattcagcgagtggaaatttaagttgttccgcgtgagaagcttcgagaagaccccagaggaggcgcagaaggagaaaaaggatagcttcgagggcaagccgtcattggaacagagccccgccgttctagataaggctgacggtcagaagccagtccctactcagccactcctcaaagcccatcctaagttttcgaagaaattccatgataacgaaaaggcacgcgggaaagcgattcaccaggccaatctcaggcacctgtgtcgcatctgtggcaattctttcagagccgacgaacacaacaggaggtatcctgtgcacggccccgtagacgggaagacgcttggcttgctgcggaaaaaggagaaacgagctacgtcttggccagacctgattgctaaggtgtttcggatagatgtcaaggcagatgtcgattcaattcatccgactgaattctgtcacaactgttggagtatcatgcacagaaagtttagcagtgccccctgcgaagtttactttccacgaaatgtaacaatggagtggcatccccacactccctcctgcgatatttgcaacacagcacgcagaggtctcaaacggaaaagcctgcagccgaatcttcagctctccaaaaagctcaagactgtgttggatcaggcaaggcaggcgcggcagcacaagcgccgtgcacaggccagaatctctagcaaagatgttatgaaaaagatcgccaactgttctaaaattcatctgtccactaagttacttgctgtggacttccctgagcactttgttaaatccatcagctgtcagatctgtgaacatatcctggcagaccccgtcgaaacaaattgcaagcatgtgttctgcagagtctgcatcctgaggtgccttaaggtcatggggtcctactgtccgtcttgtcggtatccttgctttccaacagacttggagagtccggttaagtcattcctaagtgtcctcaactccctcatggttaaatgccccgccaaagagtgtaacgaagaggtttctctggagaagtacaaccatcatatctcgtcccataaggagagtaaggaaatatttgtgcacattaataagggagggcgaccccgccagcatcttctgtctcttactcgaagagcacaaaagcacagactgagggaattgaagctccaggtaaaggcgttcgccgataaagaggagggaggcgatgttaagtccgtctgcatgactctcttcctgctggccctccgcgctcgaaacgaacaccgacaagcggatgaacttgaagcaataatgcagggaaaaggtagtggccttcagcccgccgtatgcctggcaatacgggtaaatacattcctctcttgctcacagtaccataagatgtatcgtaccgtgaaggctatcacaggtcgccagatctttcagcctctccatgctctccgaaatgcggagaaggtgctactgcctggttatcaccattttgaatggcagcctcccctgaagaatgtgtcaagcagcaccgacgtggggattattgacgggctcagcggactttcaagctctgttgacgactatccagtggatacgattgctaagcgatttcggtatgactctgctctggtgagtgcactcatggacatggaggaggatatcctcgaaggcatgagaagtcaggaccttgatgactacctgaatggccccttcacagttgtggtgaaagagagctgtgacgggatgggtgacgtgtctgagaaacatggaagtgggcccgtggtgcctgagaaggctgtgcgcttctcctttaccataatgaaaatcaccatcgcccactctagccagaacgtgaaggtcttcgaggaggcaaagccaaactcagaactttgttgtaagcctctttgccttatgttggccgatgagtcagatcatgagacgctgacagccattctttctccattgatcgctgagagggaggcgatgaagtcatcagagctgatgctggagctgggaggaatactacgcacatttaagtttatatttagagggaccggctacgacgaaaagttagtaagagaagtagagggtctggaggcatcagggtctgtgtatatctgcacgctctgcgacgccacccgcctcgaggcatctcagaatctggtgtttcattcaattacacgcagccacgcagaaaatcttgagagatatgaggtttggcgcagcaatccctatcatgagtccgtcgaggaattgcgagaccgagtgaagggcgtctctgctaaaccctttattgaaaccgtgccctccatcgatgccctgcattgcgacatcggtaacgcagcagagttctacaagatcttccaactggagatcggcgaggtctacaaaaaccctaatgcatcaaaagaggaacggaagcggtggcaggctacattggacaaacaccttcgcaaaaaaatgaaccttaagcctatcatgcggatgaatggtaattttgctagaaaattgatgactaaggagaccgtggacgcggtgtgtgaattgattccatccgaggagaggcatgaggcactccgggagctgatggatctgtacctcaaaatgaaacccgtctggcgttcttcgtgtccggccaaggagtgccctgagtccctttgccagtattcattcaatagccagcggttcgcggagctgctttccacaaaattcaagtatcgttacgaaggaaaaattacaaactacttccacaaaaccctggctcatgtacccgagattatcgagagagatgggagtattggagcctgggcaagcgagggcaatgagtccggcaataagctttttcggagattccgcaaaatgaatgccagacagagcaagtgttatgagatggaggacgtgctgaagcatcactggctgtacaccagtaagtatctccagaaatttatgaatgcgcacaacgcactgaagacctccggttttactatgaatccacaggccagtctgggcgacccattaggtatcgaagatagcctggagtctcaggactctatggagttctag

SEQ ID NO: 202758 - DNA, 1584 bp, synthetic construct
  misc_feature 1..1584: note = Description of Artificial Sequence: Synthetic coding sequence
  source 1..1584: mol_type = other DNA
atgagcctgcagatggtgaccgtgagcaacaacatcgccctgatccagccaggtttctccctaatgaacttcgacggtcaggtattcttctttgggcagaaagggtggccaaagaggtcgtgccccacaggggtttttcatctagacgtcaagcacaaccatgtgaagttgaagcccacaatcttcagtaaggactcttgctacctaccacctttgaggtatcctgctacatgtacctttaaaggctccctggagtctgagaagcaccagtacattatccacggcggcaaaacccctaataacgaggtatctgataaaatatacgtgatgagcatagtatgtaaaaacaacaagaaagtgacctttagatgcaccgagaaggacctagttggtgatgtgccagaggctagatacggtcactccatcaatgtcgtatactcgagaggtaagtctatgggcgttctgtttggcggtcgctcctatatgccttctacccaccggaccaccgaaaaatggaattctgtcgcagattgcctgccctgtgtcttcctcgttgactttgaattcggttgcgcaaccagctacattctgcctgaactgcaggatggactgagttttcatgttagtatcgccaagaacgacactatatacatcctcggaggccacagcctggctaacaacattcgcccagccaacctctatcgaatcagagtcgaccttcccctcggctcccctgctgtgaattgcacagtcctgccagggggcatttccgtatcctcggctatacttacacaaaccaataatgatgagttcgtgattgtgggggggtatcagcttgagaaccaaaagagaatgatctgcaatatcatttccctggaagataacaaaatcgaaattcgggaaatggagacccctgattggacacccgacataaagcacagcaagatatggtttggatcgaacatgggaaacggaacagtatttttggggatccctggcgataacaagcaggttgttagcgaaggcttctatttctatatgttaaaatgtgccgaagacgacaccaatgaagagcagacaacattcacaaattcccaaacttccaccgaggatccgggcgatagtaccccctttgaggactccgaggaattctgctttagcgccgaggctaatagttttgacggcgatgacgagtttgacacctataacgaggacgacgaagaggacgagtccgagacagggtattggattacatgttgccctacatgtgacgtcgatattaacacttgggtgcctttctactctaccgagctgaacaagcccgctatgatctactgtagtcatggggacggacattgggtgcatgcccagtgcatggacctcgctgaacgcacgttaatccatttgagcgccggcagtaataagtactattgcaatgagcacgtggagattgccagggcactgcacacaccacagcgggttctgccactgaaaaagcccccaatgaaatctctaaggaagaagggatcgggcaagattctgactcccgcaaaaaagtccttcctgcgacgtctgttcgattag

SEQ ID NO: 202759 - DNA, 216 bp, synthetic construct
  misc_feature 1..216: note = Description of Artificial Sequence: Synthetic coding sequence
  source 1..216: mol_type = other DNA
atgagcctgcagatggtgaccgtgagcaacaacatcgccctgatccagcccgggttctccttgatgaactttgacggccaggtgttcttttttgggcaaaagggttggcccaagcgtagctgcccgaccggcgtgtttcatctggatgtcaagcataaccatgttaagctgaagcctaccatcttcagtaaggactcttgttatttgcctccatag

SEQ ID NO: 202760 - DNA, 453 bp, synthetic construct
  misc_feature 1..453: note = Description of Artificial Sequence: Synthetic coding sequence
  source 1..453: mol_type = other DNA
atgagcctgcagatggtgaccgtgagcaacaacatcgccctgatccagccaggcttcagcttaatgaattttgatggtcaggtcttttttttcgggcagaagggatggcccaaacgctcttgccccactggcgtctttcacctggatgtgaaacacaatcatgtaaaactgaaaccaacgattttctctaaggatagctgttaccttccccccctcagatatccagcgacctgcacgttcaaggggtccttagaatccgaaaagcaccagtacatcatacacggagggaagactccgaataatgaggtcagcgataagatttacgtaatgagtatagtgtgtaaaaataataagaaagtgacatttcggtgcacggaaaaggacctggtgggagatgttcctgaagctaggtatgggcattcaattaacgttgtgtacagtagagggaaatag

SEQ ID NO: 202761 - skipped

SEQ ID NO: 202762 - DNA, 1503 bp, synthetic construct
  misc_feature 1..1503: note = Description of Artificial Sequence: Synthetic coding sequence
  source 1..1503: mol_type = other DNA
atggaccacaccgagggcagccccgccgaggagccccccgcccacgctccctcgcctggaaagtttggcgagaggccacctcctaaaaggcttactagagaggcaatgaggaactatctgaaggagagaggcgaccagacggttctgatactccacgctaaggtggcccaaaaatcgtatggaaatgagaaacggttcttttgccccccaccgtgtgtgtatctcatggggtcagggtggaaaaaaaaaaaagagcagatggaaagagacgggtgctctgagcaggagagtcagccttgtgccttcatcggaattggcaactccgaccaggagatgcaacagcttaatctggaagggaaaaattactgtactgccaagacactctatatttccgactctgataagcgaaaacacttcatgttgtcagtgaagatgttctacggaaacagcgacgacatcggcgtgttcttgtcaaaacgaattaaggtcattagcaagcctagtaagaaaaagcaatctctgaagaatgcagacctatgtattgcaagcggaacaaaggtggctctcttcaataggctgagatcacagaccgtgtcaacgcgctatttgcatgtcgaaggcgggaacttccatgccagttcccaacaatggggagcttttttcatacacctgctcgacgatgatgaatccgaaggcgaggagttcaccgtgcgtgacggatacattcattatggacaaaccgtaaaactggtgtgctccgtcacgggcatggctcttcctcgtctcatcatccgcaaggtagataaacagacagcactgctcgacgcagatgaccctgtcagtcaactccacaaatgtgcattttacttaaaagatactgagcggatgtatctgtgtctgtctcaggaaaggattattcagtttcaggcaaccccgtgccctaaagaacccaataaagagatgattaacgacggtgctagctggactattatctccacagacaaagctgagtacaccttctacgagggaatgggaccagttctggctccagtgaccccggtgccagtggtggaatctctgcaacttaacggtggcggagacgtggccatgctggagctgacaggtcagaacttcacccccaatctccgcgtatggtttggtgacgtggaggcagaaaccatgtatcggtgcggagaatcaatgctctgcgtcgttcctgacatctccgcctttcgtgagggctggcggtgggtgcggcagccggtgcaggtgcctgtgacattggtccgaaatgacggcattatatactcaacttcactgaccttcacctacactccagaacccggacccagaccacattgtagtgctgccggcgcaatcctgcgcgccaactctagccaggtgccccccaacgagtcaaataccaattcagagggctcttacacgaatgccagcactaactcaacttcagttacatcctcgacggctacggtggtgtcttag

SEQ ID NO: 202763 - DNA, 1461 bp, synthetic construct
  misc_feature 1..1461: note = Description of Artificial Sequence: Synthetic coding sequence
  source 1..1461: mol_type = other DNA
atggcctggatcaagcggaagttcggcgagcggcccccccccaagcgactcacccgagaagctatgcgtaactacctgaaggaaaggggcgatcagaccgttctcatcctccacgccaaagtcgcccaaaaatcttacggaaatgagaagcgcttcttttgccctcccccctgtgtgtatctgatgggcagtggatggaaaaaaaagaaggaacagatggagcgagacggctgctcagagcaggagtctcagccctgtgcgttcatcggaatcgggaactctgaccaagagatgcaacagctgaatttagagggcaagaattattgcacagccaagaccctttatatctctgactcggataaacgcaaacactttatgttgtccgtcaagatgttctacggcaattctgacgacattggcgtgttcctcagtaagcggataaaggttatcagtaaacccagtaagaagaaacaatccctgaaaaacgccgacctttgcatcgcgagcggtacaaaagtagcgctcttcaaccgccttagaagtcagacggtctctacgcgctatctgcacgtagaaggaggaaacttccacgcgagctcacaacagtggggagccttcttcatacatctactggatgatgatgaatcagagggcgaagaatttacagtccgggacggatatattcactacggccaaaccgttaagcttgtctgcagtgttactggtatggcacttccacggcttataatcaggaaagttgacaaacagaccgctttgctggatgcggacgatccggtgagccagttgcataagtgcgcattctacctgaaagatactgaacgaatgtacctgtgtttgtctcaggaacggatcattcagttccaggctacaccatgtccaaaggaacctaacaaggaaatgattaatgacggagcctcatggacgattatttctactgacaaggctgaatataccttctacgagggcatggggccggtgctagccccagtcacgcccgtgccagtggtcgagtcgcttcaacttaatgggggaggcgatgtggcaatgctggagcttaccggtcagaattttacaccaaacctgcgggtctggttcggcgacgtggaagctgagactatgtatcgctgcggtgagagcatgctctgcgtggtgcccgacatctccgcattccgcgaaggttggcgatgggtgagacaaccagtacaagtgcctgtgacccttgtcaggaatgacggcattatctactccacctcccttacctttacatatacccctgaaccgggtccaagaccgcactgtagtgccgcaggcgcaattcttcgtgcaaactcctctcaggtgccccccaatgagtcgaacaccaattctgaaggtagttataccaacgccagtactaattctaccagcgtcacgagtagcacggcaacggttgtgagctag

SEQ ID NO: 202764 - DNA, 1458 bp, synthetic construct
  misc_feature 1..1458: note = Description of Artificial Sequence: Synthetic coding sequence
  source 1..1458: mol_type = other DNA
atgggcggctgccggaagttcggcgagcggcccccccccaagcggctcacccgggaagctatgcggaattacctgaaggagcggggtgatcaaacagttctcatcttacacgctaaggtggctcagaagtcgtacggtaatgaaaagagattcttctgcccgcccccatgtgtctatctgatggggagtggatggaagaaaaaaaaggagcaaatggaaagagacggatgctctgagcaggaatctcagccatgtgcttttatcggaatcggcaatagcgatcaggagatgcagcaactgaacctcgaaggaaagaactactgcactgcaaaaacactttatatttctgatagtgacaagaggaaacatttcatgttatcggttaagatgttttacggcaacagtgatgacatcggcgtcttcctgagcaaacggataaaggtgatatctaagcccagcaagaaaaaacagtctcttaagaacgcagatctgtgcattgcctccggcactaaggtggccctgtttaatcggttgcgctcacagaccgtcagcactaggtatttgcacgtggagggaggaaatttccatgcgtcatctcaacagtggggagcttttttcatacacctcctggacgacgacgaaagcgaaggcgaggaattcacagtcagggacggttacattcactatggccagaccgtgaagctcgtttgctccgtgactggaatggcattgcctcggctgattatccgaaaagtggacaaacagacggcgctgctagacgcagacgaccccgtttctcagctgcacaagtgtgcgttttatttgaaggacaccgaacggatgtatttgtgcctgtctcaagaacgaattattcaatttcaggctactccatgtcccaaggaacccaacaaggaaatgatcaacgatggggcgtcgtggactataatttcgacagataaagctgagtacacattctatgagggaatggggcctgttttggccccggtgacacccgttcccgtggtcgagagcctgcagttgaatggtgggggagacgtcgcaatgctcgagctaactggccagaacttcacaccgaatctccgggtgtggttcggcgatgttgaggccgagacaatgtataggtgcggtgagtccatgttatgtgtcgtccccgatatatccgccttcagggaaggatggagatgggtgcgtcagcccgtgcaggtgcctgtaacgttggtgaggaacgatgggattatttattctacatccctgactttcacatacacccctgaaccaggcccacggccgcattgcagcgccgcaggggccatcctgagagcaaattcctcacaggtcccccccaacgaatccaatactaacagtgaaggctcttataccaatgcgagcactaactctacaagcgttacatcgagtaccgccactgtggtcagctag

SEQ ID NO: 202765 - DNA, 1464 bp, synthetic construct
  misc_feature 1..1464: note = Description of Artificial Sequence: Synthetic coding sequence
  source 1..1464: mol_type = other DNA
atggcccccgtggtgaccggcaagttcggcgagcggcccccccccaagcgtctcactagagaagctatgaggaactacctcaaagagaggggagatcaaaccgtcctgattctgcacgccaaggtcgcacaaaagagctatggaaacgaaaagcgatttttctgtcccccgccctgcgtttacttaatgggctccgggtggaagaagaaaaaagagcagatggaacgagatggctgcagtgagcaggagtctcagccatgtgctttcatcgggatcggcaatagcgaccaagagatgcagcagctcaacctggagggtaaaaattactgtaccgcaaaaaccttgtacataagcgacagtgacaagcgcaaacatttcatgctcagcgttaagatgttctacgggaacagcgacgacatcggggtgttcctttcaaagcgaataaaagtgatctccaagcctagtaagaaaaagcagtccctgaagaacgccgacctgtgtattgcctcaggaactaaagttgccttatttaatcggctgagatcacagaccgtgagcacccggtatctgcacgtcgaaggcggtaatttccacgcatcatcacagcagtggggcgccttctttatacaccttctggatgatgatgagagtgaaggcgaggagttcactgtgagggatggttatattcattatgggcagaccgttaaactagtatgttctgtcacagggatggcccttccgcgactgattatccgtaaggtggataaacagaccgcattgctggacgccgacgatccggtgagtcaactgcacaagtgtgcgttttatcttaaggacactgagcgcatgtacttgtgtctgagccaggagcggattattcaattccaggccaccccgtgccccaaggagccgaataaggaaatgatcaacgacggggcttcgtggactataatctccactgacaaggctgaatacaccttttacgaagggatgggtcctgtgctggctccagtcactccagtacctgtagtggagagcctgcaactgaacggtgggggagacgtcgccatgctggagctgacggggcaaaattttactcccaacctgcgagtttggttcggcgacgtggaggccgaaactatgtatagatgcggagagagcatgctgtgtgttgtacctgacatttccgcttttagagagggctggaggtgggtgcggcagccagttcaagtgcccgtcacccttgtgcgtaatgatgggatcatctacagtacaagtctaacgtttacttacactccagagcctggaccgcgcccgcactgtagtgctgccggggctatccttagggcaaattctagccaagtccctcccaatgagtcaaatacaaattcagagggctcgtacacaaacgcgtctaccaactcgacatcggtgacttcttcgactgctacagttgtgtcttag

SEQ ID NO: 202766 - DNA, 1461 bp, synthetic construct
  misc_feature 1..1461: note = Description of Artificial Sequence: Synthetic coding sequence
  source 1..1461: mol_type = other DNA
atggcctggatcaagcggaagttcggcgagcggcccccccccaagcgcctgacgcgcgaagccatgcggaactatcttaaggaaagaggcgaccaaactgtgttgatacttcatgctaaggttgcacagaagtcatacggcaacgagaaaagatttttttgcccaccaccctgcgtttacctgatgggctccggatggaagaagaagaaggaacaaatggagcgcgacggctgttcagagcaagagtcccagccatgtgcgttcatcggaatcgggaattccgatcaagagatgcagcagcttaatctagaaggcaagaactactgtacagccaagaccctatacatttcggactcagataagagaaagcatttcatgctctcagtcaaaatgttctacggaaactctgatgacatcggtgtttttctcagtaaaaggattaaagtcatcagcaaaccaagcaagaagaagcagtcactcaagaacgccgatctttgcattgctagcgggacaaaagtcgcactcttcaaccgtttaaggtcacaaactgtcagcacacggtacctacacgttgagggaggaaatttccacgctagctcacagcagtggggggccttttttatccacctgcttgacgacgacgagagcgagggtgaggaattcacagtgcgcgatggatacatacactacggccagacggtcaagttagtgtgctctgtgacaggaatggcactacctcgcctcattatccgcaaagttgataagcagacggcgctgttggatgccgacgatcccgtgagccagctccataagtgcgcgttttatctgaaggatactgagagaatgtacctctgcctgagccaggagaggataattcagttccaagccacaccatgtccaaaggagcctaataaggagatgattaatgacggagcttcctggaccattatcagtaccgataaagccgagtacaccttctacgagggcatggggcccgtcctggcgccagttacaccagtcccagttgtagaaagtcttcagctcaacgggggcggcgatgtcgccatgttggagctgacggggcagaacttcacgcccaatctacgggtctggttcggcgatgtcgaggcagaaacaatgtataggtgtggtgaatcaatgctgtgtgtggtccccgatataagcgccttccgagaaggatggcggtgggtgaggcaaccagtgcaggttccagtgactttggttaggaatgacggcataatctattctacttcattaacctttacgtacacccccgaacccggaccaagaccacactgctctgcagccggcgcgattcttagagctaatagcagccaggtcccaccaaatgaatccaacaccaactctgagggcagttatacaaatgcttctacaaattcgacctccgtcacctccagcacagctacggtcgtctcgtag

SEQ ID NO: 202767 - DNA, 1503 bp, synthetic construct
  misc_feature 1..1503: note = Description of Artificial Sequence: Synthetic coding sequence
  source 1..1503: mol_type = other DNA
atggaccacaccgagggcagccccgccgaggagccccccgcccacgccccatctcctggcaagtttggtgaacgaccaccccccaaacgtctgacccgagaggctatgcggaattatcttaaagagcgtggcgaccagactgtgctcatcctgcacgctaaagtcgcccaaaagtcttacggaaacgagaagaggttcttctgcccccccccatgtgtctacctcatgggcagcgggtggaagaagaaaaaagagcaaatggaaagggatggatgtagcgaacaggagtctcagccctgtgcttttattggcatcggcaattccgatcaggaaatgcaacagttaaacctcgagggcaagaattattgcactgcaaaaaccctgtatattagcgacagtgacaaaaggaagcacttcatgttgagcgtcaagatgttttacgggaatagtgacgatattggcgtgtttctgtccaaaagaatcaaggtgatcagtaaaccatccaagaaaaagcaatctttaaagaacgctgacctgtgtatcgcttccggaacaaaagtggcgctcttcaatcgattgcggagtcaaacggttagcacgagatacctgcacgtggaggggggcaattttcacgcatcttcccagcagtggggcgcattttttattcacctcttagatgatgatgaatccgaaggcgaggagttcactgtgcgcgacggatacatccactatggccagaccgttaagcttgtgtgctcggtgaccggaatggctcttccgcgcctcatcattagaaaagtggataaacagacggcgctgctggatgccgatgaccctgtcagccagctgcataaatgtgctttttatttaaaggatactgagcgcatgtacctttgcctgtcccaggaacgaattattcagttccaggctaccccatgtcccaaagagccaaataaggagatgatcaatgacggtgctagctggactattatcagcacggataaagccgaatacaccttctatgaggggatggggcccgtcctagcacctgtaactcccgtcccagtcgtggaatccctgcaattaaacgggggcggcgatgtggcaatgttggagctcaccggtcagaacttcactcctaacctgcgcgtttggtttggtgatgtcgaggcagagactatgtatcggtgcggggagagtatgctctgtgtggtaccggacatttcagcttttagagaaggctggaggtgggtgcgacagcccgttcaggtgccggtgaccctcgtacggaatgacggtatcatttactctactagccttaccttcacctatacaccagaacccggtccgcgcccgcactgctccgccgccggtgcaatcctgcgagccaactcctcacaggtgcccccaaatgaatctaataccaactctgagggttcctatacgaacgcatccaccaattccacaagtgtaactagttccacagctacagtcgtttcatag

SEQ ID NO: 202768 - DNA, 432 bp, synthetic construct
  misc_feature 1..432: note = Description of Artificial Sequence: Synthetic coding sequence
  source 1..432: mol_type = other DNA
atgcggaactacctgaaggagcggggcgaccagaccgtgctgatcttgcatgccaaggttgcacaaaagtcctacggcaacgagaagcgcttcttctgcccacccccgtgtgtttatctgatgggctctggctggaagaagaaaaaggaacagatggagcgagacggctgttcagagcaggaaagccagccctgtgcctttataggcataggtaacagcgatcaggagatgcagcagctgaacctcgaaggcaagaattattgcacagccaagacattatacattagcgactccgacaaacgcaagcacttcatgctgtcagtaaaaatgttttatggaaacagcgatgatattggggtgtttctcagcaagcggatcaaagtgatttctaagccaagtaagaagaagcaatctctgaaaaatgcagattag

SEQ ID NO: 202769 - DNA, 87 bp, synthetic construct
  misc_feature 1..87: note = Description of Artificial Sequence: Synthetic coding sequence
  source 1..87: mol_type = other DNA
atggcctggatcaagcggaagttcggcgagcggcccccccccaagcggcttacccgtgaagcaatgcggaactacctaaaggaatag

SEQ ID NO: 202770 - DNA, 294 bp, synthetic construct
  misc_feature 1..294: note = Description of Artificial Sequence: Synthetic coding sequence
  source 1..294: mol_type = other DNA
atggcctggatcaagcggaagttcggcgagcggcccccccccaagcgcctgactcgagaggctatgaggaattaccttaaagagaggggcgatcagactgtgctgatcctgcatgctaaggtggcccagaagtcctatggtaacgagaagaggttcttttgtcctcccccctgcgtttacttaatgggaagcgggtggaagaagaaaaaggagcaaatggagagagacggctgctccgagcaggagagccaaccttgcgccttcatcggcatcggcaacagtgaccaggagtag

SEQ ID NO: 202771 - DNA, 1398 bp, synthetic construct
  misc_feature 1..1398: note = Description of Artificial Sequence: Synthetic coding sequence
  source 1..1398: mol_type = other DNA
atgcggaactacctgaaggagcggggcgaccagaccgtgctgatcctacatgctaaggtggcccaaaagagttacgggaacgaaaaacgatttttttgcccacccccgtgcgtgtatctgatgggaagcggttggaaaaagaagaaagaacaaatggaaagagatggatgctcagagcaggagtcccagccttgcgctttcattggcattggaaacagcgatcaggaaatgcagcagttgaaccttgagggtaaaaattactgtacagctaaaaccctgtatatatcagactccgacaagcggaagcacttcatgctgtccgtgaaaatgttctatggcaactccgatgacatcggtgtctttctctccaagagaattaaagtgatttctaagccctcaaagaaaaaacagagtctcaaaaacgcagatctgtgtatcgcctcaggaacaaaagtagcactgttcaataggctccgaagccagaccgtgagtaccaggtatcttcacgtggagggaggcaactttcacgcctcaagtcagcagtggggggccttctttattcatcttttggatgacgatgaaagcgaaggcgaagagttcacagtgcgtgatggctatatccactacggccagaccgttaagctggtatgcagcgtaacaggaatggccctgccccgccttataatacggaaggtggataagcagactgctctattggatgccgacgaccccgtgagccagttgcacaagtgtgcattctacctgaaagacacagaacgcatgtacttatgtctgtctcaggaaaggatcatccagtttcaggcaacaccctgccccaaggagcctaataaggagatgatcaatgatggagcgagctggacgattataagtactgacaaggccgaatatactttctatgaaggtatggggccagtgctcgcgcccgtcaccccagtgccggtggttgaatccctccagctgaatggaggcggcgatgtggccatgttagagctgacaggccaaaactttacccctaatctgagagtttggtttggagacgttgaggccgagactatgtatcggtgcggagagtccatgttgtgtgtcgtgccagatatctccgccttccgcgagggatggagatgggtcagacagcctgttcaggttccggtgacccttgtacggaacgacgggatcatttactccacttctctgacgtttacttacacccccgaaccaggacccaggccccattgttctgcggctggggctatcctgagagcgaactcatcccaggtgcccccgaacgagtcaaatactaattctgagggcagctacactaacgccagcaccaactcaacctccgtcacttcgtcaactgctacggtcgtgtcatag

SEQ ID NO: 202772 - DNA, 474 bp, synthetic construct
  misc_feature 1..474: note = Description of Artificial Sequence: Synthetic coding sequence
  source 1..474: mol_type = other DNA
atgcggaactacctgaaggagcggggcgaccagaccgtgctgatcctacacgccaaagttgcacagaaaagctatggaaatgagaagcggttcttctgtcccccaccttgcgtgtatttgatggggtcagggtggaagaagaaaaaagagcaaatggaacgggacggctgtagcgagcaggaaagtcagccctgcgcattcatcgggatcggaaacagtgaccaggagatgcaacaattgaacctcgaaggcaagaactattgtaccgctaagaccctgtacatttcagattctgacaagcggaaacactttatgttaagcgtcaaaatgttttatggcaattccgacgacattggcgtgttcctctccaagcgtattaaagtgataagcaagccaagtaagaaaaagcaatccctgaaaaatgctgacctatgtatcgccagtggcactaaggtagccctgtttaaccgctag

SEQ ID NO: 202773 - DNA, 150 bp, synthetic construct
  misc_feature 1..150: note = Description of Artificial Sequence: Synthetic coding sequence
  source 1..150: mol_type = other DNA
atggcctggatcaagcggaagttcggcgagcggcccccccccaagcgcctgaccagagaggccatgagaaactatctgaaagagagaggagaccagactgtgctgattctacacgccaaggtggcacagaaaagctacggaaatgagtag

SEQ ID NO: 202774 - DNA, 324 bp, synthetic construct
  misc_feature 1..324: note = Description of Artificial Sequence: Synthetic coding sequence
  source 1..324: mol_type = other DNA
atggcctggatcaagcggaagttcggcgagcggcccccccccaagagattgactagagaagctatgaggaattacctgaaggaacggggcgaccagaccgtgctgattctgcacgccaaggttgcccagaagagctatgggaacgagaaaaggttcttttgccctcccccctgtgtgtatttgatgggctctggctggaaaaaaaaaaaagagcagatggaaagggatggatgctctgagcaggaatcccaaccatgcgccttcattggcatcggcaacagtgatcaggaaatgcagcagctcaatttagagggcaaaaattag

SEQ ID NO: 202775 - DNA, 285 bp, synthetic construct
  misc_feature 1..285: note = Description of Artificial Sequence: Synthetic coding sequence
  source 1..285: mol_type = other DNA
atggcctggatcaagcggaagttcggcgagcggcccccccccaagcgcttgacccgggaggctatgaggaattatctaaaggaacgaggcgaccagacggtgctaattttgcacgcaaaggtggctcagaagagctatgggaatgaaaaaaggtttttttgcccacctccttgcgtctatcttatgggaagtgggtggaagaagaagaaggagcagatggagagggacggttgttcagaacaggagtctcagccatgcgcatttattggcatcggtaacagctag

SEQ ID NO: 202776 - DNA, 537 bp, synthetic construct
  misc_feature 1..537: note = Description of Artificial Sequence: Synthetic coding sequence
  source 1..537: mol_type = other DNA
atggaccacaccgagggcagccccgccgaggagccccccgcccacgccccttccccaggtaagttcggcgagaggcctccacctaagcggttgactcgcgaggccatgaggaattatcttaaagagagaggcgatcaaactgtgctcatccttcacgccaaagtggcacagaagtcctatggcaatgaaaagagatttttttgtcctccgccctgcgtttatctcatgggctccggatggaaaaaaaaaaaggaacaaatggagcgcgacggatgctccgagcaggagtcccagccttgcgcgttcatcggcattggcaatagcgatcaggagatgcagcagctcaacctggaaggtaagaactactgtacagcaaaaaccctgtatatctctgactccgacaaaagaaagcatttcatgctatccgtgaaaatgttctatgggaactccgatgatataggggtatttctctcaaagcgtataaaagtgatttccaaacctagtaagaagaagcagtcactgaaaaatgcggactag

SEQ ID NO: 202777 - DNA, 333 bp, synthetic construct
  misc_feature 1..333: note = Description of Artificial Sequence: Synthetic coding sequence
  source 1..333: mol_type = other DNA
atggcctggatcaagcggaagttcggcgagcggcccccccccaagcggcttacacgcgaggctatgaggaactatttgaaagagcgcggggatcaaaccgttctgatattacatgcaaaagtggcccagaagtcctacggtaacgaaaagcggttcttctgccctcctccatgcgtctatctcatgggctcagggtggaagaagaagaaggagcagatggagagagacggctgctctgagcaggagtctcagccctgtgcctttatcggcatcggaaattcagatcaggaaatgcagcagctgaacctggaaggcaagaactactgtacctag

SEQ ID NO: 202778 - DNA, 342 bp, synthetic construct
  misc_feature 1..342: note = Description of Artificial Sequence: Synthetic coding sequence
  source 1..342: mol_type = other DNA
atggcctggatcaagcggaagttcggcgagcggcccccccccaagcggctcacaagagaggctatgcgcaattacctcaaagaaagaggggatcagacagtgctcatcctgcacgccaaagtcgcccagaaaagttatggtaacgaaaaaaggtttttttgtcctcccccatgtgtctacctgatggggtcaggctggaaaaaaaagaaggagcagatggagcgtgatgggtgctctgagcaggagtcccagccatgtgccttcatagggatcgggaattcagaccaggaaatgcagcagctgaacctggaggggaaaaactattgcaccgctaaaacctag

SEQ ID NO: 202779 - DNA, 147 bp, synthetic construct
  misc_feature 1..147: note = Description of Artificial Sequence: Synthetic coding sequence
  source 1..147: mol_type = other DNA
atggcctggatcaagcggaagttcggcgagcggcccccccccaagcggctcacacgcgaggccatgcggaattacctcaaagagcgtggtgatcagaccgttctgatcctccacgccaaggtcgcccagaagagctatggaaactag

SEQ ID NO: 202780 - DNA, 570 bp, synthetic construct
  misc_feature 1..570: note = Description of Artificial Sequence: Synthetic coding sequence
  source 1..570: mol_type = other DNA
atgcggaactacctgaaggagcggggcgaccagaccgtgctgatcctgcacgccaaggtagcgcagaaaagttatggaaacgagaagcggttcttttgccctcctccatgcgtgtacctgatgggaagcgggtggaagaagaagaaggagcagatggaaagggacgggtgctctgagcaggaaagtcagccctgtgcctttatcggcattggcaactccgatcaagaaatgcagcaacttaatctcgaggggaagaattattgtactgccaaaactttgtatatcagtgactctgacaaacggaagcactttatgttgtctgtaaagatgttctacgggaattccgacgacataggagtcttcctctcaaaaaggattaaggtgatttccaaaccgagtaagaaaaagcagagcctcaaaaacgccgacctctgcatcgccagtggcacaaaggttgccctcttcaacaggctaaggtcccagactgtctcgacaaggtatctgcacgtggagggaggcaattttcacgcgtcaagccagcagtggggtgcgttcttcattcatctgtag

SEQ ID NO: 202781 - DNA, 600 bp, synthetic construct
  misc_feature 1..600: note = Description of Artificial Sequence: Synthetic coding sequence
  source 1..600: mol_type = other DNA
atggccagcgtgagcgccctgaccgaggagctggacagcatcacctccgagctccacgctgtggaaatccaaattcaggaactgactgagcgtcagcaggaacttatacagaagaagaaagtgctaaccaagaaaattaaacaatgcttggaagactccgatgccggagcaagcaacgagtacgattccagccctgccgcctggaacaaagaagatttcccttggtctgggaaagtgaaggacattctgcagaacgttttcaagctggagaagtttcgtccattgcagttagaaacaataaacgtgaccatggcaggaaaagaagtgttcttagtgatgcctacgggcggcggtaagtctctatgctatcagctgccagctttatgcagcgacggatttacactcgtcatatgtccgttaattagtttaatggaagatcagctgatggtattgaaacaactcgggatctccgccacaatgctaaacgcaagttcatccaaggagcacgtgaagtgggtccacgcagagatggtcaacaagaattctgagcttaagctcatttacgtgactcccgagaagatcgccaaatccaagatgtag

SEQ ID NO: 202782 - DNA, 636 bp, synthetic construct
  misc_feature 1..636: note = Description of Artificial Sequence: Synthetic coding sequence
  source 1..636: mol_type = other DNA
atggccagcgtgagcgccctgaccgaggagctggacagcatcaccagcgaactccatgccgtggaaatccagatacaggagttaacagaaagacagcaggagctcattcagaagaaaaaagtgctcactaaaaagatcaagcagtgtctggaagacagcgacgctggcgcctctaacgagtatgacagctctcctgccgcatggaacaaggaggatttcccttggtctggaaaggtgaaggacatcctccagaacgtattcaagctggagaagtttcgccctttacagcttgaaacaattaacgtaaccatggccgggaaggaggtatttctcgttatgcccaccggcgggggcaagagcctgtgctatcaattacctgccctctgttctgatgggtttacccttgtgatatgtccactgatctctctgatggaggatcaactgatggtgcttaaacagttgggtataagtgctacgatgctgaatgcaagctcctcaaaggagcatgtaaaatgggtgcacgctgaaatggttaataagaattcggagctaaagctgatctatgttactcccgagaaaattgccaagtctaaaatgtttatgagcaggttggagaaagcctatgaggcgcgctag

SEQ ID NO: 202783 - DNA, 1950 bp, synthetic construct
  misc_feature 1..1950: note = Description of Artificial Sequence: Synthetic coding sequence
  source 1..1950: mol_type = other DNA
atggccagcgtgagcgccctgaccgaggagctggacagcatcacctctgagttgcatgcagtggagatccagattcaggaattgactgagcgtcagcaggagctaatccagaagaagaaagtcctcactaaaaaaataaagcagtgcctggaagacagtgatgcaggcgccagtaatgagtatgatagttcccctgccgcctggaacaaggaagattttccttggtcaggaaaggtaaaggatatcctgcagaacgtgttcaagctcgaaaagtttcgcccactgcagctagaaacaattaacgtgactatggcaggaaaggaggtatttctagtcatgcctaccggtggagggaagtccctatgttaccagctccccgcattgtgttctgatggctttaccctcgttatctgtccactgataagcctcatggaagatcagttgatggtgttgaagcaactcggcatcagcgcgaccatgctcaacgcatctagctctaaggagcacgttaagtgggtccatgctgaaatggtgaataaaaattccgagttaaagctaatttatgttacacctgagaaaatcgcgaaatcgaaaatgtttatgtcaaggctagagaaagcttatgaagctcggaggtttactcgaattgccgtcgatgaagttcactgctgttcccagtggggacatgactttcggcctgactacaaggctctggggatcctcaagaggcagtttcccaacgccagtcttattggcctcaccgcaaccgccactaaccacgtgctgaccgacgcccagaaaatcctttgtatcgagaagtgcttcacatttacagccagctttaaccgtcctaacctgtactacgaggtgagacaaaaaccatctaacactgaagacttcattgaggatatcgtaaaactcatcaacggcagatacaagggacagagtggcattatatattgcttcagccagaaagatagcgaacaggttaccgtgtccctacagaatctcggaatccacgccggagcatatcatgccaatctagaacccgaggataagacaacggtgcacagaaagtggagtgccaatgagatccaggtggtcgtggcaacagtcgcctttgggatgggcatagacaaaccggatgttcggtttgtaattcaccatagcatgagcaaatcaatggagaactactaccaagagtccggcagagccggcagagacgacatgaaagccgactgcattctctattatggattcggcgatatcttcaggatctcgtctatggtagtgatggagaacgtcggccaacagaagctgtatgaaatggtgtcctactgtcagaacatctctaaatgcaggagagtcctgatggcccaacacttcgacgaggtgtggaattctgaggcctgtaacaagatgtgtgataactgctgcaaggactcagccttcgagcgaaaaaatattactgaatactgtcgagatctcataaagatcctcaagcaggccgaggaactgaatgagaaactgaccccactcaaattgattgatagttggatgggcaaaggagccgcaaagttacgcgtggccggcgtggtggcccccacgttgcctagagaagatctggaaaaaatcatcgcccacttcttgattcagcaatacttgaaggaggattattccttcacagcctatgcaactatttcctacctgaaaatcggcccaaaggctaacttgcttaataacgaggcacacgccattaccatgcaggtgactaaaagtacccagaactcgtttagggccgagagcagtcagacatgccatagcgaacaaggcgataaaaagatggaggagaaaaacagtggcaattttcaaaagaaagcagctaacatgctgcagcaaagcggcagcaagaatacaggtgccaaaaaaaggaagatcgacgatgcctag

SEQ ID NO: 202784 - DNA, 1950 bp, synthetic construct
  misc_feature 1..1950: note = Description of Artificial Sequence: Synthetic coding sequence
  source 1..1950: mol_type = other DNA
atggccagcgtgagcgccctgaccgaggagctggacagcatcaccagtgagctccatgccgtggagatacagattcaggaactgacagaacgtcagcaagaactgatacagaagaagaaagtgctaactaagaagatcaaacagtgtctggaggactcagacgcaggggcttctaacgagtatgatagctcgcctgcggcctggaacaaagaagactttccatggtcaggcaaggtaaaggacatccttcagaacgtcttcaagttggagaagttcagacccctgcagctcgagacaatcaatgttaccatggccggtaaggaagtcttccttgtgatgcccacaggcggaggcaagagcttatgctaccaattgccggctttgtgtagcgatgggtttactctcgtcatttgcccgctgatatccttgatggaggaccagttaatggtgcttaaacagctggggatctccgctaccatgctaaatgcgagttcctctaaggaacatgttaagtgggtccacgccgaaatggttaacaagaactctgaattaaaactgatatatgtaactcccgagaaaatcgctaaatctaaaatgtttatgtccaggctcgagaaggcatacgaggccaggaggttcacccgcattgctgtcgatgaagtgcactgttgttctcagtgggggcacgacttcaggccagattacaaagcgctcggcatactcaagagacagttcccaaatgcaagccttattgggctgaccgccacagccaccaatcacgttctaacagacgcccaaaagatcttatgcattgagaaatgttttaccttcacagcatctttcaatcgccccaacctctactacgaagtgaggcagaagcctagtaatacggaggatttcatcgaggacatagtgaaactgattaacgggaggtataaaggccagagcggaatcatatactgcttttcgcagaaagattctgagcaggttactgtctctctgcagaaccttgggatccatgctggagcctaccacgccaacctggagcccgaagataaaaccacagtacaccgcaagtggtccgcaaatgagatccaggtggtagtggccacagtcgccttcggcatgggtattgataagcccgatgtgcgctttgtaattcatcacagcatgagtaaaagtatggaaaattactatcaagagagtggaagggccggacgcgacgatatgaaggcagactgtattctctattacggatttggggatatattcaggatctcttctatggtagtaatggaaaatgtgggacaacaaaaattatatgaaatggtgtcatattgtcagaatatttctaagtgccgaagagttctgatggctcagcatttcgacgaggtttggaactctgaagcttgtaacaagatgtgcgacaattgttgcaaggactccgccttcgagcggaaaaatataaccgagtactgccgcgatctgatcaaaatactcaagcaggctgaagagctgaatgagaagctgaccccccttaagctgatagacagctggatgggaaagggagctgctaagctgagagtggctggtgtggtagcccccactctaccccgagaggaccttgagaagattattgcccactttcttatccaacagtacctgaaggaggattattctttcacagcctatgccaccattagctatctgaagattgggcccaaagcaaatctgttgaataatgaggcccacgccatcactatgcaagtcactaagtccacgcagaatagtttccgagctgagtcatcgcagacatgccacagcgagcagggcgataaaaaaatggaggaaaagaactccgggaactttcagaagaaggctgctaacatgttgcagcagtcaggatccaagaacactggcgccaaaaagcggaaaatagatgatgcttag

SEQ ID NO: 202785 - DNA, 321 bp, synthetic construct
  misc_feature 1..321: note = Description of Artificial Sequence: Synthetic coding sequence
  source 1..321: mol_type = other DNA
atggccagcgtgagcgccctgaccgaggagctggacagcatcaccagcgagctccacgcggtcgaaattcaaattcaagagctgactgaacgacagcaggagctgatccagaagaagaaagtgctgacaaagaaaatcaaacagtgcctcgaggactcagatgccggagcctctaatgagtatgacagctcccctgcggcgtggaacaaagaggacttcccttggagcggaaaggtaaaagacattctacagaacgtatttaagttggaaaaattcaggcccctccagttggagactatcaatgtgactatggcggggtag

SEQ ID NO: 202786 - DNA, 294 bp, synthetic construct
  misc_feature 1..294: note = Description of Artificial Sequence: Synthetic coding sequence
  source 1..294: mol_type = other DNA
atggccagcgtgagcgccctgaccgaggagctggacagcatcacctctgaactgcatgccgtggagatccagattcaggagcttacagaacggcagcaggaactgatacagaagaagaaggtcctgaccaaaaaaattaagcagtgtcttgaggatagcgatgctggtgcgagcaacgaatacgattcctcacctgccgcatggaacaaagaggattttccgtggagcgggaaagtcaaggacatcttgcagaacgtttttaagctagagaaattccgcccgctacaactctag

SEQ ID NO: 202787 - DNA, 219 bp, synthetic construct
  misc_feature 1..219: note = Description of Artificial Sequence: Synthetic coding sequence
  source 1..219: mol_type = other DNA
atggccagcgtgagcgccctgaccgaggagctggacagcatcacctctgagctgcatgccgtggaaattcagattcaggagctgacagaaaggcaacaggaactcattcaaaaaaagaaggtgcttaccaagaagattaaacagtgcctggaggatagcgatgccggcgcaagcaacgagtacgattcctctccagccgcctggaacaaggaagactag

SEQ ID NO: 202788 - DNA, 396 bp, synthetic construct
  misc_feature 1..396: note = Description of Artificial Sequence: Synthetic coding sequence
  source 1..396: mol_type = other DNA
atggccagcgtgagcgccctgaccgaggagctggacagcatcacctcagagttgcacgcagtggaaatccagatccaagagcttactgagcgacagcaggagctgatacagaaaaagaaagtcctaaccaaaaagatcaagcagtgtctggaagacagtgacgccggcgcatctaacgaatacgattcgagtccggccgcatggaacaaagaggattttccctggtctggtaaagtgaaggacattcttcagaacgtgtttaagctggagaaatttcgccctcttcagctggaaaccatcaatgtgacgatggctggaaaagaagttttcctagtcatgcctaccggcggaggcaagagtctgtgttaccagcttcctgccttgtgctctgactag

SEQ ID NO: 202789 - DNA, 2976 bp, synthetic construct
  misc_feature 1..2976: note = Description of Artificial Sequence: Synthetic coding sequence
  source 1..2976: mol_type = other DNA
atgagcagccaccacaccaccttccccttcgaccccgagcggcgggtgcggtctaccttaaaaaaagtgttcgggttcgattctttcaaaacccccttacaagagagcgctacaatggccgtggtgaagggaaataaggacgtcttcgtctgcatgcctaccggagctggcaagtcactctgttaccaactccccgctctgctggcgaaaggcattaccattgtcgtctctcccctgatcgctctcatacaggatcaagtcgatcacctcttgacactgaaggttagagtgtctagtctcaatagtaagttatccgctcaagagagaaaagaactgttagccgacttggaaagagagaaaccccagacaaaaatcctgtacattacccctgaaatggctgctagcagttcgtttcaacctacccttaattccctcgtgtccaggcaccttctgtcttatttggtcgtggacgaagctcattgtgtgtcacagtggggacatgacttccgcccagattacctgcgtctcggggcgttgcggtctcgcctagggcatgccccctgcgtagcactgactgcgaccgctaccccccaggtacaggaggacgtatttgccgccctgcatctgaagaagcccgttgcaatcttcaaaacgccctgtttccgggccaacttgttctacgacgtacagttcaaggagctgatctctgacccttatggtaatttgaaggatttttgtctcaaagccttgggccaggaagctgataagggcttgagcggatgtggcatcgtgtactgccgaacccgggaggcttgcgagcaactggccatcgagcttagctgcaggggcgttaacgcaaaggcttaccacgccggacttaaggcctccgagcgaacactggtgcaaaatgactggatggaggaaaaggtaccagtcattgtcgccacaatctcgtttgggatgggggtggacaaggccaacgttaggttcgtcgcccactggaacatcgccaagtctatggccggctactaccaggagtccggtcgtgcgggcagagatgggaaaccatcatggtgtaggttatattattcaaggaacgatcgagatcaggtgtctttcctgattaggaaagaggtggccaaactccaagagaaaagaggtaataaggccagcgacaaagccactatcatggctttcgacgccttggtgaccttctgtgaggagctgggatgtagacacgctgccatagccaagtactttggagatgctcttccagcttgtgcaaaaggctgcgatcactgccagaaccccactgcggtcaggcggcggctggaggcactggagcgatcgtctagctggtcaaagacgtgcatcggcccatctcagggcaacggtttcgacccagagttatacgaaggagggcggaagggatatggagatttcagtcgctatgacgagggaagtgggggatccggcgatgaaggccgggatgaagctcataaaagggaatggaacttgttctatcaaaagcagatgcagctgcgaaaggggaaagaccctaagattgaggaatttgtaccccccgatgagaattgtccactcaaagaggcgtcaagtcggagaatcccaagactgactgtcaaggcaagggagcactgcctccgcctgcttgaagaggccctgagcagtaacaggcagagtactcgtaccgctgacgaggcggatctgagggctaaagctgtggagctggaacacgagacctttcgtaacgctaaggttgccaacctttacaaagcttcggtccttaaaaaagtggcagacatacatcgcgcttcaaaggacggacagccgtatgacatgggggggagcgcaaagagctgctccgctcaggccgagccacctgagcccaacgagtacgacatccctcctgcaagccatgtgtacagcctgaagcccaagagagttggagcaggcttcccaaaaggatcatgtccgttccaaaccgccaccgaactgatggagacaactcggataagagagcaagccccacagcctgaacgaggaggtgaacacgagccaccatcacggccatgcggactgctggatgaagatgggtcagaacccctccccggcccgaggggtgaggtccctggcgggtctgcacattatggggggccctcgcctgagaaaaaggcaaagtcctcaagcggcggatcgagcctcgccaagggacgggccagcaagaagcagcagctcttagcaactgcagcgcacaaggatagtcagagcattgcccgattcttttgccgaagagtggaaagccctgctctccttgcatccgcaccggaggcagaaggagcctgtccctcatgtgaaggggttcagggccccccgatggctccagagaagtacaccggcgaagaagacggtgctggtggccattctccagctccacctcagacggaggaatgtctaagggagaggcctagcacatgtccgccccgagatcaggggacgcctgaagtgcagccaacacctgccaaagatacatggaaggggaaacggccgaggagccaacaagagaaccctgaatctcaaccccagaagaggccccgaccatcggctaagcctagtgtcgtggccgaggttaagggatccgtgagcgcaagcgagcaaggaaccctgaaccccacagcccaggatccgttccagctcagtgcaccaggcgtaagccttaaggaagccgcaaacgttgttgtgaaatgcctcactccattctacaaggagggcaagtttgccagcaaggaacttttcaagggctttgcgaggcacctgagccacttgctcactcaaaagacctccccaggacggagtgtgaaagaggaggcgcagaacttaatccggcacttctttcacggccgagcgcgctgtgagtctgaggccgattggcacggactatgtggcccacaacgatag

SEQ ID NO: 202790 - DNA, 1308 bp, synthetic construct
  misc_feature 1..1308: note = Description of Artificial Sequence: Synthetic coding sequence
  source 1..1308: mol_type = other DNA
atgagcagccaccacaccaccttccccttcgaccccgagcggcgggttcggagcactttgaagaaagtcttcgggttcgactcctttaaaacccctttgcaggagtctgccacaatggctgtggtgaaaggaaataaagacgtgtttgtgtgtatgccaacaggtgccggaaagtccttgtgttatcagcttcccgctctccttgctaagggcatcactatcgttgtgtccccactgatcgctttaatccaggaccaggtggaccacctcctgacgctcaaggttagggtgtcctcgcttaacagcaagctgtccgcacaggaaagaaaggaacttctggcagatctggagcgagagaagccgcaaactaagatactgtatattacaccagagatggctgctagcagctcatttcagccaaccctgaatagcctggtaagccgccatcttctgtcatacctggtggtggatgaggctcactgtgtgagccagtgggggcatgatttccggcctgactatttacgattaggagcactccggagccgactcggccacgcaccgtgcgtcgccctgacagccactgcaacaccgcaggttcaggaggacgtgtttgctgctctgcatctcaagaagcccgtggcaatctttaaaacaccctgtttccgcgcaaatctgttctacgacgtgcagttcaaagagctgatctctgacccttatggcaacctgaaagatttctgcctaaaggcgctgggacaggaggctgataaaggactgagtgggtgcggaattgtctattgtaggaccagggaggcctgcgagcagctggctatcgagctcagctgcaggggagtcaacgccaaggcctaccacgcggggttgaaagccagcgagcgcaccctggtccaaaatgactggatggaggagaaggtgcccgttatcgttgcgactatcagtttcggtatgggagtcgataaggccaacgttaggttcgtagctcattggaacattgcgaagtccatggccggctactaccaggagtccgggagggccggaagagatggaaagcctagttggtgtcgcctatactacagtcgcaatgatcgagatcaggtgagcttcctgattagaaaggaggtagcaaaacttcaggaaaagagggggaacaaggcatccgacaaagcaaccataatggcgtttgatgccttagtaacgttctgtgaagaactggggcggtggggacgaggccacggaaagtccctccgtgccgcctggtgttcccaggtggtgagccgacacgccgagctttag

SEQ ID NO: 202791 - DNA, 1233 bp, synthetic construct
  misc_feature 1..1233: note = Description of Artificial Sequence: Synthetic coding sequence
  source 1..1233: mol_type = other DNA
atgagcagccaccacaccaccttccccttcgaccccgagcggcgggtacggagcactctgaaaaaggtcttcggattcgattcgtttaagacaccccttcaggaatcagcaacaatggcagtagttaagggcaataaagacgtattcgtgtgtatgcccaccggcgcaggaaagagcttgtgctatcagctcccagccctcctggccaaggggataacaattgtcgtgtctcccctgattgccctgattcaagaccaggtggaccatctgttgacgcttaaggtcagagtgtcttctctgaactccaagctttcggcgcaagagcgaaaggaattactggctgatttggagcgcgagaaaccccaaacgaagattctctacatcacacccgagatggctgcctcaagtagttttcagcctacacttaacagcctggtaagtcggcatttactttcgtacctggtggtggatgaggctcattgtgtctctcagtggggtcatgactttaggccagactacctgcgactcggcgccctcagaagtcgcttagggcatgctccttgcgtggccctcactgccaccgcaactccacaggttcaggaagacgttttcgctgccttgcacttaaaaaaacctgtagctatttttaagaccccatgtttccgggcaaatctcttctacgacgttcagtttaaggaactgatttcagatccctacgggaacttgaaagacttttgcctgaaggcccttggccaggaagccgataagggtctgagcggctgcggaattgtgtattgcagaaccagggaagcttgcgagcagcttgccatcgagttgtcttgtcgaggcgttaatgcaaaggcctaccatgccggactcaaggcgtccgaacggactctggtccagaacgactggatggaagagaaggtcccagtgattgtggccacaatctccttcgggatgggagtagacaaggcaaacgtgcggtttgtcgctcactggaacatcgctaagagcatggcaggatactatcaggagtcaggtcgcgcaggccgtgacgggaagcccagctggtgtcgactgtactatagccgtaatgacagagatcaggtgagtttccttatcagaaaggaagtagccaagctgcaggagaagcgaggaaacaaggccagtgacaaggctactataatggcgtttgacgctctggtcaccttctgtgaggagttaggctag

SEQ ID NO: 202792 - DNA, 3057 bp, synthetic construct
  misc_feature 1..3057: note = Description of Artificial Sequence: Synthetic coding sequence
  source 1..3057: mol_type = other DNA
atgagcagccaccacaccaccttccccttcgaccccgagcggcgggtgaggagcactctgaagaaagtcttcggctttgattcctttaagacccccctgcaggagagcgcaacaatggcagtggtaaagggaaataaggatgtcttcgtgtgtatgcctacaggcgcagggaagagcctgtgctaccagctgcctgccctccttgcgaaagggattacaatcgtggtctcccccctgattgcattgatccaagatcaggtcgatcacctgcttactttaaaggttcgcgttagctctctgaattctaagctgagcgcccaggaaagaaaggaactgctggctgacctggaaagagagaaaccacagacgaaaatcctgtatatcacacccgaaatggccgcctcatcaagcttccaacccaccttgaattcccttgtgtcccggcaccttctgtcttatttagtcgtggacgaggcccattgcgttagccagtggggccacgacttcaggcctgactacttacgtctgggggctttgcgatcccgcctgggccatgccccatgcgtggcgcttacagctaccgctaccccgcaagtgcaagaggacgtcttcgccgctctccacctgaagaagcctgtcgcgatattcaaaacaccatgcttcagggctaacctgttttatgatgtgcagttcaaggaactgatttctgatccttatgggaatttgaaagatttttgtctgaaagccctggggcaggaggcggacaaagggctgagcggctgcggcatagtgtactgcaggactcgggaggcctgcgaacagttggctatcgaactgtcctgcaggggggttaatgcaaaggcctatcacgcaggcctgaaagcctccgagcgaacactcgttcaaaacgactggatggaagagaaggtgcctgtgatcgtcgccaccatctccttcggcatgggcgttgataaagcaaacgttcgattcgtggcacactggaacatcgctaagtccatggccggctactatcaggaatcaggccgggcaggacgagatggaaaaccatcctggtgcagactttattattcgaggaatgacagagaccaagtgtccttcctgatcaggaaagaagtagccaaactgcaggagaagcggggcaataaggcaagcgataaagctaccattatggcattcgacgcactcgttaccttttgtgaggagctggggtgcagacatgccgctatcgccaagtattttggtgacgcactccccgcatgcgctaagggctgcgatcattgtcagaatcctactgctgttcgtagacggctggaggccctggagcggtcctcttcatggtctaagacatgtattgggcccagtcagggcaacggctttgatcctgagttgtatgaaggcggcagaaagggatacggggacttcagcaggtacgatgaaggctccgggggaagcggggacgagggaagagacgaagctcacaaaagagagtggaacctgttttatcagaaacagatgcagctcagaaaaggcaaggaccctaaaatcgaagaatttgttccccccgatgagaattgcccgctaaaagaagcatcatcgcgcagaattcctcgtctcaccgttaaagcaagagagcattgtctacgcttactcgaggaagcactcagctctaaccgccagtccacccgcacggccgatgaagctgacttgcgcgcaaaagccgtagaacttgagcacgaaacattcaggaacgcaaaagtggcaaatctctacaaggccagcgtcctcaagaaagtggccgacatccatagggcttctaaagatggccagccatatgacatgggcggctccgccaagtcctgcagcgcccaggcagaaccgccagagcctaatgagtatgacatcccaccggcttctcacgtgtacagtctgaagcctaaacgcgtgggtgctgggttccctaagggttcttgtccgttccaaactgccactgagctgatggagacgacccgtattagagagcaggctccgcaaccggagcggggaggagagcacgagccgccaagcagaccatgcggactactggatgaagatggctccgagcctcttcctggcccaaggggggaggtgcctggcgggtcagctcactacggcggcccgagccctgaaaagaaagctaagtcctcctccggcgggtccagtctggccaaaggacgtgcgtctaaaaagcagcagcttcttgcaactgcagcacataaggactcccaaagcattgcccgctttttctgtaggagagtcgagtctcctgcgctactggcttccgcgcccgaagctgaaggtgcgtgtcccagctgtgagggggtgcagggaccccccatggcacccgaaaagtacaccggggaagaagacggcgccggagggcactccccagcaccaccccagacagaagaatgcttgagagaaaggcccagcacctgtcccccccgggaccaggggacccccgaggtccagccaacgcccgccaaggacacatggaaagggaaaagaccgcgtagtcaacaagaaaacccggagtcccagccccaaaaaaggcctcgcccatccgccaagccttcagtagttgcggaggtgaaggggtccgtgagcgcctctgaacagggaactttgaatcctacagcccaggaccctttccagctttccgcccccggcgtcagcctgaaggaagccgctaacgtcgtcgtgaagtgcctgaccccattctataaagaaggcaagtttgcatccaaagaacttttcaagggcttcgcacgtcatctgtcccacttactgactcaaaaaacttcccccggccggagcgtgaaggaagaagcacagaatcttattcgacacttctttcatggccgtgctagatgcgaatccgggccgcacgggtgggtcttttgggacacttgcagaggccaaaaagtcgaaggcgggggagccgcggccgggaggagaggaagaaaatccgggccctctccctccagcaagtccggctag

SEQ ID NO: 202793 - DNA, 1761 bp, synthetic construct
  misc_feature 1..1761: note = Description of Artificial Sequence: Synthetic coding sequence
  source 1..1761: mol_type = other DNA
atgttcctggtgcggtgccggcacgccgccatcgccaagtacttcggagatgctctccctgcttgtgccaagggctgcgaccattgccaaaatcccaccgccgttagacgccggcttgaagcactggagagatcaagcagctggtccaaaacatgcattgggccttcacaaggaaacggatttgacccggagttgtatgaaggcgggagaaaggggtatggggacttcagcagatacgacgagggaagcggaggaagtggcgatgagggccgcgacgaagcccacaaacgtgaatggaatctgttttatcaaaaacagatgcaactgaggaaggggaaggatccgaagatcgaggaattcgttccgcccgacgagaattgtcctttgaaggaggcaagcagtcgtagaattccccgcttaaccgtgaaagcccgagagcactgcttgagactccttgaggaggctctgagcagcaacaggcagtcaactcgaacggccgacgaggcagacctacgtgcaaaggcagtggagctcgaacatgaaacctttcggaacgccaaagtggcaaacctatacaaggcctccgtgttgaagaaagtggccgacatccacagagcaagcaaagatggccagccatacgatatgggagggagtgctaagtcctgttctgcgcaggccgagccgccagaacctaatgagtacgacataccaccagccagccacgtgtatagcctgaagcccaagagagtcggggccggcttccctaaagggtcctgtcctttccaaaccgccacagaactgatggagacaacaagaatccgggagcaggccccccagcctgagcggggcggggagcatgagccacccagccggccttgcggattgctggatgaggatggatccgagcctctgcccggtccccgcggagaagtgccagggggctcggcccactacggaggtccatcccctgagaagaaagctaaaagcagttccggcggaagtagcctagcaaagggtagagcttcgaagaagcaacagctcctggccacagccgcccacaaggattcgcagtctattgcccggtttttttgccgtcgggtggagtcccctgccctgcttgcttcggcaccagaagccgagggagcctgtccttcctgcgagggcgtccagggaccccctatggcgccggagaagtacacaggcgaggaagatggcgccggtggccattctcccgcccccccccaaactgaagagtgcctgcgggagagaccatccacctgtccccccagggatcagggtacccccgaagtgcagccaactcccgccaaagacacctggaaggggaagaggccacggagccaacaggaaaatccggagtcacagcctcagaaacggccacggccctctgccaaacccagcgtggtcgccgaggttaagggctccgtaagtgcttcagagcaggggaccttgaacccaacggcgcaagatcccttccagctgtccgcaccaggcgtgtccctgaaagaggctgctaacgtggtggtcaaatgcctgacccctttttataaggaaggaaaatttgcaagcaaagagctgttcaaggggtttgctcgacacttgagccatttactcacgcagaagaccagcccagggcggagtgtgaaggaagaggcccaaaatctgatcaggcacttctttcatggccgcgcccggtgtgagtccgaggctgattggcatggtttgtgcggcccacagaggtag

SEQ ID NO: 202794 - DNA, 1200 bp, synthetic construct
  misc_feature 1..1200: note = Description of Artificial Sequence: Synthetic coding sequence
  source 1..1200: mol_type = other DNA
atggcccagcgggccttccccaacccctacgccgactacaacaagagcttagctgagggatactttgatgctgcgggtcgcttgacaccggagttttcccagagactaactaacaagattcgtgagctgctgcagcagatggagagaggcttgaaatctgccgatccacgggatggtactggctataccggctgggctgggatcgccgttctttaccttcatctctacgacgtgtttggcgatccggcttacctccagctggcccacggatacgtgaagcagagtctgaactgccttacgaaacgcagcattactttcttgtgcggcgatgccgggccacttgccgtggcggccgttctctatcacaaaatgaacaacgaaaagcaggccgaggactgcatcacgaggctgatacacttgaataagatcgacccacacgctcctaacgagatgctgtatggtcgaatcggctacatctacgctctgctcttcgtcaacaaaaatttcggggtggaaaaaataccacagtcccacattcagcagatttgtgaaaccatcctcacctcaggcgaaaacctggcacgcaaacggaacttcacagccaagagtcctcttatgtacgagtggtatcaggaatactacgtaggagctgcccatggtctggccggcatctattactacttgatgcagcccagcctgcaggtgagccaaggtaagctgcactctctagtcaaaccgtctgtggattatgtttgccagctgaagtttccgagtggcaattatcccccttgtattggcgacaatcgggatctgctggtgcactggtgtcatggggcaccgggcgtaatttacatgctgattcaggcttacaaggtctttcgggaggaaaagtacctatgcgacgcatatcagtgtgctgatgtgatttggcagtacgggctactcaagaaggggtacggcctgtgccacggctcagccggcaacgcatacgcattcctgacactctataatttaactcaagatatgaaatacctctatcgggcctgtaagttcgcagaatggtgcctggagtatggggagcacggttgtagaacccctgatacgccatttagcctctttgagggtatggcagggacaatatacttcctggccgacctattagtgcctacaaaggctagattccccgcttttgagctgtag

SEQ ID NO: 202795 - DNA, 528 bp, synthetic construct
  misc_feature 1..528: note = Description of Artificial Sequence: Synthetic coding sequence
  source 1..528: mol_type = other DNA
atgctgccccccatggccctgcccagcgtgagctggatgctgctgtcatgtctgatcttgctgtgtcaggtgcagggtgaagaaacccagaaggagctccctagcccacgcattagctgtccgaagggctcaaaggcatatggcagcccctgctatgcgctcttccttagtcccaagagctggatggatgctgatttggcgtgtcagaaacggcctagcgggaagctggtctcagtgttaagcggcgccgaagggtccttcgtctcaagcctggtcagatcgattagcaatagttactcatatatttggattggactgcatgatcccacccaggggagcgagcctgacggggatggatgggagtggtcttctactgatgtgatgaattacttcgcatgggaaaaaaatccctctaccatcctgaaccctgggcactgcgggagcctgtcccggagcaccggttttctcaaatggaaagactacaattgtgacgctaaactcccttatgtctgtaagttcaaagactag

SEQ ID NO: 202796 - DNA, 528 bp, synthetic construct
  misc_feature 1..528: note = Description of Artificial Sequence: Synthetic coding sequence
  source 1..528: mol_type = other DNA
atgctgccccccatggccctgcccagcgtgagctggatgctgctgagttgtcttatcctcttatgccaggtgcaaggcgaagaaacccagaaagagctgccatcaccccgcatttcatgcccaaagggcagcaaagcctacgggagcccctgttacgctctgtttttatctcccaaaagttggatggacgcggatctggcgtgccagaagcgacccagcggtaaactcgtgtcagtactctctggagccgaaggctcatttgtgagttccttggtcaggtcaataagtaactcatattcttatatttggatcggacttcacgacccaactcagggctcagaaccagatggcgatggatgggagtggagctctacggacgtaatgaactactttgcttgggagaaaaacccctccactatcttgaacccaggccattgtggcagcttgagcaggtccaccggtttcctgaagtggaaggattacaattgtgatgccaagctcccgtacgtctgtaagttcaaggactag

SEQ ID NO: 202797 - DNA, 390 bp, synthetic construct
  misc_feature 1..390: note = Description of Artificial Sequence: Synthetic coding sequence
  source 1..390: mol_type = other DNA
atgctgccccccatggccctgcccagcgtgagctggatgctgctgagctgcctgattctcctatgccaagtgcaaggggaggagacccagaaggagctgccctcacctaggattagctgtccaaagggatccaaagcctatggatctccttgctacgccttattcctcagtccaaagtcttggatggatgcagacggcagcgagcccgacggagacggctgggaatggtcctctactgacgttatgaactacttcgcctgggaaaaaaacccatctactatcctgaatccgggacattgtggcagtctctctcgttccactggctttcttaaatggaaggattacaactgtgacgcaaaactgccttacgtgtgtaaattcaaggattag

SEQ ID NO: 202798 - DNA, 477 bp, synthetic construct
  misc_feature 1..477: note = Description of Artificial Sequence: Synthetic coding sequence
  source 1..477: mol_type = other DNA
atggccagccggagcatgcggctgctgctgctgctgagctgcctggccaagaccggagttcttggcgacatcattatgaggccgagttgtgcaccgggatggttctaccacaagtccaactgctatgggtattttcggaagctcaggaactggtcagatgcagagctggagtgtcagagctacggtaacggggcccatctggcgagtatccttagtctcaaggaggcctcaactattgccgaatacattagcgggtatcagcgttcccaaccaatatggattggccttcacgacccacagaagcggcagcaatggcagtggattgacggggccatgtacttgtatcggtcttggagtggcaagtccatgggagggaacaagcattgcgccgagatgtcttccaacaataacttcttgacctggagcagtaacgagtgcaataagcgccagcacttcctctgcaaataccgaccatag

SEQ ID NO: 202799 - DNA, 477 bp, synthetic construct
  misc_feature 1..477: note = Description of Artificial Sequence: Synthetic coding sequence
  source 1..477: mol_type = other DNA
atggccagccggagcatgcggctgctgctgctgctgagctgcctggctaagaccggggtgctcggagatatcattatgagacccagctgtgctccaggatggttttatcataagtccaattgctatgggtacttccggaagcttcgcaattggtccgacgctgaactggagtgtcagtcctatggaaacggcgctcacctcgcttccatcctctctctaaaagaagctagtaccattgcggaatacatctccggctaccagaggtcacagcccatttggatcggcctccacgatccacagaaaaggcaacaatggcagtggattgacggcgcgatgtatctatacaggtcgtggagcgggaaaagcatgggggggaacaagcattgtgctgaaatgagcagtaacaacaactttttgacttggtctagtaacgaatgtaataagcggcagcatttcctgtgtaagtatcggccctag

SEQ ID NO: 202800 - DNA, 405 bp, synthetic construct
  misc_feature 1..405: note = Description of Artificial Sequence: Synthetic coding sequence
  source 1..405: mol_type = other DNA
atggccagccggagcatgcggctgctgctgctgctgagctgcctggccaaaaccggggttttgggggatattatcatgcgaccaagctgtgctcctggctggttttaccataagtcaaattgttacggttactttcggaaattgagaaactggtccgatgccgaagtccgtaatcttctgccggcgtggccgggactttcgcgggccaaggaccagcccgagccccagatttcttttgattctgggtcttcagttctcccaggacattatgaggaaaaacctctgtggctcgtgaagtggcgagaagaggggtgcgtgtttaattcatttaattccgttagtatcgcggaagctggcgctgtgtgccagaccctcgatggactgcaagcccatactgacacctag

SEQ ID NO: 202801 - DNA, 375 bp, synthetic construct
  misc_feature 1..375: note = Description of Artificial Sequence: Synthetic coding sequence
  source 1..375: mol_type = other DNA
atggccagccggagcatgcggctgctgctgctgctgagctgcctggctaaaacaggcgtgctcggagatattattatgcgaccttcatgcgctcctggttggttttatcataagtccaactgctacggatacttccggaaactccggaattggtcagatgccgaactggaatgccaaagctatgggaatggagcgcacctggcttctatcctttcgctgaaagaggcgagcaccattgcggagtacatttcaggctaccaacggagccagcctatatggataggcctgcatgacccacaaaaacaaccattaaatagttgcctgttcttcctgtggccgtgggaagggctccctgtggagtcactactggggtag

SEQ ID NO: 202802 - DNA, 900 bp, synthetic construct
  misc_feature 1..900: note = Description of Artificial Sequence: Synthetic coding sequence
  source 1..900: mol_type = other DNA
atgagcagcatcaagatcgagtgcgtgctgcccgagaactgccggtgtggcgagtcacccgtctgggaagaagtcagcaatagcctgctgttcgtcgacataccagccaagaaagtgtgtcgatgggacagttttaccaaacaagttcagcgggtcaccatggatgctcccgtgtcctctgtagccttacgacaaagtggcggctacgtagccacaatcggaactaaattttgcgccttgaactggaaggaacagtctgccgtagtgctagcaacagtggataatgataagaagaataatagattcaacgatggcaaagtggatcccgcagggcggtacttcgctggtacaatggccgaggaaactgcccccgccgtgcttgagaggcatcaaggggccctatactccctgtttccagatcatcatgtgaaaaaatatttcgatcaggtcgatatatctaatggtctcgactggtccttagaccacaagatattctactacattgactcactgagctattccgtcgatgcctttgattacgacttgcaaaccggtcagatctcgaaccgaaggagcgtctataagctggagaaagaggagcagattcccgatggcatgtgcatcgatgccgaaggcaagctttgggtcgcatgctacaacggtggacgggttatccgcttggatccagttaccggtaagaggctgcaaacggtcaaactaccggtggataaaactacgtcctgctgctttggcggtaagaattactcagagatgtatgttacatgcgctagggatggaatggatccagagggcctcctccgtcagcccgaagccggcggcatattcaaaattaccggcctcggagtgaagggcatagccccctacagctacgccggttag

SEQ ID NO: 202803 - DNA, 900 bp, synthetic construct
  misc_feature 1..900: note = Description of Artificial Sequence: Synthetic coding sequence
  source 1..900: mol_type = other DNA
atgagcagcatcaagatcgagtgcgtgctgcccgagaactgccggtgtggtgagtcacctgtgtgggaagaagtcagcaactctttactctttgtcgacatacctgctaagaaagtgtgtcggtgggatagctttactaaacaagtgcaacgagtgacaatggacgctcccgtttcaagcgtggccttacgccaaagcggtggttacgttgctacaattggcacgaagttttgtgcacttaattggaaggaacaatctgcagtcgtgctggccactgttgacaatgacaaaaaaaacaacagattcaacgacgggaaagtggacccagccggacgttactttgcgggcacaatggctgaagagaccgctcctgcagtgctcgagcgccaccagggagccctatactccctttttccagatcatcacgtcaaaaagtacttcgatcaggtggatatttctaacggactggactggtccctggatcacaagatcttctattatattgactccctgtcgtatagtgtcgacgcatttgactacgatcttcagaccggtcagattagtaaccgcaggtccgtgtataaactggagaaggaggaacaaatccccgacggaatgtgtattgacgcagagggtaagctgtgggtggcttgctacaacggtggacgggtgatccgtctcgacccagtcaccggcaagcgcctgcagaccgttaagctacccgtggataaaaccacgtcctgttgtttcggcgggaagaattactccgaaatgtacgtgacttgtgcacgggacgggatggacccagaaggcttgctgaggcaacccgaggctgggggtatctttaagatcacgggactgggcgtgaaaggaattgccccttactcttatgctggctag

SEQ ID NO: 202804 - DNA, 900 bp, synthetic construct
  misc_feature 1..900: note = Description of Artificial Sequence: Synthetic coding sequence
  source 1..900: mol_type = other DNA
atgagcagcatcaagatcgagtgcgtgctgcccgagaactgccggtgtggagaatctccggtgtgggaagaagtgtccaattccttactattcgtagacatccctgcaaaaaaggtctgccgttgggacagtttcacaaagcaagtccagcgggtgaccatggatgcaccagtttcttccgtggcgttacggcagagcggcggctatgttgcgacaatcggaacaaagttctgcgcgctgaactggaaggagcagtccgctgtcgttcttgccaccgttgataacgacaagaaaaacaaccgctttaatgacggcaaggtcgaccctgcagggcgctactttgccggtacgatggccgaggaaaccgcccctgctgtgttagagcggcaccagggggccctttatagcctctttcccgaccatcacgtgaagaagtacttcgaccaggtggacatttctaatggactcgactggagtctcgaccacaaaatcttttactacattgacagccttagctactccgtggacgcgtttgactatgaccttcaaactggccagatcagtaaccggagatcagtgtataaactggagaaagaggaacaaataccggacggcatgtgcatcgatgccgaagggaaactttgggtggcatgctacaatggggggcgggtgattaggctggaccccgtcacaggcaaacgactgcagactgttaaactccccgtggataagaccacgtcatgttgttttggaggtaaaaactatagcgaaatgtatgtgacctgcgcaagggatgggatggaccccgagggcctgctgcgtcagcctgaggcaggcggtatctttaaaatcacgggcctaggtgttaaaggaatcgccccttattcttatgctggttag

SEQ ID NO: 202805 - DNA, 684 bp, synthetic construct
  misc_feature 1..684: note = Description of Artificial Sequence: Synthetic coding sequence
  source 1..684: mol_type = other DNA
atgagcagcatcaagatcgagtgcgtgctgcccgagaactgccggtgtggcgagtccccagtatgggaggaagtatccaattcgcttctcttcgttgatattcctgccaagaaggtttgccggtgggattctttcaccaaacaagttcagcgcgtgacaatggatgccccagtgtctagcgttgctctacgccagtccggcggctacgtagcaacaattgggaccaaattttgtgcgcttaactggaaggagcagtccgctgtcgtcctcgctaccgtagataacgacaaaaagaacaacaggtttaacgatggcaaggtcgatcctgccggacggtatttcgctgcgaaccgtaggtctgtgtacaaactggaaaaagaagagcagatacccgacggtatgtgtattgacgcggaaggcaagttatgggtggcttgctataatggaggccgtgtcatcaggctggaccccgttactggaaaaagactgcaaacggtgaagctccccgtggataaaacaacgtcctgttgcttcggcggaaagaattattccgagatgtacgtaacctgcgcacgtgatggtatggatccagaggggctgctgagacagccagaggcaggcggcatcttcaaaataactgggcttggcgtgaaaggaatcgccccctattcctatgcgggatag

SEQ ID NO: 202806 - DNA, 3876 bp, synthetic construct
  misc_feature 1..3876: note = Description of Artificial Sequence: Synthetic coding sequence
  source 1..3876: mol_type = other DNA
atgagcagcgccgtgggcccccggggcccccggccccccaccgtgcccccacccatgcaggagctgccagatttgtctcatctcaccgaggaggaacggaacatcattatggcagtgatggatcggcagaaagaggaggaggaaaaagaggaggccatgctcaaatgtgtcgtccgcgacatggccaaaccagcagcctgcaagacccctagaaatgccgagaaccagccacatcagccgtctcctcgccttcaccagcagtttgaatcctacaaggagcaagtaagaaaaatcggagaagaggctaggaggtatcagggagagcataaagacgatgcccccacctgtggtatctgtcacaagactaaattcgccgacggctgcggtcacctgtgttcatactgtaggaccaagttttgcgctaggtgtggcggtcgggtctcactgagatcaaataatgaggataaatacgtgatgtgggtttgtaatctgtgcagaaaacaacaggaaatcctgacaaagtctggggcctggttttttggaagcggaccccaacagacttctcaggatggcacactcagcgatacggccacaggtgcaggctctgaggtgccaagggagaaaaaagctcgcttacaggagcgatctaggtcccagacccctctttccacagccgcagcaagcagccaggacgccgctccgccctcagcgcctcctgaccgcagcaaaggcgccgagcccagccagcaagccctgggacctgagcagaaacaggcatctagccgcagtaggtctgaacctcccagagagagaaagaagaccccgggtctctccgagcaaaacggtaaaggtgcactcaaaagcgagcggaagcgggtacccaagacaagcgctcagccagtcgagggcgccgttgaggagagggagagaaaagaacggagagaatcgcgaaggctggagaaggggcgaagccaggattaccctgatactcctgaaaagagggacgagggcaaggcagcagacgaggaaaagcaacggaaggaggaagactaccagacgagatacagatctgatcctaatctggccaggtaccccgtgaaacctccccctgaggagcagcaaatgcgcatgcacgcgcgcgtctcacgcgcaaggcatgagcgaagacatagcgacgtagccctgccaagaaccgaagcaggagctgccttgcctgagggcaaggccggaaaaagggctccagctgctgctagagccagcccccccgactctccacgggcatactccgcggaacgaactgctgagacccgggctcctggtgctaagcaactcaccaaccattctccacccgcaccaagacatggaccagtccccgccgaggcacccgaactaaaggcccaagagccactgcgaaaacagtctcgcctcgacccctcatccgccgtactgatgcggaaggctaagagagaaaaggtggaaactatgttgagaaatgattcccttagcagcgaccaatcagaatcggtccggccaagcccccccaaaccccaccgctcaaaacgaggtggcaagaaaaggcagatgtccgtttcttcaagcgaagaagagggagtttctactcccgaatacaccagctgcgaggacgtggagttggagtctgaaagcgtgagtgaaaagggagatctggactactactggctggacccggccacatggcacagcagagagacaagtccaataagttcacatcccgtgacctggcagcccagcaaagaaggtgacaggctcattggaagggtcatactgaacaaaagaaccacaatgcccaaggattctggcgccctgctcggtctaaaagtggtgggcgggaaaatgaccgatctcgggaggctcggtgcttttattaccaaggttaagaaaggtagcctggccgacgtcgtgggccacctgcgggcaggcgacgaggtcctggaatggaatgggaagccgctgcctggcgctaccaatgaagaggtttacaacatcatcttggaatcaaagagcgaaccccaggtggaaattatcgttagccgcccgatcggagatattcccagaatccctgaaagcagtcatccgcccctggagagcagctcctctagttttgaatcgcagaagatggagaggccttctatctcggtaatcagccctacgagccccggagcattaaaagatgctccccaggtgttacccggtcagttgagtgtgaaactctggtacgacaaagtgggccaccagctcatcgtgaacgtactgcaggctactgacctgcctgccagggtagatggaaggcccaggaacccgtacgtcaaaatgtactttctgcccgatagatcagacaaaagcaagaggcgtactaaaacagtaaaaaagattctcgaaccgaagtggaaccaaaccttcgtatactctcacgttcatcgtcgggattttagagaaaggatgcttgagatcaccgtctgggaccagccccgcgttcaggaggaggaaagcgaattcctcggcgagatcttaattgagctggagacggcactgctcgatgacgagcctcactggtataaattgcagacccatgacgaaagttcactgccactccctcagcctagcccgttcatgccacgaaggcacatccacggagaaagctcctcgaagaagctgcagaggagccaacgtatttcggactccgacatcagcgactacgaagtagacgacgggatcggagtagtgccgcctggctacaggtccagcgcgagggagtccaagtctactaccctgaccgtgcccgaacagcaaaggacaacacaccatagaagccggagcgtctcccctcataggggtaatgaccagggaaagccgcggtcacgccttcccaatgttccccttcaaagatccctcgatgaaatccatcctacgcggagatcaaggtccccgaccagacatcacgatgcttcccgatctcctgtggaccaccgcactagggatgtcgactctcagtacctttcagaacaggatcgtatgcaccggcaacgttcccctactcaaagcccacccgctgacacctcgttctcttcccgccgcgggcggcagttaccccaggtgcctgtgcgctccggatcaattgaacaggagagtgggcacaaaaaactgaagtcaaccatacaaagaagcactgaaaccggaatggctgccgagatgcgcaaaatggttagacagccgtctagggaaagtacggatggctctataaattcttactcctccgaaggcaatctgattttcccaggagtccggctgggggccgactctcagttcagtgatttcctagacgggctgggtcccgctcagctcgtggggcggcaaaccctcgccacaccggcaatgggagacatccagatcggaatggaggataaaaaaggacagcttgaggtggaagtcatccgggctaggtcgttaactcagaagcccggctccaagagcacgcccgcaccatacgtgaaggtttatctgcttgaaaacggcgcatgtattgccaagaaaaaaacgaggatcgccaggaaaaccctggatcctttgtaccaacagtctctcgtatttgatgaatcaccccagggcaaggtattacaagtgatagtttggggagactatggaaggatggaccataagtgctttatgggcgtcgcacagatcctgctagaggagctggacctgtcgagcatggtgattggctggtataagctcttcccaccctccagcctagttgatcctaccttgacccctctgactcggagggcatcacagtcatccctggagtcaagcacagggccgccgtgtatcagaagttag

SEQ ID NO: 202807 - DNA, 4428 bp, synthetic construct
  misc_feature 1..4428: note = Description of Artificial Sequence: Synthetic coding sequence
  source 1..4428: mol_type = other DNA
atgagcagcgccgtgggcccccggggcccccggccccccaccgtgcccccacctatgcaggaactgcccgatttaagccacctgacagaggaagaaaggaatatcataatggcagtaatggatcggcagaaggaagaagaggagaaagaagaggccatgctgaagtgcgtcgtgagggatatggcgaaacctgccgcgtgcaagacgccacgcaacgccgagaaccagccacaccagcctagccccaggctccatcagcagttcgagtcttacaaggaacaggtgcgcaagattggcgaggaggcccgtcgatatcagggggagcacaaagatgacgcccctacctgcgggatctgtcacaaaacaaaatttgctgacggctgcggtcatctctgctcatattgtcgaactaagttctgcgcaaggtgcggtggccgtgtcagcctgcggtctaacaatgaggacatctgcgtaatgtgggtgtgtaatttgtgcagaaagcagcaggaaatcctgactaagagcggcgcatggtttttcggatcggggccacagcagacatcacaggatggcactctttcggatacggcgacgggcgctggcagtgaagttccaagagagaagaaggcacgcctgcaggagaggtcacggtctcaaacacccctgtccacagccgccgcttcgtctcaggatgccgcacctccctccgcacctccggacagaagcaaaggcgcagaaccgagtcagcaggccttaggtcccgagcaaaagcaggcatctagtaggtcgcggagcgaacctccacgcgagaggaagaagacaccaggactgagtgaacagaatggaaagggcgctttgaagagcgaaaggaagagagtgcccaagactagcgcacaacccgtcgagggcgccgtggaagagcgggagagaaaagagcgacgcgaatctcgcagactggagaaaggccggagtcaggattaccccgatacacccgagaagcgagacgaaggcaaagctgcagatgaagaaaagcaacgcaaggaagaggactaccagacacgctaccggtctgatcccaatttagctagatatcctgtaaaacctcctcccgaggaacagcagatgcgcatgcatgcccgtgtaagccgtgctcggcatgaacgacgtcatagtgatgtcgcacttcctcgaaccgaggccggggcagccctgccagaaggtaaggcggggaaacgagccccagctgctgccagagcatcacccccggacagcccgcgcgcctatagcgccgagcgtacggccgagacgcgagctcccggtgccaaacagttaactaatcacagcccgcctgccccacgtcatggcccagtccccgcagaggcgccggagctgaaggctcaggagcctctcagaaagcaaagcaggttggatccaagctccgcagtccttatgaggaaggccaagagagaaaaggtcgagactatgctgagaaacgactccctctcttccgatcagtccgagtccgttaggcccagccccccgaaaccacaccggtccaagcgtgggggaaagaagcggcagatgtctgtctccagctccgaagaggagggggtgtccacccctgagtataccagctgcgaggatgtagaactggaatcagaatctgtgtctgaaaagggtgaccttgattactattggctggacccagccacatggcactcccgcgaaaccagtccaatctctagtcatccagtcacgtggcagccttcaaaagaaggggatcgactaattggacgagtcattctgaacaaaagaacaactatgccaaaggattctggtgccttgctcgggctcaaagtagtcggcggaaaaatgaccgaccttgggcggctgggggccttcatcaccaaggtgaaaaagggatctctcgctgacgtagttgggcacctgcgcgcaggagatgaggtcttagaatggaatgggaagcccctgcccggcgctacgaatgaggaagtctacaacatcattttagagagcaaatccgagccccaggtggagattatcgtgtcaagacccataggcgatatacctcgcatcccagagtcttctcacccaccattagagtcttcttcctcatccttcgagtctcagaaaatggaaaggccctctatatcggtgataagcccaacctctcctggagctctgaaggatgccccccaggttctgcccggccagctatccgtcaagttatggtacgacaaagtcggccaccaactgattgttaatgtgttgcaggcaacggacctgcctgccagggttgacggaaggccgcggaacccatatgttaagatgtattttctgccagatcgctcagacaagtcaaaaaggaggacaaaaaccgtgaagaagattcttgagcctaagtggaaccagacctttgtatattcacacgtccatagaagggactttcgcgaaaggatgctggagatcacagtgtgggatcagcctcgtgttcaggaggaagagagcgagtttctgggcgagattctcattgagctggagaccgctctcctggacgacgagcctcattggtacaagctgcagacacatgacgagagcagcctgccattgccccagccgagcccctttatgccccgtcgacatatacacggagaatccagttctaaaaagctgcaaagatcacagaggatttccgactcggacatttctgattacgaggtagatgatggaatcggcgtggtgccccctggataccggtcttccgcccgagagtccaaaagtaccactctgaccgtgcccgagcaacaacggactacacaccacagatcaaggagcgtgtcccctcatcggggaaatgaccaaggtaaacccagatcccggctccctaacgtgccactgcaacgaagcttagatgaaatccatcccacgagacgctcgaggtctccaactagacaccatgacgcttctcggagcccagtagaccataggacccgtgacgtcgactcacagtacctgagtgaacaggacagcgagctcttgatgctgcccagagccaaacgcggccggagtgcagagtgtttgcatactacccgtatgcaccgacaacgaagtcctactcagagtccccctgcagacacctccttcagcagtcggaggggaagacagttaccgcaggtccctgtgaggagtggatctattgagcaggcgagcttggtggttgaggagcgcacccgacaaatgaaaatgaaagtccacaggtttaagcagaccaccggctctggctctagtcaggaactagacagagagcagtattctaaatataatatccacaaagatcagtaccgatcgtgcgacaacgtcagcgcgaagtcttccgactccgatgtttccgatgtgtcagcaattagtaggactagcagcgcgagcagactttcttccacgagtttcatgagcgagcagtccgaacggccccgcggcaggatcagacgcatgggcacatccggaaggagcatcatgaagtcaacaagtgtctctggtgaaatgtatacactggagcataacgacggcagtcaatccgacaccgctgtgggaacagtgggggcgggaggaaagaaaagacgctccagcctgagcgcaaaggtcgttgctatcgtgtctcggcgaagccgatctacctctcagcttagtcagacagagagcggccataagaaactgaagtctactatacaaagatctacggagacaggaatggcagcagaaatgagaaagatggtgagacaaccgagtcgggagtcgaccgacggtagcattaatagctactctagtgaagggaatctgatcttcccaggcgtgaggctaggtgccgactcacaattctccgattttctagatggcttgggcccagcccagctggtgggacgccagaccctcgccacacccgcgatgggcgatatacagatcggcatggaggacaagaaagggcaattggaggtcgaggttataagggcaaggtctcttacccagaaaccaggatccaagtccacccctgctccatacgtgaaggtctatctgctggagaatggagcctgcatcgccaagaagaaaacaaggattgctcggaaaaccctcgatcccctctaccagcagagcttggtctttgacgagtccccccagggaaaggtgctgcaggtcatcgtatggggcgattacggcaggatggaccataaatgttttatgggcgtggctcaaatccttctggaggaactcgacctgagttccatggtgatcggatggtataagctttttcccccatcctccctggtcgaccccaccttaacccccctcaccaggagggcctcccagtctagtttggagtccagcactggaccaccttgcatccgcagctag

SEQ ID NO: 202808 - DNA, 4116 bp, synthetic construct
  misc_feature 1..4116: note = Description of Artificial Sequence: Synthetic coding sequence
  source 1..4116: mol_type = other DNA
atgagcagcgccgtgggcccccggggcccccggccccccaccgtgccccctcccatgcaggaactgccggatctgtctcatcttacagaggaggaacggaacataataatggcggtcatggatcgtcaaaaggaggaggaggaaaaagaggaggctatgctgaagtgtgtcgtgcgcgacatggctaagcctgccgcctgtaaaacccccaggaatgctgagaaccagccccaccagccatcaccccggctgcaccagcagtttgagagctacaaggagcaggttaggaaaatcggggaggaagcacgccgataccagggggagcacaaagatgatgcccctacctgcggaatctgccacaaaacaaaattcgccgatggctgtgggcacctgtgctcctattgcaggacgaaattctgtgcgaggtgcggaggacgggtgtcccttcgcagtaacaacgaaaataagatcgttatgtgggtctgtaacctatgccgaaagcagcaggaaatattgacaaaatccggagcgtggttcttcgggagcggcccccaacagactagccaggacggcacgctcagcgatacagctactggagcgggtagcgaagttccccgcgagaaaaaggcacgcctacaggaaaggtcacggtcacaaacaccgttaagcacagcagccgcctcttcacaggacgccgcgccgccctccgcccctcctgatagaagtaaaggggcagagccctctcagcaagccttgggtcctgagcagaagcaggctagtagccggtcccggtctgaaccaccaagagaacgtaaaaaaacacctggactgtccgagcagaatggcaagggtgctctgaagagcgagcgcaagcgtgtgcccaaaactagcgctcaacccgtggagggggccgtggaggagcgggaacgtaaagagagaagagagtcaaggcggttagaaaaggggcggagtcaggactacccagatacaccagagaagcgcgacgagggcaaagctgctgatgaagaaaagcagcgcaaggaagaggactaccagacaaggtacaggagtgacccaaaccttgcgagatatccagtaaaaccaccccccgaggaacagcagatgaggatgcacgcgagggtttcaagggcaaggcatgaaaggcggcattccgatgtcgccctgccacgaaccgaggctggtgccgccctaccagaaggcaaggctggaaagcgagccccagccgctgcacgagctagtcctccagattcaccccgtgcctattcagccgagaggaccgctgagacacgggctcctggtgcgaaacagcttacaaaccacagcccaccagccccacggcacggtcccgtccctgctgaagcccctgagttgaaggcgcaggaaccgctacgcaagcagtccagactggacccttcatcagctgtgctgatgagaaaagcgaaacgggagaaggtggaaacaatgctgcgcaatgactcactgagctcagaccagtctgaatctgtgcggccgtcccctccaaaaccccaccgaagcaaaagaggcgggaagaagaggcagatgtctgtgagctcaagtgaggaggagggggtgtcgactcccgagtacacctcttgcgaggacgtggagcttgaatcagagagcgtgagcgaaaagggtgacttagattattattggcttgaccccgcgacgtggcacagtagagagactagccccatttcctcccacccagtgacctggcagccaagcaaagaaggcgatcggttgattggtagggtcatcttaaataagagaacaaccatgcccaaggattccggtgctctgctcggtctcaaggtcgtggggggaaagatgacggatttaggacgactgggtgcatttatcacaaaagttaaaaaaggttctctggctgacgttgtcggacatctgcgtgcaggcgacgaggtcctggagtggaatggcaagcctcttcctggagccaccaacgaggaggtctataatattattctggagtctaaatccgagccacaggtcgagataattgtgagccggcccataggggatattccacgcattccagagagcagtcatccaccattagagagcagctccagttcctttgagtctcaaaagatggagcggccgagtatttcagtgatttctcccaccagtcccggggccctgaaagatgccccacaggtgctgcctgggcagttaagtgtgaaactgtggtatgacaaagtgggccaccaactcattgtcaacgtgctccaggcaacagatctgccagcccgcgtggacggacgccctcgcaatccatatgtgaagatgtacttcctacccgataggtcagacaagtcaaagcgcaggaccaaaacagtgaaaaagattctagagccaaaatggaaccagacctttgtctatagccacgtccaccgcagagacttcagagaacgcatgctcgagattacggtctgggatcagcccagagtgcaagaggaagagagcgagtttctgggcgaaatcctcatcgagctagagaccgcgcttttagacgacgagcctcattggtataagcttcagacccacgatgagtctagccttccacttccccagccatccccattcatgccccggcggcatattcatggggaatcatcaagcaagaaactccagaggtcgcagcgcatcagtgattcggatatttccgattacgaggttgatgatgggatcggcgtcgtgcccccagtcggctatcgttcctcagcgcgtgagagcaagtcaactaccctgacagtgcccgaacaacagagaaccacccaccatcgatcgaggagtgtcagccctcacagaggtaacgaccaaggaaaacccagaagtagactgcctaatgtccctttgcagcggagtctggacgagatccaccctacacggcgttcaagaagccccacaagacatcatgatgcttctagaagccctgttgatcacagaaccagagatgttgattcccagtacttgtccgagcaggactcagaactgctgatgctccctcgggctaaacgaggtagatctgccgagtgcctgcacaccacctccgagctgcagccattcttggacagggcacggtctgccagtacaaattgtcttcggcctgatacatcactgcactcacccgagagggagagggggaggtggagtccatcactcgaccgaaggagacccccttcaccgaggatccagatacagcacgcctcccccgagaatgacaggatgcacaggcagcgcagtcctacccaatcccctcccgctgacactagttttagctccagaagaggccgacagctgcctcaagtccctgtgcggagtgggtctattgaacaagaatcagggcataagaaattaaaaagcactatccagaggagtaccgaaaccgggatggccgccgagatgcggaaaatggttcgccaaccaagccgagaaagcacagacggctccatcaactcctacagcagcgagggaaacctgatcttccctggcgtgagattaggcgccgactcccagttctctgatttcctggacggcttggggcccgcccagttggtcggccgacaaactctagctacgccagccatgggagatatccagattggcatggaggataaaaagggccagctagaggtggaggttatacgggctagaagcctgacccagaagccaggctcgaaatcgacccccgccccctacgtcaaggtgtatttactggagaacggcgcatgcatagccaagaaaaagacccggattgccaggaaaacactggaccccttatatcagcagtcacttgtgtttgatgaatctccgcaggggaaagttttacaggtgatagtctggggcgactacggccgaatggaccacaaatgctttatgggagtcgcccagatactgctcgaagaactcgacctgagcagtatggtaatcggctggtataaacttttccccccctcttccctagtagaccctaccctcactcctctgactcgcagagccagtcagtcttccttggaatcatcaactggtcccccgtgcattaggtcctag

SEQ ID NO: 202809 - DNA, 4626 bp, synthetic construct
  misc_feature 1..4626: note = Description of Artificial Sequence: Synthetic coding sequence
  source 1..4626: mol_type = other DNA
atgagcagcgccgtgggcccccggggcccccggccccccaccgtgccaccaccaatgcaagagcttcctgacctgagccacctgacagaagaagaacgaaatattataatggctgttatggaccgccagaaggaggaagaggagaaggaggaggctatgctcaagtgtgtcgtgagggacatggccaaacccgctgcttgtaagaccccgcgcaatgcggagaatcagcctcatcaacccagcccaaggctgcaccagcagttcgaaagctacaaagagcaggtccggaagatcggagaggaggctagaaggtatcaaggcgaacataaagacgacgcccctacgtgtggtatttgtcataagactaagtttgctgacggctgcgggcacttatgctcctactgcagaaccaagttttgtgcgaggtgcggggggcgagtcagcctgcggtccaacaacgaggataagtatgtaatgtgggtctgcaacctgtgtcggaagcaacaggagatcctgacaaagagtggagcctggtttttcggatctggcccccagcaaacatcgcaggatgggacgttatctgatacagccactggagccgggagcgaagtcccaagggaaaaaaaagcccgattgcaagaacgttcccgtagccagacccccctgtctactgcggctgcctcgtcacaggacgccgcccccccatcagcgcctcctgatcgcagcaaaggagccgaaccatcccagcaggcactgggcccagagcagaagcaggcttcctcccgaagtcggtctgagcctcctagagagagaaaaaaaacccctgggctatccgagcagaacggaaaaggcgctctgaagtctgagcgtaagagagtcccaaagacctcagcccagcctgtggagggcgccgttgaagaacgagaaaggaaggaaaggcgcgagagcagaagattggaaaagggccgcagtcaggactatcccgatacacctgagaaacgggacgagggcaaagccgccgatgaggaaaaacagcggaaggaagaggattaccagactagatacagatctgacccaaatctggctaggtaccccgtgaaacccccccccgaagagcagcagatgcgtatgcacgctcgcgtctccagggcccggcatgaaagacggcattccgatgtggctctgccgcgcaccgaggcaggtgcagctcttccagaaggtaaggcaggtaaacgggccccggctgccgcccgagcgtcccctcctgactcacctcgagcatattctgccgagcgcactgccgagacacgggccccaggcgctaaacaactgacgaaccacagcccacctgccccccgccacggcccagttcccgccgaagctcctgagttgaaggcccaagaaccgctcagaaagcagtctcgactggatccgagctctgctgttctgatgcgcaaagctaaacgggaaaaagtggagaccatgctcaggaacgattccctgtcaagcgaccagtctgagagcgtccgcccctctcctccaaagcctcacagaagcaagcgaggtggtaaaaagaggcaaatgagcgtgtccagtagtgaggaggaaggcgtaagcacccccgagtacacaagttgtgaggacgtagaactcgaaagtgagtccgtcagtgaaaagggggacctggattattactggctggaccctgccacctggcattctcgggaaacctctcccatctcgagccaccctgtcacatggcagccaagtaaagagggcgatagactcatcggccgggtgattctgaataagagaactacaatgcccaaggattctggggctctgctcgggcttaaagtcgtcgggggaaagatgaccgatctgggcagactgggggcatttattacaaaagtcaaaaaaggttccctggcagacgtggtggggcacctccgcgcaggcgacgaagtccttgaatggaatggcaaaccactgcccggtgctacaaacgaggaggtatacaatatcatcctggagtcaaaaagcgaacctcaggtggagatcatcgtgagcaggccaattggtgacattccaagaatccctgagagtagccacccacccctggaatccagctccagcagctttgagagtcagaagatggaacgcccatccatctctgtcatctcccccacttctcctggtgccctcaaggacgccccccaggtgctgcccggtcagctgagtgtgaaactgtggtatgacaaagtggggcatcagctaattgtgaacgtccttcaggctaccgacctgccggccagggtagatggacggccaaggaacccatatgttaagatgtattttctgcccgatcgctcggacaaaagcaaaaggcggaccaagaccgtgaagaagattctggaaccaaaatggaaccagacttttgtgtactcacatgtccaccgccgtgatttcagagaacgaatgctggaaataacagtgtgggaccagccacgagtgcaggaagaagaatccgaatttcttggggagatcctcattgaactcgaaaccgccctgctggatgacgagccacattggtataaactccagactcacgacgagagcagtttgccactgccgcagccttcgccgttcatgcctagaagacacatccacggtgagagcagctccaaaaagctgcagcgatcccagaggatctccgattctgacattagcgactatgaagtcgatgacggaatcggagtagtaccacccgttggatacagatctagtgctagagaatcaaagtcgaccactttaacagttcctgagcagcagcggacaactcaccacagatcgcggtctgtttccccacacagaggcaacgatcagggcaaacctcgatctcggctgccaaatgtgcctttacagcgttcgttggacgagatccatcccacaaggcgctcccgctcgccgactcggcatcatgacgcaagcagatcaccagtggaccaccgtactcgcgatgtagatagccagtacctgagcgagcaggattcagaactgctgatgctaccaagagctaaacgggggagaagtgctgaatgtttacatactacccgccacctagttagacactacaagacgctcccaccaaaaatgccattgctgcagtcttcatcacactggaacatttattcagagctgcagcccttcttggatagggctcggtcagcctctaccaattgtctgcgaccagatactagcctgcattctcccgagagggaacgaatgcatagacagcgttcacctacacagagcccccctgctgacacctcatttagcagcaggcggggtaggcaactaccccaggtgcccgtacgatcggggtcgattgaacaggcctctctggttgtggaagaaagaacccggcaaatgaaaatgaaagtccataggttcaaacaaactactgggagcggatccagtcaggagttagaccgcgaacaatacagcaaatataacatacataaagatcagtaccgtagttgtgacaatgttagcgcaaagagctccgattcagacgtgtcagacgtgtctgcgatctcccgcacatctagtgcttcacgactcagctcgaccagcttcatgtctgagcagagcgaacgccccagaggacgtatttcttcctttacccccaagatgcaaggtagaaggatgggcactagcgggcgttcaattatgaaaagtacgtcggtttctggagaaatgtacacactagaacacaatgacgggtcccagagtgacacagcagtcgggacagtaggcgccggtggcaaaaagagacggtcaagtctgtcggcaaaagtggttgctattgtttctaggcgctcccgtagcactagccagctgagccagactgagagcgggcacaagaaactgaaaagtacaattcagaggagcaccgagacaggcatggctgccgagatgaggaagatggtgcgccaaccctcacgagaatccacagatggaagcatcaacagctacagctctgaaggcaacttaatctttccaggcgtgaggctgggagctgactctcaattctctgactttcttgacgggctgggtcccgcccagctggttgggagacagaccctggccacacccgccatgggcgatattcaaatcggtatggaggacaagaaaggacagttggaagtggaagtcattcgtgctcgatccctgacccaaaagcctggtagcaagagcactcccgccccgtacgttaaggtttatctgctggaaaatggggcctgtatcgccaaaaaaaaaacacgcattgctaggaaaacactcgaccccctgtatcagcaatctctggtctttgacgagtcacctcagggaaaagtgctgcaggtgattgtgtggggcgattacggtcggatggatcacaaatgtttcatgggcgtcgcacagattctgttagaggagctggatttgtcatcaatggtgatagggtggtacaaattatttcccccatcatcccttgtcgacccgacactgacccctctgactcgacgggccagccagagctcattagaatcttcaaccggccctccttgcattcggtcgtag

SEQ ID NO: 202810 - DNA, 4446 bp, synthetic construct
  misc_feature 1..4446: note = Description of Artificial Sequence: Synthetic coding sequence
  source 1..4446: mol_type = other DNA
atgagcagcgccgtgggcccccggggcccccggccccccaccgtgccccctcccatgcaagaactccctgatctgtcgcacttaacagaagaggagagaaacatcattatggcagtcatggaccggcaaaaagaggaagaggagaaggaggaggccatgctaaaatgtgtggtgcgagacatggcaaagcctgctgcttgcaagacgcccagaaatgcagaaaaccagccacaccagccctccccccggctccaccagcagttcgaatcatacaaggaacaagtgaggaaaatcggcgaagaagcaaggcgctaccaaggcgagcacaaagatgatgctcccacatgtggcatttgccacaagaccaaattcgccgatggttgtggacacttatgtagctactgccggacaaaattctgtgcacggtgtggcggcagggtatcactgagatctaataacgagaataagatcgtaatgtgggtttgcaacttatgccggaagcagcaggaaattctgactaagtctggagcctggtttttcggcagcggacctcaacagacatcacaggatggaactctgagcgatactgcaacaggcgctggatcagaggtgcccagggagaaaaaagctaggctccaggaacggagccgttcgcagactcccctgagcaccgctgccgccagctcccaggatgcagcgcccccaagcgctccgcccgatcgatctaagggagccgagcctagccaacaggctcttgggcctgaacagaaacaggcttcatctagaagcaggagcgaaccgcctagagagcgcaaaaaaacacccggcctctccgaacagaatggcaagggagcactcaaaagcgaaaggaaaagggtgcccaagaccagtgcccagccagtcgaaggagccgtcgaagaaagggagaggaaagaacggagggagtctaggaggcttgaaaagggaaggtcccaggactacccggataccccagaaaaacgcgacgagggcaaagcagctgacgaggaaaaacagcgaaaagaggaggactaccagaccagataccggtcagatcccaatctcgcaagatacccagtcaaaccaccccctgaagagcagcaaatgcgcatgcatgctcgagtgtcccgcgctcgccacgagagacggcattcggatgtggccttgccaagaacagaagcaggggccgccctgcctgaaggtaaagctggaaagagagcacctgccgctgctcgtgcatcccctcccgatagccccagggcatattccgctgagagaacagctgagacgcgcgcccccggtgctaaacagcttacgaaccattctcctccagcaccacgacacggtccagtgccagcagaagcacctgaactgaaggcccaggagcctctgcgcaagcaatcgagactcgatccgagcagcgccgtcctgatgcggaaggccaagagggagaaagtcgaaacaatgctgagaaacgacagtctgtcatccgaccagtcagaatctgtccggccctccccaccaaagcctcaccggtctaaaaggggcggaaaaaaaaggcagatgagcgtcagttcatctgaagaggaaggagtgtcgaccccagagtacacatcatgtgaagatgttgagctcgagagtgagtctgtgtcagaaaagggggacctggattactactggttggacccagctacgtggcactctcgcgagacgagcccgatctctagccacccagtgacttggcagccctccaaagagggggatagactaattggaagagtgattctgaataaaaggaccacgatgcccaaggatagcggcgccttgcttggtctcaaggtggtcggggggaagatgactgatctaggtcgcctgggtgcctttataacaaaagtgaagaagggcagcctggccgacgtcgttggacatctacgagcaggggatgaagtgctcgagtggaatgggaaaccactgcccggcgctactaatgaggaggtctataacattatcctagagagtaagtctgagccacaagttgaaattatagtcagccgtccgatcggggacattcctaggatcccagagtcctctcatcctcccttggagagcagtagctcgagttttgaaagtcagaagatggaaagaccatctatctcagtaatttctcccacatctcccggggcactgaaagatgctcctcaggtgttgccgggacagctctcagtcaagctctggtacgataaggtcgggcaccagctcattgtgaatgtcctgcaggcgacagatcttcccgccagagtagatgggaggcctaggaacccttatgtgaagatgtacttccttccagatcggagcgataagagtaagcggcggacaaagaccgttaaaaagatcctggaacctaaatggaatcagacattcgtttactcacacgtgcaccgtcgggattttcgcgagcgtatgcttgaaatcaccgtttgggatcagcctcgcgtgcaggaggaagagtccgagtttttgggggaaatcctgatagaactggaaaccgcactgttagacgatgaaccccactggtacaaattgcagactcacgacgaatcctccttaccactccctcagccgtccccgttcatgccgcgacgtcacatccacggcgagtcgagtagcaaaaaactgcagcggagccagagaatatccgacagcgacatctctgactacgaagtggacgatgggatcggcgtcgtgcctccagtggggtatcgcagctcagcgcgtgaatcaaaaagcactacactcaccgtgccagagcagcagagaactacgcaccaccggtctagatccgtctcccctcacaggggaaacgaccaagggaagccccgctctcgcctgccgaacgttccattgcagcgcagtttagacgaaattcaccccacccgacgtagccgtagccccactaggcaccacgacgcaagccggtcgccagtggatcatcggactagggacgtggacagccagtacctgtccgaacaggatagtgagttacttatgctcccccgagccaaacgcgggcggagtgccgagtgcctgcacacaacaagcgagctgcagccatttcttgatagagctaggagtgcctctacaaattgtcttcggccggacacaagtctgcacagccctgaaagagagcgtatgcatcgccagcgaagcccaacccagtcacctccagccgacacttcgtttagttcaaggcgtggacgtcaacttcctcaagtcccagttcgttccgggagtatagaacaggcctctctggttgttgaggagaggacgcgtcaaatgaagatgaaggttcatcggtttaagcaaactacgggaagcggtagttcccaggagcttgacagggaacagtactcaaaatacaacatacacaaagatcaatacaggtcctgtgacaatgtgtcagcgaaatccagcgacagcgatgtttcagatgtcagtgcgattagcaggaccagttctgccagcaggttgagttccacaagctttatgtcagagcaatccgagcgcccccgggggagaattagcagctttacccccaagatgcagggacgccgtatgggcacgagcggacgcagcataatgaaaagtactagcgtgagtggggagatgtacacattggaacacaatgatggatcccagtcagacacggcagtgggcacagtcggagcgggcggtaaaaagcgaaggagctctctgagtgctaaagtggtggcaatcgtgagccggaggtctcggagtaccagccagctgtcgcagaccgaatctggtcacaaaaagctaaagtccacgattcagaggtctaccgagactggtatggccgctgaaatgaggaaaatggttagacagccttctcgggaaagcaccgatggcagtataaacagctactccagcgaaggcaatcttatcttcccgggggtgcggctcggagcagactcccagttcagcgactttctggacgggttaggacccgcacaactggtcggccggcagacattggcgacgccagcaatggccccgtacgtgaaagtgtatcttctggaaaatggggcttgtatagcaaagaagaagactaggatcgcccgcaaaaccctggatcctctataccagcagagtttggtgttcgacgaaagtcctcagggtaaggtgctgcaggtcatcgtgtggggtgattatggaaggatggatcacaagtgcttcatgggtgtggctcagatcctgctagaggaactagatctttccagtatggttataggatggtacaagctttttcccccatcttccctggtggatcccactcttactcctcttacaagacgcgctagccaaagttcgttggagtcgtctaccggccctccctgcataagatcctag

SEQ ID NO: 202811 - DNA, 4446 bp, synthetic construct
  misc_feature 1..4446: note = Description of Artificial Sequence: Synthetic coding sequence
  source 1..4446: mol_type = other DNA
atgagcagcgccgtgggcccccggggcccccggccccccaccgtgcctccgcccatgcaggagcttccagatctctctcatctgactgaggaggagcgaaacataattatggcagtgatggatcgccagaaagaggaggaagaaaaagaagaagccatgctaaagtgcgtcgtgagagatatggctaagccagctgcatgtaagactcctcggaacgctgaaaatcaaccccaccagccttctccacgtctccaccaacagtttgaaagctataaagagcaggtgcgcaagattggagaagaagctcgccgctaccagggtgaacacaaggatgacgcgcccacttgtgggatttgtcataaaaccaagttcgcagacggttgcggacatctgtgctcttactgcagaacaaaattttgtgcccgctgtgggggtagggtgagtcttaggagcaataacgaggacaaagtggtgatgtgggtgtgcaatctgtgcaggaagcaacaagaaattctgactaagtcaggagcctggttttttggttcagggcctcagcaaactagtcaagatggaaccctgtcagataccgcgactggggccggatcagaagttccccgggaaaagaaggctaggctgcaggagaggtcacggagtcaaactcctttgtctacagccgctgccagttcgcaggatgctgctcccccctcggcaccccctgataggtctaagggcgccgaacctagtcaacaagctctggggcctgaacagaagcaggcatcatcccggagcagatccgaacctcctcgggagaggaaaaaaacacccgggctgtcagagcaaaacggaaaaggagccctcaagtctgagcgcaaaagagtgcctaagaccagcgcgcaacccgtggagggtgctgtagaggagagggaacgcaaggaaaggagggaaagccgccggctggaaaaggggcgaagtcaagattaccccgatacaccagagaagcgagacgaaggtaaagcagccgatgaagagaagcagagaaaagaggaggactaccaaactcgataccgttcagatcccaatctggcacggtacccggtaaagcccccgcccgaagaacagcaaatgagaatgcacgctcgggtttccagggcccggcacgagcgaagacacagtgacgtggcactgcccaggaccgaggctggggctgccctgccagaaggcaaagccggcaagcgggcacctgccgctgcaagagctagcccccctgatagtccacgggcttatagcgcggagagaacagccgagactagagctcctggggctaagcagctaaccaatcactccccgcccgccccccgacatggtccagtgccagctgaggcaccggaactcaaggctcaggaaccgctgagaaagcagtctcgactcgatccaagctctgcagtgctcatgcggaaagcgaagagagaaaaagtggagactatgctaaggaacgactctctttcttctgaccagagtgagagcgtgagacccagtccccctaagcctcaccggtccaagaggggcggaaagaaaaggcagatgtcagtcagttcctccgaggaggaaggcgtgtctacccctgagtacacgagttgtgaggatgttgagcttgaatccgaaagtgtgtccgagaaaggggacctcgactactattggctggaccccgcaacctggcacagcagggagacgagcccaatttcaagccaccccgttacatggcagcctagtaaagaaggcgaccgccttatcggacgggttattttaaacaagagaaccaccatgccaaaagatagcggagcgctcctggggctcaaggtggtaggcggaaaaatgactgatctgggccgactgggtgcctttatcactaaggttaagaaggggtccctcgctgacgtagtgggccatctgcgtgcgggggatgaggtattagaatggaatgggaagccgctcccaggggctaccaacgaagaggtgtacaacattattctcgagtccaagtcggagcctcaggtggagatcatcgtgtcaaggccaatcggagatattccacgcattccggagtcaagccatcctcctctagagtcctcatcatcaagctttgagagccaaaagatggaacggccaagcattagtgtcataagcccaacaagcccaggtgccctgaaagatgcacctcaggtgttgccgggacagctctcagtaaagctctggtatgataaagtcgggcaccagctaatcgtcaacgtgcttcaggcaacagacctgcccgctcgtgttgacggtcggcctcgcaatccatatgttaagatgtactttctgcccgatagatctgataaaagtaagagacgcaccaagactgtgaagaaaattctcgaacccaaatggaaccagaccttcgtctatagtcacgttcacagaagagattttcgcgaaaggatgttggaaattacagtttgggaccagccacgcgtgcaagaggaggagagcgagttcctgggtgagatcctgatagaactggaaactgctcttctcgacgatgagccgcattggtataagctgcagactcacgacgaaagtagcctgccattaccacagcctagccctttcatgcctcgccggcacatacatggggagagctcctcaaaaaagcttcagcgaagtcagaggatcagcgactctgatatcagcgactacgaagtcgatgacggaatcggtgtggtgccaccagtgggctacagaagctctgcacgggagtccaaatccaccacgttgactgtgcccgagcagcagaggaccacgcatcatagatcccggtctgtgtctcctcatcggggaaatgaccagggtaaacctcgatctagattgcccaatgtccctctccagcgctctctggacgaaattcatcctaccagaagatcccggtccccaactagacatcatgatgcatcccggtcaccggtggatcaccggacacgggacgtggactcacagtacctgagtgagcaggatagcgaattgctcatgttgccgagagcgaagagggggcgctctgccgaatgccttcacacaacaagcgagctccaaccctttctcgacagggctcgctccgccagcactaactgtttacggcctgataccagcttacacagtccagagagagaacgcatgcacagacagcggtctcccactcaaagcccgccggccgatacaagcttctctagtaggcgcggaaggcaattgcctcaggtccccgtgagatccggatcaatagagcaggcctcactggttgtcgaggagcgcaccagacagatgaaaatgaaggttcaccgcttcaagcagacgaccggttctgggtcatcccaagaactggaccgggaacagtattctaagtataatattcacaaagaccagtaccgcagctgtgataacgtatccgcaaagtctagcgatagcgacgtgtcagatgtgagtgctatctcccgaaccagctcagccagcagactctcaagtacctcctttatgtccgaacagagcgagagaccaaggggacggataagctcctttaccccaaagatgcagggcagacgtatgggaacttcgggcagaagtatcatgaaaagcaccagcgtgagcggtgaaatgtacaccctggaacacaatgacggctcacagagcgacacagctgtaggcactgttggagccggtggaaaaaagcggaggagcagcctgagcgccaaagtcgtggctatcgtctcaagacgaagcaggtccactagtcagctgtcccagactgaaagtgggcacaagaaactgaagtccactattcaaaggagcacagagactggtatggctgcagaaatgagaaaaatggtgcgccaaccttctcgagaatctaccgatggcagcatcaattcttatagtagtgagggtaatcttatcttccctggtgtaaggctcggggccgactctcagttctccgacttcttggacggcctggggcctgcccaattggtggggcggcaaactcttgccacacccgctatggccccttacgtcaaggtctacctgctggagaatggggcctgcatagctaagaaaaagactcggatcgcccggaaaacactggatcctctgtaccagcaaagtttggtatttgacgaatcaccacagggcaaagtgctgcaggtgatcgtatggggggattatggccgaatggaccataaatgctttatgggggttgctcagatactcctggaggagctcgacctgtcgtccatggtgatcgggtggtacaaattgtttcctccctcctctttggtggatcctactctgactccgttaaccaggagagcaagtcaaagcagcctggaaagtagtaccggccccccctgtatccgcagctag

SEQ ID NO: 202812 - DNA, 5079 bp, synthetic construct
  misc_feature 1..5079: note = Description of Artificial Sequence: Synthetic coding sequence
  source 1..5079: mol_type = other DNA
atgagcagcgccgtgggcccccggggcccccggccccccaccgtgcctcctccaatgcaggagctgcctgatttgtcacatctgacagaagaagagcgcaatattatcatggcggtcatggaccgccagaaagaagaggaagagaaggaggaagctatgttgaaatgtgtggtgcgcgatatggcaaagcctgcggcctgcaaaactccaaggaacgctgaaaatcagccccaccagccaagtccgaggttgcatcagcagttcgaatcttacaaagagcaggtccgtaagataggtgaggaggcccgtcgatatcagggagagcataaagatgatgcccctacatgcgggatatgtcataagactaaattcgccgacggttgcggccatctatgttcttactgtaggactaaattctgcgcacggtgtggaggccgcgtgtccctgcgctcaaacaacgaggataaggttgtgatgtgggtatgcaacttgtgcagaaaacagcaagaaatcctgacgaaatccggtgcctggttcttcggtagtggaccccaacagaccagtcaggatggaacactgtccgatacggccactggcgccgggagcgaagtccccagggaaaagaaagcccgactgcaggaacgaagcagatcacagacacctctgtccaccgctgccgctagctcacaagatgccgctcccccatccgctcccccggacagaagcaaaggtgccgagccaagtcaacaggccttagggcccgaacaaaaacaggccagctcccgaagtcgctcagagcctccccgcgagcggaagaagaccccgggattaagcgaacagaacggcaaaggggccctgaaatcagaacgtaagagggtgcctaaaaccagcgctcagccggtggaaggggccgtcgaagagagagaacgtaaagagcgcagggaatcccgcaggctggaaaaagggaggagccaggactaccccgatacacctgaaaaaagagatgaggggaaagcggccgacgaggagaagcagagaaaggaggaggactatcagacacgctatagatcagatccaaatctggcgcggtatcccgtcaaacccccccccgaagagcagcagatgcgcatgcatgctcgcgtcagccgggcccgccatgaaaggaggcactctgatgttgcgctcccaagaaccgaggcaggggctgccctgcccgaaggcaaggcagggaagagagccccggctgcagcgagagcaagcccccccgatagcccacgggcctatagtgctgaacgaacggccgaaacaagagccccaggggcaaaacagctaacaaaccatagccctccggcgccgcgtcatggaccggtccctgccgaggcgcctgaacttaaggcccaggaacccttacggaagcagtcccggctcgatcccagctccgcagtacttatgaggaaagcaaaaagagaaaaagtcgaaaccatgcttcgaaacgactccctgtcatctgatcagagtgagtccgtccgaccgagccctccaaagccccatcgttcaaagaggggagggaagaaacgccagatgagtgtgagttcatccgaagaggaaggcgtatctacacctgaatacaccagctgcgaagacgtggagctggagtctgaaagtgtctccgaaaaaggagacctcgactattactggctagaccctgccacatggcatagtcgtgagacgtcccctatctcaagccatccagtaacatggcagcccagcaaggagggggatcgcctgattggaagagtcattctgaacaagcgaacaactatgcccaaggactctggcgcccttctcggattgaaagtcgtcggcggaaaaatgactgatctagggcgtctgggggccttcataacaaaggtcaaaaagggaagtctcgcagacgtcgtgggccatctcagggccggagatgaggtgctggaatggaatggcaaaccattacccggagcaacaaatgaagaggtttataatatcatacttgaatccaagtccgagcctcaggttgaaatcatcgtttcccggccgataggagatattccgcgaatccctgagagctctcatccccccctggagagctccagctcttcatttgaatcacaaaagatggagcgcccatcgatctcagtgatcagccctacttcccctggcgctctcaaggacgccccgcaggtccttcctggccaactcagcgtgaaactttggtacgataaggtggggcatcaactgatcgtcaatgtccttcaggctacagacctcccagcccgggtggacggtcgcccccggaatccatatgttaaaatgtacttcctgcccgaccggtctgataaatccaaacggcggaccaagaccgtgaagaagatcctggaacccaaatggaaccagacctttgtatactctcacgtgcatcgaagagactttagggagagaatgctggagatcacggtgtgggatcagccacgcgtccaagaggaagagagtgagttcttaggtgagattttaatagagctggaaacagcattgctcgatgacgagccacactggtataagctacaaactcacgacgagagtagcctgcctctcccccagccgtctccattcatgcccaggcgacacattcatggagagagctcttctaagaagttgcagcgctcacagaggatatccgatagcgatatttcagattacgaggttgatgacggtattggtgtcgtgcctcctgtgggataccgctcctccgcgcgcgagtccaagagcactactcttaccgtgcccgagcagcagcgaaccactcatcacagaagcagatctgtgagccctcacaggggcaatgatcaagggaagcctagatcccggttacccaatgtgccactccagcgaagtctggacgagatccatcccacccgccggtctcgaagcccaactagacaccacgatgcaagtagatcacccgtcgatcaccgcacacgcgacgttgatagccagtatttgagtgaacaggacagtgaactgctgatgctgccacgggctaaaagaggcagatcagccgagtgtctgcacaccacccgccatctggttaggcactataagactctccctcccaagatgccgctgttacagtcctcgagccactggaacatctactcaagcatccttccggcacacacaaaaactaaaagcgtgactagacaagatatatcgcttcaccacgagtgctttaactccaccgtcctgaggtttaccgatgaaatcctggtttccgagctgcaacctttcttagaccgcgctaggtccgccagcaccaactgcctgagacctgatacgagtctgcacagcccagaacgcgaaaggggacggtggtcaccatcacttgatcgccgcaggcctccttctccaaggatccagatccagcatgcatcaccagagaatgacaggcacagccgtaagtctgagcgatcctctatacagaaacagacacgcaaaggtaccgcttctgatgctgagagggtcctgccgacatgtctatcccgtcgcgggcacgccgctcctcgagcaacagaccaacctgtcattcggggcaaacatcccgcaagaagcaggagcagcgagcattcctccatccgcaccttgtgttctatgcaccatcttgtacccgggggtagcgcccctccaagtccactgttgacaagaatgcataggcagcgctcacccacacagagtccacctgccgacacatcatttagctctcgaagagggagacagctgccacaggtcccggtacggtctggctctatcgagcaggcaagcttagtggtggaggagcgtacccgccagatgaagatgaaagtgcatcggtttaagcagacaaccggcagtggctcctcacaagaattagaccgggagcagtacagcaagtacaatatccataaggaccagtatcgatcatgcgataacgttagcgccaagtcatccgatagtgatgtcagtgacgtgtctgccatctcacggacatcttcggccagcaggttgtcatctacctccttcatgagcgaacaaagcgagagacccagaggtagaatttcgagctttacccccaaaatgcagggccgcaggatgggaacaagtgggagaagcatcatgaaatccacctccgtgagtggcgagatgtacacactggaacataatgatggttcccaatcagatacggccgtgggtaccgtgggtgccggcggcaaaaagcgccgcagcagcctgtctgccaaagtggtggcaattgtcagtagaagatcacgtagcacatcacagctctctcagaccgaaagcggtcataagaaactcaagagtaccatccagaggtcaacagagacaggaatggcggcagagatgcggaagatggtcagacagccctcccgggaatcaacagatggatccattaactcctattctagcgagggaaatctgattttcccaggcgtccgcctgggggcggattctcagttctccgacttcctggatggcctcgggcccgcccagttggtgggacggcagactctcgccactcccgctatgggcgacatacagataggtatggaagacaaaaagggacagttggaggtggaggtcattagggcgagaagcttaacacagaagcctggcagcaagtctacaccggctccatatgtcaaggtttacctcctggaaaacggcgcatgtatcgccaagaaaaagacccggattgcacgcaagactctggaccctttgtaccagcagagcctggtgttcgatgagagtccccagggtaaggtcttgcaggtgatcgtgtggggtgactatggaagaatggatcacaagtgctttatgggagtcgcccagatcttgctggaagagctggatctgagtagtatggtgatcggctggtacaaactgtttccaccttccagtcttgtggacccaacgctgacaccactgacccgacgggcaagtcagtcttctttagagtcctcaaccggccctccttgtataaggtcctag

SEQ ID NO: 202813 - DNA, 1497 bp, synthetic construct
  misc_feature 1..1497: note = Description of Artificial Sequence: Synthetic coding sequence
  source 1..1497: mol_type = other DNA
atgctgccccgggccaagcggggccggagcgccgagtgcctgcacaccacgagacactccaggaagtctgagagatcctcaattcaaaagcaaacgcggaaggggacagctagtgatgccgaacggatgcaccgacagagaagcccaacacagtcgccacccgccgacacaagtttctcctcgagaagaggccggcaactgcctcaggtccccgtgcggtctggatcaatagaacaggaacaggaaaaatacaactctagtacaaaagcatcacttgtggtcgaagaacgcactcgccagatgaagatgaaagttcaccggttcaagcaaacaaccggctctgggtccagtcaggaactggatagggagcaatacagcaagtacaatatacacaaggaccagtatcgatcctgtgataatgtcagcgcaaaaagctcagacagcgatgtctcagacgttagtgccatcagtcgcaccagctccgcttccaggctttctagtacaagctttatgagcgagcagtctgagagaccgagaggccggatttcctcatttacgcccaagatgcagggtcgtaggatgggaacctccggcaggagtatcatgaagagcaccagcgtgtccggcgagatgtacacgctcgagcataacgacggaagccagtcagataccgctgttggaacagttggagcaggcgggaaaaaaagaagatcttccctcagcgccaaggttgttgctatcgtgtctcgcagatcccgatcaacttcccagctgagtcagactgaatctggccataagaaacttaagtccaccattcagagaagcacggagactgggatggcagcagagatgcgtaaaatggtacgtcagccatcccgtgagtctacagacggatctatcaattcatatagtagcgaaggaaatctcatcttccctggcgtccgactcggcgccgattcacagttctcagacttcctcgacggtctgggcccggcacagctcgtcggcaggcagactttggcaactcctgccatgggagatattcagatcggcatggaagacaaaaaagggcaattagaggtggaggtcatacgagctagatccctgacccagaagccgggtagcaaaagcacccctgccccttacgtcaaagtgtatctcctggaaaacggtgcatgtatcgcaaagaagaaaacaagaattgctcgaaaaacactggatcctctctaccagcaatctctggtttttgacgaatctcctcagggtaaagttcttcaagtcattgtgtggggcgattatggccgcatggatcacaagtgtttcatgggggtcgctcaaattctgctcgaggagctcgacttgagctctatggtcattggctggtataagctgttcccccccagtagcctggtagatccgactctgacacccctcaccagaagggctagccaatcctcactggaatcgagtaccggtccgccgtgtatccgttcatag

SEQ ID NO: 202814 - DNA, 3039 bp, synthetic construct
  misc_feature 1..3039: note = Description of Artificial Sequence: Synthetic coding sequence
  source 1..3039: mol_type = other DNA
atgtgcgcccccggcatccacgtgagcagcgagggctgggaggaggtccgctctgttgatagtgaagaagggactattgaagcacggcgtgccgtggcgggcgatctcgattactactggttggaccccgcaacctggcatagtcgagagacatcccctatttctagccaccctgtgacctggcagccctctaaagagggggaccgcttaatcggccgtgtcatactcaataagcggactaccatgccaaaggattccggggccttattaggccttaaggtagtcggcggaaaaatgactgatttgggcaggctcggcgcttttataacgaaagtcaagaaagggtcacttgccgacgtggtagggcacctaagagccggtgacgaagttctcgaatggaacgggaagccgcttcctggagcaacgaacgaggaagtttacaatattatcctggaaagcaaatctgaaccccaagttgagattattgtaagtcgccccatcggtgacatacctcggatccccgaatcctcccatcctccgttggagagttctagctctagctttgaatcacagaagatggaacgcccaagcatctcagtgataagccctacatcacctggcgcactgaaggatgctcctcaggttctgcccgggcagttgagtgtgaaattgtggtatgacaaggtgggccaccaactgattgtgaacgtacttcaggctacagacctgcctgccagggtggacgggagaccacggaatccatacgtgaaaatgtacttcctgcccgacagaagtgataaatccaagcgtaggaccaagacagtcaagaagattttggagccaaaatggaatcaaacattcgtgtatagccacgtccaccgtcgcgatttcagggagcggatgctggaaatcacagtctgggatcagccgcgggtacaggaggaagaatccgaattcctgggtgaaatactcattgaacttgaaacggccctgctggatgacgagccacactggtacaagctccagacacacgatgaatcctccctgccgctcccgcaaccgagcccattcatgcctcgaagacatatacacggcgaatctagctctaagaagttacagagatcgcagcgcatttctgactctgatatatcggactacgaagtggatgatggcattggcgtagtgccgcctggatatcgtagtagcgcaagggagagcaagagcacaacattaaccgttccagagcaacagaggaccacccaccatagaagtaggtctgttagcccacaccgcggaaacgatcagggtaagccaagatcgaggctgcccaacgtgccgctacagcgctctctcgacgaaatccaccctacgcgcagatctaggtcacccactcggcaccacgacgcgagtcgctcccccgtcgaccatagaacccgggacgtggactcccaatacttgtccgaacaggacagcgagctgctaatgctcccacgggctaagcgcggacgatctgcagagtgcctgcacacaacaagtgagctgcaaccattcctggaccgcgctcgaagcgcctctactaattgtctgagacccgacacttcccttcattccccagagagagaaaggcacagcagaaagtccgaaagatcatcaatccagaaacagacccgaaagggcactgcttccgatgcggagcggatgcatcgtcaaaggagtccaacccagtcccccccggccgatacctcgttttcctcaaggcgcggcaggcaactgccacaggtgcccgtcaggtctggatcaattgaacaggcctctctggtggtagaagagagaaccagacagatgaagatgaaagtacaccgctttaaacaaaccacaggttctgggtcaagccaagaattggatcgggaacagtactcaaaatacaacattcataaagaccagtacaggtcttgcgacaacgtgagtgctaagagcagtgatagcgacgtgagcgacgtgagcgctatcagcaggacaagtagtgccagccgcctgtccagcaccagcttcatgtctgaacagagtgagcgccccagagggcgcatcagctcatttactcccaagatgcaggggcgccgtatggggacctcagggaggagcatcatgaagtccacctccgttagtggagagatgtacacgttggaacataacgatggttcgcagagcgacaccgcggtgggcacagtcggcgccggcggaaagaagagacgaagttcactgagcgccaaggtggtggcgatcgtaagtaggcgttccagaagtacgtcacaactgagccagactgagtccggccacaagaaactgaaatcaactattcagagaagcacagaaacaggcatggccgccgagatgcgtaagatggtgcgccagccgtcaagggaatcaactgacgggtcaatcaactcatattccagcgagggaaacctgatttttcccggggttcgacttggggccgattcacaattctctgatttcctcgacggtctgggccccgcccagttggttggcaggcagactctggcaacacccgcaatgggagacatccagatcgggatggaggataagaaaggacagctggaggtcgaagtcattcgggcaaggagtctgacccagaagccaggttctaagtctacgccggccccatatgttaaggtatatttgttggagaacggtgcctgtattgccaaaaaaaaaaccagaattgctaggaaaaccctggatccgctttatcagcagagcctggtcttcgatgagtcaccccagggcaaagttctgcaggttatcgtgtggggtgattatggccgcatggaccacaagtgcttcatgggtgtggctcagattctgcttgaggagctggatttatcttccatggtgatcggctggtacaaactttttccacctagcagcctggtggatcccaccctgaccccacttacccggcgcgctagccagagctccctcgagagtagtacaggcccgccttgcatcagaagctag

SEQ ID NO: 202815 - DNA, 660 bp, synthetic construct
  misc_feature 1..660: note = Description of Artificial Sequence: Synthetic coding sequence
  source 1..660: mol_type = other DNA
atggccgccgagatgcggaagatggtgcggcagcccagccgggagtcaaccgacggctcgatcaactcttattcctctgagggcaatctcatatttcctggtgtccgtctcggggcagactcccagttttccgatttcttagacgggttggggcctgcgcagcttgtcgggaggcaaactttggccactcccgctatgggtgacatacagatcggcatggaggataaaaaaggacagctggaggtcgaggttattcgagctcgcagcctgactcagaagcccggaagtaagtcgacaccggctccttatgttaaggtctacttgctggagaatggggcctgcattgctaagaagaagactcgaatcgccaggaagaccctcgatcctctataccagcaatccctggtctttgacgagtctccacagggaaaggttcttcaggtaattgtttggggcgattacggtcgcatggaccacaagtgctttatgggagtggctcaaattctgctggaagaattggaccttagctcgatggtgatcggttggtacaagctttttcctccgtcttcactggtggacccaactttgacccctctgactcggcgtgccagccagtcctccctggagtccagtactggccccccctgcatcagatcctag

SEQ ID NO: 202816 - DNA, 2283 bp, synthetic construct
  misc_feature 1..2283: note = Description of Artificial Sequence: Synthetic coding sequence
  source 1..2283: mol_type = other DNA
atgcccaaggacagcggcgccctgctgggcctgaaggtggtgggcggaaagatgaccgacctcgggcgacttggggcattcatcactaaagtgaagaaggggtcattggccgacgtggtaggacatctacgtgcaggcgatgaggtgctggaatggaacggcaaaccactcccgggggcaactaatgaagaggtgtataatataatactcgagtcaaaaagtgagcctcaagtagaaataattgtgagtagacccatcggagacatcccacgcatacccgagtcaagccacccaccactggagagcagcagctcgtcctttgagagtcagaagatggaacgcccaagcatttcagttatctcgccaacctcgccaggggccctcaaagacgcgcctcaggtccttcccggtcagttgtctgtgaagttgtggtacgacaaagtaggacaccagctcatagtgaacgttctccaggcgaccgatctcccagccagagtagatgggcgtccacggaatccctatgtcaagatgtattttctgcctgacagaagcgacaagagcaaaagacgcaccaaaacagtcaagaaaattttggagcccaagtggaaccagacgttcgtttactcccacgtgcataggagggattttcgtgaacgaatgctggagatcactgtgtgggaccagccccgagtgcaagaggaagaatcagagtttctgggagagatcctgatcgagttggagaccgccctactggacgatgaacctcactggtacaaactgcagacgcatgatgagagctccctgccactcccccagccaagtccttttatgccccgtagacacatccacggagaatcgtccagtaagaagctacagcgctcccagcggatatccgactcagacataagcgactacgaggtagacgacgggatcggcgtcgtgccacctgttggctaccgctcgtctgcgagggaatcaaagtctactaccctcactgtcccagagcagcagaggaccacacaccatcgctctcggtctgtaagcccccaccgcggaaacgatcagggtaaacccagatccagattgcctaacgtacctcttcagagaagcctggacgagatccacccaacgcgtcggagccgaagtcccacaagacaccacgacgccagccggtcgccagttgaccacagaacccgcgacgtcgattcccaatatctcagcgaacaggactctgagctgctgatgttgccacgcgctaaacgcggccgctcagccgaatgcttgcacacaacctccgaattgcaacctttccttgaccgcgccaggagtgcctcgacgaactgcttgcgaccggacacatctctgcacagcccagagcgagaacgacactcacgtaagagcgagcggagttcgatccagaagcagacgagaaaggggacagcctctgatgccgagcgcatgcaccgccagcgtagtccgacccagtctcccccagcagacacttcattctcctccaggcgagggcggcagctcccccaggtacccgttaggtccgggtccatcgagcaggaatccggccacaaaaagcttaaatctacaatccaacgcagcaccgaaaccgggatggccgccgagatgcgtaaaatggtaagacagcccagccgggagagtaccgacgggtccataaacagttattccagcgaaggcaacttaattttccccggtgtgaggctgggcgctgactctcagttttccgacttcctcgacgggctgggcccagctcagctggtgggccggcaaaccctggccactcctgccatgggggacatccagataggaatggaggataaaaaaggccaactggaggtggaagtgattcgagcccgaagcctaacccagaagccaggatccaaatccacaccagcgccttatgttaaggtgtatttgttggagaacggcgcctgcattgccaaaaaaaagacccggattgctagaaagacgctcgatcccctgtatcagcagtctctcgttttcgatgaatctcctcagggtaaggttctgcaggtgatagtttggggggattatggccgaatggatcataaatgcttcatgggggttgcccagatcctgctcgaggagctggacctttccagtatggtaatcggttggtataagctcttccccccttcttctctcgtagatcctactctgacccccctgacaagaagggcctcccagtcatcgttggaatcgtctacaggacctccctgcatacgcagttag

SEQ ID NO: 202817 - DNA, 2481 bp, synthetic construct
  misc_feature 1..2481: note = Description of Artificial Sequence: Synthetic coding sequence
  source 1..2481: mol_type = other DNA
atgttcgccggcttcctgcagttcctgctgctgcacaccctgcactcagggactggcgacctcgactactattggcttgacccggctacgtggcattctcgggaaacctccccaatatcttctcaccctgttacctggcaacccagcaaggaaggagaccgactgattgggagagtcattcttaacaaaaggacgactatgcccaaagatagcggagccctgctgggtctgaaagtcgtgggcgggaaaatgaccgacctggggcggctgggcgcatttatcaccaaagtgaagaagggcagcttggcagacgtggtcgggcacctcagagctggggacgaggtcctagaatggaatggcaagccactgccaggagcgactaatgaagaggtgtataacataattctggagtccaagagcgaaccccaggttgaaattattgtttcgcgccccattggagacattcctagaatccccgagagcagccacccacccctggagtcaagctcatctagttttgagtctcaaaagatggaacggccttccatttccgtgatctccccaacctcaccaggggcccttaaagacgctccacaagtgttgcccggtcaactgtcggtcaagttatggtacgataaagtggggcatcagctaatcgttaacgttctgcaggccactgatctaccagctcgggttgacggccggccaaggaatccttatgtgaaaatgtactttctgcccgaccggtcagacaagagcaagcgaagaactaagactgtgaagaagattctggaacctaagtggaaccagacgttcgtttacagtcatgttcaccgcagggactttcgcgagcgaatgctcgaaattacagtgtgggaccaacctcgagttcaggaggaggagtccgaattcctgggggagattctcatcgaactagagacagcacttctggacgacgagccacactggtacaagctgcaaacccatgacgagagcagcctgccactgcctcagccgtcaccattcatgcctaggagacacatccatggggaaagctcctcaaaaaagctccaaaggtcccagcgcattagcgacagcgacatttcagattacgaagtggacgacggcatcggggtggtcccgccggtcgggtatcgatcctctgcacgagaaagcaaatctacaacactcacggtgcccgagcagcagagaactactcaccaccgatccaggagtgtgtccccgcaccgcggtaacgatcaggggaaaccacgtagtaggctgcccaatgttccactgcagcgcagcttggacgagatccacccaacccggagatcaaggagccctactaggcatcacgacgccagcagatcccccgtggatcaccgcaccagagatgtggactcgcaatacctgtctgagcaggattccgagctgctaatgcttccgcgggccaaaaggggccggtccgccgagtgcttgcataccaccagtgagcttcagccatttctggatagagcaaggtccgcctccacgaactgcttgagacccgacaccagcttacactcgcctgaaagggagagacactcaaggaagtcggagagatcttctattcagaagcagacccggaaaggtacagcttcagatgccgagaggatgcataggcagcggtcgccaacacagtcgcctccagccgacacaagcttcagctcaaggcgggggaggcagctgccccaggtgcctgttcgatctggctcaattgagcaggagtccggtcacaaaaaactgaaaagcaccatccagcgctctaccgagacgggcatggccgccgaaatgcgcaaaatggttcgacagccttcccgagaatccactgatggatcaattaattcttactcaagcgaaggcaacctcatcttcccaggggtgaggctgggcgccgattcccagtttagcgatttcctcgatggcctaggccccgctcagctggtgggccgccagaccctagctaccccagcaatgggcgacattcagattggcatggaagataagaagggccagttagaagttgaggtcatccgtgccagaagcctcacacagaaacccggcagtaagtccactcccgcgccgtatgtgaaagtgtaccttctagaaaacggtgcatgtatagctaagaaaaaaaccaggatagcgcgcaaaactttggatcctctgtaccagcaaagcctggttttcgatgagtccccacagggcaaggtgctacaggtgattgtttggggagactacggcagaatggatcataagtgcttcatgggagtcgcgcagatcttacttgaggagctcgatctcagctcaatggtgataggatggtataaacttttccccccgagcagtctggtcgaccctacactgacgccacttacccggcgcgcatcccaaagcagcctcgagtcatccaccggtccgccatgtatccggagctag

SEQ ID NO: 202818 - DNA, 2454 bp, synthetic construct
  misc_feature 1..2454: note = Description of Artificial Sequence: Synthetic coding sequence
  source 1..2454: mol_type = other DNA
atgtgcgcccccggcatccacgtgagcagcgagggctgggaggaggtacgttcagtggactctgaagaggggacaattgaagcgaggagagcagtggcaggagaccttgactattactggctggatcccgcaacctggcatagccgagagacaagccccatctcaagtcaccccgtcacatggcagccttctaaggagggagacagactcatcggcagagtgattctaaacaagaggacaacaatgcccaaagattccggagctctgctgggtctaaaggtggtgggcggcaagatgacggacctaggtaggctgggagctttcatcaccaaagtcaagaagggctccctggccgacgtggtgggtcacttaagggcaggagatgaggtccttgaatggaacggcaagcccttgccaggcgcaacaaacgaggaagtgtacaatattattctggagagcaagtctgagcctcaggtcgaaataatcgtatctaggccaatcggtgacattcccagaattccggaatcatcccacccacctctcgaaagctcatcgtcgtccttcgaaagtcagaagatggaacggccttcaatatccgttatcagccctacttctccaggagccctgaaggatgccccccaagtgcttcctggccagctgagtgtcaaactttggtacgataaagttggccaccagttgatcgtaaatgtgctacaggctaccgacctgcccgctagggtagacggccgtcctaggaacccctacgttaaaatgtatttcttaccagaccgatccgataaaagcaagaggagaacaaaaactgtgaaaaaaatcctcgagcccaagtggaaccagacatttgtttattctcacgtgcaccgtagggactttcgggagagaatgctggagataaccgtgtgggaccagcccagggtgcaggaggaagagtctgaattcctgggtgagattctgatcgagttagaaacggcgctgctcgacgacgagccacattggtataaattgcaaacccacgacgaatcatcacttccacttccacagcccagccccttcatgccccgacgtcacatccatggagagagcagctccaaaaagttgcagaggtctcagagaattagcgatagcgacatctctgactacgaggttgatgacggcatcggcgtggtcccaccggtgggataccggtcctcagcacgtgagtccaaatcaactacccttacagttccggaacagcagcgtacgactcatcacaggagccgttcagtatctccacatcggggaaacgatcagggaaagccaaggagcaggctgcctaacgtgccccttcagcgctctctggacgaaatacatcccactcggagaagccggtcccctacacggcatcatgacgcctcacgcagcccagtcgaccatcggacacgcgatgtcgactctcaatacctatctgaacaggattctgaattgctgatgctgccccgggctaagcgcgggagatccgcagagtgtttacacactacctcagagcttcagccattccttgaccgtgcgcgaagtgcgagcacaaactgtttacgccccgatacttcactacattctcccgaaagggaacgtatgcatcgtcagcgctcgccaacacagtccccaccagcagacacttccttcagcagcaggagggggcgtcaactccctcaggtgcctgtgcgctctggctcaatagagcaggagtccgggcataaaaagttgaaaagtactattcagaggtctacggagaccgggatggccgccgagatgagaaagatggttaggcaaccctcaagggaaagtactgatggctctatcaacagttattccagcgaagggaatctcatcttcccaggagtgcggctaggcgcggattcccagttttcagacttcctggatggactgggaccagctcagttggttggtagacagactcttgcaacgcctgcaatgggagacattcagatcggaatggaggataagaaaggccaactcgaggtggaagttattagggctagaagcctgactcaaaagcctggatcaaaatctacacccgctccctatgtgaaggtctatcttttggaaaatggagcctgcatagccaagaaaaagaccaggatagcacgtaaaactttagaccccttgtatcaacagtccctggtgttcgatgagagcccccaggggaaagttctgcaggtgatcgtgtggggggattatgggagaatggaccacaaatgcttcatgggcgtggctcagattctgctggaggaactggatttgtcttcgatggtaattgggtggtacaaattatttcccccctcctcactggtggatcctaccctgacccccctcaccagacgagcctcccagagctcactggagtcttccaccgggccaccatgcatccggagctag

SEQ ID NO: 202819 - DNA, 3567 bp, synthetic construct
  misc_feature 1..3567: note = Description of Artificial Sequence: Synthetic coding sequence
  source 1..3567: mol_type = other DNA
atgcagttcgagaccctgcggcaggtgtgcaacagcgtgctgagccacttccacggcgtattctcatccccccccaacattctgcaaaacgaactgttcgggcaaaccctcaacaacgctcggaaacgctcaccgtccgtctcacgcgaccagaaccgcagatatgaccagagggaagagagagaggagtatagtcagtatgccacaagcgacaccgccatgcccagaagtccatccgattacgccgatcgcagaagccagcacgagccccagttttatgaggactctgatcacctcagctatcgtgatagcaaccgcagaagccatagacactctaaagagtatattgtcgacgatgaagacgtggagtctcgcgatgagtatgagcgccaacgcagggaagaggaataccagtcgcgataccgtagcgacccaaatcttgccagatacccggttaaaccacaaccatacgaagagcaaatgcgcatccacgccgaagtttcacgggcccgacacgagaggcgccacagcgacgtgtcactggcgaacgcggatttggaagactcccggatatccatgctgaggatggacaggcccagcaggcagcgaagtatcagtgagaggcgggccgccatggaaaaccaacgatcttactccatggaacgcacgcgggaggcacaggggccctcatcttacgctcagcgaacaaccaatcactcacctcccaccccaagacgaagcccactgcccatcgatagacctgaccttagacgtacagattcattgcggaagcagcaccacttggaccccagctcagcagtgagaaagaccaagcgggagaagatggagacgatgctgcgcaacgattctctgtccagcgaccagagtgagagcgtgcggcctcccccgccgaaaccacacaaatcgaaaaagggcggcaaaatgcgccaaatctctctctcctcctccgaggaggagttggcttccacccctgagtatacgagctgcgatgatgtcgagattgagtccgaatctgtgagtgaaaagggggatagccagaagggtaaaaggaagaccagcgagcaggccgtgttatcagacagcaacaccaggtctgaacgccagaaagagatgatgtatttcggcggccatagtctggaggaagacctggagtggtccgagccgcagattaaagactctggcgtcgatacatgctccagcacaacactgaatgaggagcactcccactctgataagcacccggtgacatggcagcccagtaaggacggcgaccggttgataggcaggatactgttaaataagagactcaaagatggttccgtgccccgggattctggcgccatgcttgggcttaaggtggtaggtggcaaaatgaccgagtctggaaggctgtgcgccttcatcactaaggtcaagaaggggtccctagctgacacggtgggccatttgaggcccggcgatgaagtgctggaatggaacgggcggctcctgcagggagcaacctttgaagaggtctacaacattatacttgagtccaaaccagaaccccaggtcgagctggtcgttagtcgcccaatcggtgacataccaaggatcccagactccacgcacgcacagctcgagtcttcttcctccagcttcgaatcccagaaaatggaccgcccatcaataagcgtgacctctccgatgtcccccgggatgctgcgtgacgtcccccagttcctgagcggacagctcagcatcaagctatggtttgacaaagtgggccatcaactcatcgttaccatactgggcgcgaaggacttgccgtcacgggaggatggccgacccagaaatccttatgttaaaatctacttcttaccggaccgcagcgacaaaaataaaaggagaaccaaaaccgtcaagaaaactttggagcctaagtggaatcagacctttatctatagtcctgttcaccggagagagttccgagagagaatgctcgaaatcacactgtgggaccaagcgagagtgcgtgaagaggaatctgaattcctgggcgaaattttgattgaactagagacggccctcctggatgacgagccgcactggtataaactgcagactcacgatgtgagttccctaccattacctcacccctccccgtacatgccacgtagacagctacacggggagtcccctactagaagattacagaggtcaaaacgcatctccgactctgaagtatctgactatgactgcgacgatgggattggagtagtgagtgactatagacacgatggccgcgatctacaatccagcactctgagcgtcccagagcaggtaatgtcctccaaccattgtagcccttcgggtagtccacatcgagtggatgtcatagggagaacacgcagttggtcccctagtgtgcctcctccgcaatcccgcaatgtcgagcagggcctgcgtgggacgaggacaatgaccggacattataatacaattagccgaatggaccggcatcgcgttatggatgatcattatagccccgaccgtgatagggattgtgaggccgctgacagacaaccctatcacaggtcaagatctacggagcaaaggccactcctggagaggaccacaacacggagtcgttccacagaacggcccgacaccaatctaatgcggtcaatgccttccctaatgaccggtcggtctgcgccaccctctcctgctctgtcccggtctcatcctcgtacaggatccgtgcagactagccctagcagcactccagtagccgggagacgcgggcggcagcttcctcagttaccacctaagggtaccctcgaccgtaaagccggcggaaagaagctgcgaagcacggtgcagagatccactgaaactggtttggccgttgaaatgcggaactggatgaccagacaagcttctcgcgagagcaccgacgggagtatgaatagctactccagcgaaggtaatctgatttttcctggggtgcggctcgcttcagactcgcaattctcagacttcttggacggactcggccccgctcagttggtggggcgccagacactggctacgcctgccatgggcgacatacaggtaggaatgatggacaagaagggacagctggaagttgaaattattcgggcccgtggactggtggttaaacctggatcaaagacactccctgccccatacgttaaagtgtacttgctagacaacggcgtatgcatcgctaagaagaagaccaaggtagcacggaagactctggaacccctctatcaacaattgctgagttttgaagagtcaccgcagggtaaagtgctgcagattatagtgtggggagattatggaaggatggaccataagtcgttcatgggcgtagcccagattctgcttgatgagttggagctgagcaatatggtcatcggatggtttaagctgtttcccccatccagtttggtggacccgacactggctcctctgacccggcgcgcttcccaatcgtctctggaaagctccaccggtccaagctattcccggtcatag

SEQ ID NO: 202820 - DNA, 4161 bp, synthetic construct
  misc_feature 1..4161: note = Description of Artificial Sequence: Synthetic coding sequence
  source 1..4161: mol_type = other DNA
atgagcgcccccgtgggcccccggggccggctggcccccatccccgctgcctcacagccccccttacagcctgagatgccagatctctcgcacctgaccgaagaagagaggaagataattctcgccgtgatggacaggcaaaagaaagaggttaaggaagagcacaaaccccaactcacacagtggttcccgttttctggaattacagagttggttaataacgttctccagccacagcaaaaacagcagaatgagaaggaaccgcagacgaagctgcatcagcagttcgaaatgtacaaggaacaggtcaagaagatgggagaagagagtcaacaacagcaggaacaaaagggcgatgccccaacatgtggaatatgccataagactaaatttgctgatggatgcggacacaattgcagctactgccagacaaagttctgtgcccggtgtggtggcagggtgagcctcaggagcaacaaggtcatgtgggtctgcaacttgtgtcggaagcagcaggagatcctgactaagagtggtgcatggttttataatagcggctccaatacgccccagcaacctgatcaaaaagttctgcgcggcctgcgaaacgaggaggcgccgcaagagaagaaaccaaaactgcatgaacagacacagtttcagggaccttccggggacttatcggtgcctgccgttgaaaaaagccgttcacatggactgacccggcaacactccattaaaaatgggtcgggcgttaaacatcacattgcctcggacattgcctcggatcggaagcgttctccatctgtcagcagggaccagaataggcgctatgaccagagggaggaacgggaggaatattctcagtacgccacctctgatacagccatgccaagaagtccatcagactacgcagatcgtcggagtcaacacgaaccacagttttacgaagatagcgatcacctcagctaccgcgattctaacagacggtcacataggcacagtaaagagtacatcgtcgatgatgaggatgtggagtctcgggacgaatacgaaagacagcggcgcgaagaggagtatcagtctcgttacaggagcgatcctaatttggcccggtaccccgttaaaccccagccatatgaggaacaaatgcggattcacgcggaggtgtctagggctcggcacgagcgtcgccactcagatgtctccttggcaaatgcggacctggaggattcaaggataagtatgctcaggatggatcggccttcaagacagcgatccattagcgagaggagagcagcaatggaaaaccagcgttcttactccatggagcggacccgggaagctcagggccccagctcctacgcgcagagaactacaaaccattcacctcccactcctaggaggtctccactgcccatcgaccgcccagaccttaggagaaccgatagcctgcgcaaacaacaccacttggatccctctagcgccgtgcgtaaaaccaagagggaaaagatggagacaatgttacggaatgacagcctaagctcagatcaaagcgaaagcgtccgcccgccgccaccaaagcctcacaagagtaagaaaggaggcaaaatgcgccagatctccctgtctagctccgaagaggaactagcttctactcctgagtacacatcctgtgacgatgtcgagattgagagcgagtcagtgagcgagaagggcgatatggattataactggttggaccacacaagctggcacagctccgaggccagcccaatgtctctccaccctgtcacatggcagcccagtaaggacggagatcgactgatcggcagaatcctgctcaataaacgcctcaaggacgggagcgtgccccgggactctggagcaatgctcggacttaaagtggtgggcggaaagatgacggagagtgggcgcctgtgtgccttcataacaaaggtcaagaaaggttcgctcgccgacaccgtaggacatcttagacccggtgacgaggtactggagtggaacgggcggctcctgcagggtgccactttcgaagaggtttacaatattatcctggaatctaagcctgagccccaggtcgagctggtagtttcccggccaatcggtgacatcccccggatccccgactctacccacgcacaactggaaagttcttcctcgagcttcgagtcacagaaaatggacagaccgagtatctctgtcacatcacccatgtctcccggaatgctgcgcgatgttccacaattcctgtccggccaactgtctatcaagctttggttcgataaggtggggcatcagctgattgttactatactgggagctaaggatctgccttctcgggaggatggacgccccagaaatccttatgtcaagatttacttcctgcctgaccggagcgataagaacaagcgtaggacaaagactgtgaaaaaaactctcgagccgaaatggaaccagacttttatctattctccagtgcatagaagggagttccgagagagaatgctggaaataactctttgggaccaggctcgggtgcgcgaagaggagtcggaattcttgggagaaatcctgattgagttggaaactgccctactagatgacgaacctcactggtacaagctgcagacccacgacgtgagttcattgcctttaccccacccgtcaccctatatgccacgcaggcagcttcatggagagagccccacacggagactgcaacgtagtaaaagaataagcgattccgaggttagcgactatgactgcgacgacgggattggcgttgtctctgattacaggcacgacggcagggatctgcaatcatctacgctttccgtgcctgaacaggtgatgtctagcaatcattgctctcctagcggttccccccacagagtcgatgtcattggtcggacccggtcttggagcccgtcagtcccacctccgcagtctcgcaacgttgagcagggcctgcgaggcactcgcactatgaccggacactataacacgatatctcgaatggatcggcatcgtgtcatggacgatcactactcgcccgacagagacagccactttcttacccttccccggagccgctattcacagaccatcgaccaccaccaccgtgatggcagagattgcgaagcagccgataggcaaccctaccatcgtagccgctctactgaacaacgccctctgttagagcgtactaccacaaggtccagaagtacagagaggcccgacacaaatctaatgcggtctatgccaagcctgatgactggccggtccgccccgccatcgcccgctttatcaaggagccacccgagaacagggtcagtacaaacatcaccctcctcaacccccgttgcaggccggcgcgggaggcagctcccccaactccctccaaagggcacactggacaggaaggctggtggtaagaaacttcgtagtacagtacagcggagcacagaaacgggacttgccgtagagatgcggaactggatgactaggcaggcctcccgagagtcaacagacggttccatgaacagctacagtagcgagggcaacctcattttcccgggggttcggctggccagtgattcacaattctccgactttttggacgggctcgggccggctcagcttgtaggtcgccagacactcgctacaccagccatgggcgacatacaagtggggatgatggacaagaaaggtcagctggaagtggaaattatccgggcacgtgggttagtggttaaaccggggtctaagactctgcccgcgccttacgttaaggtctatttgcttgataacggagtgtgcattgccaaaaaaaaaacaaaggttgccaggaagactttagagccactttatcagcagcttctcagcttcgaggaaagccctcagggcaaagtccttcaaattatcgtctggggcgactacgggaggatggaccacaaatccttcatgggcgtggcgcagattctcctcgatgaactggagttatctaatatggttataggttggttcaagttgtttcctccatcttctctggtggaccccacccttgctcctttaacccgcagagcatcccaatcttcactggagtcatcaacgggcccttcgtacagcaggtcctag

SEQ ID NO: 202821 - DNA, 858 bp, synthetic construct
  misc_feature 1..858: note = Description of Artificial Sequence: Synthetic coding sequence
  source 1..858: mol_type = other DNA
atgggccggcagggcctgggcggcgccagcgccgccggccggagcatgcaaaggtcccagtcaagatcttccctgagtgcttccttcgaggccttggcaggctattttccctgtatgaactcattagaagaagaagaaggtgaggcaggtgggaagaagttaaggtcaaccgttcaacgctccaccgagacaggtctggctgttgagatgcggaactggatgacccggcaggccagcagagagtctacagatggctctatgaacagttacagtagcgaaggtaacctgattttccctggcgtgcgacttgcgtcagattcccagtttagtgacttcctggatggactggggcccgcacagctagtgggccgccagactttggccacgcccgccatgggagatatacaagtgggaatgatggataagaaaggccaactcgaggtggagatcatacgcgctaggggactcgtggtgaaacctggcagtaagaccttacccgccccttatgtaaaggtctatttactggataatggagtttgcatagccaagaagaagacaaaagtagcgcgcaaaacactggagccactataccagcaactcctgtcctttgaagagagccctcagggcaaagtacttcagatcatagtgtggggagactacggtcgaatggatcataagtccttcatgggcgtggcccagatccttcttgacgagctagagctctcaaacatggttataggttggttcaagctgttccctcccagtagcctggtggacccaacgctcgcccccctgactagacgcgcctcgcagagctcactggagagttctactggtcctagctacagtcgcagctag

SEQ ID NO: 202822 - DNA, 384 bp, synthetic construct
  misc_feature 1..384: note = Description of Artificial Sequence: Synthetic coding sequence
  source 1..384: mol_type = other DNA
atgaccgagagcggccggctgtgcgccttcatcaccaaggtgaagaagggctcgctcgcagacaccgttgggcacctgagaccaggcgacgaagttctcgagtggaacggacgcctcctgcagggggcaaccttcgaagaagtgtacaacatcatactggagagcaagccagaaccccaggtggaactggtggtgtcaaggccgattggagatatcccgcgcatccctgatagcactcacgctcaactcgagtcttcccttccaggcctagcttggtggctgacacgggtcatccctgctctgtgggaagcagaggccggcggcagtagagggcaagaaattgaaactatcctggctaatacagtaaaaccacggctatattag

SEQ ID NO: 202823 - DNA, 4236 bp, synthetic construct
  misc_feature 1..4236: note = Description of Artificial Sequence: Synthetic coding sequence
  source 1..4236: mol_type = other DNA
atgagcgcccccgtgggcccccggggccggctggcccccatccccgcagctagccagcctcccttacaacctgaaatgcccgacctgagccacctgactgaagaggaacggaaaatcatccttgctgtaatggaccggcagaagaaagaggtaaaagaggagcataaaccacagctcacacaatggttcccatttagtggcatcactgagctagtgaacaacgtgcttcagccccagcagaaacagcagaatgaaaaggaacctcagacaaaactccaccaacagttcgagatgtataaagagcaggtcaagaagatgggcgaggagtctcagcagcagcaggaacaaaagggcgacgctccgacttgcggaatctgtcacaaaacgaaatttgccgatgggtgtggccacaactgctcctactgtcaaaccaaattctgcgctcgatgtgggggaagagtttctctgagatcaaataaggtaatgtgggtgtgcaacctgtgtaggaaacagcaggagatactgactaaaagcggcgcgtggttctacaacagcggcagcaatacaccgcaacagcctgatcagaaggttttgcggggcctccgaaatgaagaagcacctcaggagaaaaagcctaaactgcatgagcagacgcagtttcagggcccgtcgggagacttgtccgtgccagctgttgagaaatcgcggtcacacggcctgacacgacagcattccatcaagaacggctctggggtcaagcatcatattgcgagcgatatcgcaagtgatagaaaacggtccccctcagtctctagagaccagaatcggagatacgatcagagagaggagcgagaggaatactcgcagtatgcaacatcggatacggctatgcccaggtctccaagtgattacgccgataggagaagtcaacacgaaccccaattctacgaggactccgaccacctgtcataccgggattcaaatcggcgctcacaccgccactcaaaggagtatattgtcgatgatgaggacgtggaatcccgggacgaatacgaacgccagagacgtgaggaggaataccaatcacgttatcgtagtgatcctaatctggcccgctatccagtgaaaccgcagccatacgaagagcagatgcggatccatgctgaggtgtcgcgagctcgccacgaaaggcgtcactcagacgttagtctggccaatgctgatctggaagactccagaatatccatgctacgaatggaccgtccttccagacaaaggagcattagcgaacgcagggcagcgatggagaaccagaggagctattccatggagaggacgcgagaggcccagggacctagcagctacgcgcagagaaccactaaccactctccgcctactccacggcgctctcctttgccaattgatcgtccggacttgcgaaggacggacagcctgaggaaacagcaccatctggaccccagcagtgccgtccggaagacaaagcgagagaaaatggagaccatgctgaggaatgattccctatcaagcgaccagtcggagagtgtccgccctccccccccaaagccgcacaagtccaaaaaaggtggcaaaatgcgtcagatctcactgagcagctccgaggaggagctggccagcacccctgagtacaccagctgcgatgatgtggaaatcgaatcagaaagcgtgtcagaaaagggtgactcccagaaggggaagcggaaaacatcagaacaagctgttctgagcgacagtaacactaggtcagaaaggcagaaggagatgatgtactttgggggtcacagtctcgaggaagacttagagtggtccgaaccccaaattaaagactccggggtggatacttgcagcagcaccacccttaatgaggaacattcacatagcgacaagcacccagtgacttggcagccatccaaggacggagacagacttattggtcggatcctgctcaacaagcgcctaaaggatggctctgttccaagggattctggggcaatgctcggactcaaagtagttggcggcaagatgaccgagagcggtcgcttatgtgcttttattacaaaagtgaaaaaaggttcattggctgatacagttggacacctcaggcccggcgacgaagttctggagtggaatgggaggctcttgcaaggagctacattcgaggaggtgtataacattatcttagagtcgaagccagaaccacaagttgaacttgtggtgtcccgtcctataggggacattccccgtatacctgattcaacacatgctcaactagagtcttcctccagttccttcgaaagtcagaagatggaccggccatcaatctccgtaaccagcccaatgagtccaggaatgctccgggatgtgcctcagtttttatctggacaactgagtataaagctatggttcgataaggtggggcaccagctgatagtgaccatcctcggcgccaaggatctgcctagtagggaggacggcagaccacggaacccttacgtgaagatttattttttgccagataggtccgataaaaataaaagaaggaccaagaccgtgaaaaagacgttggaacccaaatggaatcagacattcatatactcccccgtacaccggagagagtttagagagcggatgcttgaaatcaccttgtgggatcaagcaagagttcgggaggaggaaagtgagttcttaggggaaattctcatagagctggaaacggccttactcgatgatgagccccattggtataaactgcagacgcacgatgtttcgtctctgcccctcccccatcccagcccttacatgccgcgccgccagctccatggggagtccccgaccagaagattacagaggtctaagcgtatttccgactccgaggtttcggattatgattgtgatgatggaattggagtggtgtccgattaccgacatgacggacgagatctgcagtccagcacactgagtgtgccagaacaagtgatgagctcgaatcactgctccccatctggcagcccacaccgagtggacgtgataggacgcacccgctcgtggtccccatcagtgccccctccccagtcccgcaatgttgagcagggtctgagggggacacgaaccatgaccggtcattacaatacaatctctaggatggaccgccacagagtgatggatgaccattattcccccgatagggacagagactgcgaggccgccgaccggcagccttaccaccgcagcaggagtaccgagcagcgacctctgctagagcggactacaactcgatcacgctccaccgaacggccagataccaacctaatgcgcagtatgccatctctcatgacaggacgtagtgcaccgccgtccccagctctctccagatctcatccccggaccgggtctgtgcagacttccccaagctccacaccggtagctggccgccgaggacgacaattgcctcagctcccacccaaaggaacattagatagaaaggccggcggaaaaaagttgcggtccactgttcaacgatctaccgaaaccggcctggccgtcgaaatgcgtaattggatgacgcgtcaagcctcaagggagtcaactgacgggtcaatgaactcctactcttctgaaggcaatttaattttcccaggagtgcgtctggccagcgattcacagttttccgacttcctggacggcctgggccccgcccaactcgtggggcggcaaactttagccacacctgctatgggcgacatccaggtaggtatgatggataaaaaggggcaattagaggtggaaatcatccgcgccaggggactggtggtgaagccaggatctaaaaccttgcccgccccctacgtgaaggtgtatctgctagacaacggagtgtgcatagcaaaaaagaagaccaaggtcgccaggaagacactcgagccgttataccagcaattactgagtttcgaagagtcccctcaaggaaaagtgcttcaaatcatcgtgtggggagattacgggagaatggaccacaagtcatttatgggtgtggcgcaaattctgctggacgagctcgagctttccaacatggtcattgggtggtttaagctgttccctccatcctctcttgttgacccaacattagcgcctctcactaggagagcgagtcagagttccctagagagcagtaccggtccatcctatagtcgttcatag

SEQ ID NO: 202824 - DNA, 4050 bp, synthetic construct
  misc_feature 1..4050: note = Description of Artificial Sequence: Synthetic coding sequence
  source 1..4050: mol_type = other DNA
atgagcgcccccgtgggcccccggggccggctggcccccatccccgcagcctctcaacccccactccagcctgagatgcctgatctttcccacttgacagaggaggagcgtaaaatcattcttgccgtgatggaccggcagaaaaaagaggaagaaaaagagcagtcagtgctgaaaaagctgcaccaacagttcgaaatgtacaaggaacaggtgaaaaagatgggcgaggagagccaacaacaacaagagcagaaaggagacgccccaacatgcggtatctgccacaaaaccaagttcgcagatgggtgtggccataactgttcttactgccagaccaagttctgcgcaagatgcggagggcgcgtgtccctcaggagcaacaaagtcatgtgggtgtgcaacctatgtcggaaacagcaggagattctgaccaaatcaggtgcatggttctacaactccgggagtaatactccccagcagcccgatcagaaggttctgcgaggactgagaaatgaggaggccccccaggagaagaaaccgaagctccatgaacagacccagtttcaggggccgagcggcgatctcagcgttcctgcagtggaaaagtcccgctcccacgggctaaccagacagcacagtataaagaacggctccggcgtgaagcaccatattgcctctgacatagcaagcgatagaaagagatctccgtccgttagtagggaccagaatcgccgctacgaccagcgagaagaacgggaagagtactctcagtacgccactagcgacaccgcaatgccccgctcccctagtgactacgctgatagacgaagccagcatgaaccccaattttacgaggacagtgatcacctcagttaccgggactctaatcgtagaagtcatagacactcaaaggagtatatcgtcgatgatgaggatgtggagtcaagagacgaatacgagagacagcgccgcgaagaggaatatcagtctaggtaccgcagcgatcccaacctagcacgatatccggtaaaacctcagccttacgaggaacagatgagaatccatgcagaggtgtctcgggctaggcacgagcggcgtcattcggacgtctccctggctaatgcggatcttgaggatagcagaattagtatgctgagaatggaccggccgtccagacagcggtctatcagcgaaagacgggctgctatggaaaatcagcggtcctatagcatggagaggacacgggaagcccagggaccctctagctatgcccaaaggaccaccaatcactcaccaccgactcccagaagatcccctctacccatagaccggcctgatctgaggagaaccgactcccttcggaagcagcaccatctggatccgagcagcgcagtgaggaagacaaaaagagaaaagatggagactatgctgcgaaatgactctttgagctcagatcaaagcgagagtgtgcggcccccgccccctaaaccccacaaatctaagaaaggaggaaagatgagacaaatctctctctccagtagcgaggaggaactggcgagtacaccggaatatacgtcttgcgacgatgtggaaatagagtccgaatccgtgtccgagaaaggcgatatggactacaactggttggatcacacaagctggcactctagcgaagcttcgcccatgagtctacatcccgtcacttggcagccctcaaaggacggggaccggctcattgggcgaattttgctcaataaacgtctgaaagacgggagcgtaccacgggacagcggagcgatgttgggcttgaaggttgtgggagggaagatgactgaatccggcagactatgcgcatttatcacaaaggtgaagaaggggagccttgctgatacagtaggccaccttaggcccggagatgaagtacttgaatggaacgggagattgctgcagggtgccacgttcgaagaggtgtacaatattattcttgagtcgaagcctgaaccccaggtagaattggtcgtatcccggccaataggggatatccctcggataccggattccacacatgcgcaactggagtcctcgtcatcctctttcgagagccagaagatggacagaccctctatatctgtgacttcacctatgtccccaggaatgctccgggacgtaccccaattcctgagcggacagctgagttcacagtcgctgtctagaagaaccacgcctttcgtgccacgggtgcaaatcaaactgtggttcgataaggtgggacatcagcttattgttacaattttgggtgcaaaggaccttccttcacgggaggacggacgaccccgcaacccctatgtcaagatatacttcctccctgatcgctcagataagaataagaggcgcacgaaaactgtgaagaaaacgctggagcccaagtggaaccaaacattcatatatagtcccgttcatcgtcgagagtttcgggaaagaatgctcgagattacgttgtgggatcaggcacgtgtgcgtgaggaggagagtgaattcctgggagaaatactgattgagcttgaaactgcactgctggacgacgagccacactggtacaagcttcaaacccatgacgtgagttctcttcctttgccccatcccagtccgtacatgccgaggagacagctgcacggggagagccccacccgaaggttgcagagatccaaacggatatctgattcggaggtttctgactacgattgcgacgatggtatcggtgtggtgtcagattaccggcacgacggacgtgacctgcagtccagtaccctgtcagtgcctgagcaggttatgtctagcaatcactgcagcccatcggggagcccccatcgggtagatgtgatcggccgtaccaggtcttggtcaccaagtgttcctcctccacagtctcgaaacgtggagcagggtctgaggggcacaaggacgatgacaggtcactacaataccatttctcggatggatcgacacagagtgatggacgatcactacagtcccgacagggaccgggattgtgaggccgctgaccgtcagccctaccaccggagtagaagtacagagcagaggccgctgctggagcggacaacgacccgaagtagatcaacagagcgacccgacaccaatctcatgcgctccatgccatccctgatgacagggcgatccgctcctccttcccctgccctctccagaagccacccccgtaccggcagtgtccaaacctctccatcttccacccctgtggcgggccgaagaggcagacagctcccccagctgccccccaaaggaaccctagatcggaaggcaggcgggaaaaagctgcgctctacagtgcagcgtagtactgagacaggcctcgctgtggagatgcgtaattggatgactcgccaggcctcccgggaatcaacagatggcagtatgaactcctattcttctgagggtaacctcatctttcctggcgtgcgtctcgctagtgacagccaattttccgactttcttgacggactgggacccgcccagctcgtagggcgccagacactggcaacgcctgctatgggagatatacaggtgggaatgatggataagaaggggcaattagaagtcgagatcatacgcgctcgcggattagtagttaagccaggctccaagactctacctgctccatatgtgaaagtgtatctcctcgataatggcgtgtgtatagctaaaaagaaaacgaaggtcgcaaggaaaaccctcgagcccttgtatcagcagcttcttagtttcgaggagagtccgcaggggaaggtgctgcagatcattgtgtggggcgattatggccgcatggatcataaatcattcatgggtgtcgcacaaatccttctggacgagctagaactctcaaacatggtcatcggatggtttaagctgtttcccccatcttcattagtcgaccccaccctggcaccactgacaagacgcgcctcacaaagcagccttgagtctagcaccggcccttcatatagccggagttag

SEQ ID NO: 202825 - DNA, 3492 bp, synthetic construct
  misc_feature 1..3492: note = Description of Artificial Sequence: Synthetic coding sequence
  source 1..3492: mol_type = other DNA
atgcagttcgagaccctgcggcaggtgtgcaacagcgtgctgagccactttcacggtgtgttttcttcacctcccaatatccttcagaatgaattgtttggacagaccttgaataatgcccggaaacggtcaccctcagtgagccgagaccagaacagaagatatgaccagagagaggaacgggaggaatactcccagtacgccacgagcgatacggccatgcctcgcagccctagcgattacgccgaccgacgctcgcagcatgaacctcagttctatgaggacagcgatcacctgtcatatcgtgactccaacaggaggagccacagacactccaaggagtacattgtcgatgacgaagatgtagagtcgcgggatgagtacgagagacagagacgcgaggaggaataccagagtaggtatagaagcgaccctaacctcgctaggtaccccgtcaagcctcagccttatgaagagcagatgagaatccatgctgaggtgagtcgcgcgcgtcatgagcggcggcactccgacgtctccctggccaacgcagacctggaggattcacgcataagcatgttaaggatggataggccttcacggcaacgcagtatttccgagcggcgggcagctatggagaaccaacgctcatacagtatggaacgaactcgtgaggcacagggaccttcttcttatgcccaacggaccacgaaccattcccctccaactccgcgccggagtcctttacctattgaccggcccgatttgaggagaacagattccctccgaaagcaacaccatttagatccctcatccgccgtgcggaaaaccaaacgggaaaaaatggagacaatgctgcgcaacgacagcctatcctccgatcagagcgagtccgtgcgacctccacctcccaaaccccataaatccaagaaagggggaaagatgcggcaaataagcctgagctctagcgaagaagaactagccagtacccctgaatacacaagctgtgatgacgtggaaatcgagtcggaaagcgtctcggagaaaggggacatggattataattggttagaccacactagttggcatagcagtgaggcatctccaatgtctctgcatccagtgacctggcagccaagtaaagatggcgaccgtttgatcgggcgcattctgctgaacaagcgtctgaaggacgggtcggtaccccgggatagcggggccatgctgggacttaaggtcgttggcgggaaaatgacggagtcaggccgcctgtgtgctttcatcactaaggtgaagaaaggaagccttgcagacacagtgggccatcttcggcccggtgacgaggtgctcgagtggaacggacgactccttcaaggggccacttttgaagaagtgtacaacattattctggaatccaagcctgagcctcaggtagagctggtggtgtcccgtccgataggagacatacctagaattcccgactctactcacgcacaactcgagtcctcttctagcagcttcgaaagccagaagatggacaggcctagcatcagcgtcacctctcccatgtccccaggaatgttacgagacgtcccccagttcctctcgggccagctgagcataaagctctggtttgacaaagtcggccatcagttgatagttaccatccttggagccaaggacctaccttctagggaagacggccgcccacgaaacccatatgtgaaaatctacttcctgccagaccggtctgataaaaacaagaggagaactaaaacagttaagaagacactggagccaaagtggaaccagactttcatatatagcccagtgcatcggcgcgagttccgggaaagaatgctcgagattacactctgggaccaggcccgagtacgcgaggaagaatcagagttcttaggggagatccttatcgagctcgagacagcccttctcgatgacgagcctcactggtataagctgcagacccacgacgtttcctccctgccactccctcacccctccccttatatgccccgacggcagctccacggggagtcccctacaaggcgcctccagaggtctaagagaatttcagacagcgaagtgagcgattacgactgcgatgacggaattggagtggtgtccgattacagacacgacggtagggatttacagtcgtccacattgtcagtcccagagcaggttatgtcatctaaccactgttcaccatctggatctccgcatcgcgtcgatgtgattggcagaacacgctcttggagccccagtgtacctccgccccagtctagaaatgtggaacaaggcctgcggggcactcgaacaatgacaggccattacaataccatttccagaatggaccgccaccgggtcatggatgatcactattcccccgatagggatagccatttcctgaccctgcccagatctcggtacagtcagacgatcgatcatcaccatcgagacgggagggactgtgaggctgcagacagacaaccctaccaccggtcccgcagtaccgaacagcgtcccctgctcgaaagaaccaccacccgaagtcgaagtactgaacgccctgatacaaaccttatgcgcagcatgccctctcttatgactgggcgcagtgcacctcccagcccagctctcagcaggtcccaccctagaacaggctctgtccaaacatctcccagctcaaccccagttgctggccggcgcgggcgccagcttcctcagctgcctcccaagggaactctggataggaaggccggcggcaagaagttgcgatccacagttcaaaggtctaccgagacaggactggccgtcgaaatgcggaattggatgaccaggcaggcttcgagggagtctacagacggctctatgaattcctacagcagtgaaggcaatctgatcttcccaggcgtgcgactggcctcagactctcagttcagcgactttcttgatggtctgggtccagcccagctggttggccggcagactctggccacacctgcaatgggagacatccaggtgggcatgatggataagaaggggcagctggaagtcgagatcataagagcacgtgggctcgtggtcaaaccaggaagtaaaactttgcccgcaccttacgtgaaagtgtacttgcttgataatggtgtgtgcattgccaagaagaagacgaaggtggcccggaagacacttgaaccactgtatcagcagctgctgagttttgaggagtccccacaggggaaagtcttgcagattatcgtgtggggcgattacggcagaatggaccacaaatccttcatgggcgtggcccagatcttactcgatgagctggagctttctaacatggtcattggttggttcaaactcttcccaccaagtagtttggttgatcccactctcgcacccttgacgagaagagccagccagagctcactggagtcgagcacagggccctcctattcacgtagctag

SEQ ID NO: 202826 - DNA, 927 bp, synthetic construct
  misc_feature 1..927: note = Description of Artificial Sequence: Synthetic coding sequence
  source 1..927: mol_type = other DNA
atgttcaacggcgagcccggccccgccagcagcggcgccagccggaatgtggttagatcctcctcaatctccggcgagatctgtggctcccagcaggctggtggaggggccggaacaaccacagcaaaaaagagacggtcgtctctgggggccaaaatggtggctatcgtggggctgacacagtggtccaaaagcacactgcagctgccccaacctgagggtgctactaaaaagttacgatccaatatccgcagaagcacagaaaccggaattgccgtagagatgcgttctcgcgtgacaaggcaaggctctcgagagagcacagatggttcaaccaattcgaatagcagtgacggtactttcatcttcccgaccacacgtcttggcgcagagagccagttctccgacttcctcgacggtctgggtcctgctcaaatcgtgggtcggcaaacactggccacccctccaatgggagatgtccacattgctatcatggatcgttccggccaactggaagtagaagtcattgaggcacgcggccttacccccaagccagggtcgaagagcctccctgccacttatatcaaagtgtatttgctcgagaatggcgcatgcttagctaaaaaaaagaccaaaatgacaaagaagacgtgtgatccactctaccaacaggctctgctttttgatgaaggaccacaggggaaagtgttgcaagtcattgtctggggggactatggaaggatggatcacaagtgcttcatggggatggctcagattatgcttgatgaactggacctgagtgcggctgtgactggctggtataagctgttccccactagtagtgtggctgactccactttgggaagcctgacgcggagactgtcccaaagcagcctagagagcgcgacaagcccaagctgttcctag

SEQ ID NO: 202827 - DNA, 927 bp, synthetic construct
  misc_feature 1..927: note = Description of Artificial Sequence: Synthetic coding sequence
  source 1..927: mol_type = other DNA
atgttcaacggcgagcccggccccgccagcagcggcgccagccggaatgtggtgcgcagcagcagcatttccggcgaaatctgtggctctcagcaggccggtggcggggctggaaccacgaccgcaaagaaaaggcggagtagcttgggggctaagatggtggctattgttgggctgacacagtggtccaagtccacgctgcagctcccacaacccgagggggccactaagaaactcaggtctaacatccgacgctctaccgagaccggaatagctgtggagatgcggtctcgtgtgaccagacagggctcccgcgaatccaccgatgggagcacaaactcaaactcctccgatggaacatttatatttccaacaacacgcttgggagccgagtctcagttttctgactttttggacggtctcgggcccgctcagattgtgggccgacagaccttggccaccccaccgatgggcgacgtacacatcgccatcatggataggtcagggcagcttgaggtcgaggtgatagaggcgagaggcctgacgccaaagcctggttccaaatccctccccgcaacctacatcaaggtgtatctgctcgagaacggcgcttgtctcgccaaaaagaagaccaagatgaccaaaaagacttgtgatcctctgtaccagcaggcactcctctttgatgaagggcctcagggtaaggtgcttcaggtcatcgtatggggggactacgggcgcatggaccacaaatgtttcatggggatggcgcagattatgttggacgagctagatttgagcgccgctgtaaccgggtggtataagcttttccctaccagctctgtggccgattccacactgggttctctcacccggcgactttctcagagcagcctcgagagtgcaacatccccctcttgtagttag

SEQ ID NO: 202828 - DNA, 810 bp, synthetic construct
  misc_feature 1..810: note = Description of Artificial Sequence: Synthetic coding sequence
  source 1..810: mol_type = other DNA
atggagcggagccagagccggctgagcctgagcgccagcttcgaggcgcttgctatttacttcccgtgcatgaacagcttcgacgacgaagacgccggagacagccgccggttgaagggggcaatccagaggtcaacagagacaggattagcagtagaaatgcccagccgtaccttgagacaggcgagccatgaaagcatcgaagacagtatgaactcatacggatccgagggcaatttaaattatggaggagtgtgtctcgcgtccgacgcccaattttctgattttttgggttcaatgggccccgcacagttcgtcggcagacaaactctggcaaccacaccaatgggagatgtcgaaatcggattgcaggaacgcaatggccagcttgaagtggatatcatccaggccaggggactgactgctaaacccggctctaaaaccttgcccgcagcatacataaaggcctatttactcgagaatggaatctgcatcgctaaaaagaaaactaaggtggcccgtaaatctctggaccctctgtacaatcaggtccttctgtttcccgaaagccctcagggcaaggtactgcaggtaatcgtatggggcaactatggccgaatggagaggaaacagttcatgggggttgcacgggtgctgctggaggagctggacctgaccaccttggctgtgggatggtataagctctttcctacaagctcaatggtcgatcccgccacaggaccactcttgcgtcaggcttcgcaattgtcccttgagagtactgtcgggccctgcggcgagagatcatag

SEQ ID NO: 202829 - DNA, 813 bp, synthetic construct
  misc_feature 1..813: note = Description of Artificial Sequence: Synthetic coding sequence
  source 1..813: mol_type = other DNA
atggagcggagccagagccggctgagcctgagcgccagcttcgaggcgcttgccatttactttccatgcatgaacagctttgacgatgaagatgccgaaggcgattcgaggcggttaaaaggagccattcaacgtagcactgagacgggactcgccgttgaaatgccgagccggacactgaggcaggcctctcacgagtcaatagaggattccatgaattcttacggctcagaaggaaatctaaattacgggggagtctgcctcgcaagcgatgcacaattcagcgacttcctgggttccatgggtccagcacagtttgtcggacgtcagaccctggctactactccgatgggggacgttgagatcggccttcaagagcgtaacgggcaattggaggtcgacatcatccaggcccgcgggctcactgctaagcctggctccaagactctgcctgctgcatatattaaagcgtatctgctggaaaatgggatatgcattgccaaaaaaaaaaccaaggtagcccgcaagagcttggatcccctgtataaccaagtattgctattccccgagtccccacaaggcaaggtgctccaagtgattgtgtggggcaactacggacgtatggagagaaagcaatttatgggcgtggctagggtgctgctggaagagctggatcttaccaccttggccgttggttggtacaaactcttccctaccagtagcatggtggatcctgcgaccggcccactgttgagacaagcaagccagcttagtcttgaatccactgtcggaccttgcggagaaaggtcatag

SEQ ID NO: 202830 - DNA, 759 bp, synthetic construct
  misc_feature 1..759: note = Description of Artificial Sequence: Synthetic coding sequence
  source 1..759: mol_type = other DNA
atggaggacggcgtggccggcccccagctgggcgccgccgccgaggccgcggaggcggctgaggctcgtgccagaccgggagtgacattaaggcccttcgcccccctatccggagcagcagaagccgacgaaggggggggggactggtccttcatagactgcgagatggaggaggtggaccttcaggatttgccctcggccacaatcgcctgccacctggacccccgtgtatttgttgacggcctgtgccgtgctaaatttgagagtctgtttaggacatacgataaagacatcacttttcagtatttcaaatcctttaaacgggttagaattaatttttcaaatccgttttccgctgcagacgccaggttacagttacataaaacagaatttctgggaaaggagatgaagctttattttgcacagaccctgcatatcggcagttcgcacctagcccccccaaaccccgataagcaattccttatttctccaccagctagtccgcccgttggctggaagcaagttgaagacgccacccccgtcattaattatgacctgctctacgctatttccaagctgggaccaggcgagaaatatgagctgcatgctgccacagacacaacaccctcagttgtggttcacgtatgcgagtctgatcaggagaaggaggaagaggaggagatggaaagaatgcggcgcccaaaaccaaagattattcaaacgcgccgccccgaatatacccccatacacctctcatag

SEQ ID NO: 202831 - DNA, 594 bp, synthetic construct
  misc_feature 1..594: note = Description of Artificial Sequence: Synthetic coding sequence
  source 1..594: mol_type = other DNA
atgcacttccggaacttcaactacagcttcagcagcctgatcgcctgcgtggctaattcggacattttctctgagagtgaaacccgagccaaattcgagtccctattccgtacatatgacaaggacattaccttccaatattttaagtctttcaaaagagtgcggatcaatttcagcaaccctttttcggccgctgatgcccgcttacagttgcacaaaactgaattccttgggaaggagatgaagctttatttcgctcagacattgcatattgggtcttctcacctggctccccctaatcctgataagcaatttctgatctctccccccgctagcccccctgttggttggaaacaggtggaagatgctaccccagttataaattatgacctgctttatgccatttctaaactagggccaggagagaaatacgagttgcatgcggcaacagacacaacccccagtgttgttgtccatgtgtgcgagtcagaccaggagaaagaggaagaggaggagatggagaggatgcgacgccccaagcctaagattattcaaacgagacggcccgaatacactcccatccacctcagttag

SEQ ID NO: 202832 - DNA, 729 bp, synthetic construct
  misc_feature 1..729: note = Description of Artificial Sequence: Synthetic coding sequence
  source 1..729: mol_type = other DNA
atgcagggcgagcagggccggcggctgttccggctgctgctgaacgatctgcccggccgagacaggctgccatgctcataccctcagccgcatgtggaacaggcatcaacctcggccagtccccgcttgttggctgtgaatatccccgaagacacactcttatcctatcccgagtctagtttgccactccagaggcactgtgcattccaccgctttagcaaggccaagttcgagtcgctatttagaacatatgataaagatattaccttccagtacttcaagtcttttaaaagagttcgcatcaacttttccaaccctttttccgccgccgacgctcggctacaacttcacaagacagagttcctgggaaaggaaatgaagctctattttgcgcagactctccacatcggctcgtcacacttagctccccctaatccagacaagcaatttctcatctctcctccagcttcaccccccgtgggctggaagcaggttgaggacgccacccctgtaatcaattacgacctgctgtatgccatcagtaagcttgggccaggggagaagtacgagctgcacgctgcaactgatactaccccaagtgtggtggttcacgtgtgcgagtccgatcaggagaaggaagaagaggaagagatggaacgaatgcggcggcctaagcctaaaattatccaaacaaggcggcccgaatataccccaatccatctgtcttag

SEQ ID NO: 202833 - DNA, 354 bp, synthetic construct
  misc_feature 1..354: note = Description of Artificial Sequence: Synthetic coding sequence
  source 1..354: mol_type = other DNA
atgaagctgtacttcgcccagaccctgcacatcggcagcagccacctggcccctccaaatcctgacaagcagtttctcatttccccaccagcctcaccccccgtcggctggaagcaggtggaagatgcaacccctgttattaactatgacttgttgtacgctatctctaagctgggacctggtgaaaagtacgaactgcacgctgcaaccgataccacgccatcggtcgtcgtgcatgtgtgtgaaagcgatcaagagaaagaggaagaggaagagatggagaggatgcgtagacctaagcctaaaatcattcagacgagacgccctgaatatactccaatacatttgagctag

SEQ ID NO: 202834 - DNA, 354 bp, synthetic construct
  misc_feature 1..354: note = Description of Artificial Sequence: Synthetic coding sequence
  source 1..354: mol_type = other DNA
atgaagctgtacttcgcccagaccctgcacatcggcagcagccaccttgcaccccccaatcccgacaaacagttcctgatctctccgccggcttcgccccccgttggctggaaacaagtcgaagatgccaccccagtgataaactacgatttactgtatgcgatttcaaaactgggtcccggagaaaaatacgaattgcacgctgccaccgacaccacaccctcagtggtggtgcatgtgtgtgagtccgaccaggagaaggaagaagaggaagaaatggaaagaatgcggagacccaagccaaagataattcagacccgtcgccctgagtatacacccatccacttgtcctag

SEQ ID NO: 202835 - DNA, 354 bp, synthetic construct
  misc_feature 1..354: note = Description of Artificial Sequence: Synthetic coding sequence
  source 1..354: mol_type = other DNA
atgaagctgtacttcgcccagaccctgcacatcggcagcagccacctagcgccacccaatcctgacaaacagttcctgatcagccccccagctagtccacccgttgggtggaaacaggtggaagacgccacccctgtcatcaattatgatctgctgtacgcaatctcaaagttgggtccaggggagaagtacgagcttcatgcagccactgatacaacaccaagcgtcgtcgttcacgtctgtgagagtgaccaggagaaggaggaggaagaagaaatggaaagaatgagacgccccaagccaaaaatcatccaaacacggcgcccagaatatactccgattcatctctcctag

SEQ ID NO: 202836 - DNA, 732 bp, synthetic construct
  misc_feature 1..732: note = Description of Artificial Sequence: Synthetic coding sequence
  source 1..732: mol_type = other DNA
atgcggggcgagagctacttcatcggcatgcggagccccggccagcaggggcacgtcccggaggacggcggtctgtttctgctttgctgtattgatagagattgggctgtaacccggtgttttgcagaagaagcattccaggccataactgacttcaatgaccttccaaacagtctgtttgcatgtaatgttcaccagtccgtattcgagggtgaggaatccaaggagaagttcgagggcctttttagaacatatgacgactgcgtgacattccagttgtttaagtcatttaggagagtccgtatcaacttcagcaaccctaagtccgccgccagggcacgtattgagcttcatgaaacccagttccgtggaaagaaactcaaactttactttgcacaggttcaaacccccgaaaccgatggggacaagcttcacctggctcctccacagcccgcaaagcagtttttgataagtcccccaagctctcccccggtggggtggcagccaattaatgacgcgacccctgtgctcaattacgatttgctgtacgcagttgcaaagcttggcccaggtgagaaatacgagttgcatgcaggtaccgaaagtacaccatccgtggtggtgcatgtgtgcgactctgacatcgaggaagaagaggacccaaaaacgtctcctaaaccaaaaataattcagaccagaaggcccggtctgcctccatccgtctccaactag

SEQ ID NO: 202837 - DNA, 594 bp, synthetic construct
  misc_feature 1..594: note = Description of Artificial Sequence: Synthetic coding sequence
  source 1..594: mol_type = other DNA
atgcccgcccccagcatggactgcgacgtgagcaccctggtggcctgcgtcgtcgatgtggaggtcttcaccaatcaagaggttaaggaaaaattcgaaggtctgttcaggacatacgacgattgcgtgacctttcaactgtttaaaagctttcgccgggttcgaatcaatttctccaatcccaagtcggccgcacgtgcacgaatagagctgcacgagactcagtttcggggaaagaagctaaagctgtatttcgcccaggtgcagaccccagaaacagacggggataaattacacctagcaccgccacagccggccaagcagttcctgatctcaccaccatcctcccctccggtcggctggcaacccataaacgatgctacgcccgtccttaactatgacctgctgtacgcagttgcaaagctgggtcccggggaaaaatacgaactgcacgcaggcactgaaagcactccttctgttgtggtacacgtttgtgattctgatatcgaagaggaagaggatcccaagacatctccgaaacccaaaattatccagaccaggaggccaggcttacccccaagcgtttcaaactag

SEQ ID NO: 202838 - DNA, 732 bp, synthetic construct
  misc_feature 1..732: note = Description of Artificial Sequence: Synthetic coding sequence
  source 1..732: mol_type = other DNA
atgcggggcgagagctacttcatcggcatgcggagccccggccagcaggggcacgtgcccgaagacggcggcttgtttctgctttgctgcatagatagagactgggccgtcaccaggtgctttgcagaggaggccttccaggctatcaccgacttcaatgacctcccaaactctctgtttgcgtgcaacgttcaccagagcgtcttcgagggggaagagtctaaggagaaattcgaaggcctctttcgcacttatgacgattgtgtcacttttcagctttttaagagcttccgaagggtcaggatcaacttttctaaccccaagtcggctgcaagagctcggattgagctgcatgagacgcaattccgcggaaaaaagctgaaactctactttgctcaggtgcagacaccagagactgacggagacaaactgcatctggccccaccacaacccgccaaacagttcttaatcagccccccctcttctcctcccgtcggttggcagcctatcaatgatgcgactcccgtgctcaactacgatctgttgtacgccgtcgcgaagctgggacccggggaaaagtatgaactgcatgcaggcaccgagagtaccccctccgtagtcgtccatgtgtgcgattctgacattgaggaggaagaggatcctaaaaccagtcccaagcccaagatcatccagacccgtcgccctggactgcccccaagcgtgtctaactag

SEQ ID NO: 202839 - DNA, 732 bp, synthetic construct
  misc_feature 1..732: note = Description of Artificial Sequence: Synthetic coding sequence
  source 1..732: mol_type = other DNA
atgcggggcgagagctacttcatcggcatgcggagccccggccagcaggggcatgtccctgaggacggagggttatttcttctttgctgtatagatcgcgactgggccgtcacacgctgtttcgccgaagaggccttccaagcaattactgactttaacgatctgcccaattcattgttcgcatgcaacgtccatcagagtgtgttcgaaggagaggagtccaaggaaaagttcgaggggctctttcgtacctatgatgactgtgtgactttccagctgtttaagagcttccgacgcgtcagaatcaatttttcgaacccaaagtcagcggcgcgcgccagaattgagctgcatgaaacccagtttagaggcaagaaactcaagctctacttcgcccaagtgcaaacccccgagacagacggggataagttgcatcttgcccctccccaaccagctaagcagtttctgatttctcctccctcatccccccccgtgggctggcagccaattaatgacgccacaccagttctcaactatgatctcctctatgcagttgctaaactggggccaggagaaaaatatgagctgcacgccggaacagaaagcaccccctcggtggtggtacacgtctgtgattcagatatcgaggaagaagaagatcctaagacttcacctaagcccaagattattcaaacacgccgcccaggactcccaccttctgtcagcaactag

SEQ ID NO: 202840 - DNA, 1596 bp, synthetic construct
  misc_feature 1..1596: note = Description of Artificial Sequence: Synthetic coding sequence
  source 1..1596: mol_type = other DNA
atggtggacgtgggcaagtggcccatcttcaccctgctgagcccccaggaaatcgcatctatcagaaaagcttgcgtgtttgggacctccgcttccgaggcgttgtatgtcacggacaacgacgaagtgtttgtgtttggcctgaattacagcaattgtctgggcaccggtgataatcagtcaactctggtgccaaaaaagctcgagggcctgtgtgggaaaaaaatcaagtcgttaagttatggctccggccctcacgtgctgctgtctactgaggacggagtcgtctacgcatggggacataatggctactctcagctcggcaacggtactacaaatcagggtattgcacccgttcaggtctgcactaacctgttgattaaacaggtcgtggaggtcgcgtgcggatctcaccactctatggcacttgctgcggacggggaagtcttcgcttggggctacaacaattgcggacaagtgggtagcggttccaccgccaaccagccaacccctcgcaaggtcactaactgtcttcatatcaagcgggtggtgggcatagcctgcggacagacatccagcatggctgtgctggataatggggaggtttacgggtggggctacaatgggaatgggcaacttggtcttggcaataacggaaaccaactgacacccgtgagggtagccgctctccattccgtgtgcgtgaatcaaatcgtttgtgggtatgcacatacgttggcgctcaccgatgagggcctcttatacgcctggggcgctaacacgtatgggcagctgggcaccggaaacaaaaataacctactgagtcccgcccacattatggtggagaaagaaagagtggtggaaattgcagcttgccatagcgcccatacctccgccgctaagactcaaggcggccatgtgtatatgtgggggcagtgccggggccagtccgttatactgccccatctcactcactttagttgtaccgatgacgtgttcgcctgctttgccacacctgccgtatcgtggcgactgctatctgtggagcatgaggatttcctgaccgtcgctgaatctttaaaaaaggagtttgactcccccgagacagctgatcttaagttccgaatcgatggtaaatacatccacgtccacaaggctgttctgaagattcgatgtgagcactttcgctcgatgttccagtcttattggaatgaagacatgaaggaagtcattgaaatcgaccagttctcgtaccccgtctaccgggcttttctgcagtacctgtacaccgatactgttgacctacctcctgaggacgccatcggattattggatctagcaacgtcttattgtgagaatagactgaagaaactgtgtcaacacattattaaacgaggcattactgtcgaaaatgcgttcagtctcttctccgctgctgtccgctacgacgcagaggatcttgaggaattctgctttaaattctgcatcaaccacctgacagaggttactcagacagctgcattttggcaaatggatggccccttgttaaaggaattcatcgccaaggcctccaagtgtggagctttcaagaattag

SEQ ID NO: 202841 - DNA, 1596 bp, synthetic construct
  misc_feature 1..1596: note = Description of Artificial Sequence: Synthetic coding sequence
  source 1..1596: mol_type = other DNA
atggtggacgtgggcaagtggcccatcttcaccctgctgagcccccaggagatcgcatcgatcagaaaggcatgtgtgtttggtacttcggcatccgaggccttgtatgttactgataatgatgaggtgtttgtattcggtctcaactattctaattgtctgggcaccggcgacaaccaatccactctggttccaaaaaaacttgaggggttatgcggcaagaagatcaaatccctatcttatggctcaggccctcatgtgttgctgagtacggaggacggtgttgtgtatgcctgggggcataacgggtactctcaacttggcaacggcacaaccaaccagggcattgctcctgtccaggtgtgcaccaacctattaatcaaacaagtggttgaggtggcatgtggctcccatcacagcatggccctggccgctgatggcgaagtgtttgcatgggggtacaataattgcgggcaagtgggaagcggatcaacggctaatcagcccactccccgcaaggtcacgaactgtctacatataaagagggttgtcggaatcgcctgcggccaaacaagctccatggcagtacttgacaatggagaggtttatggttgggggtacaacggcaacgggcagctggggctcggaaataacggcaaccagttgacgcctgtgcgcgtggccgccctgcactccgtgtgtgtgaaccagatcgtgtgcggctacgcccacacacttgccttgaccgacgagggccttctgtacgcatggggggcaaatacgtacggccagctgggtaccggcaataaaaacaatttactgtctcctgcacatatcatggtcgaaaaggagagggtggtggaaatcgcagcgtgtcatagcgcccacacctccgccgccaaaacccaaggtggacatgtgtatatgtggggtcagtgccggggccaatccgtgatcctgccgcacctcactcacttcagttgtacggatgatgtctttgcctgctttgctactcctgccgtgagctggaggctcttaagtgtggagcacgaagactttctaacggtagctgaatctctcaagaaagaattcgacagtcccgagacggcagacttgaaattcagaattgacggcaagtatatccatgttcataaagcagtcctcaaaattcgttgtgaacacttccggagcatgttccagtcatactggaacgaggacatgaaggaggttattgagatcgaccagttcagctacccagtgtaccgggcctttctgcagtatctctacaccgacacagtggacttaccacctgaggatgccattggcttgctggacttggctacaagctactgcgagaatagacttaagaagctctgccaacatatcattaaaaggggtattaccgtggaaaacgccttctctctgttctccgcggccgtgagatacgacgctgaagacctcgaggagttttgctttaagttttgtatcaatcacctgactgaagtgacacagactgcagctttctggcaaatggatggtccccttttgaaggaattcatcgcaaaagcctccaagtgcggagcattcaagaattag

SEQ ID NO: 202842 - DNA, 1068 bp, synthetic construct
  misc_feature 1..1068: note = Description of Artificial Sequence: Synthetic coding sequence
  source 1..1068: mol_type = other DNA
atggtggacgtgggcaagtggcccatcttcaccctgctgagcccccaagagatcgcttccatcagaaaggcttgcgtgtttggcacatctgctagtgaggccttatacgtcaccgataacgacgaggtgttcgtttttggcttaaattatagcaactgcctgggcacaggagacaaccaaagtactctcgttccaaaaaaactggagggcctttgcggcaagaagatcaagagtctgtcttacgggagtggaccccacgtcttgctgagcaccgaagacggggtggtgtacgcttggggacataatggctactcacagctcggcaacggcaccaccaaccagggcatagcacctgtccaggtctgtaccaacctcctaatcaaacaggtggtagaggtcgcttgcggctcccaccacagtatggccctggctgcagatggagaggtatttgcatgggggtataataattgtggacaagtgggttcagggtccaccgctaatcagcctacccccaggaaagtgaccaactgcttgcacattaagcgggtagtcggaattgcttgtgggcagacaagctcaatggccgtgctagacaatggcgaggtctatggctgggggtacaacgggaacggacaactgggcctaggtaataacggcaaccagctgacgcctgtacgagttgcagcgctgcattcagtctgtgtgaaccagattgtgtgcgggtacgctcacaccctcgccctgacggacgagggattactgtatgcgtggggcgccaatacctatgggcagctcggcacgggcaacaaaaataatctgctctctccagcccacatcatggtggaaaaagaacgagtggtggagatcgccgcctgtcactcagcccacacatctgctgcaaaaacacagggcggccacgtttatatgtggggccaatgcaggggccagtcagtcatcctgcctcacctgactcatttcagctgtacagacgacgtgtttgcatgctttgcaaccccagccgtgtcctggcggctgcttagtgtggtgtcgatcgtgatcggtaagtag

SEQ ID NO: 202843 - DNA, 1656 bp, synthetic construct
  misc_feature 1..1656: note = Description of Artificial Sequence: Synthetic coding sequence
  source 1..1656: mol_type = other DNA
atggaggaggagctgcccctgttcagcggcgacagcggcaagcccgtacaggcaacgctgtcaagtctcaaaatgctcgatgtcggcaagtggcctatctttagtttgtgctccgaggaggagctgcaactgattcggcaggcctgtgtgttcggtagcgctgggaacgaggtgctctatacgacagtgaacgacgagatttttgtgctagggaccaactgctgcggctgtctgggcctaggagacgtgcagtcgaccattgagccacgtagactggatagcttgaatggaaaaaagatcgcttgcctgagctatggttctggcccgcacatcgtgctggctacaaccgagggtgaagtttttacctggggacacaatgcctattcccagctcggcaatggcacgactaatcatggcctcgtgccttgccacatttcgactaatctaagtaacaaacaggttatcgaagtggcgtgcggcagttatcactctttggtgttgactagcgatggcgaagtgtttgcatgggggtacaataattccggccaggtgggttctggatcaactgtaaaccagccaattccgcgacgtgttaccggctgtttgcagaacaaggtagtagtaaccatcgcttgcggccagatgtgttgcatggccgtggtggatacgggcgaagtgtacgtgtggggctataacggcaacggccaacttgggctggggaacagtgggaatcagccgaccccttgccgcgtggccgctctccagggaattcgtgtgcagcgggtggcctgtggctacgctcacacgctagtactcactgacgaagggcaagtgtatgcatggggggctaacagttatgggcagctaggtacagggaacaaatcaaaccaaagctatcctacccctgtgaccgtggaaaaagatagaattattgaaatcgcagcctgtcacagcacacacacatccgccgccaagacccagggcggtcacgtgtatatgtggggacaatgccgcggccagtcggtaattctgccacatttgacacattttagctgtaccgatgacgtcttcgcctgctttgccacacctgccgtgacatggcgcctgctgtctgttgagccggacgatcatctcacggtcgcagaaagtctgaaaagggagtttgataaccctgacaccgccgaccttaagtttttggtggacggcaaatacatttacgcacacaaagtcctgttaaagattcgctgtgaacactttaggtcaagcttggaggacaatgaggacgatatagtggaaatgtcggagttcagttaccccgtctatcgggcgttcctggagtatctgtacactgacagcatctccttatccccagaggaggccgtcggtttgctagacctcgctacattttatcgtgaaaatcggctcaagaagctatgtcagcaaactattaagcaggggatatgtgaagaaaatgctattgcattactcagtgccgccgtgaagtatgatgctcaagacttggaggaattttgttttcggttttgtataaaccacctgactgttgtcactcagacgtctggctttgcagaaatggaccacgacctgcttaagaactttattagcaaggcatcccgcgtcggggccttcaaaaattag

SEQ ID NO: 202844 - DNA, 1671 bp, synthetic construct
  misc_feature 1..1671: note = Description of Artificial Sequence: Synthetic coding sequence
  source 1..1671: mol_type = other DNA
atgagcgccctgccccgggacctggagctgagcaacccccgggagaaactcacaaaacctgtccaagctactctttccagtctgaagatgctcgatgtgggcaagtggccgatcttttcactctgctccgaagaggaacttcagctgatccggcaagcttgtgtcttcggtagtgcaggaaacgaggtcctgtacacaacggtcaacgacgagatctttgtcctcgggacaaattgctgcggctgcctagggctgggggacgtccagtcaacaatcgagccgagaaggctggactcactcaatggcaaaaaaatcgcctgcctaagctacggcagtggccctcacattgtgctggccacgacagagggagaagtctttacttggggacacaatgcttactcccagttgggtaatggaacaactaatcacggcctagtaccctgtcacatcagcaccaatctctcgaataaacaagtgatagaggttgcctgcggatcttatcactccttagtcctgacatccgatggtgaggttttcgcatggggctacaacaattccggacaggtgggctcgggctccacagtgaatcagcccataccccggcgcgtcactggctgtctccagaacaaagtcgtggtgactattgcatgcgggcaaatgtgttgcatggctgtcgttgacacgggggaggtgtacgtgtggggctacaatggcaatggccagctcggtctcggcaattctggtaaccagcctaccccctgtcgagtggccgcactgcaaggcattcgcgtgcagcgggtggcatgcgggtatgcccatacactcgtgctgactgatgaaggccaggtgtatgcctggggcgcgaactcctatggacagctagggactggcaacaagtcgaaccaaagctatcctactccagtgacggtggaaaaagaccggatcattgagatcgccgcttgccacagtacccacacatctgcggccaaaacccagggagggcacgtgtacatgtggggccagtgtagaggacagtccgtgattctgccacaccttacccatttttcctgcacagacgacgtatttgcttgcttcgccactccggctgtgacctggcgtcttctgagcgttgagccagacgaccacctgactgtggcagagtccctaaaaagagaatttgataaccccgatactgcagacttgaaattcctcgtggatgggaaatatatctacgcacataaggtgctactaaagattagatgcgaacacttccgctcctcccttgaagacaatgaggacgacattgttgaaatgtcagaattttcatatccggtatatagggccttcctagagtacctgtacacagatagtattagcctctccccagaggaggccgtgggactgcttgatctggccacattctatagggaaaaccgcttgaagaaactctgtcaacagaccattaagcagggcatctgtgaagaaaacgccatcgctcttctgagcgctgctgttaagtatgatgcacaggacctcgaggagttctgtttcaggttctgtataaatcacttaacggtggtcacacagacatctggattcgcagaaatggaccacgatctcctgaagaatttcatttccaaagcgagccgcgtgggagcctttaaaaactag

SEQ ID NO: 202845 - DNA, 1512 bp, synthetic construct
  misc_feature 1..1512: note = Description of Artificial Sequence: Synthetic coding sequence
  source 1..1512: mol_type = other DNA
atgctgcaggacggcagctgcaagcagatgctgctgatgctgctgatcgtacagcctgtccaggccacactgtcaagcctgaaaatgctcgatgtgggaaagtggccaatcttcagcctgtgtagcgaagaggaactgcagctcattcggcaggcgtgtgtttttggcagcgccgggaatgaagtgctgtacacgacagtaaacgatgaaatatttgtcttgggcactaactgctgtggatgcctcggccttggtgacgtgcagtctacaatagaacctcggaggttagattctttgaatgggaagaagattgcgtgtctctcatacggctccggaccacatatcgttttggccaccaccgaaggcgaggtgtttacttggggtcataacgcatactcccagctgggtaacggaaccaccaaccatgggctcgtcccttgccacatcagcacaaatttgtctaataaacaggtcatcgaagtggcctgcggatcttaccattcacttgttcttacatccgatggtgaggtctttgcttggggctacaataatagcggacaggtgggaagcgggagcactgtcaaccagcctattccccgcagagtaacgggctgtctacaaaataaagtggtagtgacaattgcttgtgggcagatgtgttgtatggccgtcgtagatactggggaagtatatgtgtggggatataatgggaatggacagctcggcctgggtaattcaggcaatcagccaaccccatgcagggtcgctgctctccaagggattagagtacagagggttgcatgtggatacacccacacatctgccgccaaaacccaaggcggacatgtgtacatgtggggccaatgccggggacaatccgtgattctcccacatttgacacatttcagctgtacagacgacgtattcgcctgttttgccactccggcagtaacctggagactgctttccgttgagcctgacgatcacctgaccgtggctgaatcactcaagagggagtttgataacccagataccgcagatctcaagtttctggtagatggcaaatacatttatgcccacaaagtgctgctcaagatccggtgtgagcattttagaagcagtctcgaggacaacgaggacgacattgtggaaatgtctgaattttcctatccggtgtatcgagccttccttgagtacttatacaccgatagtattagcctgagtcctgaagaggccgtaggcctactggatctggctaccttctacagagaaaaccgccttaagaaactgtgtcagcagacgatcaagcagggcatctgtgaagagaatgcaatcgctctgctgagtgcagcagtgaaatacgacgcccaggatctggaagagttctgctttcgattctgtatcaatcacctcacagtggtgactcaaactagcggattcgccgagatggaccatgacttgttgaaaaattttatcagcaaggcatcgagagtgggcgcattcaaaaactag

SEQ ID NO: 202846 - DNA, 1671 bp, synthetic construct
  misc_feature 1..1671: note = Description of Artificial Sequence: Synthetic coding sequence
  source 1..1671: mol_type = other DNA
ccctgcagcaaccggtaccccggcggcggcgccgacaaggcccccgcttgcgaagaacccgtgcaagcaacattatcctccctgaaaatgcttgacgtgggaaaatggcctatctttagcttgtgctcggaggaggagctgcagctcatccggcaagcatgtgtctttggctcagccggcaacgaagttctgtacacaaccgttaatgatgaaatcttcgtcctcggcacgaactgttgcggatgtctgggccttggagatgtacagagcaccatcgagccacggaggcttgattctttaaacggtaaaaagatagcttgcctgtcctacggatccgggcctcatatagtgctggccaccacggaaggagaggtgttcacctggggacataatgcttatagccagctcggcaacggcactacaaaccatggactggttccgtgccacatctccaccaatttgtcgaataagcaagtgattgaggtcgcatgcgggtcctaccacagcttagtgctgacttctgatggtgaggtatttgcttggggttacaacaattcaggccaagttgggtctggttctacggttaatcagccaatcccccgcagggtcactgggtgcctacagaataaggtggtagttacgatagcctgtgggcagatgtgctgcatggcggtcgtcgataccggcgaagtgtatgtgtggggttacaacgggaacggacagctgggcttgggcaacagcggtaaccaacccacgccatgtagggtggccgccttgcagggcatcagggttcagcgagttgcatgtggatatgcccacaccctggtcttaaccgatgagggacaggtgtacgcctggggggctaattcctatggacagctgggcaccggaaataagagcaaccagagttatcctactcctgttacagtggaaaaagaccgcattatcgagatcgctgcctgccactccacgcacacctcagcggctaaaacacagggcgggcatgtttacatgtggggtcagtgcagaggtcagtccgtcatcctgccacatctcacacactttagttgtaccgacgacgtgttcgcttgcttcgcgacccccgccgttacgtggagactgctttccgttgaacccgatgatcacctcactgtggcggagtctcttaaacgtgagtttgataaccccgacacagccgacctgaaattcctcgtcgatgggaagtatatctacgctcataaagtgcttttaaagatacgttgcgaacacttcagatcttcactggaggataacgaagatgacattgtggagatgagtgagttttcatacccagtttacagagctttcctggaatacctgtacacagattctataagtctcagtccggaagaggcagtgggactgctggatctagccaccttttacagagagaataggctcaagaagctctgtcagcagaccatcaaacagggaatttgcgaagaaaacgccattgccctgttatctgccgctgtgaaatatgatgctcaagaccttgaagaattttgcttccgtttctgtatcaaccacctgacagtcgtcacgcagacatctgggtttgcggagatggaccatgacttgctgaagaactttatctcaaaggcgagcagggtcggggcattcaaaaattag

SEQ ID NO: 202847 - DNA, 834 bp, synthetic construct
  misc_feature 1..834: note = Description of Artificial Sequence: Synthetic coding sequence
  source 1..834: mol_type = other DNA
atgagcggcgtgaccaccgagaccggcagcctggacagcgccaccgttgctacatctcagcctttagcagaatggcagctttgcaaggcttctgtttctcgggggatcattgagattgcagcctgccacagcacacacacctccgccgccaagacacagggtggtcacgtgtacatgtggggtcaatgccggggccagtcagttattctgcctcacctgacccatttcagttgcaccgacgatgtgttcgcctgtttcgccacacccgccgtcacttggaggctcctttccgtggagccggacgaccatctgacggtggccgagagcttgaagagggaatttgacaatccagatactgctgatcttaagtttctggtcgatggtaagtacatttacgcccataaggtgctgcttaaaatccgatgtgagcacttcaggtcaagcctcgaggacaacgaggacgacatcgtggagatgtcagaattttcgtatcctgtgtacagggccttcctcgagtatttatataccgacagcatcagcctctccccggaagaggcagtgggccttctggatttagcaaccttttaccgcgaaaacaggctcaagaagctgtgtcagcagaccattaaacagggcatctgtgaagagaacgccatcgccttgctgagcgctgctgttaagtacgacgcacaggatctagaggagttctgctttagattttgtattaaccacctgaccgtggtgacgcagaccagcgggtttgctgagatggaccatgacctgctcaagaacttcattagcaaggcaagcagggtgggagctttcaagaattag

SEQ ID NO: 202848 - DNA, 846 bp, synthetic construct
  misc_feature 1..846: note = Description of Artificial Sequence: Synthetic coding sequence
  source 1..846: mol_type = other DNA
atgctggacgtgggcaagtggcccatcttcagcctgtgcagcgaggaggagttgcagttgattagacaggcatgtgtgttcgggtcagctggcaacgaagtcctgtatacaaccgtgaacgatgaaatcttcgtattaggaaccaactgctgcggttgcttgggcctgggagatgtgcagtcaactatcgagccgagacggctcgacagccttaacggcaaaaagattgcctgtttatcgtacggatccggcccccatatcgtgctggccactacagaaggtgaggtcttcacttgggggcacaatgcctatagtcagttaggcaacgggaccacgaatcatggcctcgtgccttgtcacattagcactaacctgtctaacaagcaggtaatcgaggttgcctgcggttcctaccattccctcgtgcttacatcagatggcgaggtgtttgcctggggatacaacaactccggtcaggttggatcaggctccaccgtgaaccaaccaattcctaggcgagtcacagggtgcctgcagaacaaggtcgtcgtgacaattgcctgtggccagatgtgttgtatggccgtggtcgataccggcgaagtgtatgtttggggatataacgggaatggtcagctgggcttaggaaacagcggaaaccagcctaccccttgtagggtcgccgctctccagggtatacgggttcagcgcgactaccgggattgctcactctccctgcatactcacgtatgcggccaagatgctggctgggcccgggtgcacgtgggaccagtgcccggatcggtgagagacccccctgctccccatcccctgctcctgcattag

SEQ ID NO: 202849 - DNA, 1359 bp, synthetic construct
  misc_feature 1..1359: note = Description of Artificial Sequence: Synthetic coding sequence
  source 1..1359: mol_type = other DNA
atgagccccaagcggatcgccaagcggcggagcccccccgccgacgccatccccaagtccaagaaggtgaaagatacccgggccgccgccagtaggagggtgccaggcgcgaggtcatgtcaaggcgcctgtggaccttcaccccccgaccagaaaactagacctgtgagtcataggtcccattcaacagagcccggtctcgtcttgacacttggacaaggagatgtcggacaattggggctgggagaaaatgtcatggagcgaaaaaaacctgctctggtgtctatcccggaggatgtggtgcaggcagaggctggagggatgcacactgtgtgcttgagtaaatcgggtcaggtctacagcttcggctgcaatgacgaaggtgcattgggtcgcgatacaagtgtggaggggtctgaaatggtaccaggaaaggtggagctccaggagaaagtcgtgcaagtaagcgctggcgacagccataccgcagcactcactgacgacggaagagtgtttctctggggttcttttcgcgataataatggcgtgatcggcctgctcgaaccgatgaaaaagagcatggtgccggtacaggttcagctggatgtgcccgttgtcaaggtagcctcaggcaatgaccacctcgtcatgttgactgccgacggagacctctataccttgggatgcggggagcaggggcagctcggacgggttcctgagctctttgcgaatcggggcgggaggcagggcctggagcggctgctcgtgcccaaatgcgtcatgctgaagtctcgtggaagtcgcgggcatgtgaggtttcaggatgcgttttgtggagcctactttacattcgctatctcccacgaggggcatgtgtacggattcggactgtctaactatcatcagctcggcacaccagggacagagagctgctttattccccagaacctgacgagcttcaagaactctactaagtcgtgggtgggatttagtgggggccaacaccatacggtttgtatggattctgagggcaaggcatattctctcggaagagccgaatatggcagactcggactgggtgaaggagctgaagaaaaatccattcctactctgatatctcggcttccggccgtgagctcagtcgcctgtggcgcctccgtagggtacgcagtgacgaaggatgggagagtctttgcatggggaatgggcactaattaccagctcggtacgggccaagacgaagatgcctggagtcccgtagagatgatgggtaagcagttggagaatcgcgttgtactcagcgtctcaagcggcggccagcatacagtgctgctggtcaaagacaaagagcaatcttag

SEQ ID NO: 202850 - DNA, 1266 bp, synthetic construct
  misc_feature 1..1266: note = Description of Artificial Sequence: Synthetic coding sequence
  source 1..1266: mol_type = other DNA
atgagccccaagcggatcgccaagcggcggagcccccccgccgacgcaatacctaagagcaagaaggtgaaggtttctcaccgaagccacagtaccgagcctggactggtgctgaccctaggtcaaggtgatgtcggccagctcggattgggtgaaaacgtgatggaaaggaagaaaccagcgctcgtctctatcccagaggacgtggttcaggccgaggcaggagggatgcacaccgtatgcctgtctaagtcgggacaggtgtattctttcggctgcaatgacgaaggggccctggggagggatacatcggttgaaggttccgaaatggtgccagggaaagtagaactgcaggaaaaagtagtccaggtgagcgctggtgatagtcacactgctgcactaacagacgatggtcgagtttttctgtggggatccttcagggacaacaatggagtgataggtctgctggagcccatgaagaaatccatggtgcccgtacaggttcagctggacgtacccgtcgtgaaggtcgcatccggcaacgaccacctcgtaatgctcaccgccgacggggacttatacaccttaggctgtggagaacaggggcagctagggagagttcccgaactgtttgcaaacaggggcggtagacaggggttggaacgtctgttggttccgaaatgcgtcatgctgaagtcaaggggctcaagaggccacgtgcgctttcaggacgcattctgcggggcttattttacgtttgccatcagtcacgagggccatgtgtacggattcggactctctaattatcaccagcttggaactcccggaaccgaaagctgcttcattccccagaatctgactagtttcaaaaattctacaaaaagttgggttggattcagcggcgggcagcaccacacagtatgtatggatagcgaaggcaaggcctatagcctcggcagggcagagtacggccggcttgggctcggtgaaggggccgaagaaaaatccattcccacccttatttccagactgccggccgtctcaagcgtggcctgtggtgcctcagtagggtacgctgtcactaaagatggcagagtcttcgcatgggggatgggcacgaactatcagctcggcactggtcaggacgaagacgcctggtccccggttgagatgatgggaaaacagttagagaatcgggtggtgctgagcgttagttctggtggccagcacacagtgttgctagtcaaagataaagaacagtcctag

SEQ ID NO: 202851 - DNA, 1266 bp, synthetic construct
  misc_feature 1..1266: note = Description of Artificial Sequence: Synthetic coding sequence
  source 1..1266: mol_type = other DNA
atgagccccaagcggatcgccaagcggcggagcccccccgccgacgcaattccaaaaagtaagaaggtcaaggtcagccaccggagccattccactgaaccaggattggtcctcacgttgggccaaggcgacgtggggcagctggggttaggtgagaacgttatggagagaaaaaagcccgcactggtgagcataccagaagatgtcgttcaggctgaggctggaggaatgcatactgtctgtttgagcaaatctggacaggtgtacagtttcggctgcaatgatgaaggtgcgctaggtagggatacttcagtggaggggtcagagatggtgccaggaaaagtggagctgcaggagaaagtggtacaggtctcagccggggatagtcataccgctgcccttacggacgacgggagagttttcctgtggggaagcttcagagataacaacggtgtgatcggcctgctggagcctatgaagaagagtatggtccccgtccaggtgcagctcgatgtcccagttgtaaaggtagccagcgggaacgaccacctggtcatgctcacagctgatggcgatctctacacactgggatgcggtgaacaaggtcaattgggccgggttcccgagctgttcgccaacagaggaggtcggcaaggcttagagaggctgctcgtaccgaagtgtgtcatgctgaagtctcgcggtagtcgcgggcacgtacgattccaggatgccttttgtggggcatacttcaccttcgcgatatctcacgaggggcacgtgtatggcttcggcctgagtaactatcaccagttgggcacgcccggtactgagtcgtgtttcatcccccagaacctgacaagcttcaaaaattccactaaaagctgggtcggcttctccgggggccagcaccataccgtgtgtatggattctgaaggaaaggcctacagcttaggaagagctgagtatggtaggttgggccttggcgagggtgcagaggagaaaagcattcctacactgatcagccgtctgcctgccgtcagctcggtagcatgtggcgctagcgtcgggtacgccgtcacaaaggatgggagggtgttcgcatggggtatgggcacaaactaccaacttgggaccggacaagacgaggatgcctggtcccccgtcgagatgatgggcaagcagcttgagaatcgcgttgtgttatcagtctcctctggggggcagcacactgtgttgctggtcaaagacaaggaacagtcctag

SEQ ID NO: 202852 - DNA, 1266 bp, synthetic construct
  misc_feature 1..1266: note = Description of Artificial Sequence: Synthetic coding sequence
  source 1..1266: mol_type = other DNA
atgagccccaagcggatcgccaagcggcggagcccccccgccgacgctattccaaagtctaaaaaggtgaaagtgtcccacaggtcccactcaaccgaaccaggtctcgtcttgaccttaggccagggagatgtcgggcagctcggtttaggagagaacgtgatggaacggaagaaacctgcactcgtctccatccctgaagatgtggtacaagccgaggctggtggcatgcacactgtgtgtctgagcaaaagcgggcaggtatattctttcggctgcaacgatgaaggagcactgggccgcgatacgagcgtcgaaggttccgagatggtgcctggtaaagtggagttacaggagaaggtggtgcaagtgtctgccggggatagtcacaccgcggccctgacggacgatggcagggttttcctatggggatcctttagggacaataatggcgtgatcgggctccttgagccaatgaagaagtcaatggtgcctgtgcaggtccagctggacgtccctgtagtcaaggtggcgagcggaaacgatcatttagtgatgctgacagcagacggtgatttatacactcttggctgcggcgagcagggacaactgggccgggtccctgagctgtttgccaacagaggcggacggcaggggctggagagactcctcgtgcctaagtgtgtcatgcttaaatcccggggctcaagagggcatgtgaggtttcaagatgctttctgtggggcctacttcacctttgctatcagccatgaagggcacgtttacggatttggactgtctaattaccaccagcttgggacacccggaacagaatcctgtttcattccacagaatctgacatcttttaaaaattctaccaagtcgtgggtgggcttcagcggtgggcagcaccacacggtatgtatggatagcgaaggtaaggcctatagtctggggagggccgaatatggtagactcggtttgggcgaaggcgctgaagagaaatcaatacctacactgattagtcgactgccagccgtctcttccgtcgcctgcggggcctccgtcggctacgctgtgactaaggatgggcgagtttttgcctggggaatgggcactaactatcaattgggaacagggcaggatgaggatgcttggtcacctgtcgagatgatgggcaagcagctcgagaaccgcgtggtcttaagcgtcagcagcggtggacagcatactgtcctgctcgtgaaagataaagaacagagctag

SEQ ID NO: 202853 - DNA, 693 bp, synthetic construct
  misc_feature 1..693: note = Description of Artificial Sequence: Synthetic coding sequence
  source 1..693: mol_type = other DNA
atgagccccaagcggatcgccaagcggcggagcccccccgccgacgcgatcccaaaatcgaagaaggtaaaagtgtcgcacagaagtcactctaccgagcccggcctcgtgttgaccctcgggcagggagatgtggggcaactggggctgggggaaaatgtgatggagcgcaagaagcccgccctggtatccattccagaagatgtggtacaggcagaagccgggggaatgcacacggtgtgtttgagcaagagtggtcaagtgtactcatttggttgtaacgatgagggggctttggggcgggacacctccgtcgaaggctccgagatggttcctggtaaagtggagttgcaggaaaaagtggtccaagttagcgccggagactcccacaccgcagcactgaccgatgatggtcgcgtgtttctctgggggtcctttagggacaacaacggagtaatcggcctcttagaacctatgaaaaaatctatggtccccgtgcaggtccagctggacgtcccagtagtgaaggtcgccagcggcaacgatcatctggtgatgttgacagctgatggggacctttacacactgggatgcggggagcagggtcaactgggcagagtgcctgaactcttcgcaaatcgagggggtagacagggcttagagagactcttagtgcctaagtgcgtgatgtag

SEQ ID NO: 202854 - DNA, 852 bp, synthetic construct
  misc_feature 1..852: note = Description of Artificial Sequence: Synthetic coding sequence
  source 1..852: mol_type = other DNA
atgagccccaagcggatcgccaagcggcggagcccccccgccgacgcaattcctaaatcaaaaaaggttaaggtgtctcaccgttcccacagtaccgagcctgggctagtcttaacactggggcagggcgacgtgggccaactgggcctgggggaaaacgtgatggagaggaaaaagcctgccctggtgtctattccggaagatgtagttcaggccgaggctggaggcatgcacacagtctgccttagcaagtccggtcaggtgtacagtttcgggtgtaatgacgagggcgccctaggaagagacacatccgtcgagggctccgagatggtcccaggcaaagtggagctccaggagaaggtcgttcaggtttctgccggtgattctcacacagctgctttgaccgatgatggacgcgtcttcctctgggggtccttcagggacaataatggcgttatcggactgttggagcccatgaagaagtctatggtgcccgtgcaggtccagttggacgttccagtcgtaaaagttgccagcgggaacgaccacctggttatgctcaccgccgatggagatttatacaccctcggctgtggagaacaaggccaactggggcgcgttcccgaattgttcgccaatcgagggggcagacagggattagagaggctactggtgcctaagtgtgtcatgctgaagtcacggggctccagagggcatgttaggtttcaagacgccttctgcggggcctactttacatttgcgatttcccacgaagggcacgtgtacgggtttggactgtcaaattaccaccagctgggcactcctgggacagaaagctgctttataccctag

SEQ ID NO: 202855 - DNA, 708 bp, synthetic construct
  misc_feature 1..708: note = Description of Artificial Sequence: Synthetic coding sequence
  source 1..708: mol_type = other DNA
atggcccgggaggagtgcaaggccctgctggacggcctgaacaagacaacagcctgctatcaccacctggttctgactgtaggtggaagcgccgatagtcagaacctgcgtcaggagctccagaagactaggcaaaaagcccaagaattggccgtcagcacttgtgcaagacttacagctgtactgagagaccgaggactggccgctgatgagcgggccgaatttgagcgactgtgggtcgcattctctggctgtctggatctgctcgaggcagatatgcggcgcgctctcgaattaggggctgccttccccctgcatgcacctcgtagacccctggtgagaactggggtggccggggcaagctcaggggtcgcagccagagcacttagtaccagaagcttgcgtctcgaagccgagggggatttcgatgttgcggatctaagagagctcgaacgcgaagttctgcaggtcggcgagatgatcgacaatatggaaatgaaggtgaatgtcccaagatggacagtgcaggcccggcaggctgccggcgctgagctgctctcaacagtgagcgccggtccctcaagcgttgtctcactacaagagcgaggagggggatgcgacccccgcaaagcgctggccgccattctctttggagccgtgttgctggccgccgtggcactggcagtctgcgtggcaaagctgagttag

SEQ ID NO: 202856 - DNA, 630 bp, synthetic construct
  misc_feature 1..630: note = Description of Artificial Sequence: Synthetic coding sequence
  source 1..630: mol_type = other DNA
atgcgggccgccgccatcagcacccccaagctggacaagatgcccggcatgtttttttccgccaaccccaaagaattgaagggaaccacacatagtctgctggatgacaaaatgcagaagcggagacctaagacattcggtatggatatgaaagcctatctaagatcaatgattccccatctcgagtccgggatgaagtccagcaagtctaaggacgtcctgtctgcagctgaagtgatgcagtggtcccaatccctggaaaagctcttagccaaccaaactgggcagaatgtgttcggaagcttcctgaagagcgagttctccgaagaaaacattgaattttggctcgcttgcgaagactataagaaaaccgagtcagacctcctaccctgcaaggctgaggagatatacaaggctttcgtccactccgacgccgctaaacaaattaatatcgattttagaactcgggaatcgactgctaagaagatcaaagccccaacccctacatgcttcgatgaggcccagaaagtgatatacacattgatggaaaaggatagctatcccagatttctgaagtccgacatctacctcaacctgctcaacgacttgcaggccaattcactcaaatag

SEQ ID NO: 202857 - DNA, 1044 bp, synthetic construct
  misc_feature 1..1044: note = Description of Artificial Sequence: Synthetic coding sequence
  source 1..1044: mol_type = other DNA
atgcccggcaagcccaagcacctgggcgtgcccaacggccggatggtcttggctgttagcgatggagaactgtcctctactaccggtcctcagggccaaggggaaggaaggggctccagcctttcgattcattctctgccttccgggcctagttctccgtttcccaccttcgtgagttcgaaatcagagtcccatagaaaaagcctggggagtaccgaaggtgagtccgagtccagaccgggcaaatactgttgcgtctatcttccggacggaacagcgagtctggcactggctcgtcctgggctgactatcagagatatgctggcaggcatttgcgaaaaaagaggcttgtcactgccggacattaaagtgtacctcgttggcaacgaacagaaagcgctcgtgctcgatcaggactgcactgtgctggcagatcaggaggtgaggctcgagaatcgcataacattcgaactggaattgacggcactcgagagggtcgtcaggatttctgccaaacctacgaaaagattacaagaggcgttgcaacccatactggagaagcacggtcttagcccactggaggtggtgttacatagaccaggggagaagcagcccttggatctgggtaagctcgtgtcctctgtcgctgcccagcgactcgtgctggacacattacccggcgtgaaaatctccaaagccagggacaaatccccctgtcgcagccaggggtgccctccacgcactcaagataaagccacccatcccccccctgccagtccatcaagcctcgtgaaagtgccttcctccgcaacgggaaagaggcagacatgcgatatcgaaggtttggtagaactgcttaatagagtgcagtccagtggcgcccatgaccagagaggtctgttgcgcaaggaggaccttgtactgccagaattcctgcagctgcctgctcagggcccaagttctgaagagacacccccccagaccaagtcggctgcccagcctatcggagggagtctgaactcaacaacagacagtgccctctag

SEQ ID NO: 202858 - DNA, 1701 bp, synthetic construct
  misc_feature 1..1701: note = Description of Artificial Sequence: Synthetic coding sequence
  source 1..1701: mol_type = other DNA
atgcccggcaagcccaagcacctgggcgtgcccaacggccggatggtgcttgctgtgtcagacggagagctgagcagtacgaccggaccacagggacagggtgaagggagggggagttccctctcaattcattcgctgccttctggcccttccagtcctttcccgacagaggaacagcccgtcgccagctgggctctgtcattcgagaggcttttgcaagatccgctgggccttgcttactttactgagttcctaaagaaagaattctcagcagagaatgtgaccttctggaaagcctgcgagcgctttcagcagattcccgccagcgacactcagcagttggcccaggaagctaggaacatctaccaggagttcctcagctcacaggcactgtcacccgttaatatcgaccgacaggcatggctgggagaagaggtgctggcagagcccaggcctgacatgtttcgggcccagcagttgcagatatttaacctgatgaagtttgatagttacgctagattcgtcaagtcccccctctacagagagtgtctgttagccgaagccgagggtcgcccactccgagaaccaggctcctccagactgggcagtccggatgctacccgcaaaaagcccaagctaaagcctggtaagagccttccgcttggagtcgaagaactgggacagttaccaccagtcgagggtcccggtgggcggccgcttagaaagtcttttcgacgggagttaggcggaaccgcaaacgcggcccttcggcgtgaaagtcagggaagcctcaatagcagcgcttctctggacctgggtttcctggccttcgtctctagcaagtccgaatcccaccggaagagcctggggagcactgaaggagagtctgagtcacgccccggcaaatattgttgcgtgtatctaccagacggaaccgcctccctggcactggcccgccctgggctgactatcagagacatgctagctggtatatgtgagaaacgcggattgtctctgcccgacattaaagtttacctcgttggcaacgagcaggcgctagtcctggatcaggactgtaccgtcctggctgatcaggaggtacggctcgaaaatcggatcacgtttgagctggaattgacagcgcttgaaagagtggtgcggatttccgccaaaccaacgaagcgcctacaggaagctttgcagcccattctggagaagcatggcctctcacccctggaagttgttctgcatcgccctggggagaagcagccattggacctgggcaagctcgtaagcagtgtcgcagcacagcggttggtcctggacaccctgcccggcgtgaaaataagtaaggcccgtgacaagagtccttgtcggtcgcagggctgtccgccccgaactcaagacaaggcaacacatcccccccccgcctcccccagcagcttggtcaaggtgccatctagcgccacaggtaagaggcagacttgcgatattgagggccttgtagagttgctaaacagagtccagagcagcggagcacacgaccagcgggggttgctgcgaaaagaggaccttgtcctgcccgagtttttgcagctgcctgctcagggccctagtagcgaggagacacccccccagacaaaaagtgccgcccagcccatcggtggttctctgaactccactacagatagcgccctatag

SEQ ID NO: 202859 - DNA, 1314 bp, synthetic construct
  misc_feature 1..1314: note = Description of Artificial Sequence: Synthetic coding sequence
  source 1..1314: mol_type = other DNA
tgaagccccgtgaacatcgaccggcaggcctggctgggcgaggaggtgctggccgaaccccggcctgacatgttccgggcccagcagctccaaatctttaacctgatgaaattcgattcatatgccagattcgttaaatccccactttacagggagtgtttgctggccgaggctgagggccgcccactgagggagcccggatcctcccgcctggggagccctgatgctacaagaaaaaaacccaagctcaagcctggcaagagcctcccccttggagtggaggagttgggccagctaccccctgtggaggggccgggtgggaggcccctcaggaagagtttccgtcgcgagctgggaggcacggcgaacgctgctcttcgtcgcgagtcccagggaagtctcaactcctctgctagcctcgacctcggcttcctggcatttgtgtctagcaagtcagaaagccaccgcaaatctcttggaagcacggagggagagtctgagagtagaccagggaaatactgttgcgtgtacctgccagatgggacagcttcccttgccctggccaggcccggcttgactattagagatatgctcgctggtatatgtgagaagagaggcctgtcccttcccgatatcaaagtgtacttggttggaaatgagcaaaaagccctcgtcctagatcaggactgtacagtcctggccgatcaggaggtgaggctggagaatcgcatcacttttgaactagaattgactgcgctggaacgagtcgtgaggattagtgcaaaacccactaagagactgcaggaggctttgcagccgatcttagaaaagcacggcctgagccctctcgaagtcgtgttacatcgacccggcgagaaacagcccctggaccttggcaagctggtgtcttcagtcgcggcccagcgtttggtgctggacactttgccgggcgtgaaaatatctaaggcccgggataaaagcccctgccgttctcaagggtgtcccccccgtacacaagacaaggctacgcaccctccaccagcgtccccttcgagtctggtaaaggttccgtcatctgctactggtaagagacagacttgcgacatcgaagggctggtggagctgctcaatcgggtgcaaagctccggggcccacgatcagcggggactgctgcgcaaagaggaccttgtgcttcctgagttcttgcagcttcccgcccagggcccatcgagcgaggaaaccccccctcaaacaaagagcgccgctcagcctattgggggatccctgaacagcactaccgattccgctctttag

SEQ ID NO: 202860 - DNA, 609 bp, synthetic construct
  misc_feature 1..609: note = Description of Artificial Sequence: Synthetic coding sequence
  source 1..609: mol_type = other DNA
atgtgccggaccctggccgccttccccaccacctgcctggagcgggcaaaagagttcaagactcgactaggcatttttctgcataaaagtgaacttgggtgtgataccggttccaccggaaaattcgaatgggggtctaagcatagtaaagaaaatcgaaatttcagcgaggatgtgttgggatggcgggaatcttttgatcttctcttgagctcgaagaatggcgtggcggcatttcacgccttcctgaagactgagttcagcgaggaaaatcttgaattttggctggcttgcgaggagttcaagaagattagaagcgccactaagcttgcctcaagggcgcaccagatctttgaggagtttatatgcagcgaggcaccgaaggaggtcaacatcgatcacgagacccacgagctcacaagaatgaacctccaaacggccacagccacatgttttgatgcagctcagggcaaaacacgtactcttatggagaaagattcttacccgcgatttttgaagtcaccggcctatagagacctagcagcgcaagcctctgctgcctcggctaccctgtcctcctgctccctggacgaacccagtcacacatag

SEQ ID NO: 202861 - DNA, 459 bp, synthetic construct
  misc_feature 1..459: note = Description of Artificial Sequence: Synthetic coding sequence
  source 1..459: mol_type = other DNA
atgcccgtgaagtgctgcttctaccggagccccaccgccgagaccatgacatggagtgaaaacatggacactctgctggccaatcaggccggattggacgccttccgcatttttctgaagtccgagttctccgaggagaatgtggagttctggctggcttgcgaagactttaaaaagaccaagaatgcagacaagatcgcttctaaagcaaaaatgatctactctgagttcatagaagccgacgcacctaaggagattaacatagattttggcactagggacctgataagtaagaacatcgcggagccaaccctcaaatgcttcgatgaagcacagaaactgatatattgcctgatggcaaaagatagcttcccccgtttcctgaagtcagagatttacaaaaaactggtgaactctcagcaggtccctaaccacaaaaaatggttgcccttcctgtag

SEQ ID NO: 202862 - DNA, 1809 bp, synthetic construct
  misc_feature 1..1809: note = Description of Artificial Sequence: Synthetic coding sequence
  source 1..1809: mol_type = other DNA
atggagcggagcctgcaccgggtgagcctgggcagccggcgggcccaccccgacctgtctttttacctcactacattcggtcagctgcgccttagcattgacgctcaggatcgcgtccttctcttgcacataatcgagggtaaagggctgatctctaaacaaccagggacctgcgacccctacgtgaaaatttccctgataccagaagatagcagactacggcaccagaaaacccagaccgtgcctgattgccgcgatcctgccttccatgagcatttttttttccctgttcaggaggaggatgaccagaaaagacttctggtgaccgtgtggaaccgggcatctcagagccggcagtcaggtttaattgggtgcatgtcatttggagtaaagtccctcttgacgcctgacaaggaaatctcaggatggtattatctgctgggcgagcacttggggcggacaaagcatcttaaggtggcaagaagaagactgagaccattgagggatcctcttctgagaatgcctggtggtggggacacagagaacggcaaaaaactgaaaataacaatcccccggggaaaggatggcttcgggtttacgatttgctgcgactcacccgtccgggttcaggccgttgatagcgggggtccggcggagagagccggtctacaacaacttgatactgttctacagctgaacgaaagacctgtcgaacattggaagtgcgtagaacttgcccacgagattcggagctgcccatctgagattattctcctggtgtggaggatggtccctcaagttaagcctgggcccgacggaggcgttctgaggagagcctcatgcaagtctacccacgatttacagtcaccccctaacaagcgggaaaagaactgcacccacggggttcaagccaggcccgagcagcggcacagctgtcaccttgtctgcgacagctctgatgggctcctcttgggggggtgggaaagatacaccgaagtggcaaagcgagggggccaacacaccttgccggcactgagcagggccaccgctcctacagaccccaactatattattcttgcgcccctgaatccgggcagccagctcctgcgccccgtgtaccaggaggacacaattcccgaagaaagcggatccccgtccaagggaaaaagctatacgggactggggaaaaagagtcggctcatgaagactgtgcagactatgaaaggccacggtaactaccagaattgtccggtagttagaccacatgccacccactcttcttacggaacgtatgtgacccttgcaccgaaagtcctggtctttccagtcttcgttcagccgctcgatttatgcaacccagcacgcaccctgttattaagcgaggagctgcttctgtacgaagggcgaaataaagcggctgaggtcacactgtttgcatactccgacctgctactttttactaaggaggatgaaccaggtcgctgtgatgtgctgcggaacccactgtacttgcagagtgtgaaactgcaggaggggtccagcgaagaccttaaattttgcgttctgtacctagcggaaaaggctgagtgccttttcacactggaggcccacagccaggagcaaaaaaagcgcgtgtgctggtgcctatctgagaatatcgcgaagcagcagcaacttgcagcctcgcctcctgactccaagaagctacacccctttggttctctccaacaggaaatgggccccgtgaatagcacgaacgcgactcaggaccgtagttttactagcccgggacagacactgatcggatag

SEQ ID NO: 202863 - DNA, 507 bp, synthetic construct
  misc_feature 1..507: note = Description of Artificial Sequence: Synthetic coding sequence
  source 1..507: mol_type = other DNA
atgaagaacaagctgggcatcttccggcggcggaacgagagccccggcgcacctccagcaggcaaagcagataagatgatgaagtcctttaagccaaccagcgaggaagccctgaaatggggtgaatcgttagagaagttgctggtgcacaagtatggattggccgtgttccaagcgttcctgcgcacggaattttccgaagagaacttggagttttggctggcttgcgaggatttcaagaaagtgaagtctcaatctaaaatggcctcaaaggccaagaaaatctttgccgagtacattgccatccaggcgtgcaaggaagtaaacctcgactcctacacaagagagcacactaaggacaacctacagagtgtgacccgaggatgtttcgatctggcgcagaaaagaatctttgggctgatggagaaagattcgtacccacgctttcttcgcagcgatctttatctcgacctgatcaatcagaaaaagatgtctcccccactgtag

SEQ ID NO: 202864 - DNA, 2754 bp, synthetic construct
  misc_feature 1..2754: note = Description of Artificial Sequence: Synthetic coding sequence
  source 1..2754: mol_type = other DNA
atgaaccggttcaacggcctgtgcaaggtgtgcagcgagcggcggtatcgtcaaatcactataccacgcggaaaggacggcttcggctttactatctgctgtgactcccctgtccgggtccaggccgttgactcgggaggcccggctgagagggctgggctacaacagctcgacactgtcctacagctgaatgagcggccagtggagcattggaaatgtgtagaattggcacacgagattcgcagctgccctagcgagatcatattgcttgtgtggagaatggttcctcaggtaaaacccggccccgacgggggagtgctgcggcgggcatcatgcaagtcgacgcatgatttgcaatccccgccaaacaaaagagaaaaaaactgtacacatggcgttcaggccaggcctgagcagcggcattcttgccatttggtgtgcgactcttcagatgggcttctgctgggaggttgggagcggtatacggaggtggctaagcgggggggacagcatacgcttcccgctctgtctcgggctacagcgccaactgacccaaactacatcatcctggcaccactcaatccaggctctcagcttctgcggccagtttatcaggaggacacaatcccagaagagagcggcagcccaagtaaagggaagtcatatacaggactcggtaaaaagagccgtctgatgaaaacagtacagacaatgaaagggcacggcaactaccaaaactgccctgtggtcagaccacatgccacccactcctcttacggaacttacgtgacgctagcccctaaggtgctcgtcttccctgttttcgtgcagcctctcgacctctgcaaccctgcccgcacgctgctgctgtccgaggagctactgctgtatgagggccgcaataaagccgctgaagtaactctatttgcatacagcgatctactactgttcaccaaagaagacgagcccggccgttgtgatgtgctccggaatcccctctacctgcagagcgtgaagctccaagagggcagcagcgaagacctcaaattttgtgtgctgtacctggccgaaaaagcggaatgtctgtttactctggaagcgcactcgcaggaacagaagaagagggtgtgttggtgtcttagcgaaaacatcgccaaacagcagcagcttgccgcaagccctcctgacagtaaaatgtttgagacagaggccgacgagaagagggagatggccctggaggagggcaaaggccctggagcagaggatagccctccgtcaaaggagccctcccctgggcaagagttgcccccaggccaggacctgcctcccaataaggacagcccttctgggcaggagccagccccgtctcaagaacccctgtcctctaaggactctgcaacctcggaggggtcccccccaggaccggatgcccctcctagcaaagacgtaccaccttgccaagagccgcctcccgcccaggacctcagtccctgtcaagacctacctgcaggccaggagcctctgcctcaccaggaccccctgttaacgaaggacctgcccgccatccaagaaagcccaacgcgtgacctaccaccatgtcaagacctccctccaagccaggtcagtctgcctgcaaaggctctcaccgaagatacgatgagcagtggtgacttgttggctgccactggagatcctccagcggcacccaggccagccttcgtgattccagaggtcaggctggattctacgtacagccagaaggccggggcagaacagggatgttcgggtgacgaggaagacgcagaggaagctgaagaagtagaagagggggaggaaggagaggaagatgaagacgaggacacgtccgatgacaattatggcgagaggagcgaggccaaacgtagctcaatgatagaaactggtcagggggccgaaggcggcctgagcttacgggtgcagaacagtctgagacgccggacgcactctgagggatccctgcttcaggagccccgagggccctgtttcgctagcgatacaaccctacattgctccgacggggaaggagctgctagcacatggggcatgccatcacctagcacccttaagaaggaactagggcgcaatggagggagcatgcaccatctctctcttttttttactggacatagaaagatgagcggtgctgacaccgtgggggacgacgacgaggcctcccgaaagcgcaagtccaagaatttagcaaaagatatgaagaataagcttggcatctttaggcgcagaaacgagtctccaggggctccccctgccgggaaggctgataagatgatgaagtctttcaagcccaccagcgaggaggcattgaaatggggagaatccctggaaaaattgctggtccacaagtatgggctggctgtttttcaagcgtttctacggaccgaattcagtgaagaaaatctcgaattttggttggcatgcgaggatttcaaaaaagtaaagtctcagagtaagatggctagtaaggccaaaaagatctttgccgaatacatcgcgattcaggcctgcaaggaagtgaatctggactcttatacacgcgaacatacaaaggacaatctccagtccgttacaaggggctgctttgatttagctcagaagcggatcttcggccttatggaaaaggacagttatcccaggtttctgaggtcggacctgtatctggatctgatcaatcagaaaaagatgtcccccccactgtag

SEQ ID NO: 202865 - DNA, 3597 bp, synthetic construct
  misc_feature 1..3597: note = Description of Artificial Sequence: Synthetic coding sequence
  source 1..3597: mol_type = other DNA
atgcccgtgatccccgccctgtgggaggtggagatgggccggagccaaggacaggagattgagactatcttggcaaaccggtctcactcagattcaacccccctacctaatttcctgtctggatcccaccgccctgaatgttgtacctgccgacttttgactgccagcggcgcccaggatagcttgccatttggaaggcgcctgtacagcggtccttggcggtcttgtgaggaggtatgtcatgtgagtgtcctctccgtgctgagtactagttgcggacttagcctatcccttcctatctttcctggatggatggaatggctgagccccgacattgcactccctaggcgagacgagtggacccagacgtcccccgcaagaaaacgaattactcacgccaaagtccagggggcggggcaactccgcttaagtatcgacgctcaagaccgagtcctgcttttgcacattatagagggaaaggggctgatctccaagcagccagggacctgcgatccctatgtgaaaatttccctcattccagaagacagcaggttgaggcatcagaaaacgcagacagtacccgattgtagggaccccgcattccatgagcactttttttttcctgtccaggaggaggatgatcagaagaggcttctggtaacagtttggaatcgggcctcccagtccagacagagtggactcattggctgcatgagttttggggtaaaatctttgcttacaccagataaggagattagtggttggtactatttgctgggcgagcatcttggccgcactaaacacctgaaagtggcacggcgaagactacggccccttcgcgaccctctcctacgcatgccgggaggtggtgatacagaaaatggcaagaaactcaaaatcacaatcccgcgtgggaaagacgggtttggatttaccatctgctgcgactcccccgtgagagttcaggctgtggactcgggtggccccgctgaaagagcagggttgcagcagttggacacagtgctgcaattaaacgaacgacctgttgagcactggaaatgtgtggagctggctcacgaaatccggtcctgcccgtccgagatcatccttctggtctggcgtatggtgccccaggttaagccagggccagatgggggcgtgctgaggcgggccagttgcaagtctactcacgatctccagtcaccaccgaacaagagagaaaaaaattgcacccatggggtgcaggcccgccccgagcagaggcatagttgtcacttggtatgtgattcttctgacggtcttttgctggggggttgggagaggtatactgaagtggcaaagcgcggcggtcaacacacccttccagctctcagccgcgcaaccgcaccaaccgatcccaattacataatcctagcccctctgaaccctggatctcaactgctgaggcccgtctaccaggaggacactattcccgaggaaagtggttccccgagcaaaggcaagtcgtataccggactcggaaaaaaatcaagactaatgaaaacggttcagactatgaaaggccacggaaactaccaaaattgtcccgtcgtccgaccccatgcaactcatagcagttacggcacgtatgtgacactggctcccaaggtcttggtcttcccggttttcgtccaacccttagacctgtgtaatcccgccagaacgctcctgctttctgaggagctgctgttatacgaaggcaggaacaaagccgccgaggttactctgttcgcttattccgatctgctcctgtttacaaaagaggatgagcccgggcgctgcgacgtcctccggaatcctctatatttgcaatccgtgaagctgcaagagggcagttcagaagacttgaagttctgcgtgctgtatttagcggaaaaggccgagtgcctgttcaccttagaggcccattcacaggagcaaaaaaagagagtctgttggtgcctgtctgagaacatcgctaaacagcagcaattggccgcctcacctccagactccaagatgttcgagacagaagccgatgaaaagcgcgagatggccttagaagagggcaaaggcccaggcgccgaagactcccctcccagtaaggagccctcccctgggcaggagctgcctcccggacaggacctgccaccaaataaggatagcccatccggtcaggagcctgctccgtcccaggaacctctctcatcaaaagacagtgctacgagtgaggggagtcctcctgggccagatgccccaccgtcaaaagatgtgcccccgtgccaggagcccccccctgcccaagatctctcaccctgccaggacctgcctgccgggcaggagccactcccccatcaggatccactgcttacgaaggatctgccagctatccaagagtcacctactagggatctgcctccgtgccaagatctgccccctagtcaagtgtcccttccagctaaggctctcactgaagataccatgtccagcggagatctgctggcggctaccggagaccccccggctgcacctagacctgcgtttgtcatccctgaggtacgtctggactccacttacagtcagaaagctggggccgaacagggatgttccggcgatgaggaagatgccgaggaggcagaagaagtagaagagggagaggagggcgaggaggatgaagacgaggacacttctgacgacaactatggtgagcggtcggaagccaagcgaagcagcatgatcgagactggccaaggtgcagaaggcggactgagtcttcgcgttcagaacagtctgcgccgcaggacgcactccgagggttctctgttgcaggagccccggggcccatgctttgcctctgatacaaccctccactgcagtgacggtgagggtgccgcgagtacatgggggatgccatccccttcaacactgaagaaagagttggggcgaaatggcggatccatgcaccacctgtcactatttttcaccggacatagaaagatgtctggagcagacacagtgggggacgatgatgaggccagtaggaaacgcaagtcaaagaacctggctaaggacatgaaaaataagctggggatcttccgaagaaggaacgaatcacccggagctcctcctgccggaaaagctgataagatgatgaaatccttcaaaccaacaagcgaagaggccttaaagtggggagagtccctcgagaagcttttggtccacaagtacggccttgcagtctttcaggccttcctcagaactgaatttagcgaagaaaacctggagttttggttagcttgtgaggatttcaagaaagtgaagagccagagcaagatggcctcaaaggccaagaagatattcgccgagtacattgccatccaagcctgtaaggaagtgaacctggatagctatactcgcgagcatacgaaggacaatctccagagtgttactcggggctgtttcgatctcgcacaaaagagaatcttcggattaatggagaaagacagctacccccgttttttacgcagtgatctgtatcttgatttgatcaaccagaaaaaaatgtctcctccactgtag

SEQ ID NO: 202866 - DNA, 1560 bp, synthetic construct
  misc_feature 1..1560: note = Description of Artificial Sequence: Synthetic coding sequence
  source 1..1560: mol_type = other DNA
atgttcgagaccgaggccgacgagaagcgggagatggccctggaggagggcaaaggacccggggccgaagattcacctccctctaaggagccatcccctggccaagagctgccccctggccaggaccttccccccaataaagatagcccctccggccaggagcccgccccgtcccaggaaccactgtcctctaaggattcagccacttccgagggttcaccaccgggacctgacgcaccccccagcaaggacgtgcctccctgtcaagagcccccgccagcccaggatcttagtccctgtcaagacctcccagctgggcaggagcctttaccacaccaggatcccctgcttactaaggatcttcccgccatacaagaaagccctacccgggacctgcctccttgtcaggatctgcctccgagccaagtttcccttcctgcgaaagcattgacggaagacacgatgtcgtcaggggacctcctcgccgctaccggtgaccctcctgctgctccaagacccgccttcgtaatacctgaggttcgattggactccacatactcccagaaagccggtgccgaacagggttgtagcggggacgaagaagacgcggaagaagctgaggaggtagaagaaggagaggaaggcgaagaagacgaggatgaagacacaagtgatgataactacggcgagcgttccgaagctaaacgctcttctatgatcgagaccggccagggggccgaaggcgggctgagtcttcgtgtgcagaattcgctgagacggcggacccacagtgagggctcgcttctacaagagccacgcggtccttgttttgcttccgatacaacactgcattgtagcgatggcgagggtgccgcgagtacttggggaatgcctagcccgagtacgctgaaaaaggaacttggcagaaatgggggttctatgcatcacttgtccctgttctttactggccacagaaagatgagtggcgcagacactgtgggtgatgatgatgaggcctcccgaaaacgcaaaagcaagaacctggccaaagatatgaaaaacaaattggggatcttcaggcgccggaacgagagtcccggggctccccccgccggaaaggccgataaaatgatgaaaagctttaagcccacctcggaagaggcgctgaaatggggagaaagcctggaaaagctgttagttcacaagtacggtttggcagtgttccaggcttttctcaggaccgagttctctgaggagaacctggagttttggctcgcctgtgaagatttcaaaaaggtcaaaagtcagagcaaaatggccagcaaggccaagaagattttcgcagaatacatagccattcaggcctgcaaagaggttaatcttgattcctatacacgagagcacacaaaagataacctgcaatcagtgaccagaggatgcttcgacctggcacagaagcggatatttggattgatggagaaggactcataccctagatttctgcgctccgacctctatctcgatttgattaaccagaagaaaatgtctccccctctgtag

SEQ ID NO: 202867 - DNA, 3597 bp, synthetic construct
  misc_feature 1..3597: note = Description of Artificial Sequence: Synthetic coding sequence
  source 1..3597: mol_type = other DNA
atgcccgtgatccccgccctgtgggaggtggagatgggccggagccagggccaagaaattgaaacaatcttagccaatcgctcccatagcgacagcactccactgccaaattttctgtcaggaagtcaccggccggagtgttgtacttgccggctgctgacagccagcggcgctcaggactccctaccctttgggaggagactttactccggaccatggaggtcgtgcgaggaggtttgccacgtctccgtgttgagtgtgctgagcactagctgcggcctaagtttgagcctgccaattttccctggctggatggagtggcttagtcccgacatcgctctcccccgccgcgacgaatggacccagacgagcccagccaggaagaggatcacccacgcaaaggtccagggcgccggtcagctccgcctaagcatcgatgctcaggacagggtcctgctactgcatataatcgagggcaagggtctcatttccaagcagcccggtacatgcgacccttatgtcaagatctccctcatccctgaagatagtcgactgaggcatcaaaagacacagacggtaccagattgcagggatccggcctttcacgagcattttttcttcccagtccaagaagaagatgatcagaaaagactgctggtgactgtttggaatcgtgctagtcagtctcggcagtctggattgattggatgcatgagttttggcgtgaagtccctgctgactcccgataaggaaatctcaggttggtactatttgctgggggagcatctggggagaacaaagcaccttaaggtcgcgaggcgaagattgcggccactacgggaccccctgttacgtatgcctggaggtggggacactgagaatggaaagaaactcaagatcacgattcccaggggaaaagatgggtttgggtttacaatctgctgtgactcacccgtgcgtgtccaggccgtggactctggaggccccgccgagcgagctgggctgcaacagctcgacacggtgctgcagctgaacgaacgccccgttgaacactggaaatgcgtggagctggctcatgagattcggtcctgcccaagtgagattatcctgcttgtgtggcggatggtaccacaggttaagccaggacccgacgggggcgtactgcgccgagccagttgcaagagcacacatgacctgcagtctccccccaacaagcgtgagaaaaactgtacacacggggtgcaggctcgccctgagcagcgccactcgtgtcatctggtgtgtgattccagtgatggacttctcctgggaggatgggagcgctacactgaagtggccaagcggggagggcagcatacgctcccagcacttagcagagccactgcacctaccgaccccaattacatcatcttagctccactgaatcccggctcccagcttctgcggccagtatatcaagaggacacgattcccgaagaatcaggaagccccagcaaaggcaaatcctatacaggactcggtaagaaatcccgcctaatgaagacagttcagacaatgaaaggtcatggcaactaccagaactgcccagttgtgcggccacacgctacacacagctcatacgggacatacgtaacacttgcacccaaagtgttggtgtttcccgtgttcgtacagccactcgatctgtgcaacccagctcgtacactgctgttgtcagaagaactgctgctgtacgagggtagaaacaaagccgccgaagttaccttattcgcttattccgacctcctgctcttcactaaagaggacgagcccggcagatgcgacgtgttgaggaacccactgtacctccagagcgttaaattacaggagggatcaagtgaggatttaaagttttgtgttctgtatctagccgagaaggctgagtgcctgttcacccttgaggcacattcccaggaacaaaagaagagagtttgttggtgtctgagcgaaaatatcgcaaaacagcagcagctagctgcatcacctcccgacagcaagatgttcgagacagaggccgacgaaaagagggaaatggcgctcgaagaggggaaggggcctggcgctgaggactctcctccgtctaaagagcccagccctgggcaagagctcccacccggacaggacttgcccccaaacaaagactcgccaagtggccaggagccagcaccgtctcaggagcctttatcgtccaaagatagcgcgacttccgagggctccccaccggggccagatgctccaccctccaaagatgtgcctccttgccaggaaccaccgcccgcacaggacctttctccctgtcaagatcttcctgcgggtcaggagccattgccccatcaggatcccttactcaccaaagacctccccgcaatccaagaatcccccacgagggatctccctccttgccaagacttacccccttctcaggtatccctcccggccaaagcgcttaccgaggatacaatgagctccggagacctgctggctgccactggagaccctcctgccgcccccagaccagcttttgtgatcccagaagttaggttggattccacttactctcagaaggctggtgcagagcaggggtgtagtggagatgaggaggatgccgaagaggctgaggaggtggaagaaggggaggagggtgaggaagacgaggacgaggacacatctgatgacaactatggcgagcggagcgaagccaaacgttcctctatgattgagaccggtcaaggtgctgagggcgggctctcccttagagtgcagaattcactgaggcgccgaacacactcagaggggagcctcctccaggaacctcggggtccttgtttcgctagcgacacgacactgcactgtagcgatggagagggcgccgcctccacctggggaatgccgagcccctcgaccttgaaaaaggagctgggcagaaacgggggctcaatgcatcacttgtcactattcttcaccggccaccgcaaaatgtccggggccgacaccgtgggcgatgacgatgaagcgtctcggaagcgcaaatctaaaaatttagcaaaagacatgaaaaacaaattagggatcttcaggaggagaaatgaatcccccggagcacctcccgccgggaaggcagataagatgatgaagtcattcaaacccacttcagaagaggctctcaagtggggcgaatcgctggagaagctcctcgtgcacaaatatggtctggcagttttccaggcctttctgcggacagaattctcagaagagaacctcgaattctggctggcgtgcgaggatttcaagaaggtgaagagccagagcaaaatggcctcgaaagccaagaaaatcttcgccgaatatatcgcgatccaagcatgcaaagaggtgaacctagatagttacacccgcgagcacacaaaggataacttacagagcgtcacacgcgggtgtttcgacttggcacagaagagaatcttcggtctcatggagaaagactcatacccaaggtttttacgctccgacttgtatctggatctcattaaccaaaagaaaatgagtcctccactgtag

SEQ ID NO: 202868 - DNA, 1776 bp, synthetic construct
  misc_feature 1..1776: note = Description of Artificial Sequence: Synthetic coding sequence
  source 1..1776: mol_type = other DNA
atgaaccggttcaacggcctgtgcaaggtgtgcagcgagcggcggtataggcagatcactattcctaggggcaaagacgggtttggttttaccatttgctgcgactcgcctgtgcgagtgcaggccgtggacagtgggggtcctgctgagcgtgccggattacagcaactggacacagttctacagctcaatgagcggccagttgaacattggaagtgcgttgaactggctcacgaaatacggtcgtgccctagcgagatcatccttcttgtctggaggatggttccgcaggtgaaaccaggacccgacggtggtgttctgaggcgggcatcatgtaaatccactcacgacctgcagtcacctccaaataaacgcgagaaaaattgcacacacggagttcaggcacgacccgaacagagacatagctgtcatctggtatgtgactcttccgatggcctacttctgggcggttgggagagatacaccgaagttgcaaaaaggggtggtcagcatacacttccggccttgagtcgtgccacagcccccaccgatccaaactacataatcctggcaccgctgaacccagggtctcagcttctgaggccagtatatcaggaagacaccatcccagaagaatcagggagccctagcaagggcaagagctatactggcctgggcaaaaaaagccgcctgatgaagaccgtgcagaccatgaagggacacgggaactaccagaactgccctgtggtgaggccccacgcaacccacagcagttacggcacatacgttacgttggcccccaaggttcttgttttcccagtgtttgtccagccgctcgacctctgcaatccagcccggaccttgttactgtccgaggaactgttgctgtacgaggggcggaacaaggccgccgaagtcactctgttcgcctatagtgacctgctgctgttcacgaaagaagacgagccagggcggtgcgacgtacttagaaatccgctgtatctacagagtgttaagctgcaggaaggctcttctgaagatctaaaattctgtgtgttatacttagctgagaaggctgagtgtctgtttaccctggaagcacactcccaagagcagaagaagagggtttgttggtgcttgtccgaaaatattgcaaaacaacagcagctagctgctagccccccagattccaaaatgagtggagctgacaccgttggtgacgacgatgaggcctcacggaagcggaagtcaaagaatctggccaaggatatgaaaaataaactgggcattttcagaagaagaaacgaaagcccaggagcccctccagctgggaaggcggataagatgatgaaatcgttcaagcccacaagtgaggaggctttgaaatggggagagagcctagagaagctcttggtccacaaatacggccttgccgtcttccaggcatttctcaggacagagttctctgaggagaacctggagttctggctggcatgcgaagacttcaaaaaagtgaagagccagagcaagatggcctcgaaggctaaaaagattttcgccgaatatatagctatacaggcttgcaaggaggtgaacctcgatagctatacgcgcgagcacactaaagacaaccttcagtccgtgacccgggggtgttttgatctggcccagaaacggatttttgggctgatggagaaagacagctaccccagatttctgcggtcggacctgtacctcgacctcattaatcagaagaagatgagtcctcccctctag

SEQ ID NO: 202869 - DNA, 1560 bp, synthetic construct
  misc_feature 1..1560: note = Description of Artificial Sequence: Synthetic coding sequence
  source 1..1560: mol_type = other DNA
atgttcgagaccgaggccgacgagaagcgggagatggccctggaggaagggaagggacctggagcggaagattctccccctagtaaggagcctagccctggacaggagctgcccccaggccaagacctgccccctaacaaagattctccatctgggcaggaacccgctccgtcgcaagaacctctttcctccaaagattctgcaacctcggaggggtctccacctggccctgatgctcccccctccaaagatgtcccgccctgtcaggagccccctcctgctcaggatctgtccccctgccaagatctgcctgctggtcaggagcccctgcctcaccaggaccccttactgactaaggacttgccggctattcaagagtcccccaccagagatctccctccctgccaggatctgcctcccagccaggtcagtctacccgcaaaggcactgactgaagatacaatgagctctggagatctgctggctgccacaggtgaccctcccgcagcccctaggccagcgtttgtgattcctgaagtgcgactggactctacttactcccagaaggcgggcgcggaacagggttgctccggagatgaagaggatgccgaagaggccgaggaagttgaggagggtgaggagggggaggaggacgaggatgaggacacaagcgatgataactacggggaacgaagtgaggccaagagatcgagtatgatcgagacaggccagggggctgaggggggcctcagcttgcgggtgcagaattcccttcggcgtcgaacccactccgaaggttccctgctccaagagcccagaggtccttgcttcgcgagcgatacgacactgcactgttccgatggagagggcgccgcctcaacatggggtatgcctagcccatccacattgaagaaggagttagggcgcaacggggggtctatgcaccacctgagcttgttctttacaggccaccggaagatgagcggggccgacactgtgggcgatgacgacgaggcctctcggaaacgcaaatctaagaacttggcaaaggatatgaagaacaaactgggcatttttagacggaggaacgagagccccggtgccccgcctgcaggcaaagctgataagatgatgaagagcttcaagccaactagtgaggaggccctaaaatggggcgagtcactcgaaaaactgctggttcacaaatatgggctggctgtgtttcaagcatttctccgaactgagttcagcgaagagaatctcgagttttggttggcctgcgaggattttaagaaagtgaaatcccagagtaaaatggcttcaaaagcaaaaaaaatattcgctgaatatatcgccatacaggcatgtaaagaagttaacctggacagctatacccgagagcacactaaggataatctgcagtcggtaacaagaggttgcttcgacctggcacagaaacgcatcttcggccttatggaaaaagattcgtatcctagatttctgaggtccgacctatacctggacctcattaaccagaagaagatgtcacctcctctgtag

SEQ ID NO: 202870 - DNA, 936 bp, synthetic construct
  misc_feature 1..936: note = Description of Artificial Sequence: Synthetic coding sequence
  source 1..936: mol_type = other DNA
atggtgacccggcggcccgtgaccaacagctgggactggctgcccgccggagcagctccagaggccgtgccctgtcgccacatgccgctgagcaggctgccactgcgagtaggacagaaggagttcttctttccattaccgctgctggtgccccccatttcatggctgcttctcagtgagtcacagcccagactggtgccaggttccccagtgatccggccaggctttcagcgggcctgtgtagcagcggcctgcactgtcgccgccagatgccccgggcgcggcgtgggtgatagaagtcagagtggggcctcctaccgccctatttgcggacccaaggtgggggggcctactgagatgctacgcggcatgtatctcacacgtaacggcaatctacagcgcagacacacgatgaaggaggcaaaggatatgaagaataagttagggatctttcgtcgcagaaatgagtcccccggagctccaccagccgggaaagcagacaaaatgatgaaatcctttaagccaacatcggaagaggccctaaaatggggagagagcctcgagaaactcctggttcacaagtacggtctggcagtgttccaggcatttctgaggaccgaattcagtgaggagaatttggagttctggctggcatgtgaggattttaaaaaagttaagtctcagtcgaagatggcctctaaggccaagaaaattttcgccgagtatatcgcaatccaggcttgcaaggaggtgaatctggattcttataccagagagcatactaaggataacctgcaaagcgtgacaaggggatgctttgacttggcgcagaaacgaatctttgggctgatggagaaggacagttatccccggtttctgcggagtgatttatacctggatctgattaaccagaaaaaaatgtctcccccactttag

SEQ ID NO: 202871 - DNA, 564 bp, synthetic construct
  misc_feature 1..564: note = Description of Artificial Sequence: Synthetic coding sequence
  source 1..564: mol_type = other DNA
atgaagcaccggctgggcttcctgctgcagaagagcgacagctgcgagcacaattcttctcacaacaagaaagacaaggtggtgatttgccagcgcgtcagtcaggaggaggtcaaaaagtgggcggaatcgctggagaaccttatctcccacgaatgcggattggcagctttcaaagcattcttgaagtccgagtactcagaggagaacattgatttctggatctcatgcgaagagtacaagaaaatcaagagcccctcaaagcttagccccaaagctaaaaagatttataatgagtttatcagtgtgcaggcaaccaaggaggtcaatctcgacagctgcaccagggaagaaactagtcgaaatatgttggaaccaacaataacatgtttcgacgaagcccagaagaagatattcaatctgatggaaaaggactcatataggcgctttttgaagtcccggttctacctggatcttgtgaatccctcctcatgtggcgccgagaagcagaagggggctaagagctccgccgattgcgcgtctctcgtaccccagtgcgcctag

SEQ ID NO: 202872 - DNA, 282 bp, synthetic construct
  misc_feature 1..282: note = Description of Artificial Sequence: Synthetic coding sequence
  source 1..282: mol_type = other DNA
atgtgcaagggcctggccggcctgcccgccagctgcctgcggagcgccaaagatatgaagcaccggctgggatttctgctgcagaaaagtgactcctgcgagcacaatagtagccataacaagaaggacaaggtcgttatctgccagcgtgtctctcaggaagaagtgaaaaagtgggctgaatccctggaaaacctaattagccacgagtgtgagcccgggttcctgcatcagggccgcgataagccagaacatgcaagggcatataacaatctgttgtag

SEQ ID NO: 202873 - DNA, 618 bp, synthetic construct
  misc_feature 1..618: note = Description of Artificial Sequence: Synthetic coding sequence
  source 1..618: mol_type = other DNA
atgtgcaagggcctggccggcctgcccgccagctgcctgcggagcgccaaggatatgaagcacagactgggctttctgctgcaaaaaagcgattcctgcgagcacaattctagccacaataagaaggataaggtagtgatttgccagagagtcagccaggaagaagtgaaaaagtgggcagaaagcttggagaacctgattagccacgagtgcgggctggcagctttcaaggcattccttaaatcagagtacagcgaggaaaacatcgatttttggatcagctgtgaggagtacaagaagatcaagtccccctcaaaactctctccaaaggcgaagaagatttacaacgagtttatctctgtgcaggcgacaaaggaggtcaacctcgattcctgtacgagagaggagacctcacgcaatatgcttgagccaactattacgtgtttcgacgaggcccagaaaaaaattttcaacctgatggagaaggatagttatagacgcttcttgaaatctcgattctatctggacttggtgaacccatcttcgtgtggcgcagagaaacaaaagggagcgaagtcctccgccgattgtgcaagcctggtgcctcagtgtgcctag

SEQ ID NO: 202874 - DNA, 909 bp, synthetic construct
  misc_feature 1..909: note = Description of Artificial Sequence: Synthetic coding sequence
  source 1..909: mol_type = other DNA
atgtacaacatgatgctgctgatccagaagcggaagggcatcggcagccagctcctgcgcgctggagaggcagaaggggaccgcggtgccggcacagccgaacgaagttctgattggcttgatggcaggtcctgggcgatcaaggaaaccccaacaggtctcgccggaagacggagtgaggactcggataatattttcactggcgaggaagctaagtacgcgcagtcacggtctcacagcagttcttgtaggatcagctttttactggccaacagtaagttgctaaataaaatgtgtaagggacttgctggactcccagctagttgcctaaggagtgccaaggatatgaagcaccgcttgggttttctgctacagaaatctgattcctgcgaacataactcaagtcacaacaagaaggacaaggtggtcatttgtcagagggtcagccaggaggaggtcaagaaatgggctgaatccctcgagaacctcatctcccacgagtgtggactcgccgctttcaaagcattccttaagagcgagtatagcgaggagaacattgatttttggattagctgcgaggagtataaaaaaataaagtccccgagcaagttgtcacccaaggccaaaaagatctacaatgagttcataagtgtgcaggcaacaaaggaggtgaacctcgactcttgcacacgggaggaaacatctaggaacatgctggagcctactatcacctgcttcgatgaggctcagaaaaagattttcaaccttatggagaaggactcttaccggaggttcctgaaaagtcgcttctaccttgatctagtgaatccatcttcttgcggtgctgaaaaacaaaagggggccaagtccagcgccgactgcgctagcctggtgccccagtgtgcgtag

SEQ ID NO: 202875 - DNA, 564 bp, synthetic construct
  misc_feature 1..564: note = Description of Artificial Sequence: Synthetic coding sequence
  source 1..564: mol_type = other DNA
atgaagcaccggctgggcttcctgctgcagaagagcgacagctgcgagcacaatagcagccacaacaaaaaggataaggtggtcatatgccagcgcgtctcccaggaggaagtcaagaagtgggccgaaagtctagagaacctgatctctcatgaatgcggcctggctgcttttaaggctttccttaagtccgagtactctgaggagaacatcgacttctggatctcatgtgaagaatacaaaaaaataaagtcccctagcaagctttccccaaaggcaaaaaagatctacaacgaattcataagtgttcaggccaccaaagaggtgaatctagacagctgtacgcgggaggaaacatcacggaacatgctggagcctacaatcacttgcttcgatgaggctcaaaagaaaatctttaacctcatggaaaaggatagttatcgaagattcctcaaaagtcgattttatttggatctcgtgaaccccagttcctgcggcgccgaaaagcaaaagggggccaaatcatctgcggattgcgccagcctggtacctcagtgtgcatag

SEQ ID NO: 202876 - DNA, 432 bp, synthetic construct
  misc_feature 1..432: note = Description of Artificial Sequence: Synthetic coding sequence
  source 1..432: mol_type = other DNA
atgaagcaccggctgggcttcctgctgcagaagagcgacagctgcgaacacaattctagccacaacaaaaaggacaaggtggttatttgtcaacgagtgtcccaggaagaggtgaagaaatgggccgagtccctggagaatctgatttcccacgagtgtggtctggcagcttttaaagcgttcctcaaaagcgagtatagtgaggaaaatatcgatttttggattagctgtgaggagtataagaagataaagagcccctcgaagctttcgcccaaagctaaaaagatctacaacgagttcattagcgtccaagccaccaaagaagttaatctggactcctgcaccagggaagagacctctagaaacatgctggaaccaacgattacttgctttgacgaggctcagaaaaagatattcaatctgatggagtag

SEQ ID NO: 202877 - DNA, 546 bp, synthetic construct
  misc_feature 1..546: note = Description of Artificial Sequence: Synthetic coding sequence
  source 1..546: mol_type = other DNA
atgtgcaagggcctggccgccctgccccacagctgcctggagcgggccaaagagattaagatcaagttagggattttactccagaaacctgactccgtcggcgatctggtgatcccttataacgagaaacccgagaaacccgcaaagactcagaagacctcactggacgaggccttgcagtggcgggatagcttggacaaacttctgcaaaacaactacggattggccagcttcaagtcatttctgaagtcggaattttctgaggaaaatctggagttttggatagcatgcgaagactacaagaaaataaagtcaccggctaagatggccgagaaagcaaagcagatttatgaggaattcattcagactgaagcccccaaggaagtgaatatcgaccactttactaaagatatcacaatgaagaaccttgttgaaccaagcctctctagcttcgatatggcacagaagcgcatccatgccctaatggaaaaagacagcctccctcgatttgttcgctctgagttctatcaggagctgataaaatag

SEQ ID NO: 202878 - DNA, 606 bp, synthetic construct
  misc_feature 1..606: note = Description of Artificial Sequence: Synthetic coding sequence
  source 1..606: mol_type = other DNA
atgtgcgcccggaacatcagccaggacatcctgatcctgcagatgcattccgcccattggcacatcaacggaaagtatgaagaaaaatccaacctgatgttttgggcgaaggaaatcaaaattaaactggggattttgctgcagaaacccgattccgtgggcgacctggtgattccttataatgaaaaacccgagaagccggctaagactcagaagacaagtctcgacgaggcactacagtggcgcgacagcctggacaagctactgcagaataattacggactggcatctttcaagagcttcttaaagagcgaatttagcgaagagaaccttgaattttggattgcctgtgaagattataagaagatcaaaagcccagcgaaaatggcagaaaaagccaagcaaatatacgaggagttcattcaaaccgaagcccccaaagaggtgaacattgatcacttcacaaaagacataacaatgaaaaatctcgttgagccttctctgtcaagctttgatatggcacaaaaaaggatacacgccctgatggagaaagactctttgcccagattcgtgcgttctgagttctaccaagaactgatcaagtag

SEQ ID NO: 202879 - DNA, 222 bp, synthetic construct
  misc_feature 1..222: note = Description of Artificial Sequence: Synthetic coding sequence
  source 1..222: mol_type = other DNA
atggccgagaaggccaagcagatctacgaggagttcatccagaccgaggccccgaaggaggtgaacatagaccactttaccaaggatattactatgaagaaccttgtcgagccctccctgtcgtcatttgacatggcgcagaagcgcatccatgccttaatggaaaaggattcactgccaaggttcgtgagaagtgaattctatcaggagttgataaagtag

SEQ ID NO: 202880 - DNA, 1362 bp, synthetic construct
  misc_feature 1..1362: note = Description of Artificial Sequence: Synthetic coding sequence
  source 1..1362: mol_type = other DNA
atggcccagggcagcggcgaccagcgggccgtgggcgtggccgaccctgaggagtcaagtccaaacatgatcgtgtactgtaaaattgaagatatcatcactaaaatgcaggatgacaagacgggaggcgtaccaattcgtactgtaaaatcattcttaagcaagatcccttcagtagtaactggtacagatattgtgcaatggctgatgaagaacctttccatcgaagatccagtagaggcaatacacctgggtagcctcatcgcagcacagggatatatattcccaatttcagaccacgtcctgacaatgaaagatgacgggacattttatcgctttcaggccccttatttttggccttctaactgttgggaacccgagaacaccgactacgccatctacttgtgtaagcgtaccatgcaaaataaggcaaggttagagctagcggattacgaagccgaaaatcttgccagactgcagcgggcattcgctcgaaagtgggagttcatattcatgcaggccgaagcgcaggtcaaaatcgacagaaagaaggacaaaacagaaaggaaaattctggactcccaggaacgggcattttgggatgtacatcggccggtccctgggtgcgtaaataccaccgaaatggacattagaaaatgcaggcgactcaagaaccctcagaaagtgaagaaatcagtctacggagtgactgaggaaagccaggcccagagccctgtccatgtgctatcacagccaattagaaagaccacgaaagaggatatccgcaagcagattaccttcctgaatgctcagatcgacagacactgcctgaaaatgtcaaaggttgctgaatctaaagagccttcacagcaacgagtcaaaaggtggggatttagtttcgatgaaatactcaaggatcaggtcgggagggaccaatttcttagatttttggagagtgaattttcctcagaaaacctcaggttctggttggccgttcaggatctcaagaaacagccactgcaggacgtcgccaaacgggtggaagagatctggcaggagtttcttgcccccggggcacccagtgcaattaaccttgactctcactcatacgagatcacttcacagaacgtgaaggatggggggagatatacattcgaggatgcccaggagcatatatacaaactgatgaagtctgattcctatgcccgcttccttaggtcgaatgcttaccaggatctactgttagctaaaaagaaaccagagtcagaacaaggaaggcgcacaagtttggaaaagtttacacgcagcgtggggaaaagcttggccggaaaaaggttgaccggcctgatgcagtcaagctag

SEQ ID NO: 202881 - DNA, 1383 bp, synthetic construct
  misc_feature 1..1383: note = Description of Artificial Sequence: Synthetic coding sequence
  source 1..1383: mol_type = other DNA
atggcccagggcagcggcgaccagcgggccgtgggcgtggccgaccccgaagagtccagccccaacatgatcgtgtattgcaaaatcgaagatatcataacaaaaatgcaggacgataagaccggtggtgtgcccattagaaccgttaagagtttcttaagtaagattcctagtgttgttactggaaccgatatcgttcagtggctgatgaaaaacctgtctatcgaagatcccgtggaggctatacatctgggatctttgatcgcagcccaggggtatatttttccgattagcgaccatgttctgacaatgaaggacgatggaacgttctacaggtttcaggccccatacttttggccaagtaactgttgggaacccgaaaacactgactatgctatctacctgtgcaaacggactatgcagaacaaagctcgactggagcttgcagactatgaggccgaaaacctcgccaggctccagcgggcgttcgccaggaaatgggagtttatcttcatgcaggcagaagcccaggtgaagatcgaccgaaaaaaagacaaaacagaacgcaaaatcctggactcacaggagcgggcattctgggacgtgcataggccagtcccagggtgtgtgaacacgacggagatggacattagaaagtgtcgccgactaaagaaccctcagaaagtcaagaaaagcgtgtatggcgtgaccgaggagagtcaggctcagtctcctgtgcacgttctaagtcagcccattcgaaaaacaaccaaagaggatatccgtaaacagatcactttcctaaatgcccagattgacagacactgtctcaaaatgagcaaggtcgccgaatccttaatcgcctatactgagcagtatgtcgagtacgaccctctgattacacctgctgaacccagcaacccctggatatccgatgacgtggcgctgtgggatatcgaaatgagtaaggagcctagccagcaacgcgtgaaacggtggggattctctttcgacgagatcttgaaagaccaggtaggacgggatcagtttttacgtttcttagagagtgaattttcaagcgagaacttgcgcttttggctggccgttcaagacctgaaaaagcagcccttacaggatgttgcaaagcgggttgaggaaatatggcaagagtttctggcgccaggcgcaccatctgccattaacctcgatagtcactcgtacgagataacgagccagaacgtaaaagatggagggagatataccttcgaggatgcacaggaacatatttataagctgatgaaaagtgactcttatgcaaggttcttgcggagcaacgcatatcaagatttgcttctggcaaagaaaaaggtgtggctcttgtag

SEQ ID NO: 202882 - DNA, 1419 bp, synthetic construct
  misc_feature 1..1419: note = Description of Artificial Sequence: Synthetic coding sequence
  source 1..1419: mol_type = other DNA
atggcccagggcagcggcgaccagcgggccgtgggcgtggccgacccagaggagtcgtctcccaacatgatagtctactgtaagatcgaggatattatcaccaaaatgcaagacgacaagacaggaggcgtgcccatccgcacggtcaagtcctttctaagtaaaattcctagtgtggtgacagggaccgatattgtacaatggctgatgaaaaaccttagcatcgaggaccccgttgaggctatccacttagggagcctcattgcggcccagggctacatcttcccaattagcgatcacgttctcactatgaaggatgacggaacattttaccggttccaggcgccctatttctggccatccaactgctgggaaccagaaaacaccgattatgccatctatctgtgcaaacgcactatgcagaataaggcccgcctcgaattggcggattacgaagctgagaatttggcccgcctccaaagagcctttgccagaaaatgggagttcatcttcatgcaggcagaggctcaggtgaagatcgaccgtaaaaaggacaaaaccgagaggaaaattcttgactcacaggagagagccttttgggacgtgcaccgcccagtgcccggctgcgttaacaccactgagatggacattaggaaatgccgccgtttgaaaaatccacagaaggtcaaaaaaagcgtttatggtgtcactgaagagtcgcaggcacaatcacccgtgcacgttctctcccagccaattagaaaaacaactaaggaggacatacggaagcaaattacatttctaaacgcgcagattgacaggcattgtctgaagatgtccaaagttgctgagtccttgattgcctacaccgaacagtacgtcgagtatgatcctctcatcaccccagcggagccaagcaacccctggatcagtgacgatgtagccctttgggacattgaaatgtctaaggaaccgtcacagcaacgagtgaaacgttggggattctcctttgatgaaatcctgaaagaccaagttggaagagatcagttcctaaggtttcttgagtccgagttctcatcagagaaccttaggttttggctagctgtgcaggatctaaagaagcagcctttgcaggacgttgccaagagggtggaggaaatttggcaggagtttttagccccaggcgcccctagtgcgatcaatctggactctcatagttacgaaatcacgtcacaaaacgtcaaagatgggggcaggtacacattcgaggacgctcaggaacatatctacaaactgatgaagagcgattcatacgcaagattcctgagaagtaacgcttaccaggacctcctgctggccaagaaaaaaggaaagagcttagccggaaaacgcttgacaggcttgatgcagtcctcgtag

SEQ ID NO: 202883 - DNA, 1443 bp, synthetic construct
  misc_feature 1..1443: note = Description of Artificial Sequence: Synthetic coding sequence
  source 1..1443: mol_type = other DNA
atggcccagggcagcggcgaccagcgggccgtgggcgtggccgacccagaagagtcttcaccaaatatgatcgtttattgtaagatcgaggacattatcacaaaaatgcaagatgacaagactgggggtgtgcctatcagaaccgtgaagtcgttcctgagcaagataccatcagttgttactgggacagatatcgtccagtggctgatgaagaacttgtctatcgaggacccggtcgaagccatccacctggggagcctgatcgccgcacagggatacatctttcctatttcagatcacgtgctgacgatgaaggatgacggcacattctaccgcttccaagcgccatacttctggccctctaattgctgggagccagaaaatactgattatgccatttatctttgcaaaaggaccatgcaaaataaggcaaggttagagctcgccgactacgaggctgaaaatcttgctcggctgcagagagcttttgcccggaaatgggagttcatctttatgcaggctgaagcccaggtgaagatcgatagaaaaaaagataaaacagaacggaagattttggattctcaggagcgtgccttctgggacgttcatagaccagttccaggttgtgtcaataccaccgagatggacatacgtaagtgtcggaggctgaagaacccccaaaaagtgaagaagagtgtttacggcgtaaccgaggaatcacaagcacagtccccagtacacgtgctttcccaacctattcgcaaaaccacgaaggaagatatacgtaaacagatcacatttctgaacgcccagattgaccggcactgcctcaaaatgagcaaagtcgcagaatccttgatagcgtatactgaacagtacgtcgagtatgacccacttattaccccagctgaacctagcaacccctggatctctgatgacgtagccctgtgggacatcgaaatgtcaaaggagccatctcaacagcgcgtgaaaaggtgggggtttagctttgacgaaatcctcaaagatcaggtgggacgcgatcagttcttgcgattcttggagtcagagttttcatctgaaaatcttaggttctggctagcggtacaggatctgaaaaaacagcctctgcaggacgtagccaagagggtggaggaaatttggcaggaattccttgctcctggggcaccttcagcaattaaccttgattcacattcctacgagattaccagtcagaacgtgaaagatgggggcaggtacacttttgaagatgcgcaggagcatatatacaaactgatgaagtccgactcttacgcccgcttcttgcgctccaacgcttatcaggatctcctccttgccaagaagaaaccggagagcgaacagggacgccgcacctccttggagaagtttactaggtccgtctgcctgcagttgctgttctag

SEQ ID NO: 202884 - DNA, 1428 bp, synthetic construct
  misc_feature 1..1428: note = Description of Artificial Sequence: Synthetic coding sequence
  source 1..1428: mol_type = other DNA
atggcccagggcagcggcgaccagcgggccgtgggcgtggccgacccagaggagtcaagtcccaatatgattgtctactgtaagatagaagatatcatcactaagatgcaggatgataaaactggtggcgtgcccatccgcaccgtgaaaagtttcctcagcaagatcccctcagtcgtgaccggtaccgacattgtgcaatggttgatgaaaaatctaagtatagaagaccccgtcgaagccattcatctcggcagcctgatcgccgctcaggggtatattttccctattagcgatcatgttctgacaatgaaggacgacggtactttttacaggttccaggctccatatttctggcctagcaattgctgggagccagagaacaccgactacgctatttacctttgtaagcgcacaatgcagaacaaagctcgtctagagttggccgactacgaggccgaaaaccttgctagacttcaaagggcgttcgctcgtaaatgggaattcatttttatgcaagccgaagcgcaagttaagattgatcggaagaaggacaaaacagagcggaagatcctcgacagccaggagagggcgttctgggacgtgcataggccagtgccagggtgtgttaacactaccgagatggacatccggaagtgtaggcggctcaagaatccgcagaaggtaaagaaatccgtgtacggagtgaccgaagaaagccaagcccagtcccctgtccatgtgctgagccaaccgatccggaagacgacaaaagaggacatcaggaagcagatcacgttccttaacgcccagattgacagacattgcttgaagatgtccaaggtggccgagtcattaattgcttacacagagcagtacgttgaatatgaccccctgattacaccggccgagccgagcaatccttggatttctgatgacgtcgcattgtgggacattgagatgtcgaaggaaccttcacaacaaagagtcaaaagatggggtttctcttttgacgagattttaaaggatcaggttggccgggatcagttcctgcgcttcctggaatcggagttctcatccgagaacctgaggttctggctggcggttcaagacctaaagaaacagccgcttcaggacgtggctaagagagtcgaggaaatttggcaagaatttttggccccaggcgcaccaagcgcgattaacctggatagtcactcatacgagattactagccagaacgtgaaggatggtggacgctacacatttgaagacgcgcaggagcacatctataaactcatgaaaagcgattcatacgcccgtttcttaaggagcaacgcctatcaggaccttctgctggctaagaaaaagcccgagtcagaacaaggccgcagaaccagtctggagaagttcacacgctccgtgggttag

SEQ ID NO: 202885 - DNA, 1434 bp, synthetic construct
  misc_feature 1..1434: note = Description of Artificial Sequence: Synthetic coding sequence
  source 1..1434: mol_type = other DNA
atggcccagggcagcggcgaccagcgggccgtgggcgtggccgaccctgaggagagttctccgaacatgattgtgtattgcaagatcgaggatatcattaccaagatgcaggatgacaagactggtggtgtgccaatccggacagtaaagtccttcttaagtaagatcccatccgtcgtcaccgggactgacattgtccagtggctgatgaagaatctgagcatcgaggaccctgtcgaagccatccacctagggtccttgattgctgcccaaggatacatctttcccattagcgatcacgttttaacgatgaaggacgacggaaccttttacagattccaagctccgtacttctggccctccaactgctgggagccagagaacactgactatgctatttacctatgcaaacgaaccatgcaaaacaaagctagactggagttagccgattatgaagcggagaacctggcaaggctccagagagcatttgctcggaaatgggaatttatctttatgcaggccgaggcgcaagtgaagatcgatcggaaaaaggacaaaacagagaggaaaatacttgacagccaggagagagccttttgggatgtccaccgcccagtcccggggtgcgtcaatacaacagaaatggacattcgaaagtgcagacggttgaaaaatcctcagaaggttaaaaagagcgtgtacggtgtcactgaggaatcccaggctcagtcccccgtgcatgtgttaagtcagcctatcaggaaaacaacaaaggaggacattagaaagcaaatcacattccttaatgctcaaattgatcgccactgtttaaagatgagtaaggtcgctgagtcccttatcgcctacactgaacaatacgtggagtacgacccacttattactcctgccgaaccaagtaacccctggatcagcgatgacgtcgcattatgggatattgagatgtctaaagaacctagtcaacagcgcgtgaaacgatggggattttcttttgacgaaatcttgaaggatcaggtgggaagagaccagttcttgagattcttagaatctgaattcagctccgaaaacctgagattctggctggcggttcaggatttgaagaagcaaccactgcaggacgtcgctaagcgcgtcgaagagatatggcaggagttcttagccccgggggccccaagtgcaatcaatctggacagtcacagctatgagatcacttcacagaacgtcaaggacggaggacggtacacttttgaagacgcgcaggagcacatttataagctcatgaagtccgactcttacgctaggttcttgcgtagtaacgcatatcaagatctgcttttggcaaaaaagaagcctgaaagcgagcagggtcgacgtacttctctcgagaagtttacaaggagcgtccttttgttctag

SEQ ID NO: 202886 - DNA, 1620 bp, synthetic construct
  misc_feature 1..1620: note = Description of Artificial Sequence: Synthetic coding sequence
  source 1..1620: mol_type = other DNA
atgaagaacctgagcatcgaggaccccgtggaggccatccacctggggtctctcatcgcagctcaaggatacattttccctattagcgatcacgtgctgaccatgaaggatgacggcaccttttatcggttccaagcaccctacttctggccctcgaattgttgggagccagagaatacagattacgcgatatacctgtgtaagcgcacgatgcaaaacaaggccagactggaactggctgactacgaggccgagaaccttgcccggctgcaacgcgccttcgcccgcaaatgggaatttatttttatgcaggctgaagcccaggtcaagatcgataggaagaaggataagaccgagcgaaagatcctggatagccaagaacgggccttttgggacgtgcatcgtcccgttcccggctgcgtaaatacgaccgagatggacattcgtaaatgtcgcaggctgaaaaacccccagaaagtgaaaaaatctgtttatggtgttactgaggagagccaggcacaatcccctgttcatgtgctgtctcagcctattcggaagacaactaaggaggacatcaggaaacagatcacattcttgaatgcgcaaatcgaccggcattgcttgaagatgagcaaagttgcagaatccttgattgcatatactgaacaatacgtcgaatatgaccccctgattactcctgcagagccgtctaacccatggattagcgatgacgtggccctctgggatatcgagatgtcaaaagaacccagccagcaacgcgtaaagaggtggggcttctcctttgatgaaatcctgaaggatcaggtgggcagggatcagttcctccggtttttggaaagcgagtttagcagcgaaaatttgaggttttggcttgctgtacaagatctgaagaagcagcctctacaggacgtggccaaaagagtcgaagaaatttggcaagagtttcttgctccgggcgcaccatctgcaatcaacctcgattctcactcctacgaaataacttcacaaaatgtgaaggacggcggccgttacacttttgaggatgcccaagagcacatttacaagctcatgaaatccgattcttatgcaaggtttctgcgctccaatgcctaccaggacctgttgcttgccaagaagaagccagaatcagagcaaggccggcgcacatcactcgaaaaatttacccggagcgttaacgtccagaatactcggcccgccggggcatggtctatctttatggcagctctccccatggcagtttggctgcgcacacctcgaagttgtcacggtctgagtgagtcacgcttgcttggactcccatcattacacgatggtttacgggaaggccagagtctgcctcaaagttgtcccgggagcagctctacagcagcagagggcgctagggagagagcatcaaacggcagaagtctcgctcgccgacagcactgtcagtgccacggccagggcgaggagactcagttatgtctctggtccagattggagtcctccaaaagatcccaacgtgcgagctccctccgaacaagtaaggccaagaaaaagcggcaaaccgtcaagcaaggccccaaggcgtggccctag

SEQ ID NO: 202887 - DNA, 1299 bp, synthetic construct
  misc_feature 1..1299: note = Description of Artificial Sequence: Synthetic coding sequence
  source 1..1299: mol_type = other DNA
atcgaggacatcatcaccaagatgcaggacgacaagaccggcggcgtgcctattcggactgtgaagtcttttttgtctaaaatcccgagtgtcgttacaggtaccgacatcgtccagtggctgatgaagaatctgtctatcgaggacccagttgaagctatacacttgggatccctgatcgcagcccagggctacatttttccaatcagcgaccacgtcttgacaatgaaggatgatggcaccttctacagatttcaggcaccctatttctggccctcaaactgctgggaacctgagaatacagattacgctatatacctgtgtaaacggaccatgcagaacaaggctcggctggaacttgcggactacgaggccgaaaatcttgcacgcctgcagagagcttttgccagaaaatgggaatttatcttcatgcaagcagaggcccaggtgaagatcgatcgcaagaaagacaaaactgagcgaaagattttagattcacaagagcgggcattctgggacgtgcaccgtcccgtgcctgggtgcgtcaacacgacggagatggacatacgaaagtgtcggcggttgaagaacccgcagaaagtgaaaaaaagcgtatacggagtcacagaagagtctcaggctcagagtccggtgcatgtcctttctcagccgattcggaaaacaacaaaggaagacattcgcaagcagatcaccttcctgaacgctcagattgataggcactgcctgaagatgagcaaagtggcagagagtctgatagcttacactgagcaatacgtcgagtatgacccgttaatcacccctgcggagccctccaatccatggatctctgatgatgtagcactgtgggacatagaaatgagcaaggaacctagccagcaacgtgttaaaagatgggggttttccttcgacgaaatacttaaggaccaggtgggaagggaccagtttctacgttttttggaatctgagttctcctctgaaaacctgcgcttctggctggctgtccaagatcttaaaaaacagcccctccaggacgtcgccaagcgcgtcgaggagatttggcaggagttcctggcgcccggtgccccttcagccatcaatttggacagccacagttacgaaatcactagtcagaacgtaaaggacggcgggagatatacctttgaagacgcacaggagcatatttacaagctgatgaaaagcgacagctacgcccggttcttacggtccaatgcatatcaggatttactgctagccaagaaaaaagtttggcttttatag

SEQ ID NO: 202888 - DNA, 1041 bp, synthetic construct
  misc_feature 1..1041: note = Description of Artificial Sequence: Synthetic coding sequence
  source 1..1041: mol_type = other DNA
atgcagaacaaggcccggctggagctggccgactacgaggccgagaacctcgcccgcctgcagcgcgctttcgctcgcaagtgggagttcatcttcatgcaggccgaggctcaggttaaaatcgataggaaaaaagataaaactgaacgaaaaatcttggactcgcaagaacgagccttttgggacgtgcataggcctgtccctgggtgcgtgaatacaacagaaatggatattcgaaagtgtcgccggctgaagaaccctcagaaagtgaaaaagagcgtatacggggtcacagaggaatcccaagcacaatcccccgtgcacgtgctgtctcagcctattcgcaaaaccacaaaagaagacatccggaagcaaatcaccttcttgaatgcacaaatcgacaggcactgtctgaagatgtcgaaagtggccgagtccctcatcgcgtacacggagcagtacgttgaatacgatccactaatcacaccagctgaacctagcaatccttggatttctgatgatgtagctttatgggatatagagatgtcaaaagagccaagccaacagagagtaaaaagatggggttttagcttcgacgaaattctaaaggatcaagtgggcagagaccaatttcttcgctttctggagagcgaattcagttctgagaatctgaggttttggctcgcggtacaagatttaaaaaagcagcccctgcaggacgtggctaagcgagttgaagagatctggcaggagttcctggcgcctggagcacccagcgccattaacctcgacagccattcctatgaaatcacatcacaaaacgtgaaagacggaggccgatatacttttgaggatgcccaagagcatatctataaactgatgaagagcgatagctatgcccgtttcctccgctccaatgcctaccaagacctgctgcttgccaagaaaaaacccgagtctgaacagggccgccgcacctctcttgagaagttcacgcggtccgtcctctggctgctattcccactgggaaaacgaccatag

SEQ ID NO: 202889 - DNA, 1473 bp, synthetic construct
  misc_feature 1..1473: note = Description of Artificial Sequence: Synthetic coding sequence
  source 1..1473: mol_type = other DNA
atggcccagggcagcggcgaccagcgggccgtgggcgtggccgaccccgaggaatctagcccgaacatgatagtgtattgcaagatcgaggacataatcaccaagatgcaggacgataaaaccggaggtgtgccgattcgcacagtaaagtcctttctaagcaagataccaagcgtggtgacaggcacagacattgtccaatggctgatgaaaaatctgtccattgaagaccccgtggaggcgatccatctggggagcctcatcgccgcccaggggtacattttccccatttccgaccacgtgcttacaatgaaggatgacggtactttctaccgctttcaggccccatacttctggccatctaattgttgggaaccggagaataccgactatgctatctatctgtgtaagaggacaatgcagaataaggcacggctcgagctggctgactacgaggctgagaatctggcccgtctccagagggcctttgcaagaaaatgggagttcatcttcatgcaggccgaggcccaggtcaagattgatcggaagaaggacaaaacagagcggaagattctcgatagtcaggagcgggccttttgggatgtgcatagaccggtccctggctgtgttaatacaaccgagatggacattcgtaagtgccgtagactgaagaatccccagaaagtgaagaaaagtgtgtatggggtgactgaggagagtcaggcgcagtcaccagtgcatgtcctttcccaaccaattcgcaaaacgactaaggaagatatacgcaagcagattactttcctgaacgctcagatcgacagacattgcctcaagatgagtaaggtggcggaaagtctgatcgcttacaccgagcagtatgtcgagtacgatccgcttatcaccccggccgagccatcaaacccctggatttccgacgatgtagctttatgggacatcgagatgtctaaagaaccgtcccagcagcgagttaagagatggggattctcgtttgacgaaatcttgaaggatcaggtggggcgggatcagtttctccgattcctggaaagcgagtttagttctgaaaatctgaggttctggctcgctgtgcaagacttgaagaagcagccactgcaggatgtcgcaaaaagagttgaggagatatggcaggagtttctggcgccgggcgccccgtcagccatcaatctggacagtcattcttatgaaataacctcacagaacgtaaaagatggggggcgctatacttttgaagacgcccaggaacacatatataaacttatgaagtcagacagctacgctcggtttctgagatctaacgcctaccaagacctgctgctagccaaaaaaaagccggaatctgagcagggaagacgcacgagccttgaaaagtttacacggagtgtgggaaaatctctggcgggcaaacggctgacaggactcatgcagagctcatag

SEQ ID NO: 202890 - DNA, 1419 bp, synthetic construct
  misc_feature 1..1419: note = Description of Artificial Sequence: Synthetic coding sequence
  source 1..1419: mol_type = other DNA
atggcccagggcagcggcgaccagcgggccgtgggcgtggccgacccagaagagtccagtccgaacatgatcgtgtactgcaaaatcgaggatatcatcactaagatgcaggatgataaaactgggggcgttcccattcggacagtcaaatccttcctgtcaaaaattccctccgtggttactggtaccgacatagtccagtggctcatgaaaaacctctctatcgaggacccagtggaagccatccatttgggtagcctaatagccgctcaggggtatatctttcctatcagtgaccatgtgctcactatgaaagatgacggaaccttctataggttccaagcaccctatttctggccctccaattgttgggaacctgagaatacggactatgcaatttacttgtgtaagcggacaatgcagaataaagctcgtctggaactagcagattacgaagctgagaacctggcacgactccagcgcgcatttgcccgtaaatgggagttcatttttatgcaagccgaggctcaagtaaaaattgatcggaagaaggacaagactgaacgcaagattctggacagtcaggaacgtgcattctgggacgtgcacagacctgtccctggctgcgttaatacgacagaaatggacattcgcaagtgccgccggctgaagaatccacagaaggtaaagaagtccgtgtacggtgtgaccgaggaaagtcaggcacagagtcccgtccatgtgctgtcccagccgattcggaagaccactaaggaagacattcgcaagcagataacatttttgaacgcacaaatcgataggcattgcctaaagatgagtaaggtggccgagagtctgattgcgtacactgaacagtatgtagagtacgacccactaataaccccagccgagccaagcaacccttggatttccgacgatgtagccctctgggacatcgagatgagtaaagaaccttctcagcagagagtgaagaggtggggattttcgttcgacgaaatacttaaggaccaagtaggcagggaccagtttctgcgatttcttgagagcgagttcagtagcgagaatctcaggttctggctcgccgtccaggacctgaaaaaacaaccactgcaagacgtggctaagcgggtggaggagatttggcaggagtttctcgcccccggcgcccccagtgcaatcaacctggactctcacagctatgagatcacatctcagaacgtaaaagacgggggacgatacacctttgaggacgctcaggagcatatctataagttaatgaagtccgacagctatgcacgctttcttcgtagcaatgcctatcaagacctgctcctcgcaaagaagaaggggaaatctctggcaggaaagaggttgaccggcctgatgcagtccagttag

SEQ ID NO: 202891 - DNA, 1041 bp, synthetic construct
  misc_feature 1..1041: note = Description of Artificial Sequence: Synthetic coding sequence
  source 1..1041: mol_type = other DNA
atgcagaacaaggcccggctggagctggccgactacgaggccgagaacctcgcccgactgcagagagcttttgcgcggaaatgggagttcatctttatgcaagccgaggcgcaggttaaaattgacaggaagaaggacaagaccgagagaaagatcctggactctcaagaaagagcgttttgggatgtgcataggccagtccctggatgcgtgaatacaactgaaatggacataagaaagtgcaggcgactgaaaaacccccagaaggttaaaaaatctgtgtacggcgttactgaggagagccaagctcaatccccagtgcatgtcttatcccagccaatccggaagaccaccaaggaagacatcaggaaacagatcaccttcctaaatgcccaaattgatcgccattgcttgaaaatgagcaaggtggctgagagtttgatcgcctacactgaacaatatgtggagtatgatccattgatcaccccagccgagcccagtaacccatggatatcagatgacgtcgccctatgggatattgaaatgtctaaagaaccctcacaacagcgagtgaagcgttggggcttctcattcgatgaaatcctcaaagatcaggtcggacgggaccaattcttgaggttcctggaatctgagtttagctcagaaaacctgcgcttctggctggctgtgcaggatctaaagaagcagcctctacaggacgtcgctaaacgggtagaggagatctggcaggagtttctggcccccggcgcccccagcgccatcaatctggactcacattcttacgagattacctctcaaaatgtcaaggatggaggtcgctacacttttgaggatgcgcaggaacacatttacaagctgatgaagtctgactcctatgcgcggtttttgagatcaaacgcttatcaggaccttctccttgctaagaaaaaacccgagtcagagcaagggagacgtacttctttagagaaatttactcggtcagtgctgtactcaaatacgccgctggccaagcggccatag

SEQ ID NO: 202892 - DNA, 1419 bp, synthetic construct
  misc_feature 1..1419: note = Description of Artificial Sequence: Synthetic coding sequence
  source 1..1419: mol_type = other DNA
atggcccagggcagcggcgaccagcgggccgtgggcgtggccgaccccgaggagagtagccccaacatgatcgtctactgtaagatcgaagatatcataacaaaaatgcaggatgataaaacaggcggagtccccattcggactgtgaaatcattcttgtcgaagattccaagcgtcgtgactggaacagatattgttcagtggctcatgaaaaacttaagcatcgaggaccctgtagaagctattcatttgggaagtctcatagccgcccagggttatatcttcccgataagcgaccatgtgttaacaatgaaggatgatgggacattctatcgttttcaggctccctacttctggccttctaactgttgggaacccgagaacacggattacgctatctacctctgtaaacggactatgcaaaacaaggcgcggctggagttggccgattacgaagcagaaaatctggctcggctacagagagcctttgcacggaagtgggagttcattttcatgcaggccgaagcacaggtcaagattgaccggaagaaagacaagaccgagaggaagatactggatagtcaggagcgggccttttgggatgtgcatagaccagtacccggctgtgtgaacacaactgaaatggatattcgaaaatgccgaaggcttaaaaatccacagaaggttaaaaagagcgtgtacggcgttactgaggagagccaggcgcagtcacctgtgcacgtcttgtcccaacccatccgaaagaccactaaggaagacattcggaaacagatcaccttcctcaacgcccagatagaccgccactgtctaaagatgtctaaggtggcagagtcgctcatcgcttataccgaacagtacgtggagtatgatcctttaattacaccagccgagccttcaaacccttggatcagtgacgacgtggccttatgggacatcgagatgagtaaagaacctagtcagcagagagtcaaaaggtggggcttttccttcgacgagatcttaaaggaccaagtaggccgtgatcagttccttcgtttcctggaaagcgagttcagttccgaaaacctaaggttttggttagccgtgcaagacctgaaaaagcagccacttcaggatgtggccaagagagtggaggagatctggcaggagttcctcgctccaggcgccccaagtgccatcaacctcgattcacactcgtacgagatcacaagccaaaatgtgaaagacgggggcaggtatacttttgaggacgcccaggagcatatatacaagcttatgaagtcagatagttacgcgaggttccttagatcgaacgcctatcaggatctgctccttgccaagaaaaaaggcaaatccctcgctgggaagcgactaaccgggctgatgcaatcgagctag

SEQ ID NO: 202893 - DNA, 1473 bp, synthetic construct
  misc_feature 1..1473: note = Description of Artificial Sequence: Synthetic coding sequence
  source 1..1473: mol_type = other DNA
atggcccagggcagcggcgaccagcgggccgtgggcgtggccgaccccgaggagtcttctcccaatatgattgtttactgcaagatcgaggacatcattactaagatgcaagacgacaagacggggggagtccctattcgtactgtgaagtcttttctgtccaagattccatcggtcgtcacggggacggacatcgtccagtggctgatgaagaatttgagcatcgaagaccccgtggaggccatccacctgggctccctgatcgccgcccaggggtatatatttccgatctccgatcatgttcttacaatgaaggacgatggaacattttaccggttccaagctccttacttctggcctagcaattgttgggagccagagaacaccgactatgcaatctacctgtgtaaaaggactatgcagaacaaggcacgactggagctagctgattatgaggccgaaaacttagcccggttacagagggctttcgcgaggaagtgggagttcatttttatgcaggccgaggcccaggtaaagatcgatagaaaaaaggataagactgaacggaagatcctggattcacaggaacgggcattttgggatgtgcacaggccagtgccagggtgcgtcaataccactgagatggacatccggaagtgcaggaggctaaaaaacccacagaaagttaagaaaagcgtgtatggagtcacagaagaaagccaagcccagtccccggtgcacgtgctctcccaaccaatcaggaagacaacaaaggaagacatcagaaagcagattacgttccttaatgctcagatagatagacattgtttgaaaatgagtaaggtagctgaaagtctgatcgcatacacagagcagtacgttgaatatgacccactgatcacccccgccgaaccgtctaatccttggatctcggacgacgttgcgctctgggacattgagatgtctaaggagccaagccagcagagagtgaagagatggggattctctttcgatgaaatcctcaaggaccaagttggacgtgatcagtttctgaggttcctggaaagcgaattcagcagtgagaatctcaggttctggctggccgttcaagacctgaagaaacaaccactgcaggacgttgccaagcgtgtggaagagatctggcaagagttcttggcccccggcgccccgtctgccatcaaccttgatagccatagctacgagattacctctcaaaatgtgaaagacggagggcggtacacattcgaagatgcccaagagcatatctataaactcatgaagtccgacagttatgcgcggttcctgaggtccaacgcgtaccaggatctcctgctagccaagaaaaaaccagagtcagaacagggccgacgcacttcattggagaagttcactcgcagcgttggaaaatcactcgccggaaaaaggcttactggcctcatgcagtcttcgtag

SEQ ID NO: 202894 - DNA, 1398 bp, synthetic construct
  misc_feature 1..1398: note = Description of Artificial Sequence: Synthetic coding sequence
  source 1..1398: mol_type = other DNA
atggcccagggcagcggcgaccagcgggccgtgggcgtggccgacccagaagagtcgtctcctaacatgattgtatattgtaaaattgaagacattataacaaagatgcaagacgataaaaccgggggagttccgattagaacagtcaaatcttttcttagtaagatccccagcgtggtcacagggactgatatagtacagtggctgatgaaaaatctgtctatagaggacccagtggaagctattcatttgggcagtctcattgctgcccaggggtatatttttcccatctccgatcacgttttgactatgaaggatgacggaaccttctaccgcttccaagccccctacttctggccctccaactgctgggagccagaaaacacggattacgccatttacctgtgcaagaggaccatgcagaataaggctcgcctggagctcgcggattatgaggccgaaaaccttgcgcggctgcaacgcgcttttgccagaaaatgggagtttatttttatgcaggcagaagcgcaggttaaaatcgacagaaaaaaagacaagacagaacggaagatcctggatagccaagagagggccttctgggatgtccacaggcctgttcctggatgcgtgaatactacagaaatggacattagaaagtgtcgccggctcaagaacccccagaaagtgaagaaatccgtctacggtgttactgaggagagtcaggcccagtctcctgtgcatgtcctttcacagcccatcaggaaaaccaccaaagaagatatcagaaaacaaattaccttcttgaacgcgcaaattgatcgtcactgtctgaagatgtccaaagtagcggagagcctgatcgcttataccgaacaatacgtggaatacgatccgctcatcacccctgccgaaccatcgaatccttggatctccgacgatgtggcgttgtgggacatcgagatgtccaaggagccatctcagcagcgggtgaagcggtggggtttttcattcgacgagattctgaaggatcaggtcggtagggatcagttcctacggttcctggagagcgagtttagctccgagaacttacgcttctggttggcagtgcaggatctcaaaaagcagcccttacaggacgtagccaagcgcgtggaagaaatttggcaggagtttctggctcccggcgctccttccgccattaacctggactcccactcttatgagatcacatctcagaacgtgaaggatggcgggcgctacaccttcgaagatgctcaagagcacatatacaagctcatgaagtcagactcttacgcccgcttcctaagaagcaacgcctaccaggatctactcttggccaaaaaaaaaaaagtctcaaaggtggtggagctgccatag

SEQ ID NO: 202895 - DNA, 1356 bp, synthetic construct
  misc_feature 1..1356: note = Description of Artificial Sequence: Synthetic coding sequence
  source 1..1356: mol_type = other DNA
atggaggacgtgatcgcccggatgcaggacgagaagaacggcatccccatcaggacagttaagtcatttctcagcaaaatcccatcagtgtttagcggaagtgatatcgtccaatggcttattaagaacctgactatagaagatcctgtggaggccctgcatcttgggaccctgatggccgcccacggctacttcttccccatctctgaccacgtcctgacacttaaagatgacgggacattctatagattccagactccctatttttggccaagcaattgttgggagccagagaacacggactatgctgtctacctgtgtaagcgcactatgcaaaataaggcccgacttgagctggctgactatgaggctgagtccttggcccgccttcagcgggcctttgcaaggaagtgggagttcatctttatgcaggccgaggcgcaggctaaggttgacaaaaagagggataaaattgaacggaagatcctagattcccaggaaagagcattttgggatgtgcaccgtcctgtgccagggtgcgtcaacacgacagaagttgacattaagaaatcctctcgaatgcgaaacccccataaaactaggaagtcggtgtatggcctacagaacgacattcggagccattctccaacccacacaccaaccccagagactaaacctccaaccgaggatgagcttcagcaacagatcaaatattggcagatacagctagataggcatcgcctcaagatgtctaaagttgctgattcattattgtcatatactgaacagtatctagagtatgatccctttttgctcccccctgacccgtccaatccctggctgtctgatgatacaacattttgggagctggaggcctcaaaagaacccagtcaacagagagtaaaacgttggggcttcggaatggacgaggcgctgaaggaccccgttgggcgcgagcagtttcttaaattcttggaaagtgaattcagctccgaaaacctgcggttttggctggcagtggaggatctcaaaaagcgacccattaaggaagtaccttcccgggtacaggagatctggcaagaattcttggcccctggggctccaagcgctatcaatctggactccaaatcctacgacaaaactacccagaacgtgaaggaaccaggccgctacaccttcgaggatgcccaggagcatatatataagctgatgaagtccgattcatacccacgattcatcagatcctctgcatatcaagagctcctgcaggccaagaaaaaaggaagaaatattcctatttttccctgtcataaaaactgtacaccgacactcagagctagtacaaacttgttgtag

SEQ ID NO: 202896 - DNA, 1275 bp, synthetic construct
  misc_feature 1..1275: note = Description of Artificial Sequence: Synthetic coding sequence
  source 1..1275: mol_type = other DNA
atggcccagggcaacaactacggccagaccagcaacggcgtggccgacgaatccccaaatatgctggtgtatcgaaagatggaggacgttattgccagaatgcaggatgaaaagaatggcatcccaatcagaacagtcaaatccttcttgagcaaaatcccatcagtgttttcggggtccgatatcgtccagtggctcataaagaacctcacaattgaggatcctgcagtgtatctatgcaagaggaccatgcagaacaaggcccggcttgaattggcggattacgaagccgagtccttagccaggctacagcgtgctttcgcccggaagtgggagtttatttttatgcaggccgaagcccaggcaaaggtggataagaaacgggacaagatcgagcggaaaatcttagattcacaagagcgtgccttttgggatgttcatcggcccgttccaggatgtgtgaacacaacggaagtggacataaagaaatcatccaggatgaggaatccccataagacgagaaagtctgtctatgggttacaaaatgatatccggtctcactctcccacacatacgccaacccctgaaacaaaacccccaacagaggacgagttgcaacagcaaattaaatattggcagattcagttagaccgtcatcgcctgaagatgagtaaggttgccgatagtctgctatcctatacagagcagtatcttgagtatgatccgtttttgctgcctcccgatccgtccaatccatggctaagtgatgatactaccttctgggagctcgaagcgtcaaaagagccatcgcagcagagggtgaaaaggtggggtttcggcatggacgaagccctgaaagaccccgtaggaagagagcaatttctaaagtttctggaatccgagttctcctccgaaaacctccgcttttggcttgctgtcgaagaccttaagaagaggcctataaaggaagtaccttcaagagtgcaggagatttggcaagaatttctggcacctggcgcacccagtgccattaatttggatagcaagtcatatgacaaaactacccagaacgtcaaggaacccgggaggtataccttcgaggatgcccaggaacacatctacaagctaatgaaaagtgattcatatcccagatttatccgatctagtgcctatcaggaactgcttcaggcaaaaaaaaagggccgaaatatccccatcttcccctgtcacaagaactgtacccctactctaagagccagcaccaacttgctgtag

SEQ ID NO: 202897 - DNA, 1410 bp, synthetic construct
  misc_feature 1..1410: note = Description of Artificial Sequence: Synthetic coding sequence
  source 1..1410: mol_type = other DNA
atggcccagggcaacaactacggccagaccagcaacggcgtggccgacgagtcacctaacatgctggtttacaggaagatggaggatgtgatagcacggatgcaagacgagaaaaatgggattccgattagaactgtaaagtcctttctatctaaaattccaagtgtctttagtggatcagatattgttcagtggctgattaagaatctaactatcgaggaccccgtggaggctctacaccttggcacactcatggcagcgcatggctatttcttccctatttctgatcacgtgctcaccctcaaagacgatggaacattctaccgctttcagaccccttacttctggccctctaactgttgggaaccagagaatactgattacgctgtttacctctgtaagagaacgatgcagaacaaagctcgtctggaattggccgactacgaggcagaaagcctggctcggcttcaacgcgccttcgcccggaaatgggaatttatattcatgcaggctgaagcgcaggcgaaggtcgataagaaacgggacaagatagagcgcaagattctggactcgcaggaaagagccttctgggatgtgcaccgccctgtgccaggatgcgtgaacacaaccgaggtggatattaaaaaaagttcccgcatgagaaacccccacaaaacacgcaagagtgtctatggcctgcagaacgacatcagatcacattcacccacccatacccccactcctgagaccaagcctcccacggaagatgaactgcagcaacagataaagtattggcagatccagctggaccgacaccgccttaagatgtccaaagtagcagacagcctgctctcatacaccgaacaatacctggagtacgatccgtttctacttccccccgacccaagcaatccatggctttctgacgacactacattctgggagctggaggccagtaaggaaccttctcaacaacgcgtaaagagatgggggttcggcatggacgaggcactgaaggacccagtaggccgcgaacagtttctgaaatttttggaatccgagttttctagcgagaatttgaggttctggctggcagtggaggacctgaaaaaaagacccatcaaagaggtcccaagtagggtacaggagatctggcaggaatttttggcacccggcgcgccctcggcgatcaacctggatagcaagtcctatgataagacaacccagaatgtcaaggaacctggcagatacaccttcgaggacgcccaggagcatatctacaagcttatgaaaagtgattcctatccgcgattcattaggtcatctgcttatcaagagcttcttcaagccaagaagaaagggaaaagtctgacaagcaaacgtctcaccagtctcgctcagagctattag

SEQ ID NO: 202898 - DNA, 1434 bp, synthetic construct
  misc_feature 1..1434: note = Description of Artificial Sequence: Synthetic coding sequence
  source 1..1434: mol_type = other DNA
atggcccagggcaacaactacggccagaccagcaacggcgtggccgacgagagccctaacatgttggtgtacagaaagatggaggacgtgatcgcgcgaatgcaggacgaaaaaaatggcatacccatcagaaccgtgaaaagctttctcagcaaaatccccagtgtcttttcaggttcagacatcgtccagtggttaatcaaaaatctaacaatcgaggaccccgtggaagctctgcatctcggaaccctcatggcggctcacggttactttttcccaatcagcgaccacgtccttaccctgaaggacgatggcaccttttatcgctttcagactccttatttctggccttccaactgttgggaacccgagaatactgattacgccgtatacctatgcaaaaggactatgcaaaacaaggcgcgcctagagctcgccgattacgaagcggagagccttgccagattacagcgggcctttgcccgaaagtgggaatttatattcatgcaggccgaggctcaggccaaggtcgacaaaaaaagagataagatagaacggaaaatcctggattcccaggagcgggccttctgggatgtccacagaccggtgcctggttgtgtaaataccaccgaggtcgacattaagaagagttctcggatgaggaatcctcacaagacccgcaagtccgtgtacgggcttcagaatgatatcagatcccactccccaacccacacccccactccagagaccaagcccccaacagaggacgaacttcagcagcagattaagtactggcaaatccaattggatcggcacagattgaagatgtcaaaggtcgctgactcattattgtcatacacggagcagtacctggaatacgatccattcttgctcccccccgacccaagcaacccttggctgtccgatgacactaccttctgggaactcgaggcttctaaagagcctagtcaacaacgagtaaagagatggggatttggaatggatgaagccttgaaagatccggtggggcgggaacagttcttaaaatttctggaatctgaattttcttccgaaaacttgagattctggctggcagtggaggatcttaagaagcgccccataaaggaggttccatctagagttcaggagatctggcaggagttccttgccccgggtgcaccatccgccatcaacttggacagcaaaagttacgacaaaacgacgcaaaacgtgaaggaacctggcagatataccttcgaagatgcccaagagcacatctacaagctgatgaaatctgattcttatcctaggtttatcagaagttccgcgtaccaggagctcttgcaggccaagaaaaaaggacgcaatattccaatcttcccctgccacaagaactgtacccctaccctacgggcctccacaaatctgctgtag

SEQ ID NO: 202899 - DNA, 1410 bp, synthetic construct
  misc_feature 1..1410: note = Description of Artificial Sequence: Synthetic coding sequence
  source 1..1410: mol_type = other DNA
atggcccagggcaacaactacggccagaccagcaacggcgtggccgacgaaagtccaaatatgctcgtttatagaaagatggaggacgtcattgcacgcatgcaggacgaaaagaacgggatcccaataagaactgtgaagtccttcctgtcaaaaataccctccgtgttcagcggctcggacatagtgcaatggctgataaagaacctgactattgaagacccagttgaggcccttcatctggggaccctgatggcagcccacggctattttttcccaatcagcgatcacgttctgactctcaaggacgatggcaccttttacaggtttcagacaccatacttctggccctcaaattgctgggagcccgagaataccgactatgccgtgtatctgtgcaaacggacgatgcaaaataaagccagactggaacttgcagactatgaggccgagtccctcgcacgcctgcaaagggctttcgcccggaagtgggagttcattttcatgcaggcggaggcccaagccaaggtggataaaaagcgggataagatcgagcggaagattttagattcacaggagcgtgccttttgggacgtacatcgcccagttcccggttgcgtgaacactacagaggtcgatatcaaaaagagcagtaggatgcgcaatccacacaagacgcgtaagagcgtgtatgggttgcagaacgatataagatctcacagcccaacacacacgccaactccagaaacgaaaccaccaactgaagatgaattacagcaacagatcaaatactggcagattcaactggatagacacaggctaaagatgagtaaggtcgcagactccttgttgtcctatacagagcagtatctcgaatatgacccctttctgctaccaccagatccatctaacccttggctttctgatgataccacattttgggagctcgaggccagtaaagagccatcccaacaacgtgtgaaaaggtggggtttcggaatggacgaagctctgaaggatcccgtaggccgagaacagttcctgaagttcctggagtctgagttcagttccgaaaatctacggttctggctggctgttgaagacctgaagaagcggcccattaaagaggtgccgtctcgggtccaggaaatctggcaggaattcctggccccaggggccccatccgccatcaatctggatagtaagtcatacgataagactacacagaacgtgaaggagcctggcagatacacgtttgaagacgcccaggagcatatatacaagctgatgaagtcagattcctatcctcgtttcattagatcctccgcctatcaggagctccttcaagcgaagaagaagggaaagagcctcactagcaaacgcctcacgagcctggctcagagttactag

SEQ ID NO: 202900 - DNA, 1464 bp, synthetic construct
  misc_feature 1..1464: note = Description of Artificial Sequence: Synthetic coding sequence
  source 1..1464: mol_type = other DNA
atggcccagggcaacaactacggccagaccagcaacggcgtggccgacgagagcccaaatatgttagtataccggaagatggaggatgtgatcgcacgcatgcaggacgaaaagaacggaatacccatcaggacagtcaaaagttttctctctaaaattccgtcggtgttctcagggtccgacatcgttcagtggctgattaagaatcttactattgaagatccagtggaggccctccacctagggacactgatggctgcacacggttatttttttccaatcagcgaccatgtgttgactctcaaggatgatggaaccttttatcggtttcaaactccttacttttggcctagcaattgctgggagccagaaaacaccgactatgctgtgtacctgtgtaaaagaacgatgcagaacaaagccagactggagcttgcagattacgaggcagaaagtctcgcaagacttcagcgtgcctttgccaggaaatgggagttcattttcatgcaggcggaggctcaggcaaaagtcgacaagaagcgggataaaattgagcgcaagattcttgattctcaggaaagggctttctgggacgtccaccggccggtccctggctgcgtaaatacaaccgaagttgacattaagaaatcctctcggatgaggaatccgcataaaactcgaaagtcagtgtatggcttacagaatgacattaggtctcattcaccaacccatactcccacccccgagaccaaaccaccgacagaggatgagctgcagcagcagatcaagtactggcagatccagcttgaccgccaccgccttaaaatgagtaaggtggccgattccttgctgtcatacaccgagcagtacctagaatacgatccttttttattgcctccggaccctagtaacccgtggctctctgacgatacaacgttctgggagcttgaagcctccaaggagccctctcaacaacgcgtgaagcggtggggttttggaatggacgaagctctcaaagatccagtcgggcgggagcagttcctaaaattcctggaatcagaattctcgagtgagaatttgcgattctggctggcagttgaagatttgaagaaacgtccgatcaaggaggtccctagtcgggtgcaagagatatggcaggagttcttggcacccggggccccaagcgccataaatttggattccaagagttatgataaaaccactcagaatgtgaaggaacctggccgttacacgttcgaagatgcgcaggagcatatctataaacttatgaagtccgacagttaccccagatttatccgcagctccgcttaccaggagctcctgcaggctaaaaagaagagcggaaacagcatggacagaaggacgtcctttgagaagtttgcgcaaaacgtggggaaatctctcacatctaagcgcctgacttccttagctcagtcctactag

SEQ ID NO: 202901 - DNA, 1275 bp, synthetic construct
  misc_feature 1..1275: note = Description of Artificial Sequence: Synthetic coding sequence
  source 1..1275: mol_type = other DNA
atggcccagggcaacaactacggccagaccagcaacggcgtggccgacgaaagccctaacatgctcgtgtacagaaaaatggaagatgtgatcgccagaatgcaagatgagaagaacggtattcccatcaggaccgtgaagagctttctctcaaaaatcccaagtgtcttcagcggaagcgacatagttcagtggctgattaagaacctgacgatagaagatccagcagtatacttgtgcaaacgtaccatgcagaacaaggcccgcctggagctggccgactatgaggctgagtccctggctcgacttcaaagagcattcgctaggaagtgggagttcatcttcatgcaggctgaggctcaagctaaagtggataagaagcgcgataagatagaacgtaaaatattggacagccaggagagagctttctgggatgtgcatcgcccggtgccaggatgtgttaatacaaccgaggtcgacattaagaaaagtagccgcatgaggaatcctcataaaacgagaaaatctgtgtacgggctgcaaaacgacataaggtctcattccccaacgcatacacccacaccagaaactaagccgcccaccgaggacgagctgcagcagcagataaagtattggcagatccagctcgatcggcataggctgaagatgtccaaagtggctgactccctcttaagctatactgagcagtaccttgaatacgatcccttcctgctccctccggatcccagcaacccatggctcagcgacgacaccacattttgggaactggaggcgtcaaaggaaccaagccagcaaagagtcaaaaggtgggggttcggcatggacgaagctctgaaagatcctgtgggtcgggagcaattcctgaagtttctcgagtcagagttctcgtcagaaaatctgcgattctggctcgccgtggaagacctgaagaaacgacctatcaaagaggtgccaagcagggtgcaagagatatggcaggagtttctggcacccggcgcgccttcagccatcaatctggacagtaagtcctatgacaagacaactcaaaacgtgaaagagcccggtcgttataccttcgaggacgctcaagagcacatttacaagctgatgaagtcagattcctacccccgcttcataaggtcttccgcttaccaagaactgttgcaggcgaagaaaaaagggagaaacattcctatttttccctgtcataaaaactgcaccccaaccctccgcgctagcacaaacctgctttag

SEQ ID NO: 202902 - DNA, 1488 bp, synthetic construct
  misc_feature 1..1488: note = Description of Artificial Sequence: Synthetic coding sequence
  source 1..1488: mol_type = other DNA
atggcccagggcaacaactacggccagaccagcaacggcgtggccgacgagtcacccaatatgctggtctaccgcaagatggaggatgtgattgcgcggatgcaggacgagaaaaacggtattccaatcagaactgtgaaatccttcctttcaaagattccatccgtcttttctggctcagatattgttcagtggctcattaagaacctgaccattgaagatcccgtagaggctttgcacctcggcacactgatggctgcccatggctacttctttcctatttctgatcacgtcttgaccttgaaagacgacgggacgttttatcgattccagaccccctatttttggcccagcaactgctgggagccggagaacacggattacgcagtttatctgtgtaagagaactatgcagaacaaggccaggttggaacttgccgactacgaagccgagagcctcgctaggctccagcgcgcttttgccaggaaatgggagtttatcttcatgcaggcggaggcccaggccaaggtggataaaaagcgggacaagattgaacgtaaaatcctggactctcaggagcgtgccttctgggacgttcaccgacctgtacccggctgcgtcaacacaaccgaggtggatattaagaagagttcaagaatgagaaaccctcataagactcgtaaatcagtctatgggttgcagaacgacattaggtcccattcaccaacacacaccccaacaccggaaacaaagccgcccacggaagatgaacttcagcagcagattaagtattggcagattcaactggaccgccaccgcctgaagatgagcaaagtggctgactccctcctatcctacacggagcaatatttggaatatgatccgttcctccttccccccgaccccagcaatccctggctttccgacgacaccaccttttgggaattggaagccagcaaagaacctagccagcaaagggtgaagcggtggggctttggcatggatgaggccttgaaggatcctgtgggtagggagcagtttctaaaattcctggagtctgagtttagctcagagaacctacggttctggctggccgtggaggatctgaagaagaggccgattaaagaagtgcccagtagagtccaggagatatggcaggagttcctggcccctggagctcctagtgctatcaacctggactcgaagtcttacgacaagaccacacaaaacgttaaggaacctggtaggtacaccttcgaagatgcacaggagcatatatacaaactgatgaagagcgactcttacccacgctttattcggtcttccgcttaccaagaactgcttcaggcaaagaagaagagcggaaatagcatggaccgcaggacatcatttgagaagtttgcacagaacgttggtagaaatatccccatcttcccctgtcacaagaattgcactcctaccttaagagcatcaactaacctgttgtag

SEQ ID NO: 202903 - DNA, 981 bp, synthetic construct
  misc_feature 1..981: note = Description of Artificial Sequence: Synthetic coding sequence
  source 1..981: mol_type = other DNA
caggccgaggcccaggccaaggtggacaagaagcgggacaagatcgaaagaaagatcctggactcgcaggagagggcattctgggacgtgcacaggcctgtgcctgggtgtgtaaacacaaccgaggttgatatcaagaaatcatccaggatgcggaatccccacaagacccggaaatccgtgtatggactgcaaaacgacatccgaagccattctcccactcacacaccaacacccgagactaaaccaccaactgaggatgagctacaacagcagatcaaatactggcaaattcagttagatagacatcgcttaaagatgagcaaagttgcggacagtctcctcagctacacagaacagtacctcgagtatgatcctttcctgttgccaccagacccatcaaacccctggctgtctgatgatacaactttctgggaacttgaggcatccaaggagccatcacagcagcgtgtgaagcgatggggcttcgggatggatgaggcactgaaagatcccgtgggcagggagcagttccttaagttcctggaatcagaattttcctccgaaaatctcaggttttggctagccgtagaggacctcaagaagcgacctatcaaggaggtacccagccgggtgcaggagatttggcaggaattcctagcccctggagctccatctgcgatcaacttggacagcaagagctacgacaagacaacccagaacgtcaaggaaccaggaaggtacacattcgaagacgcgcaggaacacatatacaaacttatgaagagcgattcctaccccagatttattcgcagcagcgcctatcaggagttgctgcaggctaagaaaaagtcaggcaacagcatggaccgcaggacgtcctttgagaaatttgctcagaacgtgggaaggaatatccctatctttccatgtcacaagaattgtacccctacactgagggcatcaaccaatcttctctag

SEQ ID NO: 202904 - DNA, 1182 bp, synthetic construct
  misc_feature 1..1182: note = Description of Artificial Sequence: Synthetic coding sequence
  source 1..1182: mol_type = other DNA
atggccgcccacggctacttcttccccatcagcgaccacgtgctgaccttaaaagacgacgggacattctataggtttcagaccccttatttctggccctctaactgctgggagcccgaaaataccgactacgctgtctatctttgtaagagaacaatgcagaacaaggcaagactggagctggccgactacgaagctgaaagtcttgcgaggctccagcgcgctttcgcccggaagtgggaatttatttttatgcaagcagaagcccaggcaaaggttgacaagaagagagacaagatcgagagaaagattctggacagccaggagcgtgcgttttgggacgtacacagacctgtgcccggctgtgtgaatacaaccgaggtagacattaagaaaagcagtcggatgcggaacccacacaagacgagaaaatccgtgtatggcttacaaaatgacatcagatcccattcacctacacacacacctaccccagaaacaaaaccaccaacagaggacgaattgcagcaacagataaagtattggcagatccagcttgatcgtcacagattgaagatgagcaaagtagcagattctctcctgtcttataccgagcaatacctagagtacgatccattcctgctgccacctgatccctccaatccgtggttaagtgacgacacaacgttctgggaactcgaggcttccaaggagccctcacaacagcgcgttaagcgatgggggtttggaatggacgaggctctgaaggatccagttggtcgcgagcagtttcttaagtttttagaaagtgagttctctagcgaaaatttgagattttggttagcggtcgaggacctcaagaaacgcccaatcaaagaggtaccttcgcgagtgcaggaaatctggcaagaatttcttgccccaggggccccgagtgcaattaatttggacagtaaatcttatgataagaccacacagaacgttaaagagcccggaagatacactttcgaagatgctcaagagcacatatataaactgatgaagtccgactcctatccccgctttattaggtcttctgcctatcaggagctccttcaggccaagaagaaagggagaaacatccccatcttcccttgtcacaaaaattgcaccccaacactgcgcgccagcacgaacctgctgtag

SEQ ID NO: 202905 - DNA, 774 bp, synthetic construct
  misc_feature 1..774: note = Description of Artificial Sequence: Synthetic coding sequence
  source 1..774: mol_type = other DNA
atgagcagcgcccccaacggccggaagaagcggcccagccggagcacaaggagctccatatttcagatctcaaaaccaccgctgcagagcggggactgggaacggagaggctccggctccgagagcgcgcacaagacccagcgcgcactggacgattgcaagatgctggtgcaggagttcaatacccaggttgctctgtatcgggaactggtcatctccataggtgatgtctccgtatcctgtcctagcttgagggccgagatgcacaagactagaactaagggctgtgagatggccaggcaggcccaccagaaactggcggctatctcaggacccgaggacggcgagatccatcccgagatctgccgtctgtatatccagttacagtgctgtttggagatgtacaccaccgaaatgctgaagagcatctgtttactgggaagcctgcagtttcatcggaaaggcaaggaacctggcgggggcactaagagcctggattgcaaaatagaggaatctgcggagacgcctgccttggaagactcctcttcatcacccgtggactcccagcagcatagttggcaggtgagtactgacatagaaaacaccgaaagagacatgagggagatgaagaatcttctcagtaaacttcgcgaaactatgcccctcccgcttaagaaccaagatgattcatcactgctgaacttaaccccttatcccctagtacggcgccgcaagcgtcgcttttttgggctgtgctgtctcatttcttcctag

SEQ ID NO: 202906 - DNA, 2025 bp, synthetic construct
  misc_feature 1..2025: note = Description of Artificial Sequence: Synthetic coding sequence
  source 1..2025: mol_type = other DNA
atgaccatccggcaccagggccagcagtaccggccccggatggcctttctccaaaagattgaagctctggtgaaggatatgcagaacccagagactggcgttagaatgcagaaccaaagggtactcgttacatccgttccccacgccatgactggttccgacgtgctgcagtggatagtgcaaagattgtggatcagttcgcttgaagcccagaacctgggaaacttcattgtgcgttacggctatatctaccccctgcaggacccaaaaaacttgatccttaagcccgacggctctttgtaccggtttcaaaccccatatttctggcccacccagcagtggcctgccgaagacacagactacgccatctacctcgcaaagagaaatataaagaagaagggtatcctagaggagtatgaaaaggaaaactacaattttctgaaccagaagatgaattacaaatgggatttcgtgattatgcaggctaaagagcagtacagagcggggaaggagcgtaataaggcagatagatacgccctggattgtcaagagaaagcatactggctggtccacagatgtcctccaggaatggataatgtgctcgattatggattggatcgcgtgaccaatccgaatgaggtcaaggtgaaccagaaacaaaccgtagtcgccgttaagaaggaaatcatgtactaccaacaggctctgatgagatcaacagtgaagtccagcgtgtccctcggcggcattgtgaagtacagcgagcagttttcgtcgaatgatgccatcatgagtggatgtctgccgtccaatccctggatcaccgatgatacgcagttctgggacctcaacgccaagctcgtagagatcccaaccaagatgcgggtggagaggtgggcgtttaatttctcggaattgatccgcgatcctaaagggcgtcagtctttccaatacttccttaaaaaagagtttagtggggagaacctggggttttgggaagcatgtgaagatttaaagtatggggatcagtcgaaagtgaaggagaaggctgaggagatatacaagctgtttctggcaccaggcgctcggaggtggatcaacatcgatggcaagactatggatattacagtcaaagggctgaagcacccacatcggtatgtgctggacgcagcacagacccacatttatatgctcatgaagaaagatagttatgcgcgctaccttaaaagcccaatctacaaggacatgctggccaaagctattgagcctcaggagacaactaagaaatctagcactctgccctttatgcgcagacacctgcggtcatcgccctcccctgtgatattgagacagttggaggaagaagccaaagcccgagaggcggctaataccgtcgacatcacccagcctggacagcatatggctcccagcccacacttgactgtatataccggaacctgtatgcccccttcccctagctctcctttctccagttcttgccgcagtccacgcaaacctttcgcatccccatcccgattcatccggcgacccagcacaactatttgtccttccccaatccgtgtcgccctggagtcttctagcggccttgagcagaagggcgagtgttcaggcagtatggcccctcgtggaccaagtgtaaccgagtctagtgaggcatctttggacaccagctggccccggagccggcccagggccccacccaaagcacgcatggcattaagcttttctcggttcctgaggaggggttgtttggcctccccagtgttcgcccgactttcgccaaaatgccccgccgtgtcccacgggcgtgtgcagcctctcggtgatgtggggcagcagctccccagactaaagtctaagcgcgttgctaacttttttcagattaaaatggacgtgccaacgggctccggcacctgtctgatggattccgaagatgccggcacgggcgagagcggggatagagcgaccgagaaggaggtaatctgtccctgggaatccctttag

SEQ ID NO: 202907 - DNA, 2016 bp, synthetic construct
  misc_feature 1..2016: note = Description of Artificial Sequence: Synthetic coding sequence
  source 1..2016: mol_type = other DNA
atgaccatccggcaccagggccagcagtaccggccccggatggcctttctacaaaagatcgaagctctggtcaaggatatgcagaatcccgagaccggcgttaggatgcagaatcagcgggtcctcgtgacatctgttccccacgcaatgactggcagcgacgttctgcagtggatagtgcagaggctgtggatcagcagtctggaagcccagaacctcggcaacttcattgtaagatacggatacatctaccctcttcaggacccaaagaatctaattttaaaacccgatggcagtttgtaccggttccagaccccgtacttttggccgacccagcaatggcctgccgaagatacagactatgccatctatctcgctaagaggaacatcaagaaaaaaggaattctggaggagtacgaaaaagaaaattacaattttcttaatcagaagatgaattacaaatgggatttcgtgatcatgcaggccaaggagcagtatcgggctggtaaggagagaaataaagcggaccggtatgctctcgattgccaggaaaaagcgtactggctggtccacaggtgtcctccagggatggacaatgtgctggattatggcctggacagggtaaccaacccgaacgaggtgaaaaaacaaaccgttgttgcagtgaagaaagagatcatgtactatcagcaggcgctgatgagatccaccgttaaatctagcgtgtctctcggcggaattgtcaagtactccgagcagtttagttccaatgacgcaatcatgtccggatgcttgccttctaatccctggatcacagacgacacacagttctgggacctgaacgccaagctcgttgaaatacctaccaaaatgcgcgtcgagcggtgggcatttaatttcagtgaactaatccgagacccaaaaggccgccagtcttttcaatatttcctcaagaaggagttctctggggagaacctgggtttttgggaagcgtgcgaggacctcaaatatggggaccagagtaaggttaaggagaaagccgaggagatatacaagctgttcctcgcccccggagccaggaggtggatcaacatcgacggaaaaaccatggacattactgtgaaaggcctgaagcatcctcacagatacgtgctggacgctgctcagacccacatctacatgttgatgaaaaaggattcctacgcccgctacctgaagtctccaatatacaaagacatgctcgccaaagcgattgaaccgcaggaaaccacgaaaaaatccagtactctcccattcatgagacggcacctgcgctcttctccttcccccgtaatacttcggcaacttgaagaggaggccaaggctcgagaagcggccaacaccgtcgacatcacccagcccggacagcacatggccccgtcaccccaccttaccgtgtatacgggcacctgtatgcctccttctccaagttcccccttctctagcagctgccggtcacccagaaaaccgttcgcctctccgtccaggttcattaggaggcccagtaccaccatttgtccgagcccaataagagttgctctagagtctagctctggtcttgaacaaaaaggagaatgcagcgggagcatggcaccaaggggaccctccgtcactgagagttcggaggccagtttggacacatcctggccacgaagccgcccacgggcccctcccaaagcccgaatggctctgtcctttagccgcttcctgcgccgagggtgcctggcatcgcctgtgttcgcacgccttagcccaaaatgcccagccgtaagtcatgggcgcgtgcagccacttggtgatgtgggtcaacagctgcctagactgaaatccaagcgggtcgcaaatttcttccagataaaaatggacgtccctaccggctctggtacgtgtctgatggactccgaggatgccggaactggagagagcggggaccgggctacagagaaggaagtcatttgcccttgggagtcactgtag

SEQ ID NO: 202908 - DNA, 4008 bp, synthetic construct
  misc_feature 1..4008: note = Description of Artificial Sequence: Synthetic coding sequence
  source 1..4008: mol_type = other DNA
atggagagcgagatgctgcagagccccctgctgggcctgggcgaggaagacgaggcagatttgacagactggaatctaccactcgcctttatgaagaaaagacactgtgagaaaattgaaggctccaaatctctggctcagtcctggcggatgaaagaccggatgaaaacagtctcagtggccctcgtgctgtgcctgaatgtcggcgttgatccccccgatgtcgtgaagaccacgccatgcgctcgcctggagtgttggattgatccgttatccatggggccgcaaaaagccctggagaccataggcgctaatctgcagaaacagtatgagaattggcagccccgggcacgttataaacagtcactcgaccccaccgtcgacgaagtgaagaagctgtgtaccagcctgagacgcaatgctaaagaggagcgcgtcctctttcactataatggtcacggtgtgccacgtcctaccgtgaacggcgaggtgtgggtattcaataagaactatacccagtatatacctctctctatctacgatctccagacatggatgggctcaccatcgattttcgtttatgattgttccaacgctggcctgattgtcaagagttttaagcagtttgccctccagcgggagcaggagctggaagtggctgccattaacccgaaccacccactggctcagatgcctttgcccccaagtatgaagaattgcatacaattagccgcttgtgaggcaacagaactcctccctatgatacccgatctccccgccgacctattcacttcttgtctgaccactcctataaagattgcgctgaggtggttttgtatgcaaaagtgtgtctcccttgtcccaggagtcacattagatcttatcgagaaaatccctggtcgacttaatgaccggcgcacccctttgggtgaactgaattggatcttcactgcaatcaccgatacgattgcatggaatgtgctgccccgcgacctgttccagaagcttttccgccaggatcttctggtcgcctccctgtttcgaaatttcttgctggcagagcggataatgaggagctataactgtactcctgtgagctcaccaaggctgccccccacgtacatgcacgccatgtggcaggcgtgggatctggctgtggacatctgtctgagccaactcccaacgatcattgaggagggcacagcattccgtcactccccattcttcgcagagcagctcaccgcattccaggtttggctgacaatgggcgtcgagaaccggaaccctcctgagcagctccccattgtgctccaggtgctgctgtcccaggtccatcgcctgcgggctcttgatctgctcggaagattcctggacctcggaccctgggcagtgtccttggccttgtccgtcggcatctttccctacgtcctcaagctgttacagagcagtgctcgggagctgcgacctctactggtgttcatttgggccaagattcttgccgttgattcctcctgtcaggccgatctggtcaaggataacggacataaatacttcctgagcgtgttggccgatccatatatgcccgctgaacatagaaccatgaccgcatttatcctggccgtgatagtcaatagctaccataccgggcaagaggcatgcctgcaaggaaacctgatcgctatatgcctcgaacaactcaatgaccctcacccgctgcttcgacaatgggtcgccatctgtttgggccgcatctggcagaactttgacagcgcccgatggtgcggggtccgggattctgctcatgagaagctgtattcactgctgtctgaccctattccagaggtaagatgcgccgctgtgttcgcgctcgggacatttgttgggaacagcgcagaaaggaccgatcactcaactactatcgaccataatgtggcaatgatgctagcacagctggtgagtgatggctctcctatggtgagaaaggagttggtggttgccctgtcccatctggtggttcagtatgagagcaacttttgcactgttgcactgcagttcatcgaggaggagaagaattacgcactgccctctcccgcaacaactgagggcggctccctgacccccgtgcgtgattcgccatgtacacctcggctgcgttctgtcagttcatatgggaacatcagggcagtagctacagctcgctccttaaataaatctttgcagaaccttagcttgacagaggagagtggaggagcggtggccttctccccaggcaacttgagcacgagcagtagcgccagttctacactcggaagtcccgagaatgaggagcacatactctcttttgaaactattgacaagatgcgacgagcgagcagttatagctcgctgaacagcctgatcggggtgtcctttaacagcgtttatacacaaatttggcgggttctgctccatctagcagctgatccttatcccgaagtctccgacgttgccatgaaggtcctcaactctatcgcgtacaaggccaccgtgaacgctcgtccacagcgtgtcctggacacatcaagtttaacacagtcagcgcctgctagcccgaccaacaagggggtacatattcaccaggccggaggctctcccccagcttcttctacctcctcttcaagccttacaaacgacgtagctaaacagccagtaagcagggatctgccaagcggacgtcctggcactaccggccccgctggggcccagtacacccctcacagtcaccaatttccgagaactagaaaaatgtttgacaaaggcccagagcagactgcagatgacgcagacgacgcagccggtcacaagtcttttatatctgctaccgtgcagaccgggttttgcgactggtctgcgagatacttcgctcagcctgtgatgaaaatccctgaggaacacgacttggaatcccagattcggaaggagcgggagtggaggttcctccgcaacagcagggtcagacgccaggcgcagcaggtaatccagaagggaattacccgactagatgaccagatcttcttaaatagaaaccccggcgtaccctcagttgtgaaatttcacccattcactccatgcatcgccgtcgcggataaagacagtatttgtttttgggactgggagaagggggaaaaactggactacttccacaacggaaacccccgctatacacgcgtgacagcgatggagtatttgaatggtcaggattgtagcctcctgctgaccgccaccgatgatggcgcaattcgggtctggaaaaacttcgctgacctcgaaaagaatcccgagatggtgacagcctggcagggcctgtcggatatgttacccacgacccgcggagccggtatggtggtcgattgggagcaggaaaccggcctgctcatgagctccggagacgtccggatagtgcgcatctgggataccgatcgcgagatgaaggtgcaagatatccctactggagccgactcgtgcgtgacctctctctcctgtgacagtcaccgctcactgatcgtggccggcctgggagacggcagtataagagtttatgataggcgtatggccttgagcgagtgtcgggtgatgacctatagagagcatacagcttgggtcgtgaaagctagtttgcagaaaaggccagatggacatatcgtttcagtaagcgttaacggtgatgtgcgaatcttcgaccctcgtatgccggagtccgttaacgtgctgcagattgtgaagggcttgaccgcactggacattcacccacaagctgacttgatcgcatgcggcagtgtgaatcagttcacagccatctataattcctccggcgagttaattaataacatcaagtactacgacggcttcatgggccagagggttggggccatttcatgtctggcctttcatccccattggccccaccttgccgttggaagcaacgattattacatatcagtctatagcgtggaaaaacgagtgcgatag

SEQ ID NO: 202909 - DNA, 990 bp, synthetic construct
  misc_feature 1..990: note = Description of Artificial Sequence: Synthetic coding sequence
  source 1..990: mol_type = other DNA
atgggcagccccagcatcttcgtgtacgactgcagcaacgccggccttattgttaagagttttaagcaattcgcattgcaaagagagcaggagttagaggtggccgctataaacccaaaccaccctttagcacaaatgcccctccccccttctatgaagaattgtatacaattagcagcttgtgaggctactgaactgctgcccatgattcctgatctccccgctgacctttttacatcttgcttgacaaccccaataaaaatcgccttgcgctggttctgtatgcaaaagtgcgtcagtctcgtgccgggagttacattagacttgattgagaaaatccctggccgcttaaacgacaggagaactcccttgggagaactgaattggatatttacagcaattaccgatacaatcgcttggaacgttctccctagggatttgttccaaaagctgtttcgacaggatttacttgtggcgtccttgttccggaactttcttctcgctgagagaatcatgagatcgtacaactgtacccccgtgtcatcaccaagactccctcccacctacatgcatgctatgtggcaggcctgggatctggccgtcgatatttgtctctcacagttgccgaccatcattgaggagggcacagctttcaggcactctcctttcttcgctgaacaattaacagccttccaggtgtggctcaccatgggcgttgagaatcggaaccctcccgagcagctgcccatcgtcctgcaggtgcttctttcccaggtgcaccggctcagagctctggacctgctcggcaggtttctcgacctgggcccttgggccgtatccctggccctctctgtcgggatctttccgtacgtgctgaaactcttacagtcctctgccagggagctaagaccacttctggtgttcatttgggcaaagatacttgcagttgattcagtctccatccccgcacttttgcctagggttatgtag

SEQ ID NO: 202910 - DNA, 3534 bp, synthetic construct
  misc_feature 1..3534: note = Description of Artificial Sequence: Synthetic coding sequence
  source 1..3534: mol_type = other DNA
atggagagcgagatgctgcagagccccctgctgggcctgggcgaggaagacgaggccgatcttacagattggaatctaccattagcattcatgaagaagcgacactgcgaaaagattgagggtagcaaatccctggcacaatcttggcgcatgaaggatagaatgaagacagtgagcgttgccctggtattatgcctgaacgtaggcgtggacccccccgacgtcgtgaagaccacaccatgcgcccgtctagagtgttggatcgaccctttgtccatgggacctcagaaggcgctagagactattggcgcgaacctccaaaagcagtacgagaactggcagcctagggcacgatacaagcagtcactggaccctaccgtggatgaagtcaaaaaactgtgtacaagcctcaggcgaaacgctaaagaggagagggtgttgttccactataacggccatggcgtccctcggcccactgttaatggagaagtctgggtgttcaacaagaattacacacagtatattcccctgagtatatatgatctgcaaacttggatggggtccccttcaatttttgtgtacgactgcagtaacgcgggcctaatcgtaaagagttttaagcagtttgctctgcagcgggagcaggagctggaagtggcggctatcaatcctaaccacccgctggcgcagatgcctctccctccttctatgaagaactgtatccagctggccgcctgtgaggcgaccgagcttctacctatgatcccagatttacccgcagacctatttacctcttgtctgaccacaccaatcaagatcgctttacgctggttttgtatgcagaagtgcgtgtcactggttccaggcgtgacactagacctgatcgagaagatccccggtcggttgaacgataggcgcactcccctgggggaacttaactggatttttactgccatcaccgatacgattgcctggaatgtgctaccgcgggacttatttcagaagctctttaggcaggatctattggtggcctcattgttccggaattttctcctcgccgaacgcataatgcgctcttacaattgtactccagtgtccagtccacggctaccaccaacctacatgcatgccatgtggcaggcatgggatttggccgtagacatctgtttaagccagctgcccactatcatagaagaggggaccgcattccgccacagcccgttctttgccgaacagctaaccgcttttcaggtgtggctcactatgggagttgaaaatcgaaatcccccagagcagctcccaatagtgttacaggttcttctgtctcaggtgcaccgactgagggcactggacctgttggggcgattcttggacctggggccatgggctgtgtccctagccctgtctgttggaatttttccctacgtgctcaaactgctacagtcttccgccagagagctgcgacccctgctagtcttcatctgggcaaagatactagcggtcgactccgaactagtggtagcactttcacacctcgtggtgcagtacgaaagcaacttttgtaccgtcgccctgcagttcatcgaagaggaaaaaaactatgctctgcctagccctgctacaaccgaggggggctctctgaccccagtgagggattccccatgcacgccccgattaaggtccgtttcaagttatgggaacattagagctgtggctacagcaaggtctttaaacaaaagtctgcagaatctgtctctgacagaagaatccgggggagccgtcgctttctcaccaggcaacctgagcaccagttcatcagcctcgagcactctggggagccctgagaacgaagagcacatccttagcttcgagaccatcgataagatgcgtcgggcctcttcctatagcagccttaattccctcatcggggtatctttcaactcagtttacactcagatatggcgtgtcttgctgcatctcgctgctgatccttaccccgaggtaagcgacgtcgctatgaaggttcttaatagcatcgcatacaaagctaccgtgaatgctaggcctcaacgtgtactggatacatcgtctctaactcagagcgcaccagccagccccacaaacaagggggtacacatacaccaggctgggggcagtcccccagccagttctacctcgagctcttctctcacgaatgacgtcgcaaaacaaccagtgtctcgcgacctgccatctggtcgtcctggaaccactggacctgcaggcgcccaatatactccacactcccaccaattccccagaactaggaagatgttcgataaagggcccgagcagaccgccgatgacgcagacgatgccgctggccataaaagttttatttccgcaaccgtacaaaccggattctgcgattggtcggccagatacttcgctcagcccgttatgaaaatccccgaggaacacgatctggagtcacagataaggaaagaacgcgaatggaggtttctgaggaattcccgggtgcggaggcaagcacagcaggtcatccagaaaggaattacccggctcgacgaccagatctttctgaatcgaaatcccggtgtgccatccgtcgtcaagtttcacccatttactccatgcatagctgtcgctgataaggattcaatttgtttctgggactgggaaaaaggagaaaaactggactacttccacaatggtaatcccaggtatactcgggtgaccgcgatggagtacctgaacgggcaagattgcagcctgttgctgactgctacagatgatggcgctatccgcgtgtggaaaaatttcgcagacctcgagaaaaaccctgaaatggtaaccgcttggcagggcttgtccgatatgttgccaacgacacgcggagccggcatggttgtggattgggagcaggagaccgggctgcttatgtcgagtggcgacgtgagaatcgtccgcatctgggacacggaccgtgagatgaaggtccaggacattccgactggggccgattcctgtgtgacaagtctgagttgcgattctcatcgctccttaatcgtggctggactgggcgacggatccattcgggtgtacgatcgtcgaatggctcttagcgaatgccgagtcatgacttaccgggagcatacagcctgggttgttaaggcctccctgcagaagcgccccgatgggcatatcgtatccgtcagcgttaacggggacgtacggatatttgatcctcggatgcccgaaagcgtcaacgtattacagattgtaaaagggttgacagccctcgatattcacccccaggctgatttgatcgcatgcggtagcgtaaaccagttcacagcaatttataactcaagcggagaactgattaataacatcaagtactacgatggcttcatgggtcagcgcgttggcgctattagttgtctggcctttcatccacattggcctcacctggcggtagggtctaatgactactacatatccgtatattcggtggaaaaacgggtgcgctag

SEQ ID NO: 202911 - DNA, 2097 bp, synthetic construct
  misc_feature 1..2097: note = Description of Artificial Sequence: Synthetic coding sequence
  source 1..2097: mol_type = other DNA
atgcagaacagcgagggcggcgccgacagccccgccagcgtggccctcagaccctccgccgctgccccccctgtccctgcttcaccacagcgggtgctggtgcaagcagcctcatcgaaccctaagggagctcaaatgcagcctatttctctccctcgagtgcagcaggtccctcaacaggtgcagccagtccagcatgtgtatccagctcaggtgcaatacgtggaagggggcgatgcagtctacacaaacggggcaataaggaccgcgtatacctataaccccgaacctcagatgtatgccccaagcagcacagcgagctattttgaggcaccgggaggagctcaggtgacagtcgcggcctctagcccccccgccgtgcccagccatagcatggtcggaatcacaatggatgtgggcgggagccctattgtaagttccgctggcgcctatcttatccacgggggaatggattcgacgaggcatagccttgcccatacttccagatcttcccctgccaccctgcagtggctcctagacaactacgagaccgcagagggagtaagcctcccgcgttcaagcctctataaccactatctgcggcattgccaggaacataagctcgatccagtcaacgcggccagctttggcaaactcatccgtagtgtattcatgggcttgaggactcgccgcctggggacccggggaaacagcaaataccactattacggcatccggttaaagccggatagcccgttaaataggctgcaggaggacactcagtacatggccatgcgccagcaacctatgcatcagaagccaagataccggccggcccagaaaacggattccttaggggattccgggagccactcggggctgcattccacaccggagcaaaccatggccgttcaatcgcagcaccaccagcagtacatcgatgtgtcccatgtctttccggaattcccagcgcccgatttaggctccttcctcctgcaggacggggtgacactccatgacgtgaaagcactgcagctggtataccggcggcactgcgaagcgaccgtcgacgtagtgatgaacctgcagtttcattacattgagaagttgtggctcagtttttggaattctaaagctagcagtagcgacggacctaccagtcttccggctagtgacgaggatcctgaaggcgcagtgctgccaaaagataagctgatctctctttgtcagtgcgaccctattcttaggtggatgagatcatgcgatcacattctctaccaggcacttgtcgagatcttgatcccagatgtcctgagacccgtgccctctacattaactcaggctatacgcaatttcgcaaaatccctcgaaggctggctgactaacgccatgtccgattttccgcaacaggtgatacaaactaaagtgggagtagtcagtgctttcgcgcagaccctcaggcggtacacaagcctcaaccacctggctcaggcggcacgcgccgtgttgcagaatacttcccagattaatcaaatgctttccgatctcaatcgcgtggattttgcaaatgttcaggagcaagcttcttgggtctgccaatgtgaggagtccgtagtgcagaggcttgaacaggattttaaactcaccttacaacagcagtcttcccttgatcaatgggcctcttggttggacagtgtggttacacaagtcttgaagcagcatgccggatctccctcgtttccaaaggccgcacggcagttccttctgaaatggtctttttactcctccatggtgattcgcgatctgaccctgcggtccgctgcgtcgttcggctcatttcacctcatccgcctgctctatgacgaatacatgttttatcttgtagagcacagggtggccgaggccacgggggaaactcctattgccgttatgggcgaatttaacgaccttgcctcattaagtcttacgctcctcgacaaggatgacatgggcgatgagcaacgcggctccgaagctgggcccgacgccaggagtctcggggaaccacttgtcaaacgtgagagaagcgatccaaatcattctctgcaagggatctag

SEQ ID NO: 202912 - DNA, 2940 bp, synthetic construct
  misc_feature 1..2940: note = Description of Artificial Sequence: Synthetic coding sequence
  source 1..2940: mol_type = other DNA
atggccacccaggcctacaccgagctgcaggccgccccccccccctctcagccaccgcaggcaccacctcaggctcaacctcaacctccaccacctccgccgccagcagccccgcaaccccctcagccaccgaccgctgcggcaactccccagcctcagtatgttactgaattacagtcgcctcagcctcaagctcagcctcctgggggacagaagcagtatgtaaccgaattacctgccgtgcctgccccttcacagcctactggggcgcctaccccatcacctgctccccagcaatacattgtggtaacagtatctgaaggcgccatgcgcgcttcagagaccgttagtgaggccagcccaggaagcaccgcatcacagacgggggttccgacccaggtggtgcagcaagttcagggaacacagcagcggcttcttgtgcagacttccgtacaggccaagcctggtcacgtgtctcccctccagcttacaaacatccaggtgccacagcaggcactcccgactcagagactcgtggtgcagtccgccgctcctggatcgaagggcggccaggtatcactgaccgtgcacgggacccaacaggtccactcgccacctgaacagtctcccgtgcaggcaaattctagctctagcaaaacagccggcgctccaactggaaccgtgccacagcagctgcaagttcatggtgtccagcagtccgtgcccgtgacacaggaacgctctgttgtgcaggctaccccccaggctcctaagcccggacccgtgcagccccttaccgtgcagggcctgcagcccgtacacgttgcccaggaagtgcaacagctccagcaagtcccagtgccccacgtgtattcctcccaagtgcaatatgtcgagggcggcgacgcaagttatacagcatcagccatacgttcctcaacctactcctaccccgaaacccccctctacacccagaccgccagcacatcatactatgaggcagctggaaccgcgacacaggtcagcacacccgccactagccaagcagtggcgtcaagcggaagcatgccaatgtatgtgtccgggagccaagtggtggcttctagcacctcaaccggagctggggctagcaatagctccggcggtggcggatcagggggcggcgggggcggcggcggaggaggagggggggggggctcaggtagtacgggaggtggcggttcaggcgctggaacctacgtgattcagggaggttatatgttgggctcagcctcccagtcttattctcacacgacaagggcatcacctgctactgtgcagtggctcttggacaattatgagaccgccgaaggcgtgagcctgccccgctcaactctttattgccattatttgctgcactgccaggaacagaagctggagcccgtcaatgcggcttctttcggaaaactgattaggtctgtgttcatgggcctcagaactagacgcctgggcacaaggggaaacagcaaatatcattactatgggctgcgtatcaaggcctccagtccccttctgcgccttatggaggatcagcagcatatggcaatgcgggggcagccattcagtcagaaacaacgactcaaacctatacaaaaaatggaagggatgacaaacggtgtagctgtgggccaacagccttcaactggactttcagatattagtgctcaggtccagcagtaccagcaatttctggacgctagcagatctctcccagattttaccgaactcgacctgcaggggaaggtgctgcctgaaggcgtgggcccgggggacatcaaagcttttcaggtgctgtatcgggagcactgcgaggctattgtcgacgtgatggttaatctgcaattcacattagtagagacgctgtggaaaacgttttggaggtataatttatcacagccttcagaagccccaccgctcgccgtccatgacgaggccgaaaaaaggctgcccaaagcaattctcgtcttgctgtcgaagttcgaacctgttctgcagtggacgaagcactgcgacaacgtgctctaccagggcctggtggaaatcctgataccagatgttctgagacccatcccttccgcactcacccaggccatcaggaattttgccaaaagcctagaaagctggctgacccacgccatggtgaacatacctgaggaaatgctgagggttaaggttgctgccgccggggcttttgctcagaccctgagaaggtacacctccctcaaccatctggctcaagctgctcgggccgtgctccagaataccgcccagatcaaccagatgctcagcgacttgaacagggtagacttcgcaaacgtccaggagcaggccagctgggtctgtcgttgtgaggacagagtggtacagaggctggaacaagacttcaaggtgacactccagcagcaaaattccttggagcagtgggccgcctggctagatggagttgtgtcccaagtgctgaagccatatcagggatccgccggcttcccaaaggcagccaagctctttctgctcaagtggtctttctacagttctatggtaatcagggatctgaccctgcgttctgcagccagttttgggtcttttcatctcatccggttactttacgacgagtatatgtattacctgatcgaacatagagtcgcacaggccaagggagagacccctatagcagtaatgggcgagtttgctaatctcgccacgagcttgaaccctctcgacccagataaggacgaagaagaggaggaggaagaagaaagcgaggacgagctcccgcaggacatctccctcgccgcaggcggcgagagccctgccttggggccggagacattagaaccaccagcgaagctcgccaggacagatgccagaggactcttcgtccaggccctgccttcttcttag

SEQ ID NO: 202913 - DNA, 2172 bp, synthetic construct
  misc_feature 1..2172: note = Description of Artificial Sequence: Synthetic coding sequence
  source 1..2172: mol_type = other DNA
atgcagaacagcgagggcggcgccgacagccccgccagcgtggccctgcgtccatctgcagccgcccccccagtacctgcttccccacaaagggtgctcgtgcaagcggcgagttctaatcctaagggcgcccagatgcaacccatttccttacctcgtgtgcagcaggtccctcagcaggtccagccggtgcaacatgtttatcccgcccaggttcagtacgtcgaggggggtgacgcggtttacacaaatggcgccatccgtaccgcttacacctataatccagaacctcaaatgtacgcaccatcttcgacagccagttattttgaggcccctggaggcgcccaggtgacggtcgccgcatcaagtcctcccgccgtgccctctcacagcatggtggggattactatggacgtcggcgggagccccatcgtaagcagcgctggtgcgtacttaatccacggggggatggactcaacaaggcattcacttgcacatacctcccggagctctccggccacattagagatggcaattgaaaatttgcagaagtcagaagggatcacctctcataagagcggattacttaactcccacctgcagtggctgctggataattatgaaactgcggagggagtgtccctccccaggagctctttgtacaaccactatttgagacattgtcaggaacacaaactggaccccgtcaacgctgccagtttcggtaagctcattcgtagcgtgttcatgggtctgcgtactagaaggttgggcaccagaggaaacagcaaataccactactatggaatacgactgaagccagactcgcccctgaataggctgcaagaggatactcagtacatggcaatgagacagcagcccatgcaccagaaacctaggtaccgcccagcgcagaagacagattccttgggtgacagcggctcacattccggtcttcattccactccggaacagaccatggcggtccaatcacagcaccatcagcaatacatcgatgtgtcccatgttttccccgaatttcctgcacccgacttaggcagtttcctgctgcaggacggcgtgaccttgcacgacgtgaaggcgcttcagctggtttaccgacgacactgcgaagccacagtcgatgtcgtgatgaacttacagttccattatatcgagaagctgtggctgagtttctggaacagcaaggcgagttcaagcgacggacctacttccctgcccgcttccgacgaggatccggagggtgcagtcctcccaaaagacaagctgatcagtctctgtcaatgtgaccctattttgaggtggatgaggtcatgcgaccacatactgtatcaggcccttgtcgaaatcttaatccctgacgtgctgagacccgtgccctcaaccctgacacaggccattcgtaattttgcgaagagtctagagggatggctgacaaatgcaatgtctgacttcccccagcaggtgattcaaacaaaggtaggtgtagtatcagccttcgctcagactctgagacgctacacgtccttgaaccatctagcccaggcagcgagagccgttcttcagaatacaagccagatcaaccaaatgctctcagacctcaacagagtagacttcgcaaatgtccaggaacaggcctcatgggtgtgtcagtgcgaggaaagtgtcgttcaaaggcttgagcaggactttaagctcaccctgcagcagcagtccagcttggatcagtgggctagctggttagactccgtcgtgacccaagtgttaaagcagcatgcagggagtccctccttcccaaaggctgcgcggcagtttttgcttaaatggtctttctactcatctatggtgatacgtgacctgactctgcgcagtgctgcttccttcggctcattccacctcataagacttctgtatgacgaatatatgttttacctggttgaacacagagtcgccgaggccaccggagagacaccaatcgctgtgatgggagagttcaatgatctggcatctctgtccctgactctcttggataaggacgacatgggggatgagcaaaggggaagtgaggcgggtcctgatgcaagatcactcggtgagcccctagtgaaacgggagagatcggaccctaatcacagccttcaggggatctag

SEQ ID NO: 202914 - DNA, 2097 bp, synthetic construct
  misc_feature 1..2097: note = Description of Artificial Sequence: Synthetic coding sequence
  source 1..2097: mol_type = other DNA
atgcagaacagcgagggcggcgccgacagccccgccagcgtggccctgcgcccctccgcagccgctccacctgtccccgcgtcaccacagcgggtgctagtgcaagccgctagcagcaatcccaaaggagcgcaaatgcagcccatttccctgccaagagttcagcaggtacctcaacaggtgcaacctgtgcagcatgtctacccagctcaggtgcagtatgtcgagggcggcgatgctgtgtatacgaatggggcgattagaactgcgtatacttataaccccgaaccccaaatgtatgctccaagttctacggctagttactttgaggctcccggcggcgcacaagtgacggtagccgccagttcccctcccgcggtcccctcgcactcaatggtgggaataacaatggacgttggaggtagccccattgtgtcctcggccggcgcctaccttatccatggcggcatggacagtacacgtcattccctcgcacacacctccagatcctcccctgccacacttcagtggcttttggacaactatgaaaccgccgaaggggtcagtctcccacggtcttccctgtacaaccattatctgcggcattgccaggagcataagctggaccctgtcaacgctgcttcattcggcaagctaattcggagcgtcttcatgggtcttcgcacccgaaggctgggtacccgaggaaatagtaagtaccactattatggtattaggcttaagccagacagtccccttaacaggctgcaagaagatactcagtacatggctatgcgtcagcaacccatgcaccagaaacctagatacagacccgcacagaaaacagattcactgggggattccggcagccactctggcctgcacagcaccccggagcagacgatggccgtccagtctcagcaccaccagcagtacatcgacgtaagtcacgtttttccagagtttcctgcccctgatcttggcagtttcctgttgcaagatggcgtgactctgcacgatgtgaaggctcttcagctggtgtatcgtaggcattgcgaggccactgtcgatgtcgttatgaacctgcagtttcattatattgagaaactgtggctgagcttctggaactctaaggccagcagctctgatggacctacttccctgccggcaagtgacgaggatccggagggtgccgtgctgcccaaggataagctgatctccctgtgtcagtgtgaccccatcctgcggtggatgaggagctgtgaccacatcttatatcaggcgctggtggagattctcatccccgatgtgctacggcccgtcccctctaccttaactcaggccatccggaacttcgctaaatctcttgaaggatggttaacaaacgcaatgtctgatttccctcagcaagtcatccaaacaaaggtgggagtggtgtccgcctttgcgcagaccttgcgtaggtatacatccttgaaccatctggcccaagcagcgcgagccgtcctccaaaacacgtcccagattaatcagatgcttagcgatctaaatcgcgtggacttcgccaatgtgcaggaacaggcgtcttgggtgtgccagtgtgaggaaagcgtggtacaaaggctcgaacaagactttaagctcaccctccaacagcaaagctctcttgatcaatgggcctcttggttagattctgtcgtgactcaggtcctgaaacagcatgccggttctccaagttttcctaaagctgcaaggcaattcttgctcaagtggagcttttattcttctatggtgatccgcgatctcaccctgcggtccgccgcctcttttgggtccttccatctgatcagactgctatacgatgaatacatgttttatttggtggaacacagggtcgccgaggcaaccggggagactccaatagcagtgatgggcgaattcaatgatctcgcatccctctcactgacactgctcgataaggacgatatgggagacgagcagaggggaagcgaagccggtcccgacgcgcggtctctcggcgagcccctagtaaagcgagagcgatccgaccctaaccacagcctgcagggcatttag

SEQ ID NO: 202915 - DNA, 1851 bp, synthetic construct
  misc_feature 1..1851: note = Description of Artificial Sequence: Synthetic coding sequence
  source 1..1851: mol_type = other DNA
atggccgaggacgagcccgacgccaagagccccaagaccggcggcagggctccgccaggaggcgcagaagcaggtgagcctacaaccctgctccaacgcctgagaggcactatctccaaggccgtgcagaataaagtagagggtatccttcaggatgtgcagaagttttcggacaatgataagctttatctgtatctgcagttaccctcaggcccaaccacgggcgataagtcaagcgaaccctccaccctgagcaacgaggagtacatgtatgcatacagatggatcagaaaccatctcgaggaacataccgacacatgtctccccaaacagagtgtgtacgacgcataccggaagtattgtgagagtcttgcttgttgtcgccccctgtccaccgccaattttggaaaaatcatccgggagatctttcccgacatcaaagcacgaagattgggcggccgggggcagtccaaatactgttatagcggtatcaggcggaagactttggtgagcatgccgcctttaccgggcctggatctgaaggggtcagagtctcccgagatgggaccagaagttactcctgcccctcgcgacgagcttgtggaggctgcctgtgctcttacgtgcgattgggccgaaagaatactgaaacgctctttctcctcaatcgtggaggtggcgaggtttctgctccagcagcacctcatcagcgcccgctctgcacacgcacatgttcttaaggcaatggggctggcagaagaggatgaacatgctccacgggagagatctagcaagccaaagaatggactggagaaccccgagggcggagcgcataaaaagcccgagagattggcgcagcccccaaaggatctcgaggcaaggacaggagcagggcctctggctcgaggtgaaaggaagaagagcgtagtggagtcctcggctcctggggcgaataatttacaggtgaatgcactcgtggccaggttgcctctcctgctgcctagagcccccagatctctgatccctccaatccctgtatcgcccccaattttagcccccaggcttagcagcggagccctgaaggtggcaaccctcccgctgagctcgagagctggtgccccaccagccgcagtgcccattataaacatgatcctcccgacagtgccggccctgccaggcccagggcccggccctggtcgcgcccctcccggaggcttgacccaaccccgagggaccgaaaatcgcgaggtgggaatcggcggagaccagggccctcacgacaagggcgttaagcgcaccgctgaagtccctgtgagtgaagcttctggacaggcaccccctgccaaggctgcgaagcaggatatagaggatacagccagtgacgccaagaggaaacgaggccgcccacgcaagaaaagcggcggcagtggcgagcgtaactctaccccccttaagtctgccgccgctatggaaagtgcacagagcagccggctcccttgggagacttggggatccggaggcgaaggaaattccgccgggggcgccgagagaccaggcccaatgggcgaagctgaaaagggagcagtcttggcccagggacagggtgatggaaccgtctcaaagggtggccgcggtccaggatctcagcacaccaaggaggccgaagacaagattccgctggtgccttccaaggtgagcgtgatcaaggggagcaggtctcagaaagaggcttttccccttgccaagggggaggtcgatacagcccctcaaggtaataaagacttgaaagaacatgtgctgcagagctctctgtcccaggagcataaagaccctaaggctactcctccttag

SEQ ID NO: 202916 - DNA, 1851 bp, synthetic construct
  misc_feature 1..1851: note = Description of Artificial Sequence: Synthetic coding sequence
  source 1..1851: mol_type = other DNA
atggccgaggacgagcccgacgccaagagccccaagaccggcggcagggcgccgcccggtggcgctgaggcgggcgaacccactaccctccttcaacgtctgaggggaacgattagtaaagctgtgcagaacaaggtggaaggcattcttcaggatgttcaaaaattttccgacaatgacaaactctacctgtatctccagctgccatccggtccaacaactggcgataagtccagcgaaccctccacactctccaacgaagagtacatgtacgcataccggtggattaggaatcacctcgaggagcataccgacacctgtctgcccaagcagtccgtctatgacgcatataggaagtactgcgagtccctagcctgttgccggcccctgagcaccgcaaacttcggtaaaattatacgggaaattttccctgatataaaggcccggcgcttaggcggccgggggcagagcaagtattgttattccgggattaggcgaaagaccctggtgtccatgcctccactgccaggactcgacttgaaaggcagcgagtcccctgagatggggcctgaggttacacccgcgccccgggatgaattggttgaagcggcctgcgcactcacatgcgactgggccgagaggatactgaagcgatccttcagtagcatcgttgaggtggcaaggtttctgttgcagcagcatctgatctctgccagatctgctcacgcccatgttctcaaggcaatggggctggccgaggaagacgagcacgccccaagggagagaagctctaaaccgaaaaacggcctcgaaaacccagaaggaggcgcccacaagaagcccgaacggttggctcagccccccaaggacctggaggctcggaccggggctggacccctggcccgcggcgaaaggaagaaaagcgtcgtcgaatccagcgcccctggggccaacaacctgcaggtgaatgcgttggtggccagactcccgttgctgctgccccgggccccccgctcactcattcctcccattcctgtgagtcctccaatcctggcgccacggctgtcttctggagccctgaaagtggccaccttgccattgtcgtctagggcgggcgctcctcccgccgcagtgccgattataaacatgatcctacccacagtccctgcccttccagggcccggccccggaccgggacgcgcccctcctggggggttgacccaaccccgcggaaccgagaacagggaagtcgggatcggtggagatcaagggccccacgataaaggagtgaaaaggactgccgaggtgcctgtgagcgaggcaagtgggcaagctcccccggcaaaggccgccaagcaggatatagaagacaccgcctctgatgctaagcgtaaacggggccgcccccgtaaaaagagtggaggtagtggagaacggaactccacgccactgaagtcagcagcagctatggagagcgcacaaagctcacggctaccatgggaaacctggggaagcggaggggagggcaactccgccgggggagccgaacgccccgggcccatgggggaggcagaaaagggcgctgtcctggcacagggccagggagatggcaccgtctcaaaaggaggccgtgggcccggctcccaacacaccaaggaggccgaagacaagatcccccttgtgccctctaaggtgtcagttatcaagggttctagaagccagaaggaggccttcccgctcgctaaaggcgaagttgacacagccccccagggaaacaaagatttaaaagagcacgtcttacaaagctcactgtcccaggaacataaagatccgaaggccactcctccatag

SEQ ID NO: 202917 - DNA, 1791 bp, synthetic construct
  misc_feature 1..1791: note = Description of Artificial Sequence: Synthetic coding sequence
  source 1..1791: mol_type = other DNA
atggccgaggacgagcccgacgccaagagccccaagaccggcggccgcgcgccccccggcggagccgaagccggagaacctacaactctacttcagcgattgcgaggcaccatctcaaaagcagtccagaataaggtggaaggcattctgcaggacgtacaaaagtttagcgacaacgataagctgtacttatacctgcaactaccatctggtcctaccactggcgacaagagcagcgagccctctactctgtctaacgaggaatacatgtatgcttataggtggatccgaaatcacctagaggagcacacagatacatgcctacccaaacaaagcgtctacgacgcttaccggaagtactgcgagtcactcgcttgttgtcggcctcttagcacggcgaactttggcaagatcatcagagagatatttcccgatataaaggcgcgaagactgggaggtcgtggtcagagcaagtactgctattccggaattcgcaggaaaactctcgtatcaatgccaccattacccggtctggatctcaaggggtccgagtctccagaaatgggtccagaggtaactccggccccgcgagacgaacttgtggaagccgcctgtgcattaacgtgtgactgggcagaaagaatcctgaaacgaagctttagttctatcgtggaagtggctcgattcttgctgcagcaacacctgatcagcgcaagaagtgcccacgcccacgtgctcaaggccatgggactggcagaggaggacgagcatgctcccagagagagatcctcgaagccaaagaacggattggaaaacccagaagggggagcacacaagaagccagaaaggctggcccaaccgcccaaggacttggaagcccggacaggagcaggcccactcgcccgaggggagcgaaagaaaagcgttgtagaaagtagcgccccaggcgccaacaacctccaggtgaacgcgctcgttgccagactgcctctgctgctgccccgagctccccggagcctgatccctcccatacccgtctctcccccaatcctggctcccagattgagttcaggtgccctgaaggtggccactctaccactgagctcaagagccggcgctccccctgccgccgtccctattattaacatgattctcccaaccgtacccgccctgcccggaccaggacccgggcccgggagagcacctcccgggggcttaacacagccaagaggaacagaaaacagagaagtgggaatcggaggcgaccaaggccctcacgacaaaggtgtaaagcgcacagccgaagtccccgtttccgaggcaagcggacaggccccccccgccaaggctgccaagcaagatatagaagacacagctagtgatgccaagcggaagcgggggaggcctagaaagaaaagcggcggatcaggagagcgaaactccaccccgctcaagtcagcagctgcaatggagtccgctcagtcctccaggctgccttgggaaacatgggggtccgggggcgagggaaattcagccgggggggcagagcgtcccgggcctatgggagaagccgaaaaaggtgctgtcttagcacaggggcagggcgatggcacagtatcaaagggaggcaggggcccagggtcacagcacactaaggaggcggaggataagattcccctggttccaagtaaggtatcggtaataaaaggtagtcgctcacaaaaagaagcctttccacttgccaagggtgaggtggacacagcaccacaggggaacaaagatctgaagtag

SEQ ID NO: 202918 - DNA, 357 bp, synthetic construct
  misc_feature 1..357: note = Description of Artificial Sequence: Synthetic coding sequence
  source 1..357: mol_type = other DNA
atggccgaggacgagcccgacgccaagagccccaagaccggcggccgcgcccccccaggcggtgctgaagccggcgaaccgacaaccctgctccagaggctccggggcactatctccaaagccgtccagaacaaggttgagggcattttacaggatgtacaaaaattcagtgacaacgacaaactttatctgtatctgcaactgcctagtggacccaccaccggcgataaaagtagtgagccgagcaccctcagcaacgaggagtacatgtatgcctacaggtggattcggaaccatcttgaagaacataccgacacatgccttcctaagcagtcagtctacgatgcctaccggtag

SEQ ID NO: 202919 - DNA, 693 bp, synthetic construct
  misc_feature 1..693: note = Description of Artificial Sequence: Synthetic coding sequence
  source 1..693: mol_type = other DNA
atggccgaggacgagcccgacgccaagagccccaagaccggcggccgagctccacctggtggagccgaggccggagagccaactacgctactccagcggctgaggggcaccatttccaaggccgttcagaacaaggtcgagggtatactccaagacgtacagaaattcagtgataatgacaaactctatttgtacctccagctgcccagcggccccacaaccggcgacaaaagctcagagcctagcaccctgtccaatgaagagtatatgtatgcctacaggtggattaggaatcacctagaggaacataccgatacttgtcttccaaaacaaagcgtttacgacgcctatcggaaatactgcgaaagtcttgcctgctgccgccccctgagcacagcaaactttggcaagattatcagagaaatttttcccgacattaaagcaagaaggctcggaggacgaggccagagcaagtattgctatagcggtatccgaaggaaaacccttgtctcaatgccccctctcccaggcttggatctaaagggcagcgagtcacccgagatgggccctgaggtcacaccggccccccgtgatgaactggtagaagcagcatgcgccctgacgtgtgactgggccgagcgaattctgaagcgctcttttagctcgattgtcgaggtggctagatttctgtag

SEQ ID NO: 202920 - DNA, 372 bp, synthetic construct
  misc_feature 1..372: note = Description of Artificial Sequence: Synthetic coding sequence
  source 1..372: mol_type = other DNA
atggccgaggacgagcccgacgccaagagccccaagaccggcggccgggctccacccggtggtgctgaggctggagaaccgaccactctgctacagagacttagaggcaccataagcaaagcggtgcaaaataaagtagaggggattctgcaggatgtacagaagttctcagataacgacaagctgtatctgtacctgcagcttccatcgggacctacaacgggggataaaagcagtgagccctctaccctctcaaatgaggagtatatgtatgcctaccgctggatacgcaaccacctggaggagcatacagacacatgtttgccgaagcagagcgtgtacgatgcatacagaaaatattgtgagtcatag

SEQ ID NO: 202921 - DNA, 291 bp, synthetic construct
  misc_feature 1..291: note = Description of Artificial Sequence: Synthetic coding sequence
  source 1..291: mol_type = other DNA
atggccgaggacgagcccgacgccaagagccccaagaccggcggcagggccccgccggggggggctgaggcaggggaacccactaccctgctccagaggctgcgtggcacaatcagtaaggctgttcaaaataaagtagaagggatccttcaggatgtgcagaagttttcagacaacgataagctctacctatatttgcaacttccaagcggccccacaaccggcgacaaatccagtgaaccttcaacactatcgaatgaggagtatatgtatgcttacagatggatctag

SEQ ID NO: 202922 - DNA, 321 bp, synthetic construct
  misc_feature 1..321: note = Description of Artificial Sequence: Synthetic coding sequence
  source 1..321: mol_type = other DNA
atggccgaggacgagcccgacgccaagagccccaagaccggcggcagagccccccccggaggagccgaagcgggagagccaaccacattgctgcagcgcctgcgagggacaatctcaaaggccgtgcagaacaaagtggagggcattctgcaggatgtacagaaattttcggacaacgataagttgtatttgtatttgcaattacccagcggccctactactggcgataaatcctctgagccttcgaccctgtctaatgaggagtatatgtatgcgtacaggtggatccgaaatcacctagaagagcacacagacacctag

SEQ ID NO: 202923 - DNA, 555 bp, synthetic construct
  misc_feature 1..555: note = Description of Artificial Sequence: Synthetic coding sequence
  source 1..555: mol_type = other DNA
atggccgaggacgagcccgacgccaagagccccaagaccggcggcagagcccctcccgggggggccgaagctggagaacccactacattactgcagagacttagaggcaccatctcgaaagccgtccagaataaagtggaagggattttgcaagatgtgcagaagttttctgataacgacaagctttacctctacctgcagctccccagtggacctactacaggcgataagtctagtgaaccaagtaccttatccaatgaagaatacatgtatgcttacaggtggattcgaaaccatcttgaagaacatacggacacatgcctcccaaagcagagcgtgtacgatgcctacagaaagtattgcgagtcccttgcatgttgcaggcccctctccactgccaacttcggtaagattattcgggagatatttccagatatcaaggcacggaggctgggcggtagggggcaatctaagtactgctacagcggcatccgccgcaagactctggtctccatgcccccgctgcccgggttggatctgaagggatctgagtag

SEQ ID NO: 202924 - DNA, 1731 bp, synthetic construct
  misc_feature 1..1731: note = Description of Artificial Sequence: Synthetic coding sequence
  source 1..1731: mol_type = other DNA
atggccgaggacgagcccgacgccaagagccccaagaccggcggcagagctccgcctgggggagccgaggccggagagccaacaactctcctccagcggcttaggggtacaatcagcaaggccgtgcagaacaaggttgagggcattctgcaggatgtgcagaaattttcagataatgacaaactctatctctacttacaactcccatccggcccaacgactggggataaaagaaagtattgtgagtctctcgcttgttgcaggcctctgagtaccgcgaactttggaaaaatcattcgagaaatcttccctgacatcaaagcacgtcggctgggtgggagagggcagtctaagtattgctactccgggattcggcggaaaactctggttagcatgcccccactgccagggttggacttgaaggggagcgagagccctgaaatgggccctgaagtaaccccagcgccacgcgacgagttggtagaggctgcgtgtgccttgacatgtgattgggcagagcggatcctgaaacgaagcttcagtagcatagtggaggtggctcgctttctcctgcagcagcacctgatttctgccaggtccgctcacgcccatgtgctaaaggccatggggctggccgaggaagacgagcacgcccccagggaacggagtagcaagccaaagaatggtctggagaatcctgagggtggcgctcacaaaaaacctgagcggttggcacaacctcctaaggatttggaagcaaggactggcgcaggtcctttggcaagaggcgagagaaagaagagcgtggttgaatcctcagcccccggggccaacaacctccaggttaatgccctggtcgcccgtctgcctctgctgctgcctcgggctccacgttctctgattcctccaattcccgtcagtcctcccatccttgccccccggctgtctagcggtgcccttaaagtggcaacactacccctctcttcgagagcaggagcaccaccagctgctgtaccaataatcaatatgatcctgcctacagttccagccctgcctggccccgggcccggtccgggccgcgctccccccggcgggctgacccagccccggggaacggagaaccgcgaagtagggattggcggcgatcaagggccccatgacaaaggcgtaaagcggacagctgaagtgccggtaagcgaagcttccgggcaggcacctcccgcgaaggcagctaagcaggacattgaggatacggcctcagatgccaagcgaaagcggggcaggcccaggaagaagtccggtgggagcggcgaacggaactcgactcctctgaaaagcgccgccgccatggaatcagcacaatcctccaggctgccctgggagacttggggttccgggggggaggggaatagcgccggaggggcagagagaccaggccctatgggcgaggcagaaaaaggcgcagtgctcgctcaggggcagggggacgggacggtctccaaaggaggtagaggtccggggtcccagcatacaaaggaggctgaggataagatcccattggtgccttcaaaggtgtctgtaataaaaggaagtcggagtcagaaggaagctttccctcttgccaagggagaggtcgataccgcaccccagggcaataaggatctgaaagagcacgtgcttcagagcagcctttcacaggaacacaaggatccaaaagccactcctccatag

SEQ ID NO: 202925 - DNA, 1851 bp, synthetic construct
  misc_feature 1..1851: note = Description of Artificial Sequence: Synthetic coding sequence
  source 1..1851: mol_type = other DNA
atggccgaggacgagcccgacgccaagagccccaagaccggcggccgagccccaccaggcggcgctgaggccggagaaccaaccactctgttgcaacggctgagaggaactattagcaaggccgtccaaaacaaagtcgaagggatccttcaggacgtgcagaagttctctgacaatgacaaactgtatttatacctgcagctaccatctggtcccaccacaggtgacaagtcaagcgaaccgtccaccctgtctaacgaggagtatatgtatgcatacagatggattcgcaatcaccttgaggagcacactgacacttgccttccaaaacaatcagtctacgatgcgtacagaaaatattgtgaatctctggcttgctgtcgtccactgtccaccgccaattttggcaagataatccgggagatcttcccagacatcaaggccaggagactgggaggccgcgggcagtcaaagtactgctatagtggcataaggaggaagactctggtgtccatgccccccttgcccggcctcgacctgaagggtagtgagagccccgaaatgggcccagaggttaccccagcacctcgggacgaactggtggaagccgcatgcgcccttacatgcgattgggccgagagaattttgaagagaagcttcagctcaatcgtcgaggtggcacggtttcttctccagcagcacctcatttcagcacggtccgctcatgcgcacgtgcttaaagctatgggtctcgctgaggaggacgagcatgccccccgggaaaggtcttctaagcctaagaacgggttggagaatccggaagggggcgcccataaaaagcccgaacgccttgctcagccacctaaagatttggaagccaggacgggggccggaccactcgcgcgcggcgagagaaaaaagtccgtggtggaatcaagtgcaccgggtgcgaataacctacaggtaaacgcactcgtggcccgactgcccctccttttacctcgcgccccgcggtccttgattccccccattccggtaagccctccgattctggctccaaggctttcttccggggcactcaaggtggcaaccctgccgttgtcgtcccgcgcaggcgcacccccggcagccgtaccgattattaacatgatcctcccaactgtgcctgccttgcccggccctggccctggtcctggccgggccccaccaggaggcctaacgcaacctagaggcaccgagaatagagaggtgggcatagggggggaccagggccctcacgataaaggagtcaagcgcactgccgaggtacctgtctctgaagcctccggccaggctcctcccgcaaaagctgccaaacaggacattgaagatactgcatcagacgctaagcgaaagcgtggccgtccacgaaagaagtcaggagggagtggggagcgcaatagcacacccctgaaaagcgctgccgcaatggagagcgctcagagctccagactcccatgggagacatggggcagtgggggcgagggaaacagcgccggaggcgcggagagacccggacccatgggcgaagccgaaaaaggcgctgtgctggcgcagggtcagggtgatggcacagtgagcaaagggggaagaggacctgggtctcagcacactaaggaggcagaggataaaattccgcttgtcccttccaaggttagcgtgatcaagggtagtagaagccagaaagaggcattccccctggcgaaaggggaggtcgacacagccccacaaggcaataaagatctgaaagaacacgtgctccagtcatccttgagccaggagcataaagatcccaaggccaccccaccctag

SEQ ID NO: 202926 - DNA, 498 bp, synthetic construct
  misc_feature 1..498: note = Description of Artificial Sequence: Synthetic coding sequence
  source 1..498: mol_type = other DNA
atggccgaggacgagcccgacgccaagagccccaagaccggcggccgcgcccctccaggcggggcagaggccggagaacctacgacccttctgcagcgacttagggggacgatatccaaagccgtgcaaaacaaggttgaggggattctgcaagatgtacagaagttctccgataatgacaagctatatctgtatctgcaattaccatccggccccactacaggggacaaatcttccgagccctctactctttccaatgaggagtacatgtatgcgtaccggtggattagaaatcatctcgaagagcataccgatacctgtctccccaagcagtcagtgtacgatgcatataggaaatactgcgagagccttgcttgctgtaggcctctgtccacggccaactttgggaagattattcgtgaaatctttcccgacattaaggcaaggcgactgggaggccgtggtcaaagtaaatattgctatagtggcattcgttag

SEQ ID NO: 202927 - DNA, 2787 bp, synthetic construct
  misc_feature 1..2787: note = Description of Artificial Sequence: Synthetic coding sequence
  source 1..2787: mol_type = other DNA
atggccaaggtgcccgagctggaggacaccttcctgcaggcccagcctgcaccacagctcagtcctgggatacaggaagactgctgtgttcagctgctgggcaaaggtttactcgtctaccctgaggagacagtgtacctcgccgcggaggggcagcccggcggcgagcagggcggaggagagaagggagaagacccagagctacccggggcagtcaaaagtgaaatgcacctgaataacggcaacttttcgtccgaagaagaggacgctgataatcatgacagtaagactaaggccgctgatcagtacctctcgcagaaaaagacaataacgcaaatcgtgaaagacaagaagaaacagacccagctgacactacagtggttggaggagaactacatagtgtgtgaaggcgtttgtttgccacgttgcatcctgtacgctcattacctcgatttctgcaggaaggagaaacttgagcctgcatgcgcagccacctttggaaagacaattagacagaagtttccgctgttgactacgcgacggctcgggacaaggggacactctaaataccattactacgggattggcattaaagagagcagcgcatactatcactctgtgtatagcggtaagggacttactaggttttctgggagcaaacttaagaacgaaggcggctttactcggaagtatagcctgagcagtaagacaggcacccttctgccagagtttccctcagctcagcatctggtgtaccagggctgcatctccaaagacaaagtggacacccttattatgatgtataaaacccactgccagtgcattctagataacgctatcaatggtaattttgaggaaattcaacactttttactgcatttttggcagggcatgcctgatcatctcctgcctctgctggaaaaccctgtgatcattgatattttctgtgtgtgtgattcaatcctttacaaagtccttacggatgtgctaatcccagctaccatgcaagagatgcccgagtcactgctggctgatatacggaacttcgcaaaaaattgggagcaatgggtcgtgagctctcttgaaaacctcccggaagccttgactgataagaagattcccatcgtgaggcggttcgtgagttctttgaagaggcaaacaagctttttacatctagctcagatcgcccggcccgccctattcgatcagcatgtcgtgaacagcatggtctctgatatagagagggttgacctgaactccattggctctcaggctctcttaacgatatcaggtagtacagacaccgagtcagggatctatacagagcacgacagcataaccgtctttcaggagcttaaggacctccttaaaaagaacgctacggttgaggcctttatcgagtggcttgacacagtggtcgagcagcgcgtgattaagacatccaagcagaacggtaggtcgctaaaaaagcgcgcccaggatttcctgctgaaatggagcttctttggggcccgagtaatgcacaacctgactttgaacaacgcaagttcgttcggttccttccaccttattagaatgctacttgacgagtacatccttctagcaatggaaacccaatttaataatgacaaagagcaggagctgcagaacttgttagataaatacatgaaaaattccgatgctagtaaggcagcctttacggccagcccctcctcttgttttctggccaatcgaaacaagggctcaatggtcagtagcgacgcggtgaaaaatgagagccacgttgaaaccacgtacctgccacttccatcttctcagccgggcggactcggacctgctctccaccagttccctgccggcaacaccgacaatatgcccctcaccggacagatggagctttctcagatcgctggacatttaatgacacctccaatttctccagcgatggcatctagaggctctgtcatcaatcagggtccaatggcgggcaggccgccatcagtgggccctgtcctttcagcaccgtcccattgcagcacctaccccgagcccatttaccccaccctgccacaggcgaatcacgacttttatagcaccagctctaattaccagaccgtgttcagagcacagccccacagcaccagtggtctgtacccccatcacaccgagcacggtcggtgcatggcttggactgagcagcagctgtcaagggactttttctcgggaagctgtgcgggttcgccatacaatagcaggccccctagtagttacggcccttcactgcaagcccaggattctcacaacatgcagttcctgaataccggctccttcaacttcttatctaatactggcgccgcctcttgtcagggggctacactgccgcccaacagtcccaacggatactacgggtccaacataaattatcccgaaagccacaggctgggctccatggttaatcagcacgtgtcggttatttccagcatccggtcactccccccatacagtgatattcatgacccattgaacattctcgacgactcaggacggaagcagacctcatcattctacaccgatacttcgtctccagtggcatgccgcactccagtcctcgcgtcctccctgcagactccaattccttcaagtagctcccagtgcatgtacggcacctcaaatcaatatcctgcgcaagagacactcgactcacacggaacctcctccagggagatggtgagctcactgcccccaattaacacggtctttatgggcacggccgcaggagggacgtag

SEQ ID NO: 202928 - DNA, 4122 bp, synthetic construct
  misc_feature 1..4122: note = Description of Artificial Sequence: Synthetic coding sequence
  source 1..4122: mol_type = other DNA
atggccgaggagcagcagcagccccccccccagcagcccgacgcccatcagcagttgccgccttcagcaccaaacagcggcgtggctctgcccgccctagtgcctggcctccctggcacagaggcatctgccctgcaacataaaatcaaaaacagcatttgcaagaccgttcagtctaaggtggactgcatcttgcaggaagtggagaaattcactgatcttgagaagctatacctgtatctccagcttccctccggcttgtcgaatggggagaaaagtgaccaaaacgcaatgagctcgtcccgcgcgcagcagatgcatgcctttagttggatccgcaacacattggaggagcatccagagacttccctcccaaagcaagaagtgtatgacgaatacaaatcctactgcgacaatctcggctaccatcccctgagtgcagctgattttggaaaaatcatgaaaaatgtgtttcctaacatgaaggcacggcggctcgggactagaggaaagagtaaatattgctatagtgggttaagaaagaaagctttcgtgcatatgccgacgctccccaacctggatttccataagactggcgacggcctggagggcgctgagccgtccggccaacttcagaacatagatgaagaggtgatctcaagtgcctgtcgtcttgtttgcgagtgggcacagaaagtgctttctcaaccgttcgacaccgtgctagagttagcccggtttttggtcaaaagccactacattggtacaaaaagtatggctgccctaaccgtgatggcggccgcccccgcaggcatgaagggtattactcagccctctgcctttatcccaactgccgagtcgaattcatttcagcctcaggtaaagaccctgccatctcctatcgacgcgaaacagcagctccagagaaaaattcagaaaaaacagcaagagcagaaacttcagtcacctcttcctggtgaatccgcagcgaaaaagtctgagagcgcaacgtccaacggggttactaacctacccaacggcaatccatctatactgtcacctcaaccgatcgggattgttgttgcagctgtcccatcacccataccagtccagagaaccagacaactggtgaccagcccctctcctatgtcatccagcgatggcaaagtgttgccattgaacgtgcaggtcgttactcagcatatgcagtccgtcaagcaggcccccaagactccacagaatgtgcctgcctctccaggaggggatcgcagcgcccgccataggtatccacagatccttccgaaacccgccaacacatcagccctgaccattcgaagcccgacgactgtccttttcacatcctcccccatcaaaactgccgtcgtgccagcctcacatatgtcatccttaaacgttgtgaagatgacgaccatctcactaaccccttctaatagtaatacccccctaaaacactccgcctctgttagcagtgctactggaacgacggaggagtctcgttccgtaccccagataaagaacggatcggtggtgagcctgcagagccctgggtcccggtctagttctgccggtggtacctcagcagtggaggttaaggtggaaccggagactagctctgatgaacatcccgtacagtgccaggaaaattccgacgaagcaaaggccccccagacaccgtccgccctcttagggcagaaatctaacacggacggagcacttcagaagccctctaatgagggggtgattgaaatcaaagcaacgaaggtttgtgatcagcgcactaagtgcaaatctagatgtaatgaaatgttgccagggaccagcacaggaaacaatcaaagcacaattaccctctccgtcgcctctcagaatctgactttcacctcaagttcatcacccccaaacggagattccatcaacaaagaccctaagctctgcactaaatccccaagaaagagactcagctccacactgcaggagacccaggtgcctcccgtaaaaaagccaatagtagagcagctgagcgcggccacaatcgagggccagaaacaaggctctgtgaagaaagatcagaaagttccccactcgggtaaaaccgagggctctacagcaggagcccaaataccatctaaagtgtctgtgaacgtgtccagccacattggagcaaatcaaccactgaacagtagtgcattggttatatctgactcagcgcttgaacagcaaacaaccccttccagctcaccggacataaaggtaaagttggaggggtcagtctttttgttggactctgattctaaatctgtaggatcctttaaccccaacggatggcagcagatcacaaaggatagcgagttcatttctgcatcttgtgagcagcagcaggacatctccgtgatgactattcctgagcacagtgatatcaacgatcttgaaaaaagcgtatgggaacttgagggcatgccccaagatacttactcacaacagttgcacagtcaaatacaggagtccagcctaaaccagattcaggctcactcctccgatcagctgccactccagagcgagttgaaggaatttgaacctagcgtctctcagactaacgaatcctattttccctttgatgatgagctgacccaggacagtattgttgaggaactggtgttgatggagcagcagatgagcatgaacaactctcactcgtacggtaattgcctcgggatgactttgcagagccaatctgtgacccccggggctcctatgagctcccataccagtagtacgcacttttatcatcctatccattcgaacgggacccccattcatacccccaccccaacccccacacccacccctacccctacacctaccccaacaccaacatccgaaatgatcgcagggtcacagtccctgagccgggagagcccttgttcaaggctggcccagacaacacctgtggattcggcactcggttcttcccgacacactcctattggtacgccgcacagcaattgttcctcaagcgtacccccttccccggttgagtgcaggaacccattcgctttcaccccaatcagttcctcgatggcttatcatgatgcttcaattgtgtcaagcagccccgtaaagcccatgcaacgtcctatggccactcaccctgacaagacaaaactggagtggatgaacaacggctacagcggcgttggcaattcgtccgtttcgggccacggcatcctgccgagttatcaagaacttgtcgaggatcggtttaggaaacctcacgcgtttgcagttcccgggcaatcttaccaatcgcagtctcgccaccatgacacgaactttggccgactcacccctgtatctccagtccagcatcagggtgccacggtgaacaatacaaataagcaggaaggcttcgcagttcccgccccgctggataacaaggggacgaacagcagcgccagtagtaatttccgatgccgctccgtctcccctgccgttcaccggcagaggaaccttagcggctccactctatatcctgttagcaatatacctcgcagcaacgtcacaccctttggctctccggtgacaccggaagtacacgtctttacaaacgtgcacaccgacgcttgcgccaacaatatcgcccagcgatctcagtcggtgcctttgactgtgatgatgcagaccgcatttccaaacgccctgcagaagcaggctaacagcaagaaaatcaccaacgtcttgctgagcaaactggatagcgacaatgacgacgcggtgcgcggcctcggtatgaataatctgccaagcaactacacagcaaggatgaacctcacccagattctcgagccgtccacggtttttccttcggccaacccccagaatatgatagattcttctactagcgtttacgagtttcagaccccgtcttatctaacaaagtctaatagcacaggtcagataaatttttcaccaggcgataatcaagcccaaagcgagattggtgagcagcagctagattttaactctacagtcaaggacctgctgagcggagattcattacagacgaaccagcaactgaagtatccggatgttttgggcgaatag

SEQ ID NO: 202929 - DNA, 3846 bp, synthetic construct
  misc_feature 1..3846: note = Description of Artificial Sequence: Synthetic coding sequence
  source 1..3846: mol_type = other DNA
atgagcagcagccgggcccagcagatgcacgccttcagctggatccggaataccctagaggaacacccagaaacaagtttacccaagcaggaagtgtacgatgagtacaagtcctactgcgataacctagggtaccatccactgtccgctgccgattttggtaaaatcatgaaaaatgtattccctaatatgaaagctcggcgcctgggcacgcgcgggaaatccaaatactgttactccgggctgcggaagaaggccttcgtgcacatgccgaccctcccaaacctggactttcataaaaccggcgatggtttggaaggagccgaacccagtggccagctgcagaacattgacgaggaagtaatatcttccgcatgccgcctggtctgcgaatgggctcagaaagtgctgtcccagccgtttgacaccgttctggagcttgcacgctttctggtgaagtcacattatatcggcaccaagtctatggcagcattgaccgtgatggctgcagcacccgcagggatgaagggcataacacagccttccgcatttataccgacagcagaatctaactcatttcaaccacaagtgaagaccctgccaagccctatagatgcaaagcagcaacttcagagaaagatccaaaaaaagcaacaagagcaaaagctgcagagcccattgccaggcgagagcgccgccaaaaaaagtgagagcgctacctcaaatggtgtcaccaaccttcctaatggtaatccttcaattctgtctcctcagccgatcggtattgtggtggctgccgtcccctctccaatccccgtgcagcgaacccgccaactcgtgacttccccatctccaatgtccagctccgacggaaaagtgttaccgctgaacgtccaagtggtcacacagcacatgcagagtgttaagcaggcccctaaaactccacagaacgtccctgcctccccaggcggggaccgcagtgcacggcaccggtatccccagattctgcccaaaccagcaaatacatctgcgctcaccattcgatcacccactactgtcctgtttactagctccccgataaaaaccgcagtcgtgcctgccagccacatgtcaagcctgaacgtggttaaaatgaccaccatttcactgacgcctagtaacagcaataccccactgaagcattcagctagcgtttcctccgctaccggcacgacggaagagtctaggtccgtgccacagattaaaaacggcagcgtggtatcccttcagtcacctggctctaggtcctcatctgcaggaggcacttctgcggttgaagtgaaggtggaacctgaaacgtcttctgacgaacatcccgtccaatgtcaggagaatagcgatgaggcaaaggcaccacaaacgccgtcagccctgctgggacagaaaagcaataccgatggcgccctgcagaaaccttccaacgagggagtaattgagatcaaagctacaaaggtttgcgaccagagaaccaaatgcaaatctagatgtaatgagatgctccctggtactagtacaggaaacaaccaatccacaataaccttgagcgtcgcctcccaaaacttgacctttacttcttcgagctccccgcccaacggagacagcatcaacaaagaccccaagttgtgtaccaagtcccctcgcaagagactaagtagtacactgcaagagacgcaagtaccaccggttaaaaagcctatcgtggagcagctctctgctgcgaccatcgagggccagaagcagggcagtgtgaagaaagatcagaaggttccccatagcggcaagaccgaaggctctactgccggcgcacagattccatctaaggtgtccgtcaatgtttccagccacatcggagcgaatcaacctcttaactcctccgccctggtgattagcgattctgcactcgagcaacagacgactccctcttcctctccagatatcaaggtaaagctggaaggctctgtcttcctgctggactccgacagcaagtctgtcggaagttttaacccaaatggatggcagcagattacaaaggattctgaattcatcagcgcctcatgtgagcagcagcaggacatatccgtcatgacaatccccgaacattcagatatcaacgacctggagaagtccgtgtgggaactggagggaatgccacaggacacatactcccagcaattgcacagccagatccaggaatcttcactaaaccaaattcaggctcactcatcggaccagcttcccctccagtctgagctgaaagagtttgaaccttctgtgagccaaaccaacgagtcctacttcccgtttgatgatgagctgactcaggactcgatagtcgaggagctggtgctcatggaacagcagatgtctatgaataactctcattcttacgggaactgcctcgggatgaccctccagtcacaaagtgtgactcctggagcgcctatgtcgtcacatacttcaagtactcatttctatcatcccatccacagcaacggaactccaatacatacgccaacgcctacccccacacctaccccaaccccgactcctacgccaaccccgacctcggagatgatcgccggatctcagagcctgagtcgggagtctccttgcagccggctggcccagaccacccccgtcgatagcgctctgggctccagccgacataccccgatcgggactcctcactcgaattgcagctcgtctgttccccctagcccagtcgaatgccgcaatcccttcgcgttcactccaatttctagctccatggcttatcatgacgccagtattgtttctagcagtccagttaagcctatgcagagacccatggccacacacccagacaaaacaaaattggagtggatgaacaatggctattctggagttggcaatagctccgtgagtggtcacggtatcctcccctcctaccaggagctcgtggaggatcgcttccgtaagcctcacgccttcgcagtgcctggtcagtcctaccaaagccaatcaaggcaccacgatacgaacttcgggcggcttactcctgtgagccccgttcaacaccagggcgctacagtgaataacaccaacaaacaggaagggttcgccgtgcccgcgccactcgataacaagggtacaaatagttccgcgtcttcaaattttcgttgccgcagcgttagcccagccgtccacaggcagaggaatctgagcggttccactttgtatcctgtgagcaacattccccggtcgaatgtcacaccctttggcagcccggttactcctgaagtgcatgtgtttactaacgttcacactgacgcctgcgcaaacaatatagcgcagcggtcgcagagcgtcccgctgaccgtaatgatgcagacagccttccctaacgccctacaaaaacaggccaactccaaaaaaatcaccaatgttctgcttagtaagcttgactccgacaatgacgacgctgtccgcggcctgggcatgaacaacctcccatcaaactacactgctcggatgaacttgactcaaatcctcgaaccctccactgtatttccaagcgcaaatccccagaatatgatcgactctagcaccagcgtgtacgagttccagacaccctcttaccttaccaagtcaaattcaaccggccagatcaacttctcaccaggagacaatcaggcccagtcagagatcggcgaacagcaactggacttcaattcgactgtgaaggatctgctctcgggggactccctccagacgaaccagcagctgtgcagctgccccagttccttactggccggaatgcagatgtag

SEQ ID NO: 202930 - DNA, 4383 bp, synthetic construct
  misc_feature 1..4383: note = Description of Artificial Sequence: Synthetic coding sequence
  source 1..4383: mol_type = other DNA
atggccgaggagcagcagcagccccccccccagcagcccgacgcccaccagcaattgcctcccagtgctcccaattccggagtggcattgccagctctcgtgcccggcctgcccgggactgaagctagcgcacttcaacacaaaattaagaactccatctgcaagactgtccagagcaaggtggactgtatccttcaggaagttgaaaagtttaccgacttagaaaaactttatctctatctccaactgccctctggactttcaaacggggagaagtccgaccagaacgctatgtcatccagtcgcgcgcagcagatgcatgccttttcttggattagaaacactctggaggagcacccagagacctcattgcccaagcaagaggtgtacgatgagtacaaatcttattgtgataacctcggctaccacccactgtcagcagcagacttcggtaagatcatgaagaatgtctttcccaatatgaaagctaggcgtctggggacaagaggcaagagcaagtactgctatagtgggctgcgcaagaaggcttttgtacatatgccaactctgcccaacctggacttccacaagacaggagacgggctggaaggggccgagccctccggtcagctgcagaatattgatgaggaagttatctccagcgcttgtagactggtgtgcgaatgggcccagaaggtgttgtcccagccctttgacaccgtcctggaacttgctcggtttctggttaagagccactatattggaaccaaaagcatggccgcactgactgtcatggccgcggcccctgctggaatgaaaggcattacacaaccctcagctttcatcccgacagctgaatctaatagcttccaaccacaggtgaagacactgccatccccgatagatgccaagcaacagttacagcggaagattcaaaagaagcagcaggaacaaaaactccaaagcccactgcccggcgagtccgcggccaagaagagcgaatcagctacgagcaacggagtgacaaatctgcccaacggtaaccccagcatcctgtcaccccagccaatcggtatcgttgtcgccgcggtcccatctcccattcctgttcagcgcacgcggcagttagtcaccagcccctctccaatgtcttcttctgatgggaaagtcctgcccctgaatgttcaggtcgtgactcagcatatgcagagcgttaaacaggcaccgaaaacaccccagaatgtgcctgcctcgccaggcggagacaggtctgcccggcaccggtatccacaaatcttgcctaagccagccaatacatctgccttgacaatcaggagcccgacgaccgtgctattcacttctagccccataaagaccgcagtggttcccgctagccacatgagtagcctgaatgttgttaaaatgactacgatcagccttaccccatctaactcaaacactccccttaagcatagtgcctcggtgtcatctgccacaggcacaaccgaggaatcccgtagcgtaccccaaatcaagaacggctctgtggtctcactccagagtccagggtcccggtcttcaagcgcgggaggcactagcgcagttgaagtcaaggtcgaacctgaaacatcctctgacgaacacccggtgcagtgccaggagaacagtgacgaggcaaaagcgcctcagactccatcggcattgctgggccaaaagagtaacactgacggggccctgcaaaagccctctaacgagggggtgattgagattaaggccaccaaagtgtgtgaccaacggaccaaatgtaagtcccgctgtaacgaaatgttgcctggaacttcgaccggaaataaccagagcacaataacgctctctgtggcatcgcagaatcttactttcacttcatcttcttcacctccgaacggagattccataaataaagatccaaaactgtgcaccaagtcacctcggaaacgcctctcctccactctccaggagacccaggttccgcccgtcaagaagccgatcgtggagcagctgagcgctgctactatcgagggccagaagcaaggcagcgttaagaaggaccagaaggtgccgcatagtggtaagacggaaggatctactgctggcgcacaaatcccctcaaaagtgtcagttaacgtgtcgagccatattggcgctaaccagcctctgaattcaagcgccctggtgatctctgacagcgcattggaacagcagacaactcccagcagctcccccgatatcaaagtgaagttggagggctcagtgttcctgctcgatagcgactcaaagtctgtcggctcctttaacccaaacggttggcagcagataacaaaggacagtgagtttatctcggcctcctgtgaacaacagcaggacatcagtgtgatgaccatacccgaacactctgatataaacgacttggagaagagcgtgtgggaattggagggaatgccacaggacacctattcacagcagctgcattcacagatacaagaatcctccctgaaccaaattcaggctcactccagcgaccagctgcctcttcagtccgaactgaaagaattcgaaccatcagtgtcgcaaacaaacgagagctattttccattcgacgatgaactcacccaagattccatcgttgaggagttggttctgatggagcagcaaatgtctatgaataactctcactcctacggcaactgtctagggatgacactgcagtctcagtccgtgactcccggcgccccaatgtcaagtcatacgagttctacacacttttaccaccccatccattcaaatggaacgcctattcatacccccacacccactccaacaccaaccccgacaccgaccccgacacctacaccgactagtgagatgatcgcgggatcccaaagcctgtccagagagtccccttgtagcagacttgctcagactacacccgtcgatagcgcactagggagcagtcgacacacacccatcgggaccccacattctaattgcagctcgagcgtgcccccctctccagttgagtgccgcaacccctttgcctttaccccaatctccagctctatggcttaccacgacgctagcatagtgtcctcctccccagtgaagccaatgcagcggcccatggcaactcatcctgacaagaccaaactggagtggatgaataacgggtactccggagtcggaaattcttccgtgagcggccatgggattctgcccagctaccaggaactcgttgaggatcgttttcgcaaaccacacgcctttgctgtccccggccaatcctaccagagccaatcgaggcatcacgacacaaattttgggcggctgaccccagtgtctcccgtgcagcatcaaggcgcgactgtgaataatacaaacaagcaagagggattcgccgtaccagcgcccttggataacaagggaacgaattcgagcgcttcttccaactttaggtgtaggtctgtgagcccagcggtgcaccggcaacggaatctttctggctctaccttgtatcccgtgtcgaacatcccccgtagcaacgtgacccctttcggaagccccgtaacaccggaggtccacgtgtttaccaatgtgcacaccgacgcctgcgccaataatatcgctcagaggtctcaatctgtacccctcacagtcatgatgcagacagcctttcctaatgctttgcagaaacaggctaatagcaagaaaattaccaatgtattgctgtccaagctggactcagataacgacgacgctgtgaggggcctgggaatgaataacttgcctagtaactacactgccaggatgaacttgacacagattctcgaaccgagtacagtcttcccaagtgcaaacccacagaacatgattgacagcagcacttcggtctacgagtttcaaacaccaagctatctgacaaaatctaacagtaccggccagatcaacttctccccaggagataaccaggcccagagcgaaattggtgaacagcaactggattttaacagtactgtgaaggatctcctctctggagacagtctgcagacaaaccagcagctcgtgggccaaggagcatccgatttaactaacactgcgtcggacttttccagcgatattcggctgtcaagcgaattgagcgggagcattaatgatctgaacacactggatcctaatttgctgtttgaccctggtagacagcagggtcaggacgacgaggccaccttagaagagctgaaaaacgacccgctcttccaacagatctgtagtgaaagcatgaacagcatgacttcatcgggattcgagtggatcgagtcaaaggatcatccgactgtggaaatgctcggctag

SEQ ID NO: 202931 - DNA, 4092 bp, synthetic construct
  misc_feature 1..4092: note = Description of Artificial Sequence: Synthetic coding sequence
  source 1..4092: mol_type = other DNA
atgagcagcagccgggcccagcagatgcacgccttcagctggatcaggaacaccctcgaagagcaccccgagacttcattgccaaagcaagaggtgtatgacgagtacaaaagttattgtgacaatctggggtaccatccattatcagccgcggactttggaaagattatgaagaatgtcttcccgaatatgaaggcccgacggctgggcaccagggggaaaagcaagtactgctactcaggcctccgaaagaaggcgtttgtacacatgcctaccctcccgaacttagactttcataagacgggcgacgggctggagggggccgagccaagtggacagctgcagaacatcgatgaagaggttatttcttccgcctgtcgcctggtgtgcgagtgggctcagaaagttctgtctcagccattcgatactgtcttagagttggcccgatttttggtgaaatctcactacattggaacgaagagtatggccgcgctaaccgtgatggcggccgcacccgccgggatgaagggcattacacagccgagcgccttcataccaactgccgaatcaaactcgtttcaaccccaggtgaagactctcccatcccctatcgacgctaaacagcagttgcaaagaaagatacaaaagaagcaacaagaacaaaaattacagtctccactgcctggcgagagtgctgcaaagaaatccgagtccgcaacatctaacggcgtgacaaatcttccaaacggcaatccttcgattctgtctcctcagccaatagggattgtagtcgcggcggttccaagccctatccctgtgcagcgtaccaggcagctggttacatctccttcaccaatgtcctctagcgacggcaaggtgctgcccttaaacgtgcaggtggtgacacagcacatgcagtcggtaaagcaggctcccaagacccctcaaaatgtgcccgcgtcccccggcggagataggtctgcccgacatcgatatccccagattcttccgaagcccgctaacacctccgcattgacaattcggtcacccaccacagtgcttttcacctccagccctatcaagactgcagtggtccctgcttcccatatgtcttctttgaatgtggtgaagatgaccacaatatcactgaccccatctaattccaacactcctctaaaacattcagctagtgtgagctccgcgaccggaacaacagaagaatccaggtccgtgcctcagatcaagaacggatccgttgtgtcccttcagtccccaggctctagatcttctagcgctggtggtacaagtgcagtcgaagttaaggttgagccagaaacatcttccgacgagcatccggtgcagtgccaggaaaatagcgatgaagccaaagcacctcagaccccaagtgcgttattaggacagaaatctaacacagacggcgccctgcagaaaccatcaaacgagggagtcattgagatcaaggcgacaaaagtatgtgaccagagaactaagtgtaagtcacgctgcaatgagatgttgccaggtacctccacagggaataatcagagtactatcacgttgagtgtcgccagccagaacttgaccttcacaagctccagtagtcctcccaacggggattccatcaataaggatcccaagctgtgtaccaagtcaccccggaaacggctcagcagcacactgcaggagacccaagtgccccctgtgaaaaagccaattgttgaacagttgagcgccgccacgatcgaggggcagaaacagggctccgtaaaaaaggaccagaaagttcctcattcaggtaagaccgaggggtctacggccggtgcccagattccaagcaaggtgtccgtcaacgtctcaagccatataggtgctaaccagccacttaatagctccgctctcgtcatcagcgattctgcactggagcagcagacaactccatcctcttcccccgacatcaaggtgaagttagagggctcagtgttcctcctggatagcgattctaagtccgtgggcagctttaaccctaatggatggcagcaaataactaaggactctgaatttatatccgcgagttgtgagcaacaacaggatattagcgtgatgactataccagagcactccgatatcaatgacctggagaagtccgtctgggaattggaaggcatgccgcaggatacctacagtcagcagttgcactctcagattcaggagtctagcctcaaccagatccaagcacacagctcagaccagttaccacttcagtcagagcttaaggagtttgaaccctcagtgagtcaaaccaatgaatcttattttccttttgacgatgagctgacacaggattccattgtcgaagagctcgtccttatggaacagcaaatgtcaatgaacaatagccactcgtacgggaattgcctcggcatgacactgcagagtcagagcgttaccccgggcgctcctatgtccagtcacaccagctcaacacatttttaccacccaattcacagtaacggtacacccatccacacacctaccccaacacctaccccaaccccaaccccgaccccgacaccaacccccacatccgagatgatagcgggcagtcagtccctgtctagagaaagcccgtgctctagattggcccaaacaactccagtggattccgccctcggatccagccggcacacgccaatcgggaccccacattccaattgctccagcagcgtcccaccaagccctgtggagtgtagaaatcccttcgcctttactcctattagttcctcaatggcctaccacgacgctagtatagtaagctcaagcccagttaagcctatgcagaggcccatggcaacccacccagataaaacaaagctggagtggatgaacaacggttattccggcgtcgggaattctagcgtgagcggccacggtatcctgccatcgtatcaagaactcgtggaggataggtttaggaagccgcacgccttcgccgttccaggacaatcctatcagtcacagagccgccaccatgacactaattttggaagattgaccccggtctcccctgttcaacaccaaggagcaactgtgaacaataccaataagcaagagggattcgccgtgccagccccactggacaataaaggaacaaattcttctgccagctccaattttcgctgtagaagcgtgagccctgctgttcacagacagagaaatttatccggatccactctgtaccccgtctccaatattcctcgaagcaacgtgactccattcggttccccagttacacctgaagtccacgtcttcacaaacgtccacaccgatgcttgcgctaataacatcgcccagcggtcacaaagtgttccactgaccgtgatgatgcaaacggcgtttcctaatgcccttcagaaacaggcgaattctaagaaaataacgaatgtgctcctgagtaaacttgactcagataatgacgacgcggtgaggggattgggcatgaataatctacccagcaactatacagctcgtatgaatctaacccaaatactggaaccatccacagtgtttccctccgcaaatcctcagaatatgatagattctagcaccagcgtatacgagtttcagacgccttcctacctgactaagagcaactctacaggccagattaatttttcgccgggagacaaccaagcacagtctgagatcggggaacagcagctggatttcaactcgactgtcaaagacttgctgtcgggagattctttacagacaaaccagcagctggtcggtcaaggagcttccgacctcacgaacaccgccagcgacttcagttcagacatccgattgtcgtcggaattgagtggtagcatcaatgaccttaacacactcgatccaaatctccttttcgaccccggtcgccagcagggacaagatgatgaggcaacattggaagaattgaagaatgacccactgtttcaacagatttgttcagagtccatgaattctatgacctccagtggttttgagtggatagaaagcaaggaccatcctaccgtggagatgctcgggtag

SEQ ID NO: 202932 - DNA, 783 bp, synthetic construct
  misc_feature 1..783: note = Description of Artificial Sequence: Synthetic coding sequence
  source 1..783: mol_type = other DNA
atggagctgacccagcccgccgaggacctgatccagacccagcagacgccagcatcagaactgggagacccagaggatcccggcgaagaagcagcagacggctcagataccgtggtcctgtctctgttcccatgcacacctgaaccggtgaatccagagccagatgcctctgtttcaagcccccaggccggatcttctcttaagcactcaacaaccctgactaacaggcagcgaggaaacgaagtgtccgcactccctgctactctggactctctgtcaatccatcagctagcggcgcagggtgaactggatcagctcaaggagcatttaagaaaaggagacaatttggtgaataagcccgacgaacgcggcttcactccgttaatttgggcttcggccttcggggagatcgagacagttcggttccttctggagtggggtgccgatcctcatattttggctaaggagcgggagtctgcactctccctggcctctaccgggggttacactgacatagtggggctgcttctcgagcgcgacgtggatatcaatatttatgactggaatggcgggactccactgctttatgcagttcggggaaaccacgtcaagtgtgttgaagccctccttgcccgcggcgcagatctgacaacggaggcggacagcggttacactcccatggacctcgccgtggcattaggctatcgcaaggtgcagcaagtcatagaaaaccacatcctgaaactcttccagtccaacctggtgccagccgatccggaatag

SEQ ID NO: 202933 - DNA, 714 bp, synthetic construct
  misc_feature 1..714: note = Description of Artificial Sequence: Synthetic coding sequence
  source 1..714: mol_type = other DNA
atggagctgacccagcccgccgaggacctgatccagacccagcagaccccagcttccgagttgggggaccccgaagatcctggggaggaggccgcagacggttccgacaccgtggtattatcactgtttccctgtactccagagcctgtgaacccagagcctgacgcatcagttagctcccctcaagggtctagcttgaagcacagcacgacgctaactaaccggcagcgtggtaatgaggtgtccgccctgcccgctactctggattgtgataatcttgtcaataaaccggatgagagaggatttacccctctgatttgggcttctgcatttggagagatcgaaactgttcggtttcttctggagtggggagcagacccccatatccttgccaaggaaagagaatcagctctttccctggcctccacaggcggctacacagatatcgtgggtcttctgctagagcgagacgttgacattaacatttacgattggaatggggggacacccctcctgtatgccgtccgtggaaaccacgtgaagtgcgtcgaggccttattggcaagaggcgcagatctcactactgaggcagactccggctacacaccaatggacctggctgtcgctctcggttatagaaaagtccaacaagtcattgaaaatcacattctgaaattgtttcagtcaaacctggtgccggcggacccagagtag

SEQ ID NO: 202934 - DNA, 192 bp, synthetic construct
  misc_feature 1..192: note = Description of Artificial Sequence: Synthetic coding sequence
  source 1..192: mol_type = other DNA
atggagctgacccagcccgccgaggacctgatccagacccagcagactcccgcttccgaactcggcgatcctgaggacccaggagaagaggcagccgatggctcagacacggtggtgttatcgttatttccctgcactcctgagccagtgaatcctgagcccgacgcaagcgtctctagtccccaggcatag

SEQ ID NO: 202935 - DNA, 717 bp, synthetic construct
  misc_feature 1..717: note = Description of Artificial Sequence: Synthetic coding sequence
  source 1..717: mol_type = other DNA
atggagctgacccagcccgccgaggacctgatccagacccagcagacccctgcaagtgagctcggggaccccgaggatccaggcgaagaggctgccgatggatcagacacggttgtgcttagcttgtttccttgcacacccgaacccgttaatccagagccagacgccagcgtgtcaagccctcaggcggggtcatctcttaaacacagcacaaccttaaccaatcggcaacgggggaacgaggttagcgcgctgccagctacactggattgcgataacttagtgaataagccggatgagcgaggatttacaccccttatatgggcctctgcatttggggagatcgagactgtgaggtttttactggagtggggcgctgatccacacatcctggccaaagagagagaatctgcgctgtccctggcaagtacgggcgggtataccgacattgttggattgctgttggagcgtgatgttgacataaatatctatgattggaacggtggtacccccctgctctatgcggtgcgcggaaatcacgttaaatgcgttgaggcattgctggcccgaggtgctgatctgactaccgaagctgatagcggctacacaccaatggacctggccgtggctttaggatacaggaaagtacaacaggttattgagaaccatatcctgaagctcttccagagcaatttggtgccggctgatcccgaatag

SEQ ID NO: 202936 - DNA, 819 bp, synthetic construct
  misc_feature 1..819: note = Description of Artificial Sequence: Synthetic coding sequence
  source 1..819: mol_type = other DNA
atggaggcccagggcgtggccgagggcgccggccccggcgccgccagcggggtgccgcacccggccgcacttgcgcccgccgccgcccctactttggctcctgccagtgtcgccgccgccgcctcccagtttaccttgctggtcatgcagccatgcgccggtcaggatgaagccgcggctccaggcggtagcgtaggcgctggcaagcctgttcgctacctctgcgagggcgcaggagatggcgaagaggaggccggcgaagatgaggcagacctcctggatacatcggatcctcccgggggtggcgagtcagccgctagtctggaggacctggaggacgaagaaacccatagcggaggggaaggctcatccggaggagcacgtaggagaggaagtggtgggggctctatgtctaaaacatgcacctacgagggctgttctgagacgacatctcaagttgctaaacagcgtaagccttggatgtgcaaaaaacatcggaataagatgtataaggacaaatataagaagaagaaaagtgatcaggccctcaattgcgggggaacggcctctacaggctctgccggaaatgtgaaattagaagagtctgcagataatattctgagtatagtgaagcagaggaccgggtctttcggggatagacccgcccgacccactctgttggagcaggtccttaaccagaaacggctcagtctgctgaggtccccggaagttgtgcagtttctccagaagcagcaacagttgttgaaccagcaggtccttgagcagagacaacaacagttccccggcaccagcatgtag

SEQ ID NO: 202937 - DNA, 1854 bp, synthetic construct
  misc_feature 1..1854: note = Description of Artificial Sequence: Synthetic coding sequence
  source 1..1854: mol_type = other DNA
atgagcagcctgcccaccagcgacggcttcaaccaccccgcccggtcatccggacagtccccagacgtgggaaatcctatgagcctggcacgcagcgtgtcagcttccgtctgcccaatcaaaccgagcgacagtgacagaattgagccgaaggctgtaaaggcccttaaagcttccgcagaatttcagctgaatagcgagaagaaggagcatttatccttgcaggatttgtccgaccacgcctcctccgcagaccatgcccccaccgaccagtccccagccatgcctatgcagaattctagcgaggagatcacagtagctggcaacctcgaaaagagcgctgaaaggagcacgcagggactaaagtttcaccttcacaccagacaagaggcttccctgtccgtgactagtacaaggatgcacgagccccaaatgttcctcggagagaaagattggcacccggaaaaccagaacctgagccaggttagtgatccacagcaacatgaggaaccaggtaacgagcagtacgaggtggctcagcaaaaagcttcacacgaccaggagtatctgtgcaatatcggagatcttgagctccctgaggagcggcaacagaaccaacacaaaatagtggatctggaggccaccatgaaaggcaacggtctaccccagaacgtggaccccccatccgcaaaaaaatccatcccttcaagcgagtgcagtggatgctctaacagcgagacatttatggaaattgacaccgcacaacaatcccttgtgacactacttaacagcactgggcggcagaatgcaaatgtgaagaatatcggcgccttggacctcacgctggataacccactgatggaagtggagacctctaaatgcaacccttccagcgagatcctgaacgacagcatcagtactcaggacctgcagccacctgagaccaacgttgagatccccggaaccaataaagagtacggacattatagttcccccagcttatgcggttcttgtcagccatcagtcgaatccgcggaggagtcgtgcccatccatcacggcagctctcaaggaactgcacgaactattggtcgttagcagtaaacctgctagcgagaataccagtgaggaggttatctgccagtctgagactattgccgaaggccagacatccatcaaggacctttccgagaggtggactcagaacgaacacttgactcagaacgagcagtgcccccaagtctccttccaccaagccataagcgtcagtgtcgagactgagaagctaactggtacctctagcgacacgggcagagaggctgtggaaaacgtcaacttcagaagtctgggggacgggcttagtacagacaaagagggtgtgcccaagagcagggagagcatcaacaagaacaggtccgtaactgtgacgtcagcaaagaccagtaatcagctgcattgcacactaggagtggaaattagcccaaagttgctggcgggcgaggaggacgctctgaatcagacctccgagcagaccaaatccctttccagtaattttatcctagtcaaagacctgggccagggaattcaaaacagtgtgactgacaggcccgagacaagagagaacgtctgtccagatgcctccaggcccttgctggagtatgaaccacccacgagtcacccctctagctcccccgccatcctgccacctctcatctttcccgctacggatatcgaccgaatcctgcgcgctggattcacccttcaggaagccttgggcgcactgcaccgggttggaggaaatgcggacctcgcactgctggttctcctggccaagaatattgttgttcctacttag

SEQ ID NO: 202938 - DNA, 657 bp, synthetic construct
  misc_feature 1..657: note = Description of Artificial Sequence: Synthetic coding sequence
  source 1..657: mol_type = other DNA
atgagcagcggcgccgccagcggcaccggccggggccggccccggggtggtggccctgggcccggcgaccctccgccatcagagacacataaactagtcgtcgtgggcggcggaggcgtgggcaagtctgcactgaccattcagttcatacaatcctactttgtttcagattacgacccgacgatcgaggattcgtacacaaagatttgtagtgtggatggtatacctgcccggttggatatcttggatactgctggtcaggaggaattcggggccatgagggagcagtacatgagggctggccatgggtttctgctggtgttcgccatcaatgaccgacagtcctttaacgaggtgggcaaactctttacccaaatcctgcgggttaaagatcgggacgattttccggttgtgttggttggtaataaagccgatttggagtcacagcgccaggtaccccgatctgaagcctcggcctttggtgcttctcatcatgtggcctacttcgaggcctcggccaaactgcgattaaacgtagatgaagcctttgaacaactggtccgcgccgtgcgtaaatatcaggagcaggagctccctccatcacctccgtccgcccctaggaaaaaggggggcgggtgcccctgtgttttgctgtag

SEQ ID NO: 202939 - DNA, 615 bp, synthetic construct
  misc_feature 1..615: note = Description of Artificial Sequence: Synthetic coding sequence
  source 1..615: mol_type = other DNA
atggccgccgccggctggcgggacggcagcggccaggagaagtaccgcctcgtggttgttggaggtgggggcgttggaaagagcgcactaaccatacagtttatacagtcttatttcgtgacagattatgatccgactatcgaggactcatacactaaacaatgcgtgattgacgaccgcgctgcccgactggatattctggataccgctggccaggaggagttcggtgccatgcgtgagcagtatatgcggaccggggaggggtttctattggttttttccgttacagatcgcggttcctttgaagaaatctacaaattccaacgacagatcctcagagtgaaagaccgagatgagttcccaatgatacttattggaaacaaagctgacctcgaccatcagagacaggtcactcaagaggagggtcagcagctagcccggcagctgaaggtaacgtacatggaagccagcgcaaagattcgtatgaacgttgatcaggcctttcacgaacttgtaagagtgatccgcaaattccaagagcaagagtgccccccttctccggaacccactcggaaggaaaaagacaagaagggctgccactgcgtcattttttag

SEQ ID NO: 202940 - DNA, 384 bp, synthetic construct
  misc_feature 1..384: note = Description of Artificial Sequence: Synthetic coding sequence
  source 1..384: mol_type = other DNA
atgcgggagcagtacatgcggaccggcgagggcttcctgctggtgttctcggtcactgacagaggaagcttcgaagagatttataagttccagcgccagattctccgcgtcaaggacagggacgagttccccatgatcctgatcggaaacaaagcagatttagaccatcaacgccaggtgacacaggaagaggggcagcagctcgcccgacagctcaaagtgacgtacatggaggcttctgccaagatcagaatgaacgtggatcaggcttttcacgagctcgtgagggtcatcaggaaatttcaggaacaggagtgcccgccctcaccagagccgacgcgcaaggagaaggataagaagggctgtcactgcgttatattttag

SEQ ID NO: 202941 - DNA, 384 bp, synthetic construct
  misc_feature 1..384: note = Description of Artificial Sequence: Synthetic coding sequence
  source 1..384: mol_type = other DNA
atgcgggagcagtacatgcggaccggcgagggcttcctgctggtgtttagtgtgacggacaggggaagcttcgaagaaatctataaatttcagcggcagatcctgcgtgtgaaggaccgtgacgaatttccgatgatactgatagggaataaggctgaccttgatcatcagcggcaggtcactcaggaggagggccagcagctcgcacggcagcttaaggtgacttatatggaagcctcagcaaaaatccggatgaatgttgatcaggctttccatgagcttgttagagtgatccgcaaatttcaagaacaagagtgtcctccatcaccagaacccacacgtaaagaaaaggataagaagggctgtcattgtgtgattttctag

SEQ ID NO: 202942 - DNA, 384 bp, synthetic construct
  misc_feature 1..384: note = Description of Artificial Sequence: Synthetic coding sequence
  source 1..384: mol_type = other DNA
atgcgggagcagtacatgcggaccggcgagggcttcctgctggtgttttctgtgactgaccggggatctttcgaagagatttacaagtttcagcgacagatccttagagttaaggatcgggacgagttcccaatgatactgattggaaacaaagcagacctagaccaccaacggcaagtcacccaggaggagggacagcagctggcccgacaactgaaggtgacatatatggaggcgagcgccaagataagaatgaatgttgatcaggcattccacgagctcgtgagggtaatccggaagtttcaggaacaggagtgccccccatcacccgagcccacccgcaaggaaaaagataaaaaggggtgccactgtgtaattttctag

SEQ ID NO: 202943 - DNA, 210 bp, synthetic construct
  misc_feature 1..210: note = Description of Artificial Sequence: Synthetic coding sequence
  source 1..210: mol_type = other DNA
atgcgggagcagtacatgcggaccggcgagggcttcctgctggtgttttctgtgactgatcgcggttcatttgaggagatatataagttccagcgccaaattctgcgggtcaaagaccgggatgaatttccaatgatcttgattggtaacaaggccgacctcgaccatcagaggcaagtgactcaagaagaaggacagcaactcgcgtag

SEQ ID NO: 202944 - DNA, 384 bp, synthetic construct
  misc_feature 1..384: note = Description of Artificial Sequence: Synthetic coding sequence
  source 1..384: mol_type = other DNA
atgcgggagcagtacatgcggaccggcgagggcttcctgctggtgttcagcgtgaccgacaggggaagcttcgaggaaatttacaagttccagagacagatattaagagtcaaagatcgagacgagtttcccatgatcctaatcggcaataaggctgatctggaccatcagagacaggtgacccaggaggaaggtcagcagctggctcggcagcttaaggtgacctatatggaggctagtgccaaaatccgaatgaatgttgaccaggcatttcatgaattggtccgagtgataagaaagttccaggagcaagagtgtccaccctcccccgaacctactcgaaaggagaaagataaaaaggggtgtcattgtgtgatcttttag

SEQ ID NO: 202945 - DNA, 384 bp, synthetic construct
  misc_feature 1..384: note = Description of Artificial Sequence: Synthetic coding sequence
  source 1..384: mol_type = other DNA
atgcgggagcagtacatgcggaccggcgagggcttcctgctggtgttctccgtcacagacagaggatccttcgaagagatctataagttccagaggcagatcctgcgtgtgaaggaccgcgacgagttcccgatgatcttgatagggaacaaggctgacctggatcaccaacgtcaggtgacccaggaagagggtcagcagttggcccgccaactgaaagtgacgtatatggaggcttcggcaaagatccggatgaatgtagatcaggcattccacgagctggtgcgggtgatcaggaaatttcaggagcaggaatgtccaccctcgccagaacccacacgtaaggagaaggacaaaaagggctgtcattgtgtcattttctag

SEQ ID NO: 202946 - DNA, 510 bp, synthetic construct
  misc_feature 1..510: note = Description of Artificial Sequence: Synthetic coding sequence
  source 1..510: mol_type = other DNA
atgagctacttcgtgaccgactacgaccccaccatcgaggacagctacacaaagcaatgcgtgatcgatgaccgggcggctcgcctggacatattagacacagcaggccaagaggaattcggcgcaatgcgagagcagtacatgaggactggagagggtttccttcttgtgtttagtgtgacagatagggggagcttcgaagagatatataagttccagcggcaaatccttagagtgaaagaccgggatgagtttcctatgattttgatcggcaataaggcagacttagaccaccagcgacaggtgacgcaagaggagggacagcagctagctcgacagctaaaagtcacatacatggaagcttccgccaaaattcgaatgaatgtcgaccaggcttttcatgaattggtgcgggtcattcgcaagttccaggaacaggaatgtcctcccagtcccgagccaacacggaaagaaaaggataagaagggctgccattgtgtgattttttag

SEQ ID NO: 202947 - DNA, 633 bp, synthetic construct
  misc_feature 1..633: note = Description of Artificial Sequence: Synthetic coding sequence
  source 1..633: mol_type = other DNA
atggccgccgccggctggcgggacggcagcggccaggagaagtaccgactcgttgtagtcggcggcggtggagtcggtaaatccgccctcaccatccagtttatccagttttttctcttcctccagtcatactttgtcaccgattacgacccaacgattgaggacagttacacaaaacagtgcgtgatagatgatcgggccgctcggctagacatattggacacggcagggcaggaggaattcggcgctatgcgcgagcagtacatgagaactggcgagggttttctcctggtcttcagcgtgaccgaccgaggatcctttgaagagatttacaagtttcagcgccaaatcctcagggtgaaggatcgggatgagtttcctatgatcctgattgggaataaggctgatctggaccaccaacgccaagtgactcaggaggaggggcaacagttggcacgacagctgaaagtgacctatatggaggccagcgctaagatccgcatgaacgtggaccaggccttccacgagctagtacgcgttataagaaaattccaagagcaggagtgtcccccttccccagagcctactcgtaaagagaaagataagaaaggatgtcactgcgtgatattctag

SEQ ID NO: 202948 - DNA, 633 bp, synthetic construct
  misc_feature 1..633: note = Description of Artificial Sequence: Synthetic coding sequence
  source 1..633: mol_type = other DNA
atgggctgctgcagcagcagcgacccccggcgggaggacgacctgcgcgcacgggaaaaattaaagaaaaccaagattatattcgtggtgggcggacctgggtccggaaagggtactcagtgtgaaaagatcgtacagaaatacggttacactcacctttctacaggcgaccttctgcggtccgaggtctcaagcgggagcgctcggggaaaaaaattgagcgagatcatggaaaagggtcagctggtccctcttgaaacggtactcgatatgctgagggatgctatggttgcaaaggtcaacacctctaaaggcttcttgattgatggctacccccgggaggtccaacagggcgaagaattcgagcgacgaataggacagcccacactactgctgtatgtggacgcaggcccagagacaatgacccagcggctgcttaaacgcggagagacgagtggacgcgtggatgataacgaagagactatcaaaaaacgcctggagacttattataaggcaactgagccggtaattgcgttttatgagaagcgcgggattgtccgaaaggtgaatgcagaaggcagtgtcgacagcgtcttcagccaggtgtgtacgcatcttgacgccctgaagtag

SEQ ID NO: 202949 - DNA, 354 bp, synthetic construct
  misc_feature 1..354: note = Description of Artificial Sequence: Synthetic coding sequence
  source 1..354: mol_type = other DNA
atgccccggctgttcctgttccacctgctggagttctgcctgctgctgaatcagtttagcagggctgtcgctgctaagtggaaggacgatgttattaagctgtgtggaagagagctggttagagcgcagatcgctatctgcggaatgagcacatggagcaagcgctctttatcccaagaagacgccccgcagacacccagaccggttgctggcgactttatccaaacagtgagcctcggaatttcgcctgacggcggcaaggccctgcgaacaggatcttgttttaccagggaatttctgggagccctgtccaaattgtaccatccatcgtctaccaaaattcaaaaactttag

SEQ ID NO: 202950 - DNA, 429 bp, synthetic construct
  misc_feature 1..429: note = Description of Artificial Sequence: Synthetic coding sequence
  source 1..429: mol_type = other DNA
atggcccggtacatgctgctgctgctgctggccgtgtgggtgctgaccggtgaactgtggccaggagctgaggctagggcagccccatacggtgtcaggttgtgcggcagagaattcatcagagccgttatttttacttgcggcggcagccgatggagacgtagcgatatactggctcacgaggcaatgggcgatacattcccggacgctgatgctgacgaagactctctggcaggcgaattagatgaagctatgggatcaagcgaatggcttgcgctaaccaaaagcccgcaggccttttacagaggacggccctcctggcagggaacccccggcgtcctcaggggttctagagacgtgctcgccggcctgtcgagctcttgctgcaagtggggctgtagcaaatcggagattagtagtttgtgctag

SEQ ID NO: 202951 - DNA, 1293 bp, synthetic construct
  misc_feature 1..1293: note = Description of Artificial Sequence: Synthetic coding sequence
  source 1..1293: mol_type = other DNA
atgaagcccagcctgctgtgccggcccctgagctgcttcctgatgctcctcccatggcctctagcaacactgacttcaacaactctgtggcaatgcccacctggtgaggagcctgacctggaccctggccagggtaccctctgtcggccatgcccaccaggtacctttagcgcagcctgggggtcatccccgtgccagccacacgctaggtgctcactctggcgcaggctggaggcccaagtgggcatggctaccagggatactctgtgtggggattgctggccggggtggtttgggccatggggcgttccaagagtgccctgccagccctgctcatgggcacctctcggtactcatggctgtgatgagtggggtcgacgcgcccgccgcggagtggaggtggctgcgggagcttccagtggaggcgaaacaagacagcccggtaacggcactcgggcaggggggccagaagagacggctgcgcagtacgccgtcatagctattgtgcccgtgttttgtttaatgggactgctgggcatcctggtctgtaacctgctcaaaagaaagggctatcactgcaccgcccataaagaagtgggtcccggacctggggggggggggtcaggtatcaatccagcttaccggaccgaagacgctaacgaggacaccataggagtccttgtgcggctgatcactgaaaagaaggaaaatgccgccgctctggaagagttgctgaaggagtatcattccaaacagcttgtccagacatcacacaggcccgtgagtaaactcccccccgccccccccaacgtcccacacatttgcccccaccggcaccacctgcatactgtccagggccttgccagtctctctggcccttgctgcagtaggtgctcacagaaaaaatggcccgaggtacttctgagccccgaggccgttgccgctactacgccagttccaagtctgttaccaaaccctacacgtgttcccaaagccggcgcaaaggccgggcgtcagggagaaataacaattctgagtgtcgggaggttccgggttgctaggattcccgaacagcgcacatcaagtatggtgagcgaggtgaagacaataaccgaggccggcccctcatggggcgacctgccggactcacctcagccaggcctcccgcccgagcaacaggccctgctggggtccggcggatcgcgaaccaaatggttgaagcccccggcagaaaataaggccgaagagaaccgttacgttgtccgcctctctgagtcgaatctggttatctag

SEQ ID NO: 202952 - DNA, 1293 bp, synthetic construct
  misc_feature 1..1293: note = Description of Artificial Sequence: Synthetic coding sequence
  source 1..1293: mol_type = other DNA
atgaagcccagcctgctgtgccggcccctgagctgcttcctgatgttgctcccttggcccctggctacgctcacatccaccacgctgtggcaatgtccccctggagaagagcccgacttggaccctggtcaagggactctttgccgtccatgtccacccggaacattctctgcggcttggggctcttccccctgccaaccacacgcccggtgtagcctgtggaggagattagaagcccaggtcggtatggcaacaagagatacactctgcggtgattgttggcccgggtggttcggcccctggggcgtaccacgggtgccctgccagccgtgtagctgggcacccctgggcactcatggctgtgatgagtggggaagacgagccaggaggggtgtggaagtggcagcaggtgccagcagcgggggtgaaactcggcagccagggaatggcactagagctggaggacctgaggagacagctgctcagtacgcagtgattgcaattgtgcctgtgttctgccttatgggactcctgggcatcctagtgtgcaacctgcttaaaaggaagggctaccattgtaccgcacacaaagaagtggggccagggccgggtggcggcgggagtggaattaaccctgcataccggaccgaagacgccaatgaggataccataggcgtcctcgttcgtctgataactgagaagaaagaaaatgctgccgctctggaggaactactaaaagagtaccacagcaagcagctggttcagacgtctcatagacctgtgtccaagctccctcctgccccacctaacgtcccccacatctgtccacaccgacaccatttacacaccgtacaaggcttggcttccttatcaggtccctgctgctcccggtgcagtcagaaaaaatggccggaggtcttgctgtccccagaggctgtcgctgccaccacaccggtgccctcacttctgcccaacccgacgagagtgcccaaagcgggagcaaaagccggccggcagggggagataacaatcctcagcgtggggagattccgtgtggcccgtatccccgagcagaggactagctcgatggtgagtgaggtcaaaaccatcactgaagcaggcccctcctggggcgaccttccggatagcccgcagcccggccttccaccagagcagcaggcgttgctcggaagcggaggatcacgcaccaaatggcttaagccccccgctgaaaataaggcagaagaaaataggtatgtggtcaggctgagcgaaagcaatcttgttatttag

SEQ ID NO: 202953 - DNA, 897 bp, synthetic construct
  misc_feature 1..897: note = Description of Artificial Sequence: Synthetic coding sequence
  source 1..897: mol_type = other DNA
atgcaccccggctgctgggtgcaggaggccctggtgctgaaccacgaaggtgatatggggttctccgagccaggatcccacatttgcagagcccttggtggcctgagtccaaagtgcacgtgctccggaccccttcgccgccccgggctcccttccgccggccgttcctggtttagttcaggtgtacgccttcccccatcacctggaagcgggccattcagttctcccggcatcaatcctgcctaccgtactgaggacgcaaacgaggacaccattggggttttggtgagacttattacagaaaaaaaggagaacgcggccgcccttgaagaactcctgaaggaatatcactccaagcagctcgttcagactagccatagacctgtcagcaagctgccacctgcccctccaaacgtgccccacatctgccctcatagacaccaccttcacactgtgcagggtctggcatctctctctggcccttgctgctccaggtgtagccagaagaagtggcccgaagttctgttatcaccagaagctgtcgccgctacaactcccgtaccgtctctcctccccaacccaacccgcgtacccaaagccggcgccaaggctggacgacagggggaaataacaatcttgagcgtgggccggtttcgcgttgccaggattccagagcaacgcacaagctccatggtctctgaagttaaaactatcactgaagcgggccccagctggggcgacctccctgattcaccccagcccggtttgccccccgaacagcaggcccttctgggatccggaggaagccggaccaaatggttaaagcccccagctgagaacaaggccgaggagaacaggtatgtcgttcggttatcagaatccaatctggtaatatag

SEQ ID NO: 202954 - DNA, 306 bp, synthetic construct
  misc_feature 1..306: note = Description of Artificial Sequence: Synthetic coding sequence
  source 1..306: mol_type = other DNA
atgaagcccagcctgctgtgccggcccctgagctgcttcctgatgctcctgccctggcccttggccactctgacatcaaccacactctggcagtgccccccaggcgaggaaccggacctggaccctggtcagggcaccctttgtcgtccgtgtcccccaggaaccttttctgcagcttggggtagcagtccctgccagccacacgccagatgttctctttggcgccggctggaagcgcaggtcggcatggcgactcgcgacaccctctgcggagactgttggccaggctggttcgggccttggtag

SEQ ID NO: 202955 - DNA, 4326 bp, synthetic construct
  misc_feature 1..4326: note = Description of Artificial Sequence: Synthetic coding sequence
  source 1..4326: mol_type = other DNA
atggccaccgccgccgccgccgccgccgtgatggccccccccggctgtccaggaagctgccctaattttgccgtcgtgtgtagttttctggaacgatacggacctctcctcgaccttccagaactgccatttccagagctggagcgtgtgctgcaggccccaccaccggacgtgggcaacggtgaggttcccaaggagctggtggaactgcatctgaaactgatgcgaaagataggcaagtcagtcaccgcagataggtgggaaaaataccttataaaaatctgccaggaattcaacagcacgtgggcttgggaaatggagaagaagggctatctggaaatgtccgtggagtgcaagcttgccctgttgaagtacctctgtgaatgtcagttcgacgacaacctgaaattcaaaaacataatcaacgaggaggacgctgatacaatgcggctccagcctataggacgcgataaagacggtttaatgtactggtaccagctggatcaggatcacaatgtccgtatgtacatagaagaacaggatgatcaagatggctcctcatggaagtgtattgttcggaaccgtaacgaactcgccgaaacgttggccctcctgaaggcccagatcgatcctgtcctcctcaaaaatagctctcagcaggacaactcctcccgggagagcccctccctggaagacgaggagacgaagaaagaggaagagaccccaaaacaggaggagcaaaaagaatctgaaaaaatgaagagcgaagaacaacctatggatctggagaatcggtcaactgctaatgtgcttgaagagaccacggtaaagaaggagaaggaggacgaaaaggagctggtgaaactgcccgtgatcgttaaactggaaaagccccttcccgaaaatgaagagaagaaaattatcaaagaggagagcgatagcttcaaagagaacgtgaaacccatcaaggtggaggtaaaagagtgtagagcagaccctaaggacacaaaaagctccatggagaagcccgtcgcacaggagccagaaagaatagaattcggcggcaatataaaatctagtcatgaaattacagaaaagagcactgaggaaacggagaagttaaagaatgaccagcaggctaaaatccctcttaaaaagcgagaaataaagctgagtgacgactttgattctcctgtgaagggccccctgtgtaaaagtgtgacacccactaaagaattccttaaggatgagatcaaacaggaggaagagacttgcaaacgcatctccacaatcacagcgctgggccacgagggcaagcagctggtcaatggggaagtgtccgacgagagggtagccccaaacttcaagaccgagccaattgagacaaaattctacgaaacaaaagaagaatcttacagtccctcaaaggatcgaaatataattacggaaggcaatggcacagagtctttaaattcagtgatcacctcaatgaaaaccggagagctagaaaaagagaccgcccccctgcggaaggacgccgactcctccatctctgttttggagatacactcacagaaagcccagattgaagagccagacccacccgagatggaaacatcgttggattcttcagagatggcaaaagacctgtcatctaaaaccgcgctttccagtacagaaagctgtacaatgaaaggcgaggaaaaatctcctaaaaccaaaaaagataagcggcctccaatcctggagtgcctcgaaaaacttgaaaaaagtaaaaagacctttctcgataaggacgctcagaggctgagtcctatacccgaggaggttcctaaatctacactggaaagcgagaagccaggctctccggaggccgccgagaccagcccccctagtaacatcattgaccactgtgaaaaactggcttccgagaaggaggtagtggaatgtcagtctacgagcacggtgggaggacagagcgtcaagaaggtggacctggaaacgttaaaggaagactccgaattcactaaggtcgaaatggacaacttggataacgcacaaacatccggaatcgaagaaccatccgaaacaaagggatcgatgcagaagagcaaatttaagtataagctggtgcctgaggaagagaccaccgcatccgagaacactgaaattacctccgagcggcaaaaggaggggattaaactgaccattcgaataagctcccggaaaaaaaagcccgattctccccccaaggtcctcgaacctgagaacaagcaggaaaagacagagaaggaggaagaaaaaaccaacgttggccggactcttcgccgtagtcccaggatcagcagacccacagctaaagttgccgaaattagggaccaaaaggctgacaagaaacgcggggaaggggaggatgaggttgaggaagagtctacagccctgcaaaaaacagacaagaaagaaattctcaagaaatccgaaaaggacacaaattcgaaggtttcaaaagtgaaacctaaaggtaaagtacgatggaccggcagcagaactaggggacggtggaagtatagttccaatgacgagtcagagggctcaggatctgagaagtcctcagctgcatctgaggaagaggaggagaaagagagtgaagaggctatcctagcagacgatgacgagccgtgtaaaaagtgcggcttgcccaatcatcccgaacttatcctgctttgcgatagctgcgacagcgggtatcatactgcttgtctgcggccgcctttaatgatcatcccggacggagagtggttctgccccccttgtcagcacaaactgctttgcgaaaagctcgaggagcaactgcaggatctggatgtggctctgaagaagaaagagcgggcagaacgccgaaaggagcgactggtgtacgtgggcatcagcatcgagaatatcatcccgccccaggagcctgatttctcagaagaccaagaagagaaaaagaaggactcaaagaagtcaaaagcgaacctactggaacggagatctacaaggacacggaaatgtatctcttacaggttcgatgagttcgacgaggcgattgatgaggcaattgaagatgatatcaaagaagctgacggaggtggggtcggtagggggaaggatatcagcacaattactgggcacagggggaaggacattagcactatcctggacgaggagagaaaggaaaataagaggcctcagagggctgctgccgctagaagaaaaaagcgccgtaggctcaacgacttggactccgactcaaatcttgatgaggaggagagcgaggatgagtttaaaatctcggacggctcacaggatgagttcgtagtgagcgatgaaaatcccgacgagagcgaggaggatccacctagtaacgatgacagtgacactgacttttgcagccgcagactgcggcgacacccgtctcgcccgatgagacagtctagacggctaaggaggaaaacacccaagaaaaaatactcagatgacgatgaagaagaggaatccgaggaaaactccagggattctgagagcgatttcagtgacgatttttccgatgattttgtagagacccgacggcgacggagtcgcaggaatcagaagcggcaaatcaattataaggaagactctgagtcggatgggtctcaaaaatctcttcggcgcgggaaggagatccgacgcgtacacaagagaagactgagttcttcggaatcagaagagagctatctgtctaaaaactctgaagacgacgaactggcgaaggagtctaaaagaagcgttcgcaaaagaggcagatcgaccgacgaatattcagaggccgatgaggaggaagaggaagaggagggcaagcccagcaggaaacgcctgcaccggatagaaactgatgaagaggagagctgcgataacgctcacggcgatgccaaccagccagcacgcgacagtcagccacgcgtgctacctagcgagcaggaatccacaaagaaaccatatagaattgagtctgatgaggaggaggactttgaaaatgtgggaaaggttgggtcacccctagactatagtctggtagacctgccttctacaaacgggcagtcacctggcaaggccattgagaacttaattggcaaacctacggaaaagtctcagacccccaaagacaactcaaccgccagcgcatctctagcatccaatggcacgagcggtggccaggaggccggcgcccccgaagaggaagaggatgaactgctgagggtcacagatctcgtggattacgtgtgcaattctgagcagctctag

SEQ ID NO: 202956 - DNA, 4233 bp, synthetic construct
  misc_feature 1..4233: note = Description of Artificial Sequence: Synthetic coding sequence
  source 1..4233: mol_type = other DNA
atggccaccgccgccgccgccgccgccgtgatggccccccccggctgccccggttcttgccccaatttcgccgtggtgtgtagttttttagagcggtacggcccccttctggatttgcccgagttgccgttccctgaactagagcgtgttctccaggcacctccccctgatgtgggcaacggtgaagtccctaaagaactggtggaactgcatttgaagcttatgagaaagatcgggaaatctgtcacggccgacagatgggagaaataccttattaagtacctgtgcgagtgtcagtttgacgacaaccttaagtttaagaatatcatcaatgaggaggacgctgatacaatgcgcctgcaacctattggaagagacaaggatggtctgatgtattggtaccagctggaccaggaccacaacgtgcgaatgtatatcgaagagcaagatgatcaggacggctcgtcatggaagtgcattgtgcgcaatcggaacgaactcgccgagacgttggctttactcaaggcccagatcgatcccgtgctcctgaagaattctagtcagcaggacaactcttctcgagagtcaccttccctcgaagacgaggagacgaaaaaagaggaagagacgcccaaacaggaggagcagaaggaaagcgaaaagatgaaatctgaagagcagcctatggacttagagaatcgcagcaccgcaaacgtgctggaggaaaccacagttaaaaaggaaaaggaggatgaaaaggaacttgtgaagctgccagtgattgttaagttggagaaaccactgcccgaaaacgaggagaaaaagataattaaggaggagtctgatagcttcaaagagaacgtgaagcccatcaaggtggaagtgaaagagtgccgcgccgacccgaaggacacaaagagtagtatggagaaacccgtcgctcaagaacccgagaggatcgagtttggcggcaatataaaaagttcacatgagattacggagaagtccacagaggaaaccgagaagctcaagaacgaccaacaggccaagattcctctaaagaaacgggaaattaaattgtccgatgatttcgatagccccgtgaaaggacccctgtgtaagagtgtgacacccacaaaagagtttctgaaggacgaaataaaacaggaggaggagacttgtaaacggatttccaccattaccgctttgggccacgagggtaaacagcttgtaaatggcgaagtgtcagacgaaagagtggcccctaatttcaagaccgagccgattgagacaaagttttacgaaacaaaagaggagtcttacagcccatcaaaagaccgcaatatcatcacagagggaaatggcacagagagtctaaacagcgtaatcacatccatgaaaaccggcgagctggagaaggagactgctccgctgagaaaagatgctgattcttccatatcagtcttagagattcactctcagaaagctcagatcgaagaaccggatcccccggagatggaaacatcgttagactcttcagagatggctaaggatctcagcagcaagacagctctcagctctaccgaatcttgcaccatgaagggggaggaaaagagtccaaagactaagaaagacaagcggccaccaatactggagtgcttggaaaaactcgagaagtctaagaaaactttcttggacaaggatgcccagaggctgagcccgatccctgaagaggtccctaagagcactctggaatcagaaaaaccaggaagccctgaagccgctgagacgagcccaccgtcgaatattatagatcattgcgaaaagttggcaagtgaaaaagaggttgtggaatgtcaatccactagcaccgttggagggcagagtgttaagaaggtggacctggaaaccctgaaggaagactcagagtttacgaaagtcgaaatggataacctagacaacgcacagacttccggcatcgaggagcctagtgagacgaaggggagtatgcagaaaagtaagttcaaatacaaacttgtgccagaagaggaaactacagcatctgagaacacagagatcacttccgaaagacagaaggaaggtattaaactcaccattaggattagctctcggaaaaagaaacccgacagtcctccaaaggtactggaaccggaaaataagcaggagaaaacagagaaggaagaggaaaagaccaacgtgggccggacactgcgtcgaagccctcgtatatctcgccctactgcaaaggtagccgagattcgcgatcagaaggccgacaaaaaaaggggagagggggaggacgaggtggaagaagagagtacagctttgcagaagacagataagaaggaaatcctgaaaaagtccgagaaagacacgaacagcaaagtgtcgaaagtgaaacctaaaggaaaggttagatggaccgggtcaagaactcggggacggtggaaatactccagcaatgacgaaagtgagggttccggaagcgaaaaatcaagtgcagcatccgaagaagaagaagaaaaggagagtgaggaggcaatcttagccgacgatgacgaaccctgtaaaaaatgtggtttgccaaatcaccccgagcttatcttgctgtgcgattcttgcgactcaggttatcacacagcctgtctgaggcctcccctcatgattatccctgacggagagtggttttgtcctccatgccagcacaagctgctttgtgaaaagctggaggagcaactgcaggacctcgatgtggcgctgaagaagaaagaaagagctgagcgaagaaaagagagattggtctatgtcggaataagcatcgagaatattatccctcctcaggagcctgactttagcgaggatcaggaggaaaaaaaaaaggattctaagaagtcaaaagctaatttgctggagcggcggagtacccgcacccgcaagtgtatctcgtaccgatttgatgaattcgatgaagcgattgatgaggccatcgaggacgacattaaagaagctgacggtggcggcgtcggacggggaaaagatatctccactattacaggacatagaggaaaagatattagcactatcttggacgaggaacgcaaggagaataaacggccccagagggcagcagctgcacgtagaaaaaagcgacggaggttgaacgacctggactccgacagtaacttggatgaagaagagagtgaggacgaattcaagatttctgatggctcacaggatgagtttgttgtgtccgacgaaaatccggatgagtctgaagaggaccctcccagcaacgatgactcagacaccgatttttgcagccgacgactccggcgccatccttctcgacccatgcgccagtcccgacggctcaggagaaagacccctaaaaaaaaatacagtgacgatgatgaagaggaagagagcgaggagaatagtagagactcagaatcggatttttcagacgatttttccgacgacttcgtggaaactcgcagaagaagatcccggcgaaaccagaaacgtcaaataaattataaagaggatagtgagagtgacgggtcccagaaatctctgcggagaggtaaagaaatccgccgtgtgcataagcgacggctttcttctagcgaaagtgaagagtcatacctctcaaaaaatagcgaagacgatgagcttgccaaggagagtaaaaggtcagtcaggaagaggggtcgatcaacggacgagtatagtgaagcagatgaggaagaggaggaagaggagggtaaaccctccagaaaacggctccacagaatcgaaaccgacgaagaggagtcctgtgataacgctcacggggatgctaaccaaccagctagggactcacagcccagagtgcttccatcagagcaggaaagtactaagaagccatatcgaatcgaatccgatgaggaagaagattttgaaaatgtcggcaaggttggcagcccattagattatagcctggtggacctcccatctactaacggccagtctcctggcaaagccatcgagaatctgattggcaaacctaccgagaaatcacagactcccaaagacaactccactgcctccgcttcactggcctcaaacggtacatccggtggccaggaagcaggggcacccgaagaggaggaagatgaactgttacgggtgacagacctggtggattacgtgtgcaactcggagcagctctag

SEQ ID NO: 202957 - DNA, 3570 bp, synthetic construct
  misc_feature 1..3570: note = Description of Artificial Sequence: Synthetic coding sequence
  source 1..3570: mol_type = other DNA
atgaagagcgaggagcagcccatggacctggagaaccggagcaccgctaacgtgctagaagagaccacagttaagaaagagaaggaagacgagaaagaattggtgaagcttcccgtcatagtgaaacttgagaagcctctccccgaaaatgaggaaaagaagataataaaggaggaaagtgatagcttcaaggagaacgtgaagcccataaaggtagaggtaaaagaatgcagggccgatcctaaagatactaagagttccatggaaaagccagtggcacaggagccagaacgcatcgagttcgggggcaacatcaagtcatcacacgaaataacagaaaagtctaccgaggaaaccgagaaactcaaaaatgaccagcaggctaagattccgctgaagaagcgagaaattaagctttccgacgactttgattctccagtaaagggccccctctgtaaatctgtcacaccaaccaaggaatttcttaaggatgagattaagcaagaggaagaaacatgcaaaagaatctctaccattacggcccttggccatgaaggaaagcaattagtgaatggcgaggtgagcgatgagcgcgtagctcctaacttcaagactgagcccatcgaaacgaaattctacgagactaaagaggagtcctactccccttctaaagatcgcaacatcattaccgagggtaacggcacagagtctctgaactccgtgattacaagtatgaagaccggcgaactcgagaaggagacagcacccctgcggaaagacgcagatagttctattagcgttctcgagatccattcacaaaaggcccagatagaggagcctgacccaccagaaatggagacatccctggatagcagcgaaatggctaaggatctctcttccaagaccgctctgagctctaccgagtcttgtactatgaagggagaggaaaagtcaccaaagactaagaaggacaagagacctcctatcttggaatgcctggagaaacttgagaagtcgaagaaaacatttttagataaagatgctcagcgcctttctccgattcccgaagaagtgccgaaatccaccctcgagtcagagaagcctggctctcctgaggcagcggagacttctccaccaagcaatatcatcgaccactgcgaaaagcttgccagtgagaaggaagtggtagaatgccagtccacatccaccgtcggcggccaatccgttaaaaaagtggatctggaaacgctaaaggaggactccgaatttacaaaggtggaaatggacaatctggataatgcgcagactagcggcatagaggagcccagcgagacaaaggggagtatgcagaagtctaaattcaaatacaagctcgtcccggaagaagagaccacggcctcagagaacaccgaaatcactagtgagcgacagaaagaggggattaagctgacaatccgaatttcttccaggaagaagaagccggattcccctcctaaggtattggaacccgaaaataaacaggaaaaaactgagaaggaagaggagaaaactaacgttgggcgcacactgagaaggtctccacgaatcagcaggccaacggcaaaagtggccgaaatccgcgatcaaaaggcagataagaaaaggggtgagggggaggatgaggtggaggaggaatcaacagcccttcaaaaaaccgacaagaaagagatactgaaaaagagcgagaaggacactaactctaaagtcagtaaggtgaagccaaagggaaaggtacggtggactggctctcgcaccaggggaagatggaagtatagttccaacgacgagtccgagggttcaggctcagagaagagcagcgccgctagcgaagaggaggaggagaaggagtctgaagaagctatcctcgccgatgatgacgaaccgtgtaagaagtgtggtcttcctaaccatccggagctaatcttgctgtgtgactcctgtgatagcggatatcacactgcttgcctgcggccccccttgatgatcattccagacggcgagtggttctgtccgccctgccaacacaaactcctgtgtgaaaagctggaagaacagctacaagacttggatgtcgctcttaaaaagaaggagcgggccgagcgcaggaaggagagactggtctacgttggcatatccatcgaaaacatcattcctccgcaggaaccagacttcagcgaggatcaagaagagaaaaagaaagactccaagaagagcaaagcaaacctgctggaacggcggtctacccgaacaagaaaatgcatctcttatcgatttgatgaattcgacgaggcaatcgacgaggccattgaggatgacatcaaagaagcagacggtggaggcgtgggtcggggaaaggatatctctacaattacagggcacaggggaaaggatatcagcacaattctcgatgaggagcgcaaagagaataaaaggccccagagagcagccgctgccaggcgaaagaagcgtagaaggctgaatgacctggattccgattccaatctggatgaagaggagtctgaggatgaatttaagattagcgacggctctcaggatgagttcgtagtctccgacgagaatcccgatgaaagtgaggaggatcccccctcgaacgacgacagcgacactgacttctgctctcggagactgagacgacaccccagcaggcccatgcgacaaagtagacgactgcggcgaaaaactccaaaaaaaaaatattctgatgatgacgaggaggaggagtccgaagagaacagcagggacagtgaatccgacttctcagacgacttctccgatgactttgtggaaacgcgtcgaaggcgatccaggaggaaccagaagcgccagattaactacaaggaagattccgagtccgacggaagtcagaaaagcctacgaagaggaaaggagatcaggagggtgcacaagaggagactctcctcaagtgagtcagaagagagttacttgagtaagaattctgaagacgacgaacttgccaaggagtccaagaggtccgttcgtaagagaggaaggagcactgacgagtattctgaggccgatgaagaagaggaagaggaagaagggaagcccagtcgaaaaaggttgcatcggatagaaaccgatgaggaggagagctgcgacaacgctcatggagacgctaaccagcctgcaagagactcccaaccaagggtcctcccttccgaacaagaatccaccaagaaaccctatcgcattgaatctgatgaggaggaggattttgagaacgtcggcaaagtgggatcaccactggattatagcctcgttgacttaccatccacaaacggccagagccctggaaaagctatcgaaaacttgattgggaaacctactgagaaaagccagactcccaaagataacagcacagccagcgccagtctggctagtaatggcacatcagggggacaagaggcaggggcccccgaggaggaagaagacgagctgttgagggttaccgatttggttgactacgtctgcaattctgagcagttgtag

SEQ ID NO: 202958 - DNA, 2412 bp, synthetic construct
  misc_feature 1..2412: note = Description of Artificial Sequence: Synthetic coding sequence
  source 1..2412: mol_type = other DNA
gagaccctggccctgctgaaggcccagatcgaccccgtgctgctgaagaattcatcccagcaggacaattccagtcgcgaaagcccaagtctcgaggacgaagagaccaaaaaagaggaggaaacgcccaaacaagaggagcaaaaggaaagtgagaaaatgaaatctgaagagcaaccaatggatcttgagaatcggagcacggctaatgtgctggaagaaaccaccgtcaagaaggagaaggaggatgagaaggaactggtgaagctgccagtgatcgttaaactcgagaagccccttcccgagaacgaagagaaaaagatcatcaaggaggaaagcgactccttcaaagagaacgtcaagccaattaaggtggaggtaaaggagtgccgcgctgatcccaaagacaccaagagctccatggaaaaaccggtggcacaggaacctgaacgcatcgaattcggcggaaacattaaatcctcacacgagattactgagaagagcaccgaggaaaccgagaaactgaagaatgaccagcaggccaaaatacccctaaaaaagcgagaaattaaactgagtgacgactttgattcccctgtcaaaggacccctctgcaagtctgttactccaacgaaggagttcttgaaagacgagatcaagcaggaggaagagacctgcaaacgcatttcaactattaccgccttaggccatgaaggtaaacagttggtgaacggtgaggtgtctgacgaacgggtcgcccctaatttcaaaaccgaacccatcgaaactaagttttatgagactaaggaggaatcttactcacctagtaaggacagaaatatcatcacagaaggcaatggcacagagtccctcaactctgtgattacctcgatgaaaactggagagcttgaaaaagagactgcccccttgcgaaaggatgccgactcctcaatatcagttcttgaaatccactcccaaaaagctcagatcgaggaaccagacccacccgaaatggagaccagtctggatagttctgagatggccaaggatttgagttcaaaaaccgccttgtcctctaccgagtcctgtactatgaagggggaggaaaagagtccaaaaaccaaaaaggacaagagacccccaatccttgaatgcctggaaaagttggaaaagagtaagaaaacttttctggacaaggacgcccagcgcttaagccccatccccgaagaggttcccaagagcacactggaaagtgagaaaccgggctctccagaggccgctgagacatcaccaccatctaacataatcgatcattgcgaaaagcttgcttcagagaaagaggtggtggagtgtcagagcacttccacagtggggggtcaaagcgtgaagaaggtggacctcgagacacttaaagaagacagtgagtttaccaaggtagaaatggataacctcgataatgctcaaacttcgggcatcgaggagccatccgagacaaagggctccatgcagaaatccaagttcaaatacaagcttgtccccgaagaggagacaaccgccagtgaaaataccgagattacttcggaacggcagaaggagggcatcaagctgacaatccgaatatcttcacggaagaaaaaacccgacagtccacctaaggttctagaacctgaaaacaagcaggaaaaaaccgaaaaggaggaggaaaagaccaatgtaggtcgcaccctgcgccgatctcccaggatctccagaccgactgccaaagtggccgaaatacgcgaccagaaagccgacaaaaaacgcggagaaggggaagatgaagtcgaagaggaaagtaccgctctgcagaaaactgacaaaaaagaaattttaaagaaatctgagaaggatactaatagtaaagttagcaaagtgaagcctaaagggaaggtgcggtggaccggatcacgtacgagaggccgatggaaatacagcagtaatgatgaatccgagggttcaggatcagagaaatcatctgctgctagcgaagaggaggaagaaaaggaaagtgaagaggccatactagctgatgacgatgagccttgcaagaagtgtggattaccaaatcacccagagctgattctcctatgtgactcgtgcgacagcggttaccacactgcttgccttcggcccccattaatgatcattcctgatggcgagtggttctgtcccccgtgccagcacaagctgctgtgcgagaagctggaagagcagttacaggacctggacgtggcacttaaaaaaaaagagagggcggagagacggaaggagcgactggtgtacgtgggaatctccatagagaatatcattcccccccaagaacctgacttttccgaagaccaggaggaaaagaagaaagatagcaagaagtag

SEQ ID NO: 202959 - DNA, 2109 bp, synthetic construct
  misc_feature 1..2109: note = Description of Artificial Sequence: Synthetic coding sequence
  source 1..2109: mol_type = other DNA
gccaccgccgccgccgccgccgccgtgatggccccccccggctgcccaggatcttgtccaaactttgctgtggtatgtagtttcctggaacgttatggaccgcttctggaccttcctgagctgccattcccagaactggaacgcgttcttcaggcacctccccctgacgtgggcaatggcgaagtgccaaaagaactcgtcgaactgcacctgaaactgatgcggaagatcggaaaaagcgttactgcagaccgttgggagaaatatctcataaagatctgtcaggagttcaacagcacgtgggcttgggagatggaaaagaaaggctatctggagatgagtgtggaatgcaaactggccttactgaagtatctgtgcgagtgccagttcgatgacaacttgaagttcaaaaacattatcaacgaggaagacgctgatactatgaggcttcagcctatcggccgtgataaagatggactgatgtactggtaccagcttgatcaagaccacaatgtacgaatgtatattgaagagcaagatgatcaagatgggagttcgtggaaatgcatcgtccggaaccgtaatgagctggctgaaacactagctctgctcaaggcgcagatcgacccagtactactcaagaattccagtcagcaagacaatagcagtcgtgagagcccaagtctggaggacgaggaaaccaagaaagaagaagagacaccaaagcaggaggaacagaaggagtctgaaaaaatgaaatccgaagagcagccgatggacttggaaaataggtccactgccaacgttcttgaagaaacaactgtcaaaaaagagaaagaggatgagaaagagctcgtgaagctccccgtgattgtcaagctagagaaacctttgcccgagaacgaggaaaaaaaaatcattaaagaagagtccgactctttcaaagagaatgtgaagcctatcaaggtcgaagtgaaggagtgtagggcggaccccaaagataccaagtcatcaatggagaaacctgtggcccaggagcccgagcgcatcgaattcggaggtaatatcaaatctagccatgagatcactgagaaaagcacagaggagaccgaaaagctgaagaatgatcagcaggcaaagatacccctgaagaagagggaaatcaaactttccgacgacttcgattctccagtcaagggcccactctgcaagtccgtgacaccaaccaaagaatttctgaaggatgagatcaaacaggaggaagagacttgcaaacgaataagcacaattaccgcactggggcatgaggggaaacagttagtcaacggcgaggtgagcgacgagcgagtcgcaccaaatttcaagacagagccgattgagaccaagttttatgagacaaaggaggaatcatattctccctccaaggaccggaacattatcaccgaaggaaatggcacggaaagcctcaatagcgtcattacctccatgaagactggggagttggaaaaggagacagctccactccggaaggacgccgactcaagcatctcagtgctcgagattcacagccagaaggctcaaatcgaagaacccgacccacccgaaatggagactagtctagatagctcagaaatggccaaagaccttagcagtaaaaccgcgctcagtagtacagaatcgtgcaccatgaagggagaggagaagtcccccaaaacaaaaaaagataagcggccacctattttggagtgtttggaaaagttagaaaagtcaaagaagacattcctggacaaagatgctcagagattgagcccgattcctgaggaagtccctaaaagtacactggagtcagagaagcctggctccccggaggccgcggagacctcaccgcctagtaatatcatcgatcattgtgagaaactggcctccgaaaaagaggtggtagagtgccagtctacttccaccgtaggcggacagtccgtaaagaaggtggatcttgagacattaaaggaggattcggagtttactaaggttgagatggataatcttgacaacgcccagacgtctggtatcgaggagccctctgagaccaaaggttcaatgcaaaaatag

SEQ ID NO: 202960 - DNA, 831 bp, synthetic construct
  misc_feature 1..831: note = Description of Artificial Sequence: Synthetic coding sequence
  source 1..831: mol_type = other DNA
gagccctgcaagaagtgcggcctgcccaaccaccccgagctgatcctcctctgcgatagctgcgactcaggctatcacaccgcttgtttaagaccaccattgatgataatcccagatggagaatggttttgcccaccatgccagcataagctgctgtgtgaaaagctcgaggagcagctgcaggatcttgacgttgcactcaaaaaaaaggagcgagcagagaggcgaaaagagcgtctggtgtatgtagggatttccattgaaaacatcatccccccacaggaacccgatttttccgaggaccaggaagagaagaaaaaggattctaagaaaagtaaagccaacctcctggagaggagatcgacacgaaccaggaagtgcatttcttaccggttcgacgagttcgatgaggccattgatgaagccattgaggatgatattaaggaggccgacggcggcggagtgggtcggggtaaagatatttccacaatcactggccacaggggaaaagatatcagtacaattctcgacgaagagaggaaagagaataaacggcctcagcgagccgcggctgctaggaggaagaaaaggcggcgcctgaacgatttggatagtgacagcaatctggatgaagaggagtctgaggatgaatttaaaatttctgatggaagccaggatgagttcgtcgtgagtgacgaaaatccagacgagtcggaggaagatcctccgtcaaatgatgactccgacacagatttttgttcaagacgcttgagaaggcatccctctaggcccatgcgacagagtcggagactgagaaggaaaactccatag

SEQ ID NO: 202961 - DNA, 1029 bp, synthetic construct
  misc_feature 1..1029: note = Description of Artificial Sequence: Synthetic coding sequence
  source 1..1029: mol_type = other DNA
atggcccaggtgctgatcgtgggcgccggcatgaccggcagcctgtgcgctgccctgttgagacgccaaacttccggccccctgtaccttgctgtttgggataaggccgaggattcaggaggtaggatgaccacggcctgctccccccacaacccacagtgcacagcagacctcggcgcccagtatatcacatgcactcctcactacgcgaaaaagcaccaacgattttacgacgagttgctggcttacggcgtcctgcgacccctgtcttcccctatcgaaggaatggtcatgaaggagggcgattgtaatttcgtggccccacagggtatatccagcatcatcaagcattacctcaaggagtccggtgcggaagtctattttagacatcgggtgacgcaaattaatctccgggatgataaatgggaagtcagcaaacagacagggagtcccgaacaattcgacctgatcgttctgactatgccagtgcctgagatccttcagctgcaaggggacattaccacgctgatcagcgaatgtcaacgccagcagttagaggcagtaagctactctagccggtacgctcttggcctgttctacgaagcaggaactaaaatcgatgtgccctgggctggccagtacatcacttccaatccgtgtatccgatttgtgtccattgacaacaaaaagcggaacatcgagtcctccgagattggccctagcctagtgattcacacaacagtaccctttggcgtaacctacctagagcacagcatcgaagatgttcaggaattggtttttcaacagttggagaacatcctgcctggtctgccccaacccattgctacaaagtgccagaaatggcgccactcacaggtgaccaatgccgccgccaactgccccggacagatgacgctacatcacaagccattccttgcatgcggcggcgacggattcacccagagcaattttgatggatgcataacatctgccctttgtgtgttagaagctctgaagaattatatttag

SEQ ID NO: 202962 - DNA, 948 bp, synthetic construct
  misc_feature 1..948: note = Description of Artificial Sequence: Synthetic coding sequence
  source 1..948: mol_type = other DNA
atggcccaggtgctgatcgtgggcgccggcatgaccggcagcctgtgtgcggctctcttgagacggcaaacctcgggtcccctttacctggccgtatgggataaggcagaagactccgggggaagaatgaccaccgcttgctcaccacataacccacagtgtacagcagacttgggcgcccaatacatcacttgtacaccacactacgccaaaaagcatcagaggttttatgatgaactgctagcgtacggggtgttgagacccctctcatcgccaatcgaggggatggtcatgaaagagggtgactgtaatttcgtagctccgcagggaattagcagtataatcaagcattacctcaaggagtctggggccgaagtctacttcaggcaccgtgtgacccaaatcaatttgcgagacgataaatgggaggtttctaagcagacagggagccccgagcaattcgacctgatcgtcctgacaatgccagtgccagagatactccagttgcagggagacatcactaccctgattagtgagtgccagcgtcagcagctcgaagccgtttcatatagttcacgatacgccctggggctgttctacgaagccggcacgaagatcgacgtaccttgggccggccagtatatcacctctaatccatgtatcaggttcgttagtattgacaataagaaacggaacatcgaatctagcgagattggcccctcactggtgatccatactactgtgccctttggagtgacttatctcgagcattcgattgaggatgtgcaggagcttgtgtttcagcagctggaaaacattctcccggggctgccacagcctatcgcgaccaagtgtcagaaatggaggcattctcaggtgccctccgccggtgtgatcttgggatgtgcgaagagcccttggatgatggccatcggctttccaatttag

SEQ ID NO: 202963 - DNA, 699 bp, synthetic construct
  misc_feature 1..699: note = Description of Artificial Sequence: Synthetic coding sequence
  source 1..699: mol_type = other DNA
atggcccaggtgctgatcgtgggcgccggcatgaccggcagcctgtgtgccgcactgttgcgccgccagacctccgggcccctatacctggccgtctgggataaggccgaggattctggagctgaggtttacttcagacatagagtcactcagatcaatctacgtgacgataaatgggaagtgtcaaaacaaactggttcaccagaacagttcgacttaattgtcctgacaatgcctgtgccagagatccttcagcttcagggagacatcactacactgatttcagaatgtcaacgtcaacagttggaagcagtgtcatattcttctcgctatgccctgggcctattctacgaagccggaacaaaaattgatgtgccctgggcggggcagtacattaccagcaatccttgcatccggttcgtgtctatcgataataagaagcgcaacattgaaagtagtgaaatcggaccttccttggttatccatacaaccgtgcctttcggcgtaacctacctcgaacactcaatagaggatgtacaagaacttgtgtttcaacagttggagaatatcctgccggggctcccccagcccattgcaaccaaatgtcagaagtggcgccattcgcaagtgccttcagctggagtcattttaggatgtgcaaaatccccgtggatgatggctataggctttcctatatag

SEQ ID NO: 202964 - DNA, 1221 bp, synthetic construct
  misc_feature 1..1221: note = Description of Artificial Sequence: Synthetic coding sequence
  source 1..1221: mol_type = other DNA
atggacggctggcggcggatgccccggtggggcctgctgctgctgttgtgggggagctgcacttttggactgcctacagataccactactttcaagcgtatcttcctcaagcgaatgcctagcattcgggagagcctgaaggaacgcggggtggacatggctcgtttggggcccgaatggagccaaccgatgaagaggctcacgctggggaatactacttcatcagtcatccttactaactacatggatactcagtactatggtgagatcggcatcggaacacccccccagaccttcaaagtggtttttgacaccggcagttcgaatgtttgggtacccagcagtaagtgcagtagactgtacaccgcatgtgtgtatcacaaactcttcgacgctagtgacagcagttcttataagcacaacgggactgagctgacgctgcggtatagcactggaacagtatcgggtttcctttcccaggacattatcactgtgggcggaattacagtgactcaaatgttcggtgaggtgactgagatgcctgccctgccgttcatgctcgcagagttcgatggggtcgtgggaatggggtttattgagcaggccatcggccgggtgaccccgatcttcgacaacattatctcccagggggtgctgaaggaggacgtgttctccttttactacaatagggatagtgagaactctcagtctttggggggacagattgttctgggtggctccgatccccaacactatgaggggaactttcattacatcaacttaatcaagaccggagtatggcagatccaaatgaaaggagtgtccgtggggtcaagcactctcttgtgcgaagacggctgcctagctttagtcgatacaggtgcctcctatatctctggatcaaccagcagcatcgagaaactgatggaagcgctgggagcaaaaaagcgcttattcgattacgtggtaaaatgcaatgagggcccgaccttgccagatatcagtttccacctgggggggaaggagtacactttgacgtcagcagattacgttttccaggaaagttactcctctaagaaactgtgtacgctcgctatacatgccatggacattcctcctcccacaggaccgacttgggcgctgggcgctacgttcattcggaaattttatacagagtttgatcggcgaaataaccgaatcggcttcgctctggcacgatag

SEQ ID NO: 202965 - DNA, 1212 bp, synthetic construct
  misc_feature 1..1212: note = Description of Artificial Sequence: Synthetic coding sequence
  source 1..1212: mol_type = other DNA
atggacggctggcggcggatgccccggtggggcctgctgctgctgctttggggctcctgcacgttcgggcttcccaccgacaccactacgtttaagaggattttcctcaaacggatgccttctattagggagtctctcaaggaacgcggtgtggatatggccagactgggacctgagtggtctcagcccatgaaaagactaactctgggcaacactacatcttctgtcatcctgaccaactatatggatacacagtactacggtgaaatcgggattggcacaccacctcagaccttcaaagtcgtctttgatactggctcttccaacgtttgggtaccatccagcaagtgctcccgcctttacactgcatgtgtctaccacaagctattcgacgccagtgacagcagcagttacaagcacaacggcaccgagttgacattaagatactctaccgggacagtgagcgggttcttatcccaggatataattacggttggcgggataactgtgactcagatgtttggggaggtgacagaaatgcctgcactcccattcatgctggccgaattcgacggcgtcgtaggtatgggcttcatcgagcaggccatcggccgtgtgaccccaattttcgacaacataattagccagggggtgttaaaggaagacgtattttctttttattacaataggaatagccagtctctggggggtcagatcgtgctgggtggcagtgatccccagcactacgagggaaatttccactacattaatctcatcaagaccggcgtgtggcagattcagatgaagggcgttagtgtgggatcctctacactcctgtgcgaagatggatgcctggctctggtagacacaggggccagttacatttctggctctacgtcatcaattgagaaactaatggaggcattgggggctaaaaagagattgttcgactatgtggttaaatgcaacgagggccccaccctgcccgatatttctttccatcttggagggaaagagtatacacttacatcggccgactacgttttccaggagtcctacagttcaaagaaattatgtacactagccattcatgccatggacataccaccaccgacaggccctacgtgggctttaggcgctacattcattcgcaaattttacaccgaatttgaccgccgcaacaataggataggatttgctttggcccgctag

SEQ ID NO: 202966 - DNA, 978 bp, synthetic construct
  misc_feature 1..978: note = Description of Artificial Sequence: Synthetic coding sequence
  source 1..978: mol_type = other DNA
atggacacccagtactacggcgagatcggcatcggcacccccccccagactttcaaggtggtgttcgacacaggttcttctaatgtttgggtgccaagctcaaagtgcagccgtctatatacggcatgtgtataccacaagctgttcgacgcttccgacagcagcagctataagcacaatggtaccgagctgactctgcgctattccaccggcactgtttcagggtttttaagccaggatatcattaccgtcggcgggataacggtaacgcagatgtttggcgaggttaccgaaatgcctgctcttccttttatgttagcagagttcgatggggtggttggcatgggtttcattgaacaagctatagggcgggtcacccccatctttgataatattattagtcaaggtgtgttgaaggaagacgtgttctctttctattataaccgcgatggggagaatagccaatcactgggcgggcaaattgtgctgggggggtctgacccacagcactacgagggcaattttcactatattaatttgatcaagacaggagtgtggcagatccaaatgaagggagtgtcagtgggctcatcaaccctcctgtgtgaagatggttgcctggcactggtggacaccggggcctcctatattagcgggtctacctcctccatagaaaagcttatggaagcattgggagctaagaagaggctttttgactacgtggtgaagtgtaatgaaggtccaacattacccgatatatcatttcacttggggggcaaggaatacacactgacatcagccgactatgtgtttcaagaatcctatagctctaagaagctgtgcaccctggcaatccacgcgatggacatacctcctcctactggccctacctgggcactcggggccacctttataaggaagttctacacagagttcgacagacggaataataggatcggattcgcactcgctcgttag

SEQ ID NO: 202967 - DNA, 1284 bp, synthetic construct
  misc_feature 1..1284: note = Description of Artificial Sequence: Synthetic coding sequence
  source 1..1284: mol_type = other DNA
atgagcaagggcctgcccgcccggcaggacatggagaaggagcgggaaaccctccaggcttggaaagagcgggtcggccaagagctggacagagttgtggctttttggatggagcactctcatgatcaggagcacggtggcttctttacatgtctgggcagggagggaagagtatacgacgatctgaagtatgtctggctgcaaggaagacaggtgtggatgtactgcaggctgtaccggaccttcgaaagattcagacatgctcagctgctggatgctgccaaggcagggggcgagtttctgctccggtacgccagagtggctccacctgggaagaaatgtgcatttgtgttgaccagagatggtcgccctgtgaaggtgcagcgtactattttctcagagtgtttctacactatggccatgaatgagctgtggcgggcgacaggcgaggtgaggtatcagacagaggctgttgagatgatggatcagatcgtgcattgggttcaggaggacgcatctggtttgggaaggcctcagctgcaaggagcccccgccgccgagccgatggctgtccccatgatgttgttaaatctggtcgagcagttgggcgaggccgacgaggaactcgccgggaagtacgctgaactaggagactggtgcgcccgaaggattctccaacatgttcaaagagatggccaggccgtcctggagaatgtctccgagggaggtaaagaacttcccggatgtctggggcggcagcaaaaccccgggcatactctggaggctggatggttcctgcttaggcactgcatccggaagggagatcctgagctcagagctcatgtgatcgataaatttttactgctcccttttcattccgggtgggatcccgatcatggcggactgttctacttccaggacgccgacaacttttgtcccacccaactggaatgggccatgaaactgtggtggccacatagtgaagccatgattgcatttctcatggggtacagcgacagtggagatcccgtacttctcagactgttttatcaggttgctgaatacaccttcaggcagttccgagacccagaatacggcgaatggtttggatacttgtcccgtgaggggaaggtcgctttaagtataaaaggagggccctttaaaggttgctttcatgtgcctaggtgcctggctatgtgcgaggaaatgttgggcgctttgctgtctagaccagctccagctccttcacccgctcccacccccgcctgccgtggcgcggagtag

SEQ ID NO: 202968 - DNA, 765 bp, synthetic construct
  misc_feature 1..765: note = Description of Artificial Sequence: Synthetic coding sequence
  source 1..765: mol_type = other DNA
atgagcaagggcctgcccgcccggcaggacatggagaaggagcgggaaactctccaggcatggaaagaaagagtagggcaggagctcgatcgtgtagtcgctttttggatggaacactcacacgaccaggaacacggcggcttttttacctgcctggggcgtgaggggcgggtgtatgacgacctcaagtacgtatggctgcaggggaggcaagtgtggatgtattgccgactctaccgcacattcgagcgctttcgccacgcccagcttctcgacgccgcaaaagctggcggggagttcttgctgaggtatgccagagtagcacctcccggcaaaaagtgcgccttcgtgctcacaagggacgggagacctgtgaaagtgcaacgaaccatcttctccgagtgtttttatacgatggcaatgaacgagctgtggagggcaactggcgaggtgcgctatcagacggaggctgtggagatgatggatcaaatcgtgcactgggtccaagaagacgcatccggcttggggagaccccagctccagggagcacccgcagccgaaccaatggcagtccccatgatgctcctgaacctagtcgagcagctgggtgaggctgatgaggaactggctggaaagtacgcagagctgggcgactggtgcgcaaggcggatattacaacatgtccaggctaccagatggaagcccgcgggattttgtagtgtaatcgcctttgggaaagctacacccaacttcgaaccaacatag

SEQ ID NO: 202969 - DNA, 2355 bp, synthetic construct
  misc_feature 1..2355: note = Description of Artificial Sequence: Synthetic coding sequence
  source 1..2355: mol_type = other DNA
atggcccagctgctgaacagcatcctgagcgtgatcgacgtgttccataagtatgccaagggcaatggtgactgtgctctgctgtgcaaggaagagctgaaacaactgctgttggccgagtttggcgatatcctccagaggcctaacgatcctgagaccgtcgaaacaatcctgaatctcctcgatcaggaccgcgatggccatatcgactttcacgagtaccttttattagttttccagctggttcaggcatgttaccacaagctagacaacaagagtcatgggggcaggacttctcagcaggagcgtggccaagagggcgctcaggactgtaaatttcctggcaacacgggcaggcagcatagacagcgccacgaagaggaacgccaaaatagccaccattcccagccggaaaggcaggacggcgactcacatcatgggcagccggagcgtcaggatcgtgacagtcaccatgggcagagcgaaaagcaggaccgggatagccatcacagtcaaccggaaagacaggatagagacagtcatcacaaccaaagtgaaaggcaggacaaggacttttcctttgatcagagtgagaggcagagtcaggattcttcctccggaaaaaaggtgtcccacaagtccacaagtggacaggccaaatggcaaggacacattttcgcactgaacaggtgtgagaagcccatacaggacagtcactatggtcaatcagagaggcatactcagcaaagcgagacacttggtcaagcctcccactttaaccagactaatcagcagaagagtgggtcctattgcggccagagcgagagattaggacaagagttagggtgcgggcagaccgatcgacagggccagtcttcccattatggacagacagaccgccaggatcagagctaccattacgggcagacagataggcagggccagagcagtcactactcccagactgaccgtcagggccagtcttcccattactcccagccagataggcaaggccagtcctcccactacggccagatggacagaaaggggcagtgctaccactatgatcagactaaccgacaagggcagggctctcactatagccaaccaaataggcagggacagagttcacactacgggcaacctgatactcaggatcagtctagtcactacgggcagaccgaccgacaggaccagagctcacactatgggcagactgaacgtcaggggcagagctcacattacagccaaatggatagacagggacagggaagccattacggacagacggatagacaagggcagtccagtcattacggccagcccgatcgtcaggggcagaactctcactatggtcagaccgatcgccaggggcaatccagccactatggccagacggaccgccagggccagagtagccattactcacagccagacaagcagggacagtcatcacactacggaaagattgatagacaagatcaatcctaccattatggccaacccgatgggcagggccagagtagccattacgggcagacagataggcagggacaatccttccactatgggcaaccagaccggcaggggcaatcatcccactactcccagatggaccggcagggccagagcagccattacgggcagactgatcggcaggggcaatcctcccattacggccagaccgataggcagggccagtcgtatcactacggccagactgacaggcagggccagtcgtcccactatatccagtctcaaaccggagagattcaggggcagaataagtactttcaaggcactgagggcacccgcaaagcatcatatgtagagcaaagcgggagaagcgggaggctgagccagcaaacccccggccaggaaggatatcaaaaccaagggcagggatttcaatcccgggatagccagcagaatggccaccaggtgtgggagccagaggaagactctcagcatcatcagcacaaacttctggctcagattcagcaggaaagacccctgtgccacaaaggaagggattggcagtcttgttcaagcgaacaggggcacaggcaggcacaaactcgtcaatcccacggagagggattatcccactgggcggaggaggagcaaggtcaccagacctgggaccgtcacagccacgaatctcaggagggaccttgtggtacccaggatcgcagaacacacaaagacgagcagaaccaccagagacgcgatcggcagacccacgaacatgagcagagccaccagaggcgagacaggcaaacccatgaggacaagcagaatagacagagacgtgaccggcagacccatgaggacgagcagaaccatcagagatag

SEQ ID NO: 202970 - DNA, 1320 bp, synthetic construct
  misc_feature 1..1320: note = Description of Artificial Sequence: Synthetic coding sequence
  source 1..1320: mol_type = other DNA
atggaccggaagggccagtgctaccactacgaccagaccaaccggcagggccaaggatctcactactcccagccaaaccggcagggtcaatcctcacactacggccaaccggatactcaggaccaatcttctcattacgggcaaacagacagacaagatcaatcgagccactacggacagacagagagacaaggtcagagttctcattactctcagatggacagacagggtcaggggtcacattacgggcaaaccgaccgtcagggccaatctagccattacggccagcctgatcgtcagggtcagaacagtcactatgggcagacagatcgacagggccagtcctcacactatgggcagacagataggcaaggtcagtcatcgcattacagccagcctgacaaacagggacagtctagccactacggcaagatagatagacaagaccagtcttaccattatggccaacctgatgggcagggccagtcgtcccattatggacagaccgaccgacaagggcaaagcttccactacggtcaacctgaccggcaggggcagtccagccactactcccaaatggaccgacagggccagagttcccattatggtcagacagatcgccagggccagagtagtcactatggccagactgaccgccaggggcagtcttaccactacggccagactgacagacaggggcaaagttcccactacatccagtcccagactggtgaaattcagggccagaacaagtatttccaaggcaccgaagggacgaggaaggcatcctatgttgaacagagcggtcgctcaggcagactatcccagcagactcctggccaggagggctaccaaaaccaaggccagggcttccagtcccgcgactcccagcagaatgggcatcaggtgtgggagccagaagaggactcacagcaccatcaacataaacttctggcacagattcagcaggagcgtccactttgtcacaagggacgggactggcagagctgctctagtgagcagggacaccgacaggcccagactaggcaaagtcacggtgaaggcctgagtcactgggcagaggaggagcagggccaccaaacatgggacaggcattcacatgaaagccaggagggcccctgcgggactcaggatcgaaggacccataaggatgagcagaaccatcagcgtagggaccggcagacacacgagcacgagcagtctcaccagcgacgcgacaggcagactcatgaggataagcagaacaggcagcggcgggataggcaaactcatgaggatgagcagaatcaccagcggtag

SEQ ID NO: 202971 - DNA, 1065 bp, synthetic construct
  misc_feature 1..1065: note = Description of Artificial Sequence: Synthetic coding sequence
  source 1..1065: mol_type = other DNA
atggaggtggaggccgtgtgcggcggcgccggcgaggtggaggcccaagactcagatcccgcacctgcctttagcaaggcgcctggcagcgcagggcactacgaattaccgtgggtcgagaaatacagaccagtcaaattgaacgaaattgtaggcaacgaggatacggttagtcgccttgaggtcttcgcccgggagggcaatgtgcctaacattattatagcaggcccccccgggaccgggaagactacatcgatcctatgtttagcgagggcattactgggtccagcattaaaggacgctatgctagaactgaacgcatccaatgaccgtggcattgatgttgtccggaataaaatcaagatgtttgcccagcagaaggtaactctgcctaaaggacggcacaagatcattatcttagacgaagccgattctatgacagatggcgcccagcaggccctccggagaactatggaaatttattccaagacgacaaggttcgcactcgcctgtaacgcatccgataaaatcatcgaaccgatccagagccgctgcgccgtgctccggtataccaaactaactgacgcgcagatcttgacccgccttatgaacgtgatcgagaaggagagggtcccgtacacagacgatggactggaggccatcattttcacagcacaaggagatatgagacaagccctcaacaatctgcagtctaccttttctggcttcggatttattaacagtgaaaatgttttcaaagtgtgtgatgaaccccacccactgttagtgaaggagatgattcagcactgtgtgaatgctaatattgacgaggcttataaaattctcgcccacctctggcatctggggtattctcccgaagacatcataggaaacattttcagggtgtgtaaaaccttccagatggctgaataccttaaactggagtttattaaggagatcggatatacccacatgaagatcgctgaaggggttaatagcctcttacagatggctggtctgctggccaggctctgtcaaaaaaccatggctcccgtagcctcttag

SEQ ID NO: 202972 - DNA, 963 bp, synthetic construct
  misc_feature 1..963: note = Description of Artificial Sequence: Synthetic coding sequence
  source 1..963: mol_type = other DNA
atggaggtggaggccgtgtgcggcggcgccggcgaggtggaggcccaagattccgacccagctccggccttctccaaagctcctggatccgccggacattacgagctcccctgggtcgaaaaatatcgcccagtcaagctgaacgagatagtgggtaatgaagatacagtcagtagattggaagtatttgcaagggaagggaatgttcccaatattattattgctgggcccccaggtaccggtaaaacgacctccatactgtgccttgctcgagctttactgggacccgccctgaaggatgcaatgctggaactgaacgcttctaatgattcaatgaccgatggagctcagcaggcactgaggcgaaccatggaaatttactccaagacaactaggtttgccctggcttgcaacgcttctgacaagatcatcgaacctatacaatccagatgcgcagtgctcagatacactaaactcactgatgcgcaaattttaacccgactcatgaacgttatagaaaaggaaagggtgccttacacagacgacggcctggaggccatcatctttaccgcccaaggcgacatgagacaggccctgaataacctgcagagtaccttttcaggctttgggttcattaacagtgagaacgtcttcaaggtgtgtgacgagccccaccccctccttgtgaaggagatgattcagcactgtgtgaacgcgaacattgatgaggcttacaaaatcctggctcatctgtggcatctggggtacagccctgaggatatcatcggaaacatctttagagtgtgtaaaaccttccagatggccgagtacctgaagctggagtttatcaaagagatcggatatactcacatgaaaattgcggaaggcgtcaactcactcttacagatggctggattgctagcccggctctgccagaaaacaatggcacccgtagcttcatag

SEQ ID NO: 202973 - DNA, 1071 bp, synthetic construct
  misc_feature 1..1071: note = Description of Artificial Sequence: Synthetic coding sequence
  source 1..1071: mol_type = other DNA
atgagcctgtgggtggacaagtaccggccctgcagcctgggccggctggactatcacaaagaacaagcggcacagctgcgaaacctcgtgcagtgcggtgacttcccccatctactagtatacgggccctctggagctggcaaaaagacaagaatcatgtgcattctcagggaactctatggcgtgggcgtggagaagttgagaatcgagcaccagactataaccaccccttcaaagaagaaaatcgagatatcaactatagcatccaactatcatctggaggtcaatcccagcgatgctggaaattcagaccgtgtggtgatccaggagatgctgaagacagtggctcagtcccagcagctagagacaaactcccagcgggattttaaagttgtgctgcttacagaggttgataaactcactaaggacgcccagcacgccttacgccggacaatggaaaagtacatgtctacttgtagacttatcctgtgctgcaattcgacctcgaaagtgatccctcctatcaggtcaagatgcctggctgtacgcgttcctgccccaagcattgaagacatttgtcatgtcttgagcactgtgtgcaagaaggaggggttgaatcttccttcacaattggcccatcgactggccgagaaaagctgcaggaacctgcggaaagcattgctgatgtgcgaagcctgtcgggtgcaacaatatccatttaccgcggaccaagagatcccagagacagattgggaggtgtacctgagagaaacagcaaacgccatcgtgtcacagcagacaccccagaggcttctggaagttagagggcgactttacgagctgctaacccactgcatcccccccgagattatcatgaaaggacttctctcagagctactgcataattgcgatggccagctgaagggagaggtggcgcaaatggccgcctattacgagcacaggcttcagctcggttctaaggcaatttatcacctggaagcgttcgtcgcaaaattcatggccctatacaaaaagtttatggaagatgggctcgagggcatgatgttctag

SEQ ID NO: 202974 - DNA, 918 bp, synthetic construct
  misc_feature 1..918: note = Description of Artificial Sequence: Synthetic coding sequence
  source 1..918: mol_type = other DNA
atgagcctgtgggtggacaagtaccggccctgcagcctgggccggctggactaccacaaagagcaagcggctcagcttagaaatctggtccagtgcggtgattttcctcatctgttggtgtacgggccgagtggagcaggtaagaagactcggataatgtgcattctgagagagctgtatggcgttggcgtcgagaagctccggattgagcaccagactatcacaaccccttccaagaagaaaattgagatctctacaatagcgagcaactaccaccttgaggtaaacccctccgacgctgggaatagcgaccgggtcgtcattcaagagatgcttaaaactgttgcgcagtcccagcagttagagacaaactctcagagggactttaaggtcgtgctgctgactgaagtggataaattgaccaaggatgcccagcatgctcttaggcgcacaatggagaaatatatgtctacctgcagactcatcctctgttgcaattcaaccagcaaagtaatcccacctattcgaagccgatgtctcgctgtgcgggtgccggccccaagcatcgaggacatctgccacgttctgtcaacagtttgtaaaaaagaggggcttaacctgccatctcagctggctcacaggcttgctgaaaagtcctgcaggaatttgagaaaagctctgttgatgtgcgaggcttgtcgagtgcagcagtacccatttactgccgaccaggagattcccgagacggactgggaagtctacctgcgcgagactgctaacgccattgtgagccagcagacaccgcaacggctgctagaggttcgggggcgactttacgaactactgacgcattgcatacctccagagattattatgaaagcatgtaaggaggagagccggtcttgtgacattttctag

SEQ ID NO: 202975 - DNA, 1092 bp, synthetic construct
  misc_feature 1..1092: note = Description of Artificial Sequence: Synthetic coding sequence
  source 1..1092: mol_type = other DNA
atgcaggccttcctgaagggcaccagcatcagcaccaagccccccctcaccaaagatagaggtgtggctgcctccgctgggtcatcaggcgagaataagaaagctaaacccgtgccatgggtggagaaatacagaccgaagtgcgtcgacgaggtggcatttcaggaggaggtcgtcgccgtgttaaagaagagtctggagggcgccgacctaccgaatttgcttttctacggtccgccggggacaggtaagacatcgaccattctggccgcggcccgagagttgtttggtcctgagctgtttagactgcgggtactggaacttaatgcatccgacgaacgcggcattcaggttgtgagggaaaaggtgaagaatttcgcacaattgacagtgtccgggtcccggtcagatggtaagccttgtccaccatttaagattgtgattctcgacgaagctgacagtatgacatccgcggcccaggctgcccttaggagaaccatggaaaaggagagtaagactacacggttctgtctgatctgtaactatgtgtcacgaattatcgaacctttaacttcccgttgttccaagtttcgcttcaaacccctgagcgataagattcagcagcagagactgttggatatcgctaaaaaggaaaacgtgaagattagtgatgaagggatcgcttaccttgtgaaagtcagtgagggcgacctgcgcaaagctatcacttttctgcagtcggccactcgcttgaccggagggaaggagatcaccgagaaggtaattaccgatatcgcgggagtgatacctgccgagaagatcgacggagtgttcgctgcctgccagtcaggttcctttgacaagctcgaagctgtggtcaaagacttaattgacgagggccacgccgctacccagttggtcaaccagctgcatgacgttgtggttgagaataacctttcagacaaacagaaatccataatcactgaaaagctcgcagaagtagacaaatgcttggcggatggcgccgatgaacatctgcagctgattagcctttgcgcaacagtgatgcagcagctgtcacaaaactgctag

SEQ ID NO: 202976 - DNA, 1092 bp, synthetic construct
  misc_feature 1..1092: note = Description of Artificial Sequence: Synthetic coding sequence
  source 1..1092: mol_type = other DNA
atgcaggccttcctgaagggcaccagcatcagcaccaagccccccctgactaaagacaggggtgtggccgctagtgctgggtcttcaggcgaaaacaagaaagcaaagcccgtgccgtgggttgagaaatacaggcctaagtgcgttgacgaggtagccttccaggaagaggtcgtggccgtgttgaagaagtccttagagggcgcagatctacctaacctgctcttttacgggcctcccggaaccgggaaaacgagtactatcctggccgcagcacgcgaattgtttgggcccgaattgttcaggcttcgggttctggagttgaacgcctcagacgagaggggcatccaggtggtcagggagaaagtgaagaatttcgcccagctaaccgttagtggctcgcgaagcgacggtaagccttgtccgccattcaaaatcgtgattctcgatgaggccgactctatgacttctgctgctcaggcagccctgaggcgcactatggaaaaagaatcaaaaaccacacgcttctgtctgatctgcaattatgtgtcccggataatagaaccactcacttcaaggtgctccaagttccggtttaagcctctgtctgacaagattcagcagcaaagactcctcgatattgccaaaaaagaaaacgtgaagatcagtgacgagggtattgcatacctggtgaaggtatccgaaggggacttacggaaggcaattacctttctgcagtccgcgacccgccttacagggggtaaggagatcaccgagaaggttattaccgacatagccggagtcatcccagcggaaaagattgacggcgtctttgccgcctgccagagcggcagttttgacaaacttgaagccgttgtgaaggatctgatcgatgaggggcacgctgcgacccagctggttaatcagctccacgatgtggtggtagagaataatctgtcggacaagcaaaaaagtatcattaccgagaagctggcagaggtcgacaagtgccttgccgacggtgcggacgaacatctccagctcatatctctttgcgcgaccgtcatgcaacaactcagccagaactgttag

SEQ ID NO: 202977 - DNA, 132 bp, synthetic construct
  misc_feature 1..132: note = Description of Artificial Sequence: Synthetic coding sequence
  source 1..132: mol_type = other DNA
atgcaggccttcctgaagggcaccagcatcagcaccaagccccccctgaccaaagatagaggggttgccgcctccgcgggcagtagtggcgaaaataagaaagctaagcccgtaccttgggtggagaaatag

SEQ ID NO: 202978 - DNA, 645 bp, synthetic construct
  misc_feature 1..645: note = Description of Artificial Sequence: Synthetic coding sequence
  source 1..645: mol_type = other DNA
atgcaggccttcctgaagggcaccagcatcagcaccaagccccccctcacgaaagatcggggtgtagctgccagtgctggctcgtctggcgagaacaaaaaagccaaaccggtgccctgggtcgaaaagtacagaccaaagtgcgtagatgaagtggcttttcaggaagaggtggtggccgtcctcaaaaaatccctggagggtgccgatcttccaaaccttctgttctatggccccccaggaaccgggaaaaccagcacaattctcgctgctgctcgcgagttattcggaccagagctattccgtcttagagttttggaactcaacgcgagtgatgaacggggaattcaagttgttagggagaaagtgaaaaattttgcccaactcaccgtaagtggaagcaggtctgacggaaagccgtgtcctcccttcaagatcgtgatcctggatgaggccgattctatgacttccgcggcccaggcagctcttagaaggaccatggagaaagagtcaaagaccacaaggttctgcctaatctgtaactatgtgtctagaatcatcgaacctttaaccagcagatgcagcaaattccgtttcaagccattgagtgacaaaattcagcaacagcgcctactggatatctag

SEQ ID NO: 202979 - DNA, 372 bp, synthetic construct
  misc_feature 1..372: note = Description of Artificial Sequence: Synthetic coding sequence
  source 1..372: mol_type = other DNA
atgcaggccttcctgaagggcaccagcatcagcaccaagccccccctgaccaaagacaggggagttgccgcatctgctgggagttcaggtgagaataaaaaagcaaaacctgtcccatgggtggaaaagtaccgtcctaagtgtgtggatgaagtggcctttcaggaagaggtcgtggccgtccttaagaagagtctggagggggcggatctgcccaacctgttattctatggcccccctggaactggaaaaacttccaccattttagcagctgcaagggagctctttggccccgagctattccggttgcgcgtgttagagttgaacgcttctgatgagcggggcatacaagttgtgcgggagaaggtctag

SEQ ID NO: 202980 - DNA, 504 bp, synthetic construct
  misc_feature 1..504: note = Description of Artificial Sequence: Synthetic coding sequence
  source 1..504: mol_type = other DNA
atgcaggccttcctgaagggcaccagcatcagcaccaagccccccttaaccaaggatcgcggggtggcagcttccgccggttccagcggagaaaataagaaggccaagccagttccctgggtagaaaaatacagacccaaatgtgtggacgaagtcgcctttcaagaagaggtcgtggccgtgctgaaaaagtccttggagggggcagacctgcctaacctcctcttttacgggccgcccgggacaggaaagacaagcaccattttggccgccgcccgggaactgtttggacctgaattgtttcgcctcagggtgctggaactcaatgcctcagatgagagaggaatacaggtggttcgcgagaaggtgaagaactttgcccagctgacggtgtcaggttcccgctccgatggtaaaccctgcccccccttcaagatcgtgatcctcgacgaagccgattcaatgactagcgccgcccaggctgctctgcgacgcactatgtag

SEQ ID NO: 202981 - DNA, 288 bp, synthetic construct
  misc_feature 1..288: note = Description of Artificial Sequence: Synthetic coding sequence
  source 1..288: mol_type = other DNA
atgcaggccttcctgaagggcaccagcatcagcaccaagccccccctgaccaaagaccgtggggtggccgcttcagccggatcgagtggtgagaacaagaaagctaagccggtgccctgggttgaaaaataccgcccaaagtgtgtcgatgaagtggcctttcaagaggaggtggtggcagtcctcaagaaatccctagagggagccgacctgcccaacctcctgttttatggacccccggggacaggaaaaaccagtacaatcctcgcggctgcccgtgaactgtag

SEQ ID NO: 202982 - DNA, 1746 bp, synthetic construct
  misc_feature 1..1746: note = Description of Artificial Sequence: Synthetic coding sequence
  source 1..1746: mol_type = other DNA
atgcagcggcccggcccccggctgtggctggtgctgcaggtgatgggcagctgcgccgccatcagtagtatggatatggaacggccaggggatggaaaatgtcagcctattgagatccctatgtgtaaggatattggatacaacatgactcggatgccaaacctcatgggacacgagaatcagagggaagccgcaatccagctccacgagttcgcacctctggtggaatatggctgtcatggccatctcaggttcttcttgtgtagtttatatgccccaatgtgcactgagcaggttagtacaccgatccccgcttgtcgggtcatgtgtgagcaagctcgcttaaaatgctcgcctattatggagcaatttaacttcaagtggcccgacagcctcgattgcaggaagctcccgaataagaatgaccctaactatctgtgcatggaagctcctaacaacggaagcgacgagcctaccagggggagcggactgttccctcccctgttcagaccacagcgtccacacagtgcccaagagcacccacttaaggacggaggacccggccgagggggctgcgacaacccagggaaatttcatcatgtggagaagtctgcctcctgtgcccctctctgtaccccgggggtcgacgtatactggagtcgcgaggataagcgtttcgctgtggtctggctcgccatttgggccgtgttgtgcttctttagctcagcctttaccgtcctcacttttcttatagatccagctcggtttagataccccgagcggcccatcattttcctttccatgtgctattgcgtgtattcggtaggctatctcatcagactcttcgccggcgctgaatctatcgcttgcgacagagattccgggcaactgtatgtaattcaggaggggctcgagagcaccggttgcactttagtgtttctggtgctttactacttcgggatggcctccagcctatggtgggttgtgctgacccttacctggtttttggctgcaggaaaaaaatggggtcacgaggccatcgaagcaaattcttcctactttcacctggctgcttgggcaattccagccgtgaagaccatactcatactggtaatgcgccgggtggcgggggatgagttaactggagtctgctatgtcgggtccatggatgtgaatgcattgaccggctttgtcttgatccccctggcgtgctatctagtgatcggcacgtccttcatcctgagcggattcgtggcactgttccatatccggagggttatgaagaccggtggcgagaacactgataagcttgagaagttgatggtacggattggactttttagtgtgctgtataccgtgccagctacctgcgtaattgcttgctatttttacgagaggctgaacatggactactggaagatacttgccgcgcagcacaagtgcaaaatgaacaaccaaacaaagacactggactgtctaatggcagctagcatacctgcggtggagatattcatggtgaagatttttatgctgctcgtagtcggcatcacgtccggaatgtggatctggacatctaagacactgcaatcttggcagcaggtgtgctcaaggaggctgaaaaagaagtcgagacgcaaacctgcatccgtgattacctccggaggaatctataaaaaggctcaacacccacagaagactcaccacggcaaatacgagatcccagcccaatctccaacatgtgtgtag

SEQ ID NO: 202983 - DNA, 960 bp, synthetic construct
  misc_feature 1..960: note = Description of Artificial Sequence: Synthetic coding sequence
  source 1..960: mol_type = other DNA
atggtggagaagtaccggccccagaccctgaacgacctgatcagccatcaggatatcctatccacaatccaaaagttcattaacgaggatcgtctaccacacctgttgctgtatggcccacccggaaccgggaaaaccagtactatactcgcttgcgctaagcaattatataaggataaagagttcggcagcatggtgcttgagctgaatgcaagcgacgacagagggatcgatatcattaggggcccaatcctgtctttcgcctctacccggacgatttttaagaaaggatttaagctcgttatcctcgacgaggctgacgcgatgacccaggacgctcagaatgcgcttcggagggtgattgagaaattcacagagaacactagattttgtctgatctgtaactacttatccaaaataatccctgctctgcagagtcgctgtactcgcttccgctttggccccttgacgccagaactcatggttccaaggctggagcacgtcgttgaagaggagaaagtcgacatcagtgaggacgggatgaaagccctggtgactctgtcttctggcgatatgagaagagctctgaacatcttgcagtctacaaatatggctttcgggaaggtgaccgaggagacggtatacacttgtaccgggcatccactgaaaagcgatatcgccaacattctggactggatgctaaatcaggatttcactacggcataccgcaacattactgaactcaagaccctaaaaggactggccctgcacgatattttaacagagattcacctgttcgtgcatcgcgtggacttccctagctccgtgcgtatccatcttctcacaaagatggcagatatagaatatcgcctctccgttggtaccaacgaaaagattcagctatcgagtctgatcgccgcattccaggtcactcgtgacttgatcgtggcggaagcatag

SEQ ID NO: 202984 - DNA, 315 bp, synthetic construct
  misc_feature 1..315: note = Description of Artificial Sequence: Synthetic coding sequence
  source 1..315: mol_type = other DNA
atggtggagaagtaccggccccagaccctgaacgacctgatcagccaccaggacatcttgagcaccatccagaaatttataaatgaagacagactgccccatttgttgctctatggtcccccgggtacaggcaagacgagtactattctcgcgtgtgcaaaacagctatataaggacaaggaatttggatcaatggttttagagctgaatgcttcggatgacaggggaatagatatcatacgtggccctattctgagttttgcctctactcgaacgatatttaagaagggcttcaagctggttattctggattag

SEQ ID NO: 202985 - DNA, 1023 bp, synthetic construct
  misc_feature 1..1023: note = Description of Artificial Sequence: Synthetic coding sequence
  source 1..1023: mol_type = other DNA
atggagaccagcgccctgaagcagcaggagcagcccgccgccaccaaaattcgaaatcttccctgggtcgagaaatacagacctcagacgcttaacgacctgatctcccaccaggacattctcagtacaattcaaaagttcattaacgaagataggttaccgcatctgctcttgtacggacctcccgggacagggaagacctctacgatccttgcgtgtgctaaacaactctacaaggataaagagtttgggagtatggtgctggagctgaacgcttctgatgatcgggggatcgatattattcgagggcccattctgtccttcgcctccacacgtactatatttaaaaagggcttcaagctcgtaattctcgacgaggccgacgccatgacccaggatgctcagaacgccctgcggcgggtaattgaaaaatttactgaaaataccagattttgcctgatctgcaactacctgtctaagatcatcccggctcttcagagccggtgcactcggttccgtttcgggccccttacacccgaattgatggtccccagattggagcatgtggtcgaggaagaaaaagtggacattagcgaggatggaatgaaagcccttgtgaccttgagctctggagatatgcgccgggccttaaacattttgcagtcgactaacatggccttcggaaaagtgacagaggagaccgtgtatacatgtacagggcacccattaaaaagtgacatagcgaacattctggactggatgcttaaccaggactttactactgcctacaggaacattaccgaactgaaaacattgaaaggcctggccctgcatgatatcctaacagaaatacatctgttcgtgcatcgcgttgacttccccagttccgtgagaattcacctcttaactaaaatggctgacatagaatatcggctctctgtaggcacaaacgagaagatacaactgagctccttgattgctgcttttcaggtaacgcgagatcttattgtggccgaggcatag

SEQ ID NO: 202986 - DNA, 192 bp, synthetic construct
  misc_feature 1..192: note = Description of Artificial Sequence: Synthetic coding sequence
  source 1..192: mol_type = other DNA
atggtggagaagtaccggccccagaccctgaacgacctgatcagccatcaagacatcttgagtactatccagaaattcattaacgaagaccgactgcctcatttactgttgtatggacctccgggtacaggaaagacaagcaccatcctggcctgtgccaagcagttatacaaggataaagagttcgggtag

SEQ ID NO: 202987 - DNA, 1077 bp, synthetic construct
  misc_feature 1..1077: note = Description of Artificial Sequence: Synthetic coding sequence
  source 1..1077: mol_type = other DNA
atgtggaacagcaacgacggcggcgccggctggcggcggaagcggatcgccggcggtttttccaaaagagcttctctggggtctgaacggagggtggtggctggggaggaaggacgggagaggagctggggcgtgtgggggtcacctgctggtcgccggcgcggccggctcgggcgcttgggccagtgcctgaaaggccgaagcttacgcgagcccgctgggtttagcgaggcttgggacgtcgcccaggcccttatcctcctgtttaagactggaggcttcgagtcgtacggcagctcgtcgtacgggggtgctggggggtacacccaatcaccaggaggcttcggtagccccgccccgtcccaagcagagaaaaagtcaagagccagagcgcagcatatagttccatgtacgatctcccagttactttccgccacactagtggacgaggttttcaggatcggtaatgtcgagatttctcaggtgacgatagtggggatcattaggcatgctgaaaaagctcctacaaatatcgtgtataagatcgatgatatgacagctgcccctatggacgtacggcagtgggtggatacagatgatacatctagtgagaatactgtggtaccacccgagacatacgtgaaggttgccggacacctccgtagcttccaaaataagaagtccctcgtggccttcaagatcatgcctctggaggacatgaatgagtttacaacccacattcttgaggttattaacgcccacatggtgctgtctaaggctaattcccagccatccgccggaagagctcccattagtaaccccggaatgagtgaggccggtaatttcggaggtaatagcttcatgcccgctaatggcctcactgttgctcagaatcaggttttgaacctgatcaaggcctgtccaagaccggaaggacttaacttccaggacctcaagaatcagctgaaacacatgtctgtttcctctatcaaacaagccgtcgacttcctaagcaacgaaggacacatttactcaaccgtggatgatgatcacttcaaatctacggacgcggagtag

SEQ ID NO: 202988 - DNA, 837 bp, synthetic construct
  misc_feature 1..837: note = Description of Artificial Sequence: Synthetic coding sequence
  source 1..837: mol_type = other DNA
atgggccggggcgaccggaacaagcggagcatccggggcttcgagtcatatgggtcttcgtcttacggtggtgccggcggctacacgcagagtcctgggggttttggaagtcccgctccctcacaggccgagaagaaatccagagcgcgagcccagcatatagttccctgtactatctcccaactcctatcggccacacttgttgacgaggtatttaggatcgggaacgtggagatatctcaagtcactattgttggaatcatacggcatgcagagaaggctcccaccaacattgtctacaagatagatgatatgacagcagcccctatggatgtgcgacagtgggtggacactgatgacaccagctctgagaacacagtggtgcccccagaaacttatgttaaggttgcgggccatctgcgctctttccagaacaagaaaagtcttgtggcttttaaaatcatgccactcgaagatatgaacgagtttacaacccatatcctcgaggtaatcaatgcccacatggtattgagtaaagcaaatagtcagccttccgccggacgggctcccatcagcaacccaggcatgagtgaggctggaaacttcggcggtaatagctttatgcccgccaatggcctcacagtcgctcagaaccaagtcttaaacttgattaaagcctgtccccggcctgaaggcctaaatttccaggatctgaagaatcagctgaaacatatgtcagtctcctccataaagcaggccgtagactttttgagcaacgagggccatatttatagcacagtcgatgatgatcatttcaaaagtaccgacgccgagtag

SEQ ID NO: 202989 - DNA, 813 bp, synthetic construct
  misc_feature 1..813: note = Description of Artificial Sequence: Synthetic coding sequence
  source 1..813: mol_type = other DNA
atgtggaacagcggcttcgagagctacggcagcagcagctacggcggggccggcggatacactcagtcccccggaggattcgggagccccgctccatctcaggcagagaagaaatctcgcgcaagagctcagcatattgtcccctgtacaatctcacagcttctttctgccactttagtggacgaggtgtttagaatcggcaatgtggagattagtcaggtcacaatcgtgggtattattcgacatgccgagaaggctccgacaaacatcgtgtataaaatagatgacatgacagcagcacctatggacgtccgacagtgggttgacacagatgacacgtcaagtgaaaacacagtggtaccacctgagacctacgtgaaggttgcaggtcacctgagatcctttcagaacaagaagagccttgttgcgttcaagatcatgcctctcgaggatatgaatgaattcacaacccatatacttgaagttataaatgcgcatatggtgttgagcaaagcaaactcccagccaagtgcaggccgcgccccaattagtaatcccggcatgtcggaggctggaaactttggcggaaacagcttcatgcccgccaatgggctgaccgtggctcaaaatcaggtattgaatcttattaaggcctgtcccagacctgaaggactcaactttcaggatctgaaaaaccaattaaaacatatgagcgtgagcagcattaaacaggccgtcgactttctctccaacgagggtcacatctatagcaccgtggacgatgaccatttcaaaagcaccgatgctgaatag

SEQ ID NO: 202990 - DNA, 369 bp, synthetic construct
  misc_feature 1..369: note = Description of Artificial Sequence: Synthetic coding sequence
  source 1..369: mol_type = other DNA
ctggaggacatgaacgagttcaccacccacatcctggaggtgatcaatgcacacatggttctgagtaaagccaactctcagccttctgctggaagagccccaattagtaatcctggcatgagtgaggcgggcaactttggagggaattcctttatgcctgcaaacggcctcaccgtcgcacaaaaccaagtgctgaatctcatcaaggcatgcccacgccccgagggcctgaattttcaggacttgaaaaaccagctcaagcacatgtccgtgtccagcattaaacaagctgtcgactttctgtcgaacgagggccacatctacagcactgtggacgatgaccatttcaagagcacggatgctgagtag

SEQ ID NO: 202991 - DNA, 540 bp, synthetic construct
  misc_feature 1..540: note = Description of Artificial Sequence: Synthetic coding sequence
  source 1..540: mol_type = other DNA
atgtggaacagcaacgacggcggcggcttcgagagctacggcagctcttcttatgggggcgccggcggctacacccagagcccggggggcttcgggtctccggccccgagccaggctgagaaaaagagtcgtgccagggcacagcacatcgttccttgcacaatatcgcagctattatcagctaccttagtcgatgaggtgtttagaatcggaaacgttgaaatatctcaggtgaccattgttgggatcatcaggcatgctgaaaaggccccaactaacattgtgtacaagatcgacgacatgaccgccgcccccatggacgttcgccagtgggtagataccgatgatacgtcctctgagaacaccgtggtcccccctgaaacatacgtaaaagtggccggacatctccgatcctttcaaaataaaaagtctttggttgctttcaaaatcatgccacttgaagacatgaacgagtttaccacccatatcctggaggttattaatgctcacatggtcctctctaaagcaaactcacagtag

SEQ ID NO: 202992 - DNA, 786 bp, synthetic construct
  misc_feature 1..786: note = Description of Artificial Sequence: Synthetic coding sequence
  source 1..786: mol_type = other DNA
atgagcaagagcggcttcggcagctacggcagcatcagcgccgccgacggcgccagtgggggttccgaccagctgtgtgaacgggacgccacccctgcgataaagacccagagacctaaggtgcggatccaggatgtggtgccgtgtaatgtcaaccagcttctgtcctccacagtgttcgaccctgtgtttaaggtgcgcggaataattgtttcccaagtatcaatagtgggcgtgatccggggagctgagaaggcaagcaaccatatttgttataaaattgacgacatgacagctaaacccattgaggcgaggcagtggtttggacgggaaaaagtaaaacaggtgactcccctatcagtcggagtctacgttaaggtatttgggatcctcaaatgcccgaccggcacaaagtctctggaggtgctcaaaatccacgtgcttgaggatatgaatgagtttactgtccacatcctggagaccgtcaacgcgcacatgatgcttgacaaggcccgcagggacacaaccgttgagtccgttccagttagtcccagcgaagtaaatgacgcaggcgacaacgacgagtcacacagaaactttatacaagacgaggttctgcggcttatacatgagtgtcctcaccaggagggcaagtcgattcacgagctgcgagctcagctctgtgatttgtcagtcaaggcaatcaaagaggctatcgattatctcacagtggaaggtcatatctatcctaccgtagaccgggagcacttcaaaagtgcagattag

SEQ ID NO: 202993 - DNA, 330 bp, synthetic construct
  misc_feature 1..330: note = Description of Artificial Sequence: Synthetic coding sequence
  source 1..330: mol_type = other DNA
atgaaccccgccctgggcaaccagaccgacgtggccggcctgttcctggcaaattctagtgaggctttagagagagcggtgcgctgttgcacgcaggcgtcagtggtgactgatgacggcttcgccgaaggtggcccagacgagagatccttgtatattatgcgagtggttcagatagctgtcatgtgtgtgctatccctgactgttgtgttcggaatctttttcttggggtgtaacctgctgatcaaatcagaggggatgatcaacttcctggtcaaggaccggagacccagcaaagaagtggaagccgtcgtcgtgggtccttactag

SEQ ID NO: 202994 - DNA, 1893 bp, synthetic construct
  misc_feature 1..1893: note = Description of Artificial Sequence: Synthetic coding sequence
  source 1..1893: mol_type = other DNA
atgcagggcagcagcctgtggctgagcctgaccttccggagcgccagagtccttagtagggcaaggttcttcgagtggcagtcccctgggctgcccaacaccgcagcgatggagaatggcactggtccctacggggaagaacggccaagagaggtccaggagacgactgtcaccgagggcgcagccaaaattgcattccctagcgcaaatgaggtgttctataatcccgttcaggagtttaatagagaccttacctgcgctgttattaccgaatttgcccgaatacagttgggagccaagggaattcagatcaaggtgcctggagaaaaggatacgcagaaagtagtggtagacctttccgaacaggaagaagaaaaagtcgaacttaaggaatctgaaaatcttgcatccggggaccaaccccggacagcagcagtgggcgaaatttgtgaggaggggcttcatgtgctcgaaggacttgctgcatctgggctcaggtctatccgctttgctctggaggtccctggcctgcgctctgtggtagccaacgacgcaagcacccgggcagttgaccttatcaggaggaatgtgcagctgaatgacgtggcccatttggtgcagccatctcaggccgatgcacgcatgctgatgtatcaacatcagcgggtgtctgagcgctttgacgtgatcgatctggatccgtacgggtcaccagcaacctttttagatgctgcagtacaagcggttagtgagggaggtctgctgtgcgtgacctgcactgacatggcagtgctggctggtaacagcggcgaaacgtgctatagcaagtatggagctatggccctcaagtctcgcgcctgtcacgaaatggcgctgaggattgttctgcatagtctggaccttagagctaactgttatcagcgcttcgtcgtgccactgctgagcatcagcgccgatttttacgtgagagtgtttgtccgagtgtttacgggacaagcgaaggtcaaggcgtctgctcgtgcaaaattctctgccgcctgtggacctcccgtgacaccggagtgcgagcattgtggtcagcgacatcaactggggggccctatgtgggccgagccgatccacgatttagatttcgttggccgtgtgctggaggctgtttctgctaatccaggcagattccacacatctgaacggatacggggggtcctgagtgtaattacagaggagctgccagacgtgcctctgtactacactttggatcagctcagcagcactatccattgcaacactcccagcctgctgcagttgcgaagtgccctgctccacgccgattttagggtatctctgtcgcatgcctgtaagaacgccgtgaagactgatgcaccagcgtcagctctatgggacatcatgcgatgttgggaaaaagaatgtccagttaagagggagcggctgtctgaaacgtcccccgccttcagaattctgtccgtagaacccaggctgcaagcgaactttacaatacgggaagatgccaatccgtcgtctaggcagagagggcttaaacgcttccaggctaacccggaggccaactggggacctcggccacgtgctagaccaggcggcaaagctgccgacgaggccatggaggaaaggcgccggctgctacagaacaaacgcaaggagcccccagaagacgtagcccaacgtgccgcgagactgaaaacatttccttgcaaacggttcaaagaaggaacctgccaaaggggcgatcagtgctgttattcacactctcccccgacaccgcgcgtgtcggcggacgccgcccctgattgcccagagacaagcaaccagacaccacctggccccggagctgctgctggccccggtatcgattag

SEQ ID NO: 202995 - DNA, 249 bp, synthetic construct
  misc_feature 1..249: note = Description of Artificial Sequence: Synthetic coding sequence
  source 1..249: mol_type = other DNA
atgaaggccctgtgcctgctgctgctgcccgtgctgggcctgctggtctcatctaaaacactctgcagtatggaagaagccatcaatgagcgtattcaggaagttgcagggagtctgagctttgctgtaaccggatgcacttgcggctcagcatgcggatcttgggatgttcgggcggaaacaacctgccactgccagtgtgctggaatggattggaccggggcacggtgctgtagggtgcagccatag

SEQ ID NO: 202996 - DNA, 954 bp, synthetic construct
  misc_feature 1..954: note = Description of Artificial Sequence: Synthetic coding sequence
  source 1..954: mol_type = other DNA
atgaagcggctgagcctggtgaccaccaaccggctgagcccccacggtaattttctacctctttgcacattccctcttgctgtggacatggctgcactgtttcaggaggcctcctcctgccctgtatgctccgactatctcgaaaaacctatgagtttagaatgcggatgcgcggtttgctttaagtgcatcaacagtctccaaaaagagccccacggagaggatctattgtgctgttgttgtagtatggtttctcagaagaacaagattcgcccttcgtggcagttggaacgtcttgccagtcatataaaagaactggagcccaaactgaagaagatactgcaaatgaatccaaggatgcgcaagttccaggtggatatgactcttgatgccgacactgcaaataattttctgctaatctcggatgacttgcggtcagtgaggagtggctgcatcacacagaacaggcaggatctggccgagagattcgacgtgtccatttgtatcctaggctccccccgctttacctgcggcagacattattgggaagtggatgtaggcacctccacggaatgggacctgggggtgtgccgtgaaagcgtacacagaaagggacgtattcacttaacaaccgaaagaggtttttggaccgtctctctgcgagatggcagtcggctgtcagcctctaccgtgccgctaacctttctgtttgtagatagaaaactccagagggtgggtatcttcctggacatggggatgcagaacgtctccttctttgatgccgagggcggcagccatgtttacacgttccggagtgttagtgccgaggaaccccttcatctcttcttcgccccaccctccccccctaatggggacaaatcggttttaagtatatgtccagtgatcaatccaggcactacggacgcccccgtgcatccaggcgaggccaaatag

SEQ ID NO: 202997 - DNA, 954 bp, synthetic construct
  misc_feature 1..954: note = Description of Artificial Sequence: Synthetic coding sequence
  source 1..954: mol_type = other DNA
atgaagcggctgagcctggtgaccaccaaccggctgagcccccacgggaactttttcaccctctgtacatttcccttggccgttgatatggccgctctgttccaggaagctagctcgtgtccagtctgctccgattacctggaaaagccaatgagcctggagtgcgggtgcgctgtgtgcctcaaatgtattaactcacttcagaaagaaccacacggggaggatttgctctgttgttgttctagcatggtcagccggaagaacaagattcgccgtaataggcagctggaaagactggcttcgcatatcaaagagctggagcccaagctgaaaaaaatactgcagatgaacccaagaatgcgcaaattccaggttgacatgaccttagatgccaataccgccaacaatttccttttgatcagcgacgacctgcgtagtgtgagatccggacggattcgccagaaccgacaggatctggccgaaaggtttgatgtctccgtttgcattctggggagccctcgatttacgtgcggccggcattgttgggaggtggacgtcggtacctccaccgaatgggatttgggcgtctgtcgggaatcagtgcatcggaaagggaggatccagctgaccactgagctcgggttttggacggtgtccctgcgcgatggaggtcgtctgagcgccaccaccgtgcctctgaccttcctctttgtggacaggaaactgcagcgcgtgggcattttcctagacatgggaatgcagaatgtgagtttctttgacgctgaaagcggctcacacgtgtacacttttcgttccgtgtccgccgaggaaccgcttcggcccttcctggccccatcggtgccccccaatggagaccaaggcgttctcagcatctgccctctgatgaattccgggacaaccgatgcacctgtgcgcccaggcgaggcaaagtag

SEQ ID NO: 202998 - DNA, 867 bp, synthetic construct
  misc_feature 1..867: note = Description of Artificial Sequence: Synthetic coding sequence
  source 1..867: mol_type = other DNA
atggccgccctgttccaggaggccagcagctgccccgtgtgcagcgactatctggagaaaccgatgtccttggaatgcggatgcgcagtgtgcctcaagtgtataaattcactccagaaagagccccacggggaggacctgctgtgttgttgctcaagcatggtcagcagaaagaataagattagacggaataggcagcttgagaggctggccagccatataaaggagctagaacccaagctgaaaaagatactgcagatgaaccctcgaatgagaaagttccaggtcgacatgacattggacgctaacaccgccaataacttcctactgatttcggacgaccttcgctcagtcaggagtggtaggatccggcaaaatcggcaggacctggcagagagattcgacgtgagcgtgtgcattttgggcagccctcggtttacctgcgggcggcactgttgggaagtggacgtcgggacctccacagagtgggaccttggtgtctgccgcgagagcgttcaccggaagggacgcatccagcttaccacagagcttggcttttggactgtgagtctgagagacggaggacggctgtctgctacgactgtcccattgacattcctgttcgtcgaccgcaagctgcagcgggttggaatttttctggatatgggcatgcagaacgtatcattttttgacgccgagtctggctcccacgtctacacctttaggtctgtgagcgccgaggagcccctcaggcccttcctcgcaccgagtgtcccaccgaacggcgaccaaggcgtgctctccatttgtcctctaatgaattcaggaacgacagacgcccctgttagacccggcgaggcaaagtag

SEQ ID NO: 202999 - DNA, 867 bp, synthetic construct
  misc_feature 1..867: note = Description of Artificial Sequence: Synthetic coding sequence
  source 1..867: mol_type = other DNA
atggccgccctgttccaggaggccagcagctgccccgtgtgcagcgattacctggagaaaccgatgtcgctggagtgcggatgcgccgtgtgtttaaagtgcattaactcccttcagaaggagcctcatggtgaagatctgctttgttgttgcagctcaatggtgtccagaaaaaacaagatacggagaaaccgccagctcgaaagactggccagccacataaaagaactggagccaaagcttaagaagatcctgcagatgaacccccgcatgagaaaattccaggttgacatgaccctggacgcgaatactgccaacaacttcctgcttatcagcgacgacctccggtcagttagaagtggacggatccgacagaacagacaggatctggccgaaagattcgacgtatctgtttgtatccttggctcccctcggttcacctgcggcaggcactgttgggaagtggacgtggggacatcaacagagtgggacctaggagtatgtcgtgaaagcgtccacagaaaaggccgcatacagttaaccaccgagctggggttctggacagtgtctctgcgagacgggggacgtctttccgcgacaactgtgccgctgacctttctcttcgtcgatcgtaagttacagcgcgtaggcatctttctcgatatggggatgcagaatgtgtccttcttcgacgccgagtctgggagccacgtgtatactttcaggtcagtcagcgcagaagaacccctgaggccatttctggcacccagcgtccccccgaacggcgatcagggagtcctatctatctgtcctttgatgaactctgggactactgacgccccagtgagaccgggtgaggctaaatag

SEQ ID NO: 203000 - DNA, 1137 bp, synthetic construct
  misc_feature 1..1137: note = Description of Artificial Sequence: Synthetic coding sequence
  source 1..1137: mol_type = other DNA
atggaggtggccgagctgggcttccccgagaccgccgtgagccagtccaggatttgcttgtgcgctgtcctttgcggtcactgggatttcgctgatatgatggtcattaggtccctgagcttgatcaggctggaaggggtagaagggagggacccagtcggcggaggtaacctgactaacaaacgcccatcctgtgcaccttcaccccaagatctgagtgcccagtggaagcagcttgaagataggggcgctagctcacgcagagtcgacatggccgccttatttcaggaggcgtcctcttgcccagtctgttctgactatttggagaagcccatgagcctcgagtgtggttgcgccgtttgcttaaagtgcatcaatagcctgcagaaggaaccgcatggtgaagacctcctctgctgttgctccagtatggtcagcagaaagaacaagattagacgcaatcggcagcttgaaagactcgcaagtcacatcaaggaactggagccaaaactgaagaaaattctgcagatgaacccccgaatgcgcaagttccaggtggatatgaccctggatgctaataccgccaataatttcttgctgatcagcgatgacctcagatccgtacggagcggaaggatcaggcaaaaccggcaggatttagccgagcggtttgacgtgtcagtgtgtattctcggctcaccccgttttacatgcggaagacactgttgggaggttgacgttggaacgtccactgagtgggacctcggggtgtgcagagagtccgtccacagaaaagggagaatacagttgaccactgagctgggcttctggactgttagcctgcgggatgggggtaggctgagtgctacaacagtacctctgacattcttgttcgtcgataggaagcttcaaagagtgggaatattcttggacatggggatgcagaacgtcagcttcttcgacgccgagtccggttctcatgtatacacattccgatccgtgtccgctgaggagccgcttagaccctttctcgcaccctctgttccacccaacggcgaccagggggtcttgagcatatgccctctaatgaacagcggtaccacagacgcgccagtgaggcccggcgaagctaagtag

SEQ ID NO: 203001 - DNA, 954 bp, synthetic construct
  misc_feature 1..954: note = Description of Artificial Sequence: Synthetic coding sequence
  source 1..954: mol_type = other DNA
atgaagcggctgagcctggtgaccaccaaccggctgagcccccagggtaatttcctgcccctttgcactttccctctggcagtggacatggcggccctcttccaagaggcgtcatcctgtcctgtgtgtagtgattatctggaaaagccaatgagcctggaatgcggctgcaccgtgtgcctgaagtgcatcaattcattgcaaaaagagccgcatggcgaggatctgctgtgttgctgctgcagtatggtcagtcagcggaataaaataaggccgaacaggcaattggaaagactcgtcagtcacatcaaagagctggagcctaaactgaagaagatcctccagatgaatccacggatgaggaagttccaggtagatatgacactagacgctgacacagccaacaatttccttctgatcagtgacgacctgcggtctgtgagatctggattgatcacccagaatcgtcaggatctcgctgaaaggttcgacgttagcgtgtgcatactggggtcaccacgatttacctgtggcaggcattattgggaagttgatgtggggacttcaaccgagtgggacctcggagtgtgccgcgaatctgtgcactgtaagggaaaaatccagctgacaacggaactggggttctggacagtgagcctccgggatgggagtcgtctgtctgctagtacagtgccccttacgttcctgctcgttgatcggaaactgcagcgagtgggcattttcctggacatgggaatgcagaacgtgtcattttttgatgcagagtctggatcccatgtttatacttttcggagcgtttccgccgaggagccactcagaccctttcttgcaccaagcataccccccaacggagaccagggtgtgttgtcaatatgtccacttatgaatagtgggacaaccgatgctcccgtgagacctggggaagccaagtag

SEQ ID NO: 203002 - DNA, 867 bp, synthetic construct
  misc_feature 1..867: note = Description of Artificial Sequence: Synthetic coding sequence
  source 1..867: mol_type = other DNA
atggccgccctgttccaggaggccagcagctgccccgtgtgcagcgactatctcgagaagcccatgagcctggaatgtggttgtaccgtctgtctgaaatgcattaatagcctccagaaggagccacacggggaggacctgctatgctgctgttgttctatggtgtctcaacgaaataaaatcaggcccaacaggcaactggagcgcctcgtttcacacatcaaagaattggaaccaaagctgaagaagatcttgcagatgaatccacggatgagaaagttccaggtggatatgaccttggacgctgacactgcaaataacttcctgttaatctctgacgacctccggtctgtccggtcaggcttaattacccagaacagacaggacctcgccgaaagatttgatgtgtccgtctgtatactaggaagccccagattcacatgcggccgccactattgggaggttgacgtcgggacatctaccgagtgggatctgggagtgtgcagagaaagcgtgcattgcaaagggaagatccagctgacaacggaactggggttctggacggttagcctccgagacgggtcacgtctgagtgccagcaccgttcctctcaccttccttctggtcgacaggaaattgcagagagtcggaatttttctggatatgggcatgcagaacgtgagcttcttcgatgctgagagcggctctcacgtctatacattccgtagcgtgtccgccgaggagccacttcggcccttcttggctccgtcaattcccccaaatggagaccagggagtgctgtcaatttgtcctttgatgaactctgggacaacagatgcacccgtgcggcccggagaggcaaagtag

SEQ ID NO: 203003 - DNA, 867 bp, synthetic construct
  misc_feature 1..867: note = Description of Artificial Sequence: Synthetic coding sequence
  source 1..867: mol_type = other DNA
atggccgccctgttccaggaggccagcagctgccccgtgtgcagcgattatttagagaagcccatgtcccttgaatgtggatgcaccgtctgcttgaagtgtattaatagccttcagaaagagcctcatggagaggacctgctctgctgctgctgtagcatggtttcacagaggaacaagatacgaccgaaccggcaactcgagcgcctggtgtctcacatcaaagagctggagcccaaattaaagaagatcttacagatgaatcctagaatgcggaagttccaggtggatatgactctggacgccgatactgcaaacaatttcctgctgatctctgatgacctcaggtctgtgcggtctggattaatcacacaaaatcggcaagacctcgcagagaggtttgacgtatcagtgtgtatccttggatctccacggttcacatgcggtcggcattactgggaggttgacgttgggacaagtaccgaatgggatctgggggtgtgtcgggaatctgttcattgcaaaggcaaaattcagttgaccacggagctggggttttggactgttagccttcgggatggaagccgcctgagcgcgtccaccgtaccactgacattcttgctggtggataggaagctccaaagagttgggatctttcttgatatgggcatgcagaacgtgtcattcttcgacgcagagagcgggtctcatgtatacacatttagatctgtgtctgcggaggaaccactccgccccttcctggcaccttctatacctccaaatggcgatcaaggtgttctctcaatctgccctttgatgaatagtggcacaaccgatgccccagtccggcctggcgaggctaagtag

SEQ ID NO: 203004 - DNA, 3219 bp, synthetic construct
  misc_feature 1..3219: note = Description of Artificial Sequence: Synthetic coding sequence
  source 1..3219: mol_type = other DNA
atggccaaggccaccagcggcgccgccggcctgcggctgctgctgctgctgctgctgccactcctgggcaaggtggcgctcggactctacttttccagagacgcgtattgggagaaattgtatgtggatcaggctgccggcacaccactgctttatgttcacgccctgcgggatgccccggaagaggtaccatcctttcggctgggccagcacctgtacgggacttaccggaccaggctccacgagaataactggatttgtatacaagaggatacagggctgctctatcttaacagatcactcgatcatagctcctgggagaagttgagcgtgcggaatcgaggcttcccacttctcaccgtgtatctgaaggtttttttgtcacccacgagcctgagggagggtgagtgtcagtggcctggatgcgcaagggtgtatttctctttcttcaatactagcttccctgcttgcagttctctgaaaccccgggagctgtgttttccagagacacggccaagctttaggatccgtgaaaaccgccccccagggacatttcaccagttcagattgctccccgtacagtttctgtgccctaatattagtgtggcttatcgcttgctcgaaggggaaggtctcccttttaggtgcgcaccagatagcctggaagtttcaaccaggtgggccctcgatcgcgagcaacgggagaaatacgaactggttgcagtttgcactgtgcatgctggggccagggaagaagtggtcatggtgccctttcccgtaaccgtctacgatgaggacgacagtgccccaacatttcctgctggcgtggataccgcgagtgcggtcgtggaatttaaacgcaaggaagataccgtcgtggcaactctccgagtatttgacgccgacgtcgttccagcaagcggagaactggtgaggcgatacacgtcaaccttgctccctggagacacctgggctcagcaaacattccgggttgagcactggcccaatgagacatccgtccaggccaacggttcgttcgtaagggccaccgttcacgattatcgcctggtcctgaaccgcaatctgagtatttcagagaacagaactatgcagctcgctgtgttagtgaatgattctgactttcaggggcccggggcaggggtcctgctgcttcacttcaacgtcagcgtgttgcccgtctcactgcatttaccgtccacctattccctgtctgttagtcggcgagcacgcaggttcgcccagatcggcaaagtctgtgtggagaattgccaggctttttccggcattaatgtacaatataagctccacagctctggcgccaattgtagtacgttgggcgtagtgacctcggctgaagatacttctggcatcctgtttgtgaatgacacaaaggctctcaggaggcctaaatgtgccgaactgcactatatggttgtcgccaccgaccagcagaccagtcgccaggcacaagcccaactgctggtcactgtcgaggggagctacgttgccgaagaagcaggctgccctctgtcctgtgcagtaagcaagcgtcggctggagtgcgaggagtgcgggggtttaggctctcctacaggaaggtgtgaatggcgccagggtgatggcaaaggcattacgcgaaactttagtacatgctcccctagcaccaagacatgccccgacggtcattgtgacgtggtggaaacacaggacattaatatctgcccccaggattgtctgcgcggctccatcgtaggaggccacgaaccaggcgagcccaggggtattaaggctgggtacggaacatgcaattgttttcccgaagaggaaaaatgcttttgtgagcctgaggacattcaggatccactgtgcgacgagctgtgcagaacagtcattgccgccgccgtgcttttttcttttattgtctcagttttgttatcggccttctgtattcattgctaccacaaatttgcccataaaccgccgatctctagcgcagagatgacattccgacgcccagctcaggcatttcccgtgtcgtatagcagctcgggtgctcggcgacctagcctcgattcaatggagaaccaggttagcgtggatgcgttcaagattctggaggaccctaagtgggagttccccagaaagaaccttgtcctcgggaagactctgggtgaaggggaatttggtaaggtcgtgaaggctaccgccttccacctcaaaggtagggcaggctacacgactgtcgctgttaaaatgctgaaggaaaatgcatcaccctccgagctccgggacctcctaagtgaattcaatgtgcttaagcaggtcaaccacccacatgtaatcaaattatacggtgcatgttcccaggatggacctcttcttcttattgtggaatacgcaaaatatggtagtctcagaggattcctgagagagtcacgaaaagttggccccgggtacttgggtagtggaggaagccggaactcgtcaagccttgaccaccccgatgagcgcgcactgaccatgggcgatcttatcagttttgcttggcaaatctcccagggcatgcaatacttggcagagatgaagctggtgcaccgggacctggccgctagaaacattctggtcgctgaagggagaaaaatgaagattagcgatttcgggttgtccagggacgtgtacgaagaggatagctacgtcaagcgaagtcagggaagaatacccgtaaaatggatggcgattgaatcactatttgatcacatctatactactcagtccgacgtgtggagctttggggtattactctgggagattgtgaccctgggtgggaacccttaccccggtatcccacccgagcggctcttcaacctgcttaagacgggacatcgtatggagcgccccgacaattgttctgaagagatgtacagacttatgctacaatgctggaaacaggagcccgacaaaagaccagtgttcgccgacatctctaaggatctcgagaagatgatggtgaagagaagagactatcttgatctggccgcatccactcctagtgattccctcatatatgatgatgggctgtcagaggaagagacgcccctggtcgactgcaataacgcacccctgccccgggcccttccatctacctggatcgaaaataaactttacggccgcatttcacacgcattcacacggttttag

SEQ ID NO: 203005 - DNA, 3345 bp, synthetic construct
  misc_feature 1..3345: note = Description of Artificial Sequence: Synthetic coding sequence
  source 1..3345: mol_type = other DNA
atggccaaggccaccagcggcgccgccggcctgcggctgctgctgcttctgctgttgccgctcctgggaaaggtcgctctcggactatattttagccgggacgcttactgggagaaattatacgttgaccaggccgcgggtacacccctgctgtacgtacacgctctccgtgacgcccctgaagaagtgcccagtttcagactgggacagcatctgtacgggacatacaggacccggcttcacgagaataattggatttgtatccaggaagataccggcctcctatacctgaacaggagtttggatcattcttcatgggagaagctttctgtgaggaaccgaggctttcccttgctgaccgtttacctcaaggtcttcctctctcctactagcctgcgtgagggggagtgccagtggcctggatgcgcgcgggtatattttagcttcttcaacaccagctttcccgcctgctccagtctgaagccaagagagctttgctttccagagactagacctagcttccgcataagagaaaacagaccgccgggcactttccaccagttcagactgttaccagtgcaattcctgtgccctaacatttccgtggcttaccgattacttgagggagaaggtctgccctttcgctgtgcccctgacagccttgaagtctccacacggtgggcactggacagggagcagcgagagaaatacgagttagtcgccgtgtgcactgtacatgccggagcaagagaggaggttgtgatggtgcccttccccgtcaccgtgtacgacgaggacgacagtgcacctacttttccagctggcgtggataccgcgagtgccgttgtggagttcaaaaggaaggaagataccgtggtcgcgacccttagggtgttcgacgcggacgttgtcccagcatccggtgagctggtaagacgatatacctcaaccctgctgcctggagacacgtgggcccaacagacattcagggtggagcactggccaaacgagacatccgtccaggccaatggcagttttgtccgagctaccgtgcacgactaccgattggtgctgaaccgcaacctgtctatttccgagaaccgcactatgcagcttgccgttctggttaacgactcagatttccagggaccaggcgcaggcgtactactcttgcactttaacgtgagcgtactgcccgtgtcactccatctgccttccacctattccctttccgtatccagaagggcacgaaggttcgcccagatcggcaaagtttgcgtggaaaattgtcaagccttttctggcattaatgttcagtacaagctccatagttctggggcaaactgtagtacgctcggggtagtgactagcgcagaggacactagtggtattttgtttgtgaatgacaccaaggcactgcgtagaccaaagtgcgccgaattgcactatatggtagttgctaccgatcagcaaacctctaggcaggcccaagcccagctcctagtgactgtcgaagggtcctacgtggctgaggaagcgggctgtccactgagctgtgccgtaagtaagcgccgcctagaatgtgaagagtgcgggggattaggatcacctactggccggtgcgaatggcgacagggagatggcaagggcattacacgcaacttctcgacctgcagcccctcaaccaaaacctgcccagatggacactgtgatgtcgtcgaaacgcaggacatcaatatatgcccccaggactgcctgcggggcagtattgtgggaggacacgagcctggtgaacctcgaggcattaaagccggctacggcacctgcaattgcttcccagaagaggaaaaatgcttctgtgagccagaggacatccaggatcccttgtgcgacgagttgtgcaggacagtaattgccgccgccgtcctctttagctttattgtctccgttttactgagcgcattttgtattcactgctatcacaagttcgctcataagccaccgatatcttcggcggagatgacgtttcgccgccctgcacaggccttcccggtctcatactcctccagcggcgcacggagaccctcgcttgattctatggagaatcaggtatccgtggatgcctttaagatccttgaggacccaaagtgggaatttcccagaaagaatctggttctgggcaagacattaggtgaaggggaattcggtaaagttgtgaaggcaacagcttttcacctgaaggggcgggctgggtacactactgtcgcggtcaagatgctgaaggaaaacgccagcccctctgaactgagagacctgctgtccgaatttaacgttttaaagcaggtgaaccacccccacgtgattaaactgtatggcgcgtgctctcaggatggaccgctgctcctgattgtggagtacgccaaatatgggtccttgaggggattcttgcgcgagagtagaaaggtgggacccggctacctgggctccggtggctcacgtaattcttcttccctggaccacccagacgaaagagctctgacgatgggggatctgataagcttcgcatggcaaatatcccaggggatgcagtacctagccgagatgaaactcgtgcaccgggacctcgccgctcgcaatatcctggtggctgagggccgcaagatgaagatttctgatttcggcctgagcagggacgtctacgaagaggacagctatgtcaagaggtcccagggacggattccagtaaagtggatggctattgagtccctgttcgatcatatttatacaacccagagtgacgtttggtcttttggcgtgctcttgtgggagattgtcaccctaggtggcaacccgtaccccgggatcccacctgagagattattcaatctactcaagacgggtcatcggatggagcgacctgacaattgctctgaggaaatgtacagactaatgcttcagtgctggaagcaagagcctgacaaacgacccgtgttcgccgacataagcaaggacctggagaagatgatggtgaaacggcgggattatctggatctggcagcctccaccccgtcagattcactaatctatgacgatggactgtctgaggaagaaacgcctctggtagactgcaataatgcgcctctgccccgcgctttaccctccacatggattgaaaacaagctgtacggcatgtccgaccctaattggcccggtgagtcccctgttcccctcactcgcgcggatggcacgaataccggatttcctcggtatccaaatgacagtgtttacgctaattggatgctgtccccctccgctgcaaagctgatggatacttttgactcatag

SEQ ID NO: 203006 - DNA, 1377 bp, synthetic construct
  misc_feature 1..1377: note = Description of Artificial Sequence: Synthetic coding sequence
  source 1..1377: mol_type = other DNA
atggccaaggccaccagcggcgccgccggcctgcggctgctgctgttgctcctactcccattactgggcaaggtcgccttgggattatatttttcacgggacgcctactgggaaaagctctacgttgatcaggctgcgggaacaccattactgtatgtgcacgccttaagagatgcccccgaggaggtgcctagtttccggctgggtcagcacttgtatgggacctatcgaaccaggcttcatgaaaataattggatctgtatccaggaggacacagggctcttgtacctgaatcgcagcttggaccattcttcctgggagaagctgagcgtgcggaaccggggcttccctctcctcaccgtttatttgaaagttttcttgtcccctacgagcctgcgcgagggtgagtgccagtggcctggttgcgcccgcgtttactttagttttttcaataccagcttccccgcatgctcctccctgaaaccccgggaactgtgtttccctgaaacacgcccctccttcagaatcagggagaacaggccacctggcacttttcatcaattccgcttgttacctgtacagttcttgtgtccaaacatctccgtggcctaccggctgttggagggtgaggggcttcccttccggtgcgctcctgacagtctggaggtctcgaccagatgggctctggaccgcgagcagagagagaaatatgaacttgtcgccgtctgtactgttcacgctggagcgagagaggaggtcgttatggttcctttccctgtgaccgtatatgacgaggacgatagcgctcctacctttcctgcaggcgtggacaccgctagtgccgtcgtcgaatttaagcgcaaagaagatacagtggtggccacgctgcgggttttcgacgccgatgtcgtgccagcatccggcgagctggtgcgacggtacacttcaactctactgccaggtgacacctgggcgcagcagaccttccgcgttgagcactggcccaatgagacctccgtgcaggccaatggatcctttgtgcgggcaaccgtgcatgactatcgactggtcctgaataggaacctttcgatttcagagaatagaaccatgcagttagccgtgctggtaaacgactcggacttccaaggtcctggcgccggcgttcttctgctgcattttaacgtgtcggtgctgccagtttccctgcacctgccttccacgtatagcttgtctgtgagccgccgggcacgccgcttcgcacagattggaaaagtctgtgtggagaactgcctggctgacctcacaggagacgctgtgagtggtagagacgaggctcgttcatctggcctgggtagtcaaaaacaccccggctcgtag

SEQ ID NO: 203007 - DNA, 786 bp, synthetic construct
  misc_feature 1..786: note = Description of Artificial Sequence: Synthetic coding sequence
  source 1..786: mol_type = other DNA
atggacgaggccctggagacccagctgaagaccagccggggccggttcagcgctacagagagtctgccaacattggagttactgagtcaggttgatatggattgtcgtgtacacatgcggcctatcgggctcacttgggttctacagctgacccttgcctggattcttctggaggcttgcggtgggtctcggcctctgcaggcacggtcacagcaacaccatggccttgctgccgaccttggtaagggtaaattgcacctggcgggcccctgttgccccagtgaaatggacaccaccgaaacttcaggcccaggcaaccaccccgagagatgcggagtaccaagtcctgaatgcgagtctttccttgaacacctacagcgggcgctacggagtagatttcgtcttaggctgttgggagttcgtcaggctcagcccctttgcgaagagttgtgtcaggcgtggttcgccaactgtgaagacgacattacatgcggacccacgtggctgcctctgtccgagaagcgtgggtgtgagcccagctgtttaacttacggtcaaacattcgcagatggaaccgacctttgccgaagcgctctggggcatgctctacctgtggctgccccaggggctagacattgtttcaacattagtatctctgcagtcccacgcccccggccaggacggcgtggccgtgaggctccatctcgacgatcacgctctccccggaccagcattcttgatgccgcaggcagcggctctgggtccggtagcggtagtggcccttag

SEQ ID NO: 203008 - DNA, 675 bp, synthetic construct
  misc_feature 1..675: note = Description of Artificial Sequence: Synthetic coding sequence
  source 1..675: mol_type = other DNA
atgggctggcagctgatctgggccaaggccagctgcacctggcaggatttggtggttcctcagcggtggacccaacagcggcatagggcgctcgaaacaatccagaatgcagtggagtgcagggccctgaacgccaatccgtcttggaataccagtaacgtgcccttcgccgtggcctccgcctgcggctattgggggtatgccaggcatagccgttctgctaggtccagtgccagacccggatcaccaacagccaaaatgattagtccggccgccaggctgggctcgcatagtcagaagaagggcgccgtgagcccggccgcacttcctatggaccgtctcgagtgttctggtgctatttccgcccggtgtaatcttcgacttcggggttcttcggactctccagcagcgaccagtaggattgccggcatatctggggcttgccatcatgcccagctgatatttgtgtttctcgtggagagcgctttccatcatgtgggccaggccgggtttgagctgctcactagcggcgatcctccaactagcgcaagtcagagtgtgggcattacaggggtttcacaccgccctcggccaccacccagttcatttctgccctgtctcgaccctagagaccgcatcggtacaccccaggtccctgctccaaccctaccgtag

SEQ ID NO: 203009 - DNA, 690 bp, synthetic construct
  misc_feature 1..690: note = Description of Artificial Sequence: Synthetic coding sequence
  source 1..690: mol_type = other DNA
atggactgccgggtgcacatgcggcccatcggcctgacctgggtgctgcagctcaccctggcttggatactgctggaagcctgtggcggcagccggcctcttcaagccaggagtcagcagcatcacggtctcgctgccgatctaggaaagggcaagctgcatctcgcaggaccttgctgcccttcagaaatggacactaccgagacctccggccctgggaaccatcccgaaaggtgtggagtaccaagccccgaatgtgaatccttcctggagcacctgcaaagagcgctgagatcaagattccgactgcgtcttcttggtgtgaggcaggcacaaccactctgcgaagaactgtgccaggcctggttcgccaactgtgaagatgatatcacatgtggccccacttggcttccgcttagtgaaaaaagaggctgcgaaccaagttgcttgacttatgggcagacatttgccgatggcacggatctgtgccggagtgccctgggccacgccctccccgtggccgcccctggcgctaggcattgtttcaatatttccatctcagccgtccctagacctcggccaggcaggagaggccgagaagctccctctcgccgaagccgatcccccaggacatcgattcttgacgccgctgggtcaggttccggctcaggtagtggttcagggccatag

SEQ ID NO: 203010 - DNA, 618 bp, synthetic construct
  misc_feature 1..618: note = Description of Artificial Sequence: Synthetic coding sequence
  source 1..618: mol_type = other DNA
atggacgaggccctggagacccagctgaagaccagccggggccggttcagtgccactgaatcattgcctactctcgagctgctgtcccaggttgacatggattgccgggtgcacatgcgccctatcggcctgacctgggtgttgcagttaaccctagcgtggatactccttgaggcctgtggtggttcccgacctttgcaggcaagaagtcaacagcaccacggcctagcagctgacttagggaagggtaaactgcaccttgcaggtccctgttgtccaagcgaaatggataccacagagacatctggcccaggcaatcatcctgagcgttgcggcgttccaagccctgaatgtgagtcattcttggagcacttgcaacgcgccctgcggtccagatttagattgaggctacttggagtgaggcaggcccagcctttgtgcgaggagctgtgccaagcctggtttgccaattgtgaagacgacatcacttgcgggccaacgtggctaccgctgtctgaaaaaagaggctgtgagccctcatgtctaacttatggccaggccggcgtgcagtggcgggacctgagttctatgcagcctcccccaccaggatttaaatag

SEQ ID NO: 203011 - DNA, 720 bp, synthetic construct
  misc_feature 1..720: note = Description of Artificial Sequence: Synthetic coding sequence
  source 1..720: mol_type = other DNA
atggcccggcagctgctgagccaggtggacatggactgccgggtgcacatgagacccatcggcctcacctgggtgctgcaactgaccctggcgtggattctcttggaagcatgtggcggtagtcgcccacttcaggctagaagccaacaacatcatggcctcgcagctgacctgggcaagggaaaactgcatttggccgggccgtgttgcccatctgagatggacacaactgagacatctgggcccggcaaccaccccgagagatgtggcgtgccctcgccagaatgcgagagttttctggagcacctgcagcgcgctctgcggagtagattccggctcagacttttgggtgtccgccaggcgcagccgctctgtgaggagttgtgccaggcctggtttgcaaactgcgaagacgatatcacttgcggccccacttggctgcccctttccgagaaaagaggctgcgaaccaagctgtctgacatatggccaaacgttcgcagatggcaccgacctgtgtaggtcggctctaggtcatgccttgcctgtggctgctccaggcgccagacattgcttcaacatcagcatatccgccgttccacggcctcggccaggcaggagaggtcgggaagcccccagtagacgcagtcgctctcctagaacgtccatcctggacgctgcaggctccgggtcggggtccggttccgggtctggtccttag

SEQ ID NO: 203012 - DNA, 996 bp, synthetic construct
  misc_feature 1..996: note = Description of Artificial Sequence: Synthetic coding sequence
  source 1..996: mol_type = other DNA
atggcccggggcggccggggccggcggctgggcctggccctgggcttgctccttgccttagtgttggcacctcgcgtcttaagagctaagcctacggttaggaaggaacgggtggtcagacccgatagcgagttgggcgagaggccgccagaagacaatcagagcttccagtacgaccatgaggcttttctgggcaaggaggatagcaagaccttcgatcaactaactccggacgagtctaaagaacgtctgggaaaaatcgtcgatcgcattgacaatgacggagacggttttgtgaccaccgaggaactcaaaacctggattaagagagtgcaaaaacgctatatttttgacaacgtggcgaaagtgtggaaagactacgatcgggataaggacgataaaatttcatgggaggaatataagcaggctacgtacggctattatctcgggaatccagcagagttccacgatagctctgaccaccatacattcaaaaagatgctgcctcgggacgaacgtagattcaaagcagccgatcttaatggagacctgactgccacccgcgaggagttcaccgcatttctgcaccctgaggagttcgaacatatgaaggagatcgtagtacttgagaccctcgaagacatagataaaaatggggacggcttcgtagaccaggacgagtatattgccgacatgttcagccacgaggaaaacgggccagaaccggattgggtgctgtccgagcgggagcagtttaacgagtttagggatctcaacaaggatggaaagttggacaaggatgagatccgtcattggatactgccgcaagactatgaccatgcacaagccgaggccaggcatttagtatacgagtcggataaaaacaaagatgagaagctcaccaaagaagagatactggagaattggaacatgttcgtgggctctcaagccacgaactatggggaagaccttacgaagaatcacgacgaactctag

SEQ ID NO: 203013 - DNA, 87 bp, synthetic construct
  misc_feature 1..87: note = Description of Artificial Sequence: Synthetic coding sequence
  source 1..87: mol_type = other DNA
gagatcctggagaactggaacatgttcgtgggcagccaggccaccaattacggagaggatctcacgaaaaaccacgacgaactctag

SEQ ID NO: 203014 - DNA, 954 bp, synthetic construct
  misc_feature 1..954: note = Description of Artificial Sequence: Synthetic coding sequence
  source 1..954: mol_type = other DNA
atgcggctgggcccccggaccgccgccctgggcctgctgctgctgtgtgccgcagccgccggggccggcaaggccgaagaactccattatccacttggggagcggagatcagactatgaccgggaggcgcttctgggcgtccaagaggacgttgacgaatatgtgaagctcgggcatgaggagcagcagaagcgcctgcaggccatcatcaaaaaaatcgacttggatagcgacggattcctgactgaatccgaattgagtagttggattcagatgtcctttaagcattacgctatgcaagaggctaaacagcagtttgttgagtacgacaaaaatagcgacgacactgtcacctgggatgagtacaacatccagatgtacgacagagtcatcgactttgacgagaatacagccctagatgatgctgaagaagagtccttccgaaagctacatctgaaggataaaaagagattcgaaaaggccaaccaggatagtggccccggactgagcctggaagagttcatagcgtttgagcatcctgaagaagtggattatatgaccgaatttgttattcaagaagcacttgaagaacacgataagaacggggacggattcgtgagtcttgaagagttcctcggagattacagatgggaccccaccgccaatgaggacccagagtggatcctggtcgagaaggacaggtttgtgaacgactacgataaggataacgatggacgactggacccacaggaactgctgccatgggtcgtgcccaataatcagggaattgctcaggaggaagcccttcaccttatcgatgaaatggatcttaatggtgacaagaagcttagcgaagaagaaattctggaaaatccagacctgttcctcacatctgaggccactgactatgggcggcagctgcacgacgactatttttatcacgacgagttgtag

SEQ ID NO: 203015 - DNA, 2331 bp, synthetic construct
  misc_feature 1..2331: note = Description of Artificial Sequence: Synthetic coding sequence
  source 1..2331: mol_type = other DNA
atggccgcccccggcgacccccaggacgagctgctgcccctggccggccctggcagccagtggctccgccaccgtggcgagggtgagaatgaggccgtgactcctaaaggggccacacctgcgccccaggccggtgaacccagcccggggctgggagctcgcgcgcgcgaagctgcttcacgggaggccggaagcggacccgcccgacagagccccgtggcaatggaaaccgcttctactggggtggctggcgtctcgtctgcaatggaccacacatttagcacaactagcaaagatggcgagggctcctgttatacctccctgattagtgatatctgctaccctcctcaggaagattccacttatttcacaggaattttgcagaaggagaacggccatgtaacaatcagtgagtcccccgaggagctaggcacaccagggccatctttgccagatgttcctggcattgaatcccgcggcttgttcagctctgattccggtatagagatgactccagctgagtccaccgaggtgaacaagatactggctgaccctcttgaccagatgaaagccgaggcttacaagtacatagatattacacggcctgaagaggtgaagcaccaggagcagcatcaccccgaactcgaggataaggacctcgatttcaaaaacaaagataccgacattagtattaaaccagagggagtacgagaacccgataagccagcgcctgtcgagggcaagattatcaaggaccatctgttagaagagtccaccttcgctccctacatcgacgatctgtcagaggagcagcgaagagccccccagatcacaacgcccgtaaaaattacattaacagagatagaaccttctgtggagaccaccactcaggaaaaaacacccgagaaacaggatatttgcctcaagccaagccccgacaccgtccccaccgtcacagtctccgaacctgaagatgattctccaggcagcatcaccccaccttccagcggcacggagccatccgccgccgaaagccagggcaaaggcagtatctcagaagacgaacttattacagccataaaggaggccaagggactgtcttacgagaccgcagaaaatccccgaccggtcggccagctggcagaccgcccagaggtgaaggcgaggtccgggccccccacaattccatcccccctggaccacgaggcaagctccgccgagtctggcgacagtgaaatcgaacttgtttctgaagatcccatggctgcagaggacgccctgccttctggttacgtatctttcggacacgtggggggccccccaccctcgccagctagtccctcaatacagtattccatccttagagaagagcgggaagctgagctggacagtgagctgattattgaaagctgcgatgccagttccgcctcggaagagagtcctaagcgggagcaggactcacccccgatgaagccttcagccctcgacgccatccgggaggagacgggcgtacgggccgaagaacgggctccatctcgccgtggactggctgagccaggaagctttttggactatccttccactgaaccccagcccggtcccgaactcccacctggcgacggagccctggaacccgaaacccccatgttgccacgcaagcctgaggaggattcatcgtccaaccagtcccctgctgccactaaaggcccaggaccccttggcccaggcgcccctcctccattactctttctgaacaagcagaaggccatagacctgctgtattggagagatatcaaacagacggggatcgtcttcggttccttcctactactcctgttctctctgacccagttttctgtggtctccgtcgttgcatacctagccctcgcggctctttccgcaacaatctcctttagaatctataagagcgtgctacaggccgtgcagaagaccgatgaaggccatcccttcaaagcttacctggaactcgaaataacactgtcacaggaacagatccagaagtacactgattgccttcagttttatgttaatagcacacttaaggaactgaggaggctctttcttgtacaagacttggtggacagtctcaagtttgctgtcctgatgtggttattaacttacgtgggcgccctttttaatggtttgacactcctgctgatggcagtggtgtccatgtttaccctgcccgtcgtgtatgtgaaacaccaggcacagatcgaccagtacctgggtttggtgagaacacacatcaatgcggtggtcgcaaaaatccaggcaaaaatccctggggccaagcggcacgcagagtag

SEQ ID NO: 203016 - DNA, 627 bp, synthetic construct
  misc_feature 1..627: note = Description of Artificial Sequence: Synthetic coding sequence
  source 1..627: mol_type = other DNA
atgcaggccaccgccgacagcaccaagatggactgcgtgtggagcaattggaaatcacaagcgattgatctgctctattggcgcgacatcaaacagacaggcatcgtgtttggctcttttctgctcctcctgtttagtttaacccaattctctgtggtctccgtcgtcgcttacctcgccctcgcagccctgtcggccaccatcagcttccgcatttacaagtctgttttgcaggcggtgcagaagaccgacgagggacatcccttcaaagcgtacctggaattggagatcaccctttcccaggaacagattcagaagtataccgattgcctccagttctatgtaaattctactctcaaagagttaaggcggctgttcctcgttcaagatctcgtggattccctgaagtttgccgtgctgatgtggttactcacatacgtgggagctctgtttaacggactgaccttgctactcatggccgtggtttccatgtttaccttgccagtcgtgtatgtgaaacaccaggcccagatcgatcagtatctcggtctggttcgcacccatattaatgcggtagttgccaagattcaggccaaaattcccggggctaagagacacgccgagtag

SEQ ID NO: 203017 - DNA, 1071 bp, synthetic construct
  misc_feature 1..1071: note = Description of Artificial Sequence: Synthetic coding sequence
  source 1..1071: mol_type = other DNA
atggccgccgaggacgccctgcccagcggctacgtgagcttcggccatgtaggggggccgcccccttctccggcatcccccagtatccagtacagtattctgcgcgaagagcgtgaagcagagctcgattccgagctcattatcgagagttgcgatgcgagcagtgcaagcgaggaatcaccgaagcgggaacaggactcacctccaatgaagccctccgctctggatgccattcgcgaagagaccggagtgcgcgcagaagaaagagctccatcccggagaggtctcgccgagccaggctcgtttctggattatccatccacagagccccagcccggacctgagctgccccccggcgacggcgctttggaacccgaaactcctatgctcccccgaaagcctgaagaggactcaagcagcaaccagtctcctgccgccacaaaaggacccggacccctagggccaggggcccccccaccactgttgttcctcaacaaacagaaggccattgatttactgtactggcgcgacatcaaacaaactggcattgtattcggatcatttctactgctgctgttttcactgacccagttctcagtggtgtccgtggtcgcctaccttgctttagcggccctcagcgccaccatttcgttcaggatctacaagtccgtcttacaggctgtgcaaaagaccgacgagggccacccttttaaagcttacttggaactggagatcaccctctcccaggagcagattcagaagtacaccgattgcctacagttctacgttaactctactctgaaggaattacgtaggcttttcctcgtccaggaccttgtggattccttaaagtttgcagtgctgatgtggctcttgacttatgtgggtgccctgttcaacggattgacactcctcctgatggccgtggtctccatgttcaccctgcccgtcgtgtatgtgaaacaccaagcgcagattgaccaatacctgggcctagtgaggacacacattaacgccgtggtggccaagatccaggctaaaatccccggcgcaaaacgtcatgcagagtag

SEQ ID NO: 203018 - DNA, 2109 bp, synthetic construct
  misc_feature 1..2109: note = Description of Artificial Sequence: Synthetic coding sequence
  source 1..2109: mol_type = other DNA
atggagaccgccagcaccggcgtggccggcgtgagcagcgccatggaccatacgtttagcacaacctcgaaagacggagagggctcttgctatacaagtttgatcagcgacatctgctaccctcctcaggaggacagcacttactttacaggtatcctccagaaggaaaacgggcacgtaacaatttcggaatctccggaagaattgggaacacctggcccatcactccccgatgtacccggaatcgagagtcggggcttattttcctctgactccggtatagagatgactccagccgagagtactgaagttaacaagatccttgccgatcctctggatcagatgaaggctgaggcttacaagtatatcgacattactcgtcctgaagaagtgaaacatcaggagcagcatcacccagaacttgaggacaaagaccttgactttaagaacaaggatacagatattagcattaagcccgagggtgtgcgggaacctgacaagccagctcccgttgaaggcaagattattaaggatcatctgttggaggagtccacctttgcaccatatatagatgacctttccgaggaacagcgtcgcgcaccccagatcaccaccccagtaaagattaccctgactgaaattgagccgtcggtcgagactactacccaggaaaagacaccggagaagcaagacatttgcctcaagccttcaccagataccgtacctacggtgaccgtgtctgagcccgaagatgatagtcctggctccattacgccaccgagctctgggacagaacctagcgccgccgaatcccaggggaagggatctattagcgaggacgaattaataaccgccattaaggaagccaagggcctctcgtatgagacagctgagaaccctcgacccgtcggtcagctagccgatcggcctgaagtcaaggcgaggtccggcccccctaccatcccctcgccattggaccatgaagcttccagcgctgaaagtggagatagtgagatcgagttggtctcagaggaccccatggccgcggaggatgcactgccatccgggtacgtatctttcggacatgtcggcgggcctcccccgtctcccgcatccccatccatacagtatagcattttgcgcgaggaacgcgaagctgaactcgattctgagctgatcattgaatcatgtgacgcttccagcgcttctgaggagtcgcccaaaagagagcaggactcaccccccatgaaaccaagcgctctcgacgcgatccgggaggagactggcgttagggcagaggaacgggcaccgtcaagaaggggcctagccgagcctgggagctttctggactacccatcaactgaaccacaaccagggccggaacttccaccaggagacggggccctcgagccagaaacacccatgttaccaagaaagccagaggaggactccagcagtaatcagtctcctgctgccacaaaaggccccgggccactcggccccggtgctccacccccgctgctgtttttaaacaaacagaaggcaatcgacctactgtactggcgcgatattaagcagactggcattgttttcgggtcattcttgctccttttgtttagtctcacgcagttcagcgtggtgtccgttgtggcctacttggcactcgccgcactgagcgctactatcagctttagaatctataaatccgtcctgcaagctgtccagaagacagacgaaggccatccctttaaggcgtacttggaacttgaaattactctcagtcaggagcagatacagaagtataccgactgcctgcaattttatgtgaactcaaccctgaaagagctccgcaggctcttcttggtccaggaccttgtcgatagcttgaagttcgccgtcttgatgtggctgcttacatacgtaggagcgctctttaatggcctcactctcctgcttatggcagtggtgtctatgtttacgttgccggtagtgtacgtcaagcaccaagcacaaatcgatcagtatttgggcctcgtgaggacccacatcaatgcagtcgtcgctaagatccaggcaaaaatccctggagccaaaagacatgcagagtag

SEQ ID NO: 203019 - DNA, 1638 bp, synthetic construct
  misc_feature 1..1638: note = Description of Artificial Sequence: Synthetic coding sequence
  source 1..1638: mol_type = other DNA
atgggccaggtgctgcccgtgttcgcccactgcaaggaggccccctccactgcatccagtacacctgacagtactgaggggggaaatgatgacagcgacttccgggaactgcatactgcccgcgaattttctgaggaagatgaggaggagaccacatcccaggactgggggacccctagggagttaactttctcttacattgcatttgacggagtggtggggtccggcggacgccgggactctaccgcacgccggcctaggccacaaggccgatcagtttccgagccaagagatcaacacccccagccaagtctcggggattctttggagtcaattccctctctctcccagtccccagagccaggcaggagaggggatcctgacaccgctcctccatctgaacggccattagaagatcttcggctccgacttgatcaccttggctgggtcgcgcgaggcacgggaagtggtgaagacagctccacctcgagcagcacacccctcgaagatgaggagccccaagagccaaaccgcttggaaacgggcgaagccggtgaggaactggaccttagacttagactggctcagccatcatcgcctgaggtgctcacacctcagttgtccccaggcagtgggactccccaagctggcaccccctctccgagtcgctcaagggacagcaatagtggaccagaggagcctctcttggaagaagaggagaagcagtggggccctctggagcgggagcccgtacgaggccaatgtctcgactctactgatcagttggagttcaccgtggaaccaaggttgctgggcaccgcaatggaatggctgaaaacctctttactgcttgccgtttacaaaactgtcccaattttggaactgtcgccgcctctgtggacagctatcgggtgggttcagcgtgggccaacccctccgactccagtgctgcgggtactcctgaaatgggcaaagtctcctcgatcaagcggcgttcccagcttatcattgggcgccgatatgggatcgaaggtcgcagacctgctatattggaaagacacccgcactagcggcgtggtgtttactggcctcatggtttccttgctgtgcctactgcatttttccatcgtgagtgttgctgctcatttggccttgctgctgttgtgcggaacaatatctctacgcgtgtaccgaaaggtgctgcaggccgtgcacaggggagacggtgcgaacccatttcaggcttatcttgacgtcgaccttacacttacgagagaacagacagaacggcttagccatcaaattacaagtcgtgttgtgagcgcagccacccagctgcgtcactttttcttagtggaagatctcgtcgattccctgaagcttgcgcttctcttttacattctcaccttcgtcggtgccatatttaatgggcttaccctcctgatcttaggcgtgattgggctcttcaccatcccattactgtaccgccagcaccaggcgcagattgatcagtatgtgggtctggtcaccaaccagcttagccacatcaaggctaagatacgggccaagatccctgggaccggggccctggcaagtgctgccgctgctgtgtctgggtccaaagctaaagcagaatag

SEQ ID NO: 203020 - DNA, 1419 bp, synthetic construct
  misc_feature 1..1419: note = Description of Artificial Sequence: Synthetic coding sequence
  source 1..1419: mol_type = other DNA
atgggccaggtgctgcccgtgttcgcccactgcaaggaggccccctcgaccgcctcaagcactcctgatagcacagagggaggtaatgatgattcggacttcagggagctacacacagctcgggagttcagcgaggaagacgaggaggagaccacatctcaggattggggcacgcctagggagctgaccttttcgtatatcgcatttgatggcgtggtcggtagcggcgggaggcgggacagtaccgccaggcgccctcgccctcagggaaggtcagtaagtgagccaagagaccaacatccccagccctctctgggtgattctctggaatccattccaagcctgtcacagagtcctgaaccaggtaggagaggcgatcccgataccgccccacctagcgagcggccactggaggatctgagactaaggcttgaccacctcggctgggttgcccggggcacagggagtggcgaggacagctccacctcaagcagcactcctctggaggacgaggagccccaggaaccgaatcgccttgagacaggggaggcaggagaagagctcgacctgagactacgtctggcccagccgtccagtcccgaggtcttgactcctcagctgtcccccgggtccggcactccacaggcaggtacgcctagcccatcacgttcccgggactccaactcagggccggaagagccattgttggaagaggaagagaaacagtgggggcctttggaacgcgagccagtgcgaggccaatgcctggacagcacagatcagctcgagtttaccgtggagccgaggctgctcgtcgccgacttactgtattggaaggatactcgaaccagcggcgtggtgttcacgggcctgatggtatccttgctttgcctgctgcacttttccatcgtttctgtggccgcacacctcgctctgctactgctatgcggcacgatttccctgcgggtgtatcgcaaggtcctccaggccgtacacagaggggatggggccaacccgtttcaagcgtacctcgatgttgatctgacgctcacaagagagcaaacagagagactgtcgcatcaaatcacttcccgagtggtgagcgcggcaacccaacttcggcacttctttctcgtggaggacctggtagacagtttgaagttagctctgctgttttacattctgaccttcgtcggcgccatatttaacggactcaccctgctgatcctgggcgtgatcggcttgttcacgattcctctgctatacaggcagcaccaggcccaaattgaccagtatgtcggcctggtgactaaccagctttcgcatattaaagcaaaaattcgtgctaagatcccaggcacaggggccctggcttccgccgccgcagccgtgagcgggagcaaggcaaaggccgaatag

SEQ ID NO: 203021 - DNA, 618 bp, synthetic construct
  misc_feature 1..618: note = Description of Artificial Sequence: Synthetic coding sequence
  source 1..618: mol_type = other DNA
atgggcagcaaggtggccgacctgctgtactggaaggacacccggactagtggagtagtgttcaccgggttgatggtgtcactgttgtgcttactacacttttccatcgtctccgtggccgctcatttagctctgctgctgctttgcggcacgatctccctccgggtgtacaggaaggtcctgcaggctgtgcacaggggcgatggtgccaacccgtttcaggcttacctagatgtagatctgactttgacacgggaacaaaccgaacggctgagccatcagatcacaagcagggtggtctccgccgcaacccagctgcggcatttcttcctggtcgaggaccttgtggatagcctgaagctggcattgctattttacatactcaccttcgtcggggccatcttcaacgggctcacccttctgatcctgggggtcattggcctgttcactatcccgcttttatacagacaacatcaggcccaaatcgaccagtatgtcggactggtcactaaccagctgtctcatataaaggccaagatacgggctaagatccccggaaccggcgctttggccagcgcagccgccgccgttagtgggagtaaggccaaggcagagtag

SEQ ID NO: 203022 - DNA, 3042 bp, synthetic construct
  misc_feature 1..3042: note = Description of Artificial Sequence: Synthetic coding sequence
  source 1..3042: mol_type = other DNA
atggccgagcccagcgccgccacccagagccacagcatcagcagcagttcatttggcgccgaaccgagtgcacccggaggcggcggatcgccaggagcctgtcccgcactgggaactaaatcctgcagtagctcatgcgcagaaggtctatccagcctgtgcagtgatgagccctcttccgagattatgaccagttcatttctgagcagctccgagattcacaatacaggcttgactatcctccacggggagaagtcccatgttttgggcagtcagccaattctggccaaagaagggaaagatcacctggacctcctcgatatgaaaaagatggagaaaccacagggtactagcaataacgttagtgacagctcagtgtcccttgctgctggagtgcactgcgatagaccttcaattccagcctcatttcccgagcaccccgcctttctcagcaaaaaaattggccaggtggaggagcagattgacaaggagacaaagaatcctaatggagtctcctctagggaagccaaaaccgccctggatgccgacgatcggttcactctcctgacggcacaaaagccacctaccgaatacagcaaggtcgaaggaatatacacctactcactcagcccctctaaggtgtcgggcgatgacgtgatcgagaaagactccccagagtcaccctttgaagtcatcatcgacaaagctgcatttgataaagaattcaaagatagctataaggagtcaactgatgactttggctcgtggtcagtccacacagataaggagtcatctgaggatataagtgagacgaacgacaagctgttcccccttagaaacaaggaagctggaagatacccaatgtccgccctgcttagtaggcagttctcacacacgaacgcagcactggaagaagtctcacgctgtgtcaatgatatgcacaattttacaaacgagatactgacctgggacctggtgccacaggtgaaacaacagacagacaaaagtagtgactgcataactaaaaccaccggactggatatgtcagaatacaattctgagattcctgtcgtcaacctcaagacatccacccaccagaagaccccggtttgcagcatcgacggctctacccccatcacaaagtctactggagattgggccgaggcttctctacagcaggagaatgcaataactggcaagcctgtcccggattcactcaactcaacgaaggagttctcaattaaaggcgtacaaggaaatatgcagaaacaggacgacaccctagccgagctgccaggctcgcccccggagaagtgcgattccctgggctccggcgttgcaacagtgaaagtagttcttcccgacgaccatctgaaagacgaaatggattggcaatcgtccgctctcggagaaatcacggaagcggactcttccggcgagagtgatgatacggtaatcgaagacatcaccgcagacactagctttgagaacaataaaatccaagccgaaaaaccagtctccattcctagcgctgtggtaaagaccggggagagggaaattaaggaaataccctcatgtgaaagggaagaaaaaacatccaagaactttgaagaactggtaagcgacagtgagctccaccaggaccaaccagacatcctgggtaggagtcccgcgagtgaagctgcctgttcaaaggttccggataccaatgttagccttgaagatgtgtctgaagtggcccctgagaaaccaattacgacagagaacccaaagctcccatccacagtgtctcctaacgtattcaatgaaacggaattctccctgaacgtgaccactagcgcttacctggaatctctgcacggtaagaatgttaagcacatcgacgacagctcacctgaggatttgattgccgcatttaccgagacccgggataagggtattgttgactccgagcgtaatgcgtttaaggcaattagtgagaagatgacagactttaagaccacccctccagtggaagtgctccatgagaatgaatctggcggcagcgaaatcaaagatattggaagcaaatacagcgagcagtccaaggagactaatgggtctgagcccttgggtgtatttcccactcagggaactccagtggccagtctcgaccttgaacaggagcagcttactataaaggctttgaaagagctgggcgagcggcaggtggagaaaagtacttccgctcaaagagatgcggagttacccagtgaggaggtacttaaacagacattcacttttgcccctgagtcgtggcctcaaagaagctacgatattttggaaaggaatgtgaagaacgggtcggatctgggaatctctcagaagccaataactatccgtgaaacaaccagagtcgatgcggtgtcctctctcagcaaaaccgaactcgtcaaaaaacacgtacttgcacggttgctgaccgattttagcgttcacgatctcatattttggcgggatgtcaaaaaaaccgggttcgtctttggtactacactcattatgctgctgtctctcgctgcgttctcagtcatatccgtggtgtcatacttgattttggccctgctgagcgtgacaatctcattcagaatttataaaagcgttatccaggccgtgcagaagtcagaggagggccatccgtttaaagcatacctcgacgttgatatcacactaagctcagaggctttccacaattatatgaacgccgccatggtgcacatcaaccgggcactcaagctgataattaggctctttctggtagaagatctggtcgacagtttaaaattagcagtcttcatgtggctaatgacatatgtgggtgctgtgtttaatgggattactttactgatattggctgaactcctgatcttctccgtcccaatcgtgtacgagaagtataagacacagatcgaccactatgtcggcattgcccgggaccagaccaagtctatcgtggaaaaaatacaggcaaaactgcccggtatcgccaagaaaaaggctgagtag

SEQ ID NO: 203023 - DNA, 726 bp, synthetic construct
  misc_feature 1..726: note = Description of Artificial Sequence: Synthetic coding sequence
  source 1..726: mol_type = other DNA
atggccgagcccagcgccgccacccagagccacagcatcagcagctctagctttggagcagagccatcggctccaggcggcgggggtagtcctggagcatgcccagcactgggaaccaaaagctgcagctcctcctgcgcagtacatgacctaattttttggcgggacgttaagaaaacaggattcgttttcggaacaacactgatcatgctgctcagcctggccgcttttagcgtcatcagcgttgtttcctacctaatcttggcgctgctgagcgtgactatatcttttcgcatatacaagagtgtaattcaggctgtgcaaaaaagcgaggagggacatccattcaaggcctatctagatgtggatatcactctcagctctgaagcattccataactacatgaacgccgccatggttcatatcaatcgcgccctgaaattgatcatccggctcttcctcgttgaggatctcgtcgactcactgaagctagcagttttcatgtggctcatgacttacgtaggagcagtttttaacggcatcaccctcttgatcctcgccgagttgctgatctttagcgttcctattgtctacgagaaatacaaggacccttccaaaaccccctggaaccggcaaaagaagggccgaatatctacgtggaagccagagatgcagcagttattgaagcatcatttgatcgtcatcacaagccttctagtcctgtag

SEQ ID NO: 203024 - DNA, 645 bp, synthetic construct
  misc_feature 1..645: note = Description of Artificial Sequence: Synthetic coding sequence
  source 1..645: mol_type = other DNA
atggccgagcccagcgccgccacccagagccacagcatcagcagctcttcctttggggctgagcctagcgctccaggaggcggaggcagcccaggcgcttgtccagctctcggtaccaaatcctgttcctccagttgcgctgttcatgacttaatattctggagggacgtcaaaaaaacaggcttcgtgtttggaactacactcataatgctcctgtcgcttgccgcatttagcgtcataagcgtcgtgtcttatctgatcctggctctgttatccgtaacaatttctttccgtatctataagtctgtcatccaagcggttcaaaaaagcgaggaaggtcacccttttaaaccaagactgatcaccatgcttgcctctcccgagattcgaccctctcaattgctgaagcgctccaaacagaactccctcgagtctcccaagaagcgccagaataagtacatggagacccgcaacgccactgtaactaagactccttttaactcttacaatgtggtgacctgcacaatgaaggagaacacccagtgccagctcgagcctgcattccaggccttcttcttgatttggtgcttcctcccatcctttccttttaatccacagtatcaggcacaaaagctcatggactag

SEQ ID NO: 203025 - DNA, 768 bp, synthetic construct
  misc_feature 1..768: note = Description of Artificial Sequence: Synthetic coding sequence
  source 1..768: mol_type = other DNA
atggccgagcccagcgccgccacccagagccacagcatcagcagcagctcattcggagctgaacctagcgcacccggaggcggaggaagccctggcgcctgtccagcactgggaaccaaatcttgctccagctcctgcgcagatagtttcgtcagcagctcctctagccagccagtgagtctgttcagtacaagccaggttcatgatttaatcttttggagagatgtgaaaaaaacaggattcgtgttcggaacaactttaataatgctcctgagcttggctgctttctccgtgatatcagtggtgtcctacctaattttagccctcttgtccgttacaataagctttcgaatctataaatcagtgatacaggccgttcagaaaagtgaggaaggccatccgtttaaggcgtacctggacgtggacatcaccttaagtagcgaagcatttcacaactatatgaatgctgcaatggtgcatattaaccgggcactgaaactcataatcagattattcctggtggaggacctcgtggattctcttaagttagccgtgtttatgtggctgatgacatatgtgggagctgtgtttaacgggataacactgctgattctggccgagctgctcatttttagtgttccgatcgtgtacgaaaagtataagacccagatcgaccactacgtgggtattgcccgggaccagacaaagagtattgtggaaaaaattcaagccaaactccccggtatagccaagaagaaggccgagtag

SEQ ID NO: 203026 - DNA, 3099 bp, synthetic construct
  misc_feature 1..3099: note = Description of Artificial Sequence: Synthetic coding sequence
  source 1..3099: mol_type = other DNA
atggccgagcccagcgccgccacccagagccacagcatcagcagctcaagtttcggagcagagccttcggcgccgggtgggggaggctcccccggtgcatgtcctgcactcggcaccaaatcctgctcaagctcgtgtgcagactctttcgtttctagttcatcttcgcagcccgttagcctgtttagcactagccaggaggggctgtcttcgctctgctctgacgagccgagctcagagattatgacatcatctttcttatcttcgtccgaaatccacaacactggcctgaccatcctccacggggaaaaaagtcacgttctcgggtcccagccgattttggctaaggaaggaaaggaccacctggacctgcttgacatgaaaaagatggaaaagcctcagggcacttctaacaacgtaagtgactcatcagtgagtcttgccgcgggagttcattgtgatagaccgagtataccggcttcctttcctgaacaccctgcttttctatccaaaaagatcgggcaggtggaagagcaaatcgacaaggagaccaagaatccaaacggagtatccagtcgggaggctaagacggctctggacgcagacgaccggtttacactgcttactgctcagaaacctccaactgagtattcaaaggtggagggtatttacacatattccctgtccccctctaaagtgtcaggggacgacgtcattgaaaaggactccccggaaagccctttcgaagtcattatcgacaaggccgcgttcgacaaagaattcaaggattcatacaaagagagtactgacgatttcggctcatggtccgttcacacagataaggagtcgtccgaggatatcagcgagacaaatgataagttattcccccttaggaacaaagaagcagggagatacccgatgtcagctctgttatcccgccagttttcccatacaaacgccgcactggaagaggtgtcacggtgcgttaacgacatgcacaattttaccaacgaaatcctaacgtgggatctggtgcctcaagtgaagcagcagaccgacaaatcgtccgattgtattactaagactactggtctagacatgagcgaatataactcggaaatacccgtagtgaacctgaagacttccacccatcagaagacccctgtttgctccatcgacggcagtaccccgattaccaaatcgacaggagactgggctgaggcatcactccagcaggagaacgctattactggaaagcctgttccagactctctgaactcaactaaggagtttagtattaaaggggtacaaggcaacatgcaaaaacaagatgatacgttagcagagcttccgggcagtccccccgaaaagtgtgactctctcggctccggagttgccaccgtgaaggtcgttctgcccgatgaccatctcaaagacgagatggattggcagagtagcgctttaggcgagatcacagaagctgattcttctggtgagtcggatgacacagtgatcgaggacattacagcagatacaagtttcgaaaacaacaagatccaggcggaaaaacccgtgagtatccctagcgcggtcgtaaagactggcgagagggaaattaaagaaatcccatcttgcgagagagaggagaaaacctccaagaatttcgaagaactggtgagcgactccgagctccatcaggaccagccggatattcttggcaggtctcctgcctccgaggcggcctgctccaaagtaccagataccaatgtttcactcgaggatgtctccgaagttgcccccgagaaacccattacaactgaaaatccaaagctgccttccaccgtgagcccgaacgtctttaatgagaccgagttctcattaaacgttacgaccagcgcctatctggaatcattgcatggtaagaatgtgaaacatattgacgacagttcccctgaagacctgattgctgcgtttactgagaccagggacaagggcatagtggacagcgagaggaacgcatttaaagccatttcagaaaaaatgactgatttcaaaaccacccctcctgtggaggtgctgcacgaaaacgaaagtgggggatcagagataaaggatatcggtagcaagtacagcgagcagtccaaggagactaacggcagcgagccactcggcgtcttcccaactcagggcacccccgtcgcctctctagacttagagcaggaacaactcaccatcaaagccctcaaggagctgggagaacgccaggtagaaaaatccacctccgctcaacgggatgcagaactcccgagcgaagaggttttgaaacagacttttacctttgctcccgaaagttggcctcagcggtcctatgacattctggagcgcaatgtgaagaacgggtctgatctgggcatttctcagaagccaattactattagggagacaacaagagtggacgccgtaagctcactgagcaagaccgagcttgtgaagaaacatgtcctggcccgactcctgactgatttttccgtgcatgatttaattttttggcgtgacgttaagaaaacaggattcgtattcggcacgacattgattatgctgctctcccttgctgcctttagcgttatatcagtggtctcttatctcatcctggcgctgctttccgtcactatttcatttcgaatatacaagtctgttattcaagccgttcagaaatcagaggaggggcacccattcaaggcttacctggatgtagacattactttgtcttctgaggccttccataactacatgaacgcagctatggtacacattaatcgcgcactgaagctcatcataagactgttcctagtggaggacctggttgactcactaaagcttgcggtgtttatgtggctgatgacctatgttggagctgtattcaacgggatcacgttgctcatcctcgctgagttgctcatcttttcagtacctatcgtctacgaaaaatataaaacacagatcgaccactacgtcggtatcgcccgagaccagactaaatccattgttgagaaaatccaggctaagctgccgggcatcgccaaaaagaaagccgaatag

SEQ ID NO: 203027 - DNA, 372 bp, synthetic construct
  misc_feature 1..372: note = Description of Artificial Sequence: Synthetic coding sequence
  source 1..372: mol_type = other DNA
atggccgagcccagcgccgccacccagagccacagcatcagcagcagttcctttggagcagaacctagcgcacccggtggaggcggctctcctggtgcatgcccagccctaggtacaaagtcatgttcttctagttgcgcagtccacgacctcatcttttggagggacgttaagaagactgggttcgtgtttgggactacactaataatgttgctgagcctcgcggcttttagcgttatcagcgttgtaagctatctcatcttagcactgctgagtgtcacgatttcatttcggatatataagagcgtgatccaagccgtgcagaaatccgaagagggtcacccatttaattggctgtccagttgcggatag

SEQ ID NO: 203028 - DNA, 711 bp, synthetic construct
  misc_feature 1..711: note = Description of Artificial Sequence: Synthetic coding sequence
  source 1..711: mol_type = other DNA
atggccgagcccagcgccgccacccagagccacagcatcagcagctcatctttcggcgccgagccttcagcgccaggcggaggtggttccccaggcgcttgcccagcgttaggaacaaaatcatgctctagcagctgcgccgtgcacgacctgatcttctggcgcgacgtgaagaaaacaggcttcgtttttggtaccactctaatcatgctgctctctctggccgctttcagtgttatctccgtggtgagttatctgattctggccctgctcagcgtgaccatctctttccggatctataaatctgtgattcaggccgtgcaaaagtcagaggagggtcacccttttaaggcatatctggatgtggatattaccctatcctcagaggcctttcacaactacatgaacgccgccatggtgcatattaatcgagccctgaaattgattattcgccttttcctcgtcgaggaccttgtagattccttgaaattggcggtgttcatgtggctaatgacatatgtcggggccgtgttcaacgggatcactctgttaatactggccgagctattaatcttttcagtgcccattgtctacgagaaatataagacacagatcgaccattacgtggggatagcacgggaccagaccaaatcaatcgtggagaagatccaggccaagttgccagggatcgccaagaagaaagccgagtag

SEQ ID NO: 203029 - DNA, 1122 bp, synthetic construct
  misc_feature 1..1122: note = Description of Artificial Sequence: Synthetic coding sequence
  source 1..1122: mol_type = other DNA
atggaggacctggaccagagccccctggtgagcagcagcgacagccctcctaggccccagccggctttcaaataccagtttgtccgcgagcccgaggacgaggaggaagaagaggaagaggaggaggaggacgaagacgaggatctggaagaactggaggtgcttgagcggaagcccgccgccgggctgtccgcagcccccgtgcctacagctccagctgcaggcgctcctttgatggattttggaaatgatttcgtgccaccggcgccaagaggacccttgcccgccgctccccctgtggctcccgaacgtcagcccagctgggaccccagtccagtctcctccactgtgccggccccttctccgctaagtgcagctgccgttagcccgtcaaaacttcccgaggatgatgagccccccgctaggcctcctccacctccccctgcatcagtgagtcctcaggccgagcctgtgtggacaccccctgccccagctccagccgctcccccaagcacccccgcagcccccaaaaggcgaggcagctctggttcagttgtggtagatcttctttactggcgggacatcaagaagaccggagttgtgttcggggcctccctatttcttctgctcagcctgaccgtattctccatcgtcagcgttacagcttatattgccctagcgctgctaagcgtgaccatttccttccgaatctataagggcgtgatccaggccatacagaagtctgatgaaggacacccgtttagggcttacctcgagtctgaggtggcgataagcgaggagctcgtgcagaaatatagcaatagcgccctcggtcacgttaactgtacaattaaagaactgaggcgtcttttcctggtggacgacctggtggatagtctcaaatttgccgtgttaatgtgggtgttcacatacgtgggagccctgttcaacggtctgacactcctcatattggcactcatctccctgttcagcgtgcctgtgatttacgagcggcaccaggcacagatagaccactacctggggctcgccaataaaaatgtgaaagatgctatggccaaaatacaggccaagatacccggactgaagagaaaagccgagtag

SEQ ID NO: 203030 - DNA, 3579 bp, synthetic construct
  misc_feature 1..3579: note = Description of Artificial Sequence: Synthetic coding sequence
  source 1..3579: mol_type = other DNA
atggaggacctggaccagagccccctggtgagcagcagcgacagcccacctaggccccagccagccttcaaataccagttcgtgagggagcctgaagatgaggaggaagaagaggaggaagaagaggaggacgaggatgaggacctggaagagctggaagtgctagagagaaaacccgccgcggggctgtcagctgctccagtccctacggccccggcagctggcgctccactaatggactttggcaatgacttcgtgccccctgccccccgcggtccactccctgctgctcccccggtggcgccggaaagacagccatcctgggatcctagtccagtatcttcaactgtgcctgctcccagtccactttcggctgccgccgtttccccgtcaaaacttcccgaagacgatgaaccgcccgctcggccacctcccccaccacccgcctcagtctccccccaggcagaacccgtgtggacaccgcccgctcctgctccagccgccccaccaagtacccccgccgctcccaagcgaagggggagttctggctctgttgatgagacgctgttcgccctgccagccgcctcagaacccgtcattcgatcaagcgcagaaaacatggatctgaaggagcagccagggaataccatatcagccggccaggaggacttccccagcgtcctgcttgaaacagccgcgtccctccccagcctaagccccctctcggcagcgtcttttaaggagcacgaatatctaggcaacctgtccaccgtgctgcccactgagggtacactccaagagaatgtgtctgaagcgtcaaaggaggtgagcgagaaggctaagaccttgctgatcgaccgcgatctgaccgagttttccgagcttgagtatagtgagatggggagctcttttagcgtgagcccaaaggctgagtcagcagttattgtcgctaatcctcgtgaggagattatcgtgaagaataaggatgaggaggagaagttggtgagcaacaatatcctccataatcaacaggagctgcctactgccctgaccaagctcgtgaaagaagacgaggtcgttagttctgaaaaagcaaaggattctttcaatgagaagcgcgtcgccgtggaggccccaatgagagaggagtacgccgactttaaacccttcgagcgcgtctgggaggtaaaggatagtaaggaagacagtgacatgcttgccgctggcggaaaaatcgaatccaacctagagagtaaagtcgacaagaagtgttttgccgattcactcgaacaaacaaaccatgaaaaagacagcgagagctcaaatgatgacacctcatttccgtctactcctgagggcattaaggacaggagtggagcttacatcacctgtgcacctttcaatccagctgccaccgaatcaatagccaccaatattttccccctgcttggcgacccaacatccgagaataaaacagatgaaaagaagatagaggagaagaaggcacaaattgtcacagagaaaaacacttctacaaaaacctccaatccttttctggtcgccgctcaagactctgaaaccgactatgtgacaaccgataacctgaccaaagtcactgaagaggtcgtggctaacatgcctgaaggcctaaccccggacctcgtccaggaagcctgcgaaagcgagcttaacgaggtcaccggcaccaaaatcgcgtatgagacaaagatggatctagtgcagacctcagaagtgatgcaggagtctctctatccagccgctcaactctgcccatcttttgaagagagtgaggcaacaccgtcgcctgtcctgcccgacatagtgatggaggccccattaaacagtgcggtcccctccgccggagcctccgtcatccaaccctccagctctcctctggaggcaagcagcgttaattatgaatccatcaagcacgaacccgagaaccctcccccctacgaagaagcaatgtcagtctccctcaagaaagtgtccggaatcaaagaagaaatcaaagagccggaaaacatcaatgcggctctccaagagaccgaggctccatatatcagcattgcatgtgacttaatcaaggagactaagttgagtgcagagcccgcaccagactttagcgactactccgagatggctaaagtggagcaacccgtgccggaccactctgaactggtggaggattcttcacccgattctgagcccgtggatttgttttccgatgattccatccctgatgtgccacagaagcaggacgagaccgtgatgctggtcaaggagtcattgactgaaacaagctttgagtcgatgattgagtatgaaaacaaagagaaattgagcgccctccctcccgagggggggaagccatatctcgaaagctttaaattgagccttgacaataccaaagataccctgctgcccgacgaagtcagcacgctctctaagaaggaaaaaattcctctgcagatggaggagttgtcgacggctgtctactctaatgacgatctgttcatatccaaagaagcacagatccgggagacagaaacgttcagtgatagctcaccaatcgaaatcatcgatgagtttcccacacttattagttccaaaaccgactctttttcgaagttagctcgtgagtacactgatttggaggtgagccacaaatctgaaatagcaaatgcccctgatggcgctgggagtctcccctgtacagagctgccgcatgatctctcactgaaaaacattcagcctaaagtggaggagaagataagttttagtgacgacttcagtaagaatggatcagccacatctaaagttttgctactcccaccagacgtctcagccctcgccactcaggcagagatcgaatcaattgtgaaacccaaagttctagtgaaagaagctgagaagaagctgccgtccgatacagaaaaagaggatcgatccccctcagcgattttctcggccgagctctctaagacaagcgtggtggacctcctgtattggagggacatcaaaaaaaccggagtggtgtttggagccagccttttcctcttgctgagcctgacagtgttttctatcgtcagtgtgactgcctacatagccctcgctctcctttcagtgaccatcagctttagaatttataagggggttatacaggccatccagaaatcagacgagggccatccttttagagcttatctcgaatccgaggtggcaatcagtgaagagctggttcagaagtactccaattccgccctaggccacgtgaactgcacaatcaaagagctgcgccgcctgttcttagtggacgacctagtggactcactgaagttcgctgtgctcatgtgggtttttacctatgtaggagcgctgtttaatggactcacactcttgattctcgccttaattagcctttttagcgtgcccgtcatttacgagcgccaccaggcacagattgatcattacttgggcctcgccaacaaaaatgtcaaagacgcgatggcaaagatccaggcaaagatccccggccttaaacgtaaggccgaatag

SEQ ID NO: 203031 - DNA, 2883 bp, synthetic construct
  misc_feature 1..2883: note = Description of Artificial Sequence: Synthetic coding sequence
  source 1..2883: mol_type = other DNA
atggaggacctggaccagagccccctggtgagcagcagcgacagccccccaaggcctcagcctgcgtttaaataccaatttgtgcgggaacccgaggacgaggaggaggaggaggaggaggaggaagaggatgaggacgaagacctggaggaattggaggtactggaacgcaaacagttctccgagctcgaatattccgaaatgggcagcagcttttcagtgagtcccaaggctgagagtgcagtgattgtagcaaatccgagagaagagattatcgtgaaaaacaaagacgaggaagagaagttagtttcaaacaatatccttcacaatcagcaggagctgcctacggccttaacaaaactggtgaaagaggatgaagtcgtcagcagcgaaaaggcaaaggatagttttaatgaaaagagggtggccgtcgaagctccaatgcgcgaagaatatgcagattttaagccctttgagagagtgtgggaagttaaagactctaaggaagattccgacatgcttgctgcaggaggaaagattgagagcaatttggaatctaaggtggataagaaatgtttcgcagattcgttagagcaaactaaccacgagaaggattccgaatcgagtaatgacgacacaagttttccatcaacccccgaagggattaaggataggagcggggcctacatcacatgcgctcctttcaatccggccgctaccgagagtatagcaaccaacatattccccctgctcggggatcccacatcagaaaacaagacagacgaaaagaagatagaggagaagaaggcccaaatcgtgaccgagaagaatacgtcaacaaaaacttcaaacccttttcttgtagcggctcaggactctgaaactgactacgtgaccaccgacaacctgaccaaagttaccgaagaggtagtggccaatatgccggaaggccttacccctgatctcgtccaggaggcctgtgaaagtgaactgaacgaggtgaccgggacaaagatcgcctatgaaactaagatggatcttgtgcagacgagcgaagtgatgcaagagagcctttaccccgccgctcagctgtgccctagctttgaggagtctgaagcaacaccctcacctgtcctgcctgatatcgtgatggaagcccctcttaatagcgcagttcccagcgctggagcctccgtcatacagcctagttccagccctctggaggctagtagtgtgaattatgaaagcatcaagcacgagccggaaaacccgccaccatatgaggaggccatgtccgtttccctcaagaaggtgtcaggaatcaaggaagaaattaaagagccagaaaacatcaatgcagcacttcaggagaccgaggccccctatatcagcatcgcatgtgatctcattaaagagaccaaactaagtgcagaacccgcccctgacttttctgattatagtgaaatggctaaggttgagcagcctgtgcctgatcacagcgagctggttgaggattcaagcccagactctgagccagtcgatctgtttagcgacgactccataccagacgtgcctcaaaagcaggacgagacagtgatgttggtaaaggagagcctgaccgagacctcttttgagtcaatgatagagtatgagaataaggaaaagctatcagccctgccaccagaaggagggaagccatatctcgagtcattcaagctgtctctggataataccaaggatacgctcctgcccgacgaggtgtccactctgagcaaaaaggagaaaatccccctacaaatggaggaactatctacagcagtgtactcaaacgacgatctattcatttcaaaggaagcacaaatccgggagacagagactttctccgactcttcgccgatcgagattattgacgaatttcccactctcattagtagcaagaccgacagcttttctaagctggccagagagtatactgacctcgaggttagccacaaatcagaaattgccaacgcgcccgatggggcaggaagcctcccatgcactgagttgcctcacgacctttccctgaagaacattcaacccaaggttgaggagaaaatatctttcagcgatgacttcagtaagaatggttccgcaacctctaaggttctgctcctgccaccagacgtgtcagctctggctacacaagccgagatcgagagcattgtaaaacccaaggtactggtaaaggaagcagagaagaagctgccgagcgacacagaaaaagaagatcgaagtccaagtgccatttttagtgccgaactgtccaagaccagtgtggttgatcttttatactggagagacatcaaaaagacaggcgtggtgtttggggcctctctgtttttgttgctgagcctgactgtcttttctatagtgtcagtcacagcttatatcgccctggccttgttgtcagtaaccatttcatttcggatctacaaaggagttatacaggcaatccagaagtctgatgaaggccatcccttccgggcctacctagagagtgaagtggctattagtgaagaacttgtccagaagtactccaatagtgccctcggtcatgtgaactgcactatcaaagagctcagacggttgttcttggtcgacgacctcgtggatagccttaagttcgcagtcttgatgtgggtgtttacatacgtgggtgccctgttcaatggactgacccttctcatcttggctctgatttcattatttagcgtgcccgttatttacgaacgccaccaagcacagattgatcattacttgggactggcgaacaagaatgtgaaggacgcaatggcaaaaattcaagccaaaatacccggcttaaaacgaaaggcggagtag

SEQ ID NO: 203032 - DNA, 2961 bp, synthetic construct
  misc_feature 1..2961: note = Description of Artificial Sequence: Synthetic coding sequence
  source 1..2961: mol_type = other DNA
atggacctgaaggagcagcccggcaacaccatcagcgccggccaggaggactttccttcagtgctgctggagactgccgcaagtctcccttcactctctcccctttctgcagcatcatttaaagaacatgagtacctgggaaatttatcaacagtcctgccaacggagggaacgttgcaggaaaacgtgagcgaggcctccaaggaggtatctgagaaagctaaaactctactcattgatcgtgacctcacagagtttagcgagctggaatatagcgagatggggtcttcctttagcgtgagccccaaggccgagtcagcggtcatcgtggccaacccgagggaagagattatagtgaagaataaagacgaggaggaaaaactggtgagcaataacatcttacacaatcaacaggagcttcctactgccttgaccaagctggtgaaggaagacgaagtggttagtagtgaaaaggccaaggatagcttcaatgaaaagagggtggccgtcgaggccccaatgagagaggaatatgccgatttcaagcccttcgagagggtgtgggaggtgaaggacagcaaagaggattcggacatgcttgccgcgggcgggaaaattgaaagtaatttggagtctaaagtggacaaaaagtgttttgctgacagcctggaacagacaaatcacgagaaagattctgaaagcagtaatgacgacacatcttttccatcgaccccagaggggattaaggaccgcagcggggcctacattacctgcgctccattcaatcctgccgcgactgaatcgatcgctactaacatcttcccactactcggtgaccctacgtccgagaacaagactgacgaaaagaaaatcgaggagaagaaggcccaaattgtgacagaaaagaacactagtacgaaaacgtcaaatccattcttggtagccgcccaagactccgaaaccgactatgtgaccaccgacaacctgaccaaagtgacggaagaagtggttgccaatatgcccgaaggtctgacgcctgacttggtgcaggaagcatgtgagtcagagcttaacgaggttaccgggaccaagatagcttacgaaactaaaatggacctggtgcaaacgagcgaagtcatgcaggaatccttgtaccccgcagcccaactctgcccatctttcgaagagtctgaggcaactccttcaccagttctcccggacatcgtgatggaggccccccttaattccgccgtgccctcggccggtgccagcgtcatacagccaagcagcagccctctcgaggcgagctctgtcaactatgagagcatcaaacacgagcctgagaatcctccgccatatgaagaagcgatgagcgtaagtctgaagaaagtcagcggaataaaagaggaaattaaggagcccgaaaatatcaatgcagcactccaggagacagaagctccgtatattagcatcgcttgtgacctgatcaaagaaacgaagttaagtgccgagcccgcacccgacttcagcgattactcagagatggccaaagtcgaacaaccggtgcccgaccattcagagctggtggaggacagttccccagatagtgagcctgtcgatctgtttagtgatgattcaataccagatgtaccccaaaagcaagacgagacagtaatgcttgtgaaggagtctttgacagagacatcttttgagtccatgatagagtatgagaataaagaaaaactctctgcgctgccccccgaaggaggaaaaccatacttagagtcctttaaactgtccttagacaataccaaggatacacttctgccggatgaagtcagtaccctgagtaaaaaggagaaaatcccgctccagatggaggaactctccacggccgtgtactccaatgatgacctgttcatatccaaggaggctcaaattcgggagaccgagacattctcagattcgagtccaattgaaatcatcgatgaattccccacactcatctctagcaaaaccgactcatttagcaaactggctcgtgaatacacggacctcgaggtctcccacaaaagcgagatagccaatgcccctgacggagctggatccttgccgtgcactgagctgccccacgatcttagccttaagaacattcagccaaaagttgaagaaaagatctcctttagcgacgatttcagtaagaatgggtcggcaacgtccaaggtgctgctgctgcctccagatgtgtccgccctggccacccaagctgagattgagtcaatcgtgaagcccaaagtgttggtgaaggaggctgagaaaaagttgccatccgacaccgaaaaagaggacagatcgccaagtgcaattttctccgcagaactgagtaagacaagcgtggtagacttgctctattggcgcgacattaaaaagacgggagtggtgttcggcgcaagtttgtttctgctgttgagccttaccgttttctcaattgtgtcagtcacggcgtatatcgctctggccctgctctccgtcactatttcttttcgcatctacaaaggggtgatccaagccatccagaagtccgacgagggacacccttttcgcgcgtatttagaaagtgaagtggctatctccgaagagctcgtgcagaagtacagcaactccgctcttgggcacgtaaattgcaccatcaaggaactgcggcggctttttctcgtggatgacctggtggactcgctgaaattcgccgtgttaatgtgggtctttacctacgtgggggcactctttaatggtctgacactgctaatcctggcactgattagtctcttttccgtgccggtcatctatgaaagacatcaagcccagatagatcactacctcggcctcgccaacaagaacgtgaaggatgcaatggctaagatacaggctaagattcccgggctcaagcggaaggcggaatag

SEQ ID NO: 203033 - DNA, 1179 bp, synthetic construct
  misc_feature 1..1179: note = Description of Artificial Sequence: Synthetic coding sequence
  source 1..1179: mol_type = other DNA
atggaggacctggaccagagccccctggtgagcagcagcgacagcccgcccagaccacaaccagcctttaagtatcagttcgtgagggagcctgaagacgaggaggaggaggaggaggaagaggaggaagatgaggacgaagacctggaggaactggaagtactggaaagaaagccggccgccggattgtccgccgcgccagtgccaaccgccccagcggctggagcccccctgatggatttcggaaacgactttgtgcctccagcacctcgcggccctctgcccgctgccccgcccgtggcccctgagagacagccctcttgggacccttcacctgtttccagcaccgtgcccgctccatctccactgtcggcagcagccgtcagcccaagtaaattaccagaggacgatgaaccccctgcccgcccccccccaccacctccagcaagtgtttcaccgcaggcggagcccgtctggacaccgccggcccccgcccctgccgctcccccctctacaccggccgcgcccaagcggcggggatcgagcggctcagtggacgagactctgtttgcattacccgctgcatccgaacctgtgatcagatcttcagcagtggttgatcttctgtactggcgagacattaaaaaaacaggggtcgtttttggcgcgtccctgtttctgctgctgagcctgactgtcttctcaattgtgagtgtaacagcttacatagccttagcgctcctgtcagtcaccatctcgtttagaatctataagggtgtgatccaggctatacagaagtccgatgaaggtcacccttttcgtgcatacttagagtcagaagtggccatcagcgaagagctggtgcagaaatactccaattcagctctgggccacgttaattgcaccataaaggagctgaggagactgtttctggtggacgacctcgtggactctctaaagtttgcagtcctgatgtgggtgtttacctacgtgggagcacttttcaatgggctcaccctactaatattggcccttatttctctgttctccgtgccagtgatttatgagagacaccaagcgcagattgatcactatctcgggctggctaataaaaatgtgaaagatgcaatggccaaaattcaggcgaaaatccccggcttaaaacggaaagctgaatag

SEQ ID NO: 203034 - DNA, 600 bp, synthetic construct
  misc_feature 1..600: note = Description of Artificial Sequence: Synthetic coding sequence
  source 1..600: mol_type = other DNA
atggacggccagaagaagaactggaaggacaaggtggtggacctgttgtactggcgagacattaaaaagaccggtgtcgtgtttggtgcgagtctcttcttattgttatcgctcacagttttttctatcgtctctgttacagcatatatcgcgctcgccctgctgtctgtcactatatccttcaggatatataaaggagttatacaggcaattcagaagagcgacgaaggacacccctttcgcgcatacttggagtctgaggtggctattagtgaggaactcgttcaaaaatactcgaattcggcattaggacacgtgaattgtaccattaaagaattgcggagactgttcctggttgacgacttagtcgacagtttaaagttcgctgtactgatgtgggtctttacgtacgttggtgcactgtttaacgggttaaccctgctgatccttgccctgattagtctgttttctgttcccgtgatttatgagagacatcaggcccagatcgatcattacctgggcctcgccaacaagaatgtgaaggatgccatggcgaagatacaggccaagatcccggggctcaaaagaaaagctgaatag

SEQ ID NO: 203035 - DNA, 2961 bp, synthetic construct
  misc_feature 1..2961: note = Description of Artificial Sequence: Synthetic coding sequence
  source 1..2961: mol_type = other DNA
atggacctgaaggagcagcccggcaacaccatcagcgccggccaggaagattttccatctgtgctgctcgagaccgctgcatccttaccctcgctcagccccctaagtgcagcaagcttcaaggagcatgagtatttaggcaatctatccacagtcctgcccacggaagggactcttcaagaaaatgtctcagaagcctccaaagaagttagcgagaaagccaagaccttattaatcgatcgggatcttaccgagttctccgaactggaatatagcgagatggggtctagctttagcgtgagcccgaaagcagaatctgcggtgatcgtggccaacccccgcgaagagattatagttaagaataaggacgaggaggaaaagctcgtgtcgaacaatattctgcataaccagcaggaattgcccactgcactgaccaaattagtaaaggaggacgaggtcgtttcctctgagaaggctaaggatagcttcaatgagaagcgggtggccgtagaggcccctatgcgggaggagtacgcagactttaagccattcgaacgagtgtgggaggtaaaggacagtaaggaggattccgacatgctggccgcaggcggaaagattgagagcaacctcgaatctaaggttgacaaaaaatgttttgcggacagccttgaacagactaaccatgaaaaagattcagaatcctccaacgacgatacctcttttccgagcacgccagaagggattaaagaccggtccggtgcctatattacatgcgctcccttcaaccccgcggccacggagtccattgccacgaatattttccccctgctcggcgatccaacatccgagaataagacggacgaaaaaaaaattgaggaaaagaaggcccagatagttacagaaaaaaatacgagcaccaaaactagtaacccttttttggttgcagcgcaggacagcgagactgattatgtgactaccgacaatctgaccaaagttaccgaagaggtcgtggctaacatgccagagggcctgacgccagatctggtgcaggaggcgtgcgagagcgagctgaatgaagtgaccggtaccaagatcgcctatgaaacaaaaatggacctcgtgcagacaagcgaggtgatgcaggagagcctctaccctgccgctcagctatgtccaagttttgaggaatccgaagcgaccccttctcctgtcctgccagacatcgtgatggaagcaccactgaacagcgcagtaccctctgccggagcatccgtcattcagcccagttcttcgcccctggaggcttctagcgtgaactacgagagcataaagcacgagccagagaatccaccaccctatgaggaggcaatgtctgtctccctcaaaaaagtgtcgggaatcaaagaggaaataaaagagcctgagaacatcaacgcggcactgcaggaaacagaggcgccctacatttctattgcctgtgacctgatcaaagagactaagcttagcgccgagccggcccccgacttttccgattactctgaaatggcaaaggtggagcagcccgtgccggatcactcggaactggtggaggacagttcacctgattcagaaccagtcgatcttttctccgacgatagcatccccgacgtgccccagaagcaggatgagacagttatgctggtaaaagaatctctgactgagacctctttcgagagcatgattgagtatgaaaacaaggaaaagctcagcgccttaccccctgaaggtggaaagccatacctcgagtccttcaaactttccttggacaacactaaggacacacttttacccgacgaggtatcaaccttgagcaagaaagagaaaatcccgctgcagatggaggagcttagtaccgccgtctactctaacgatgacctgttcatatccaaagaagcccagatccgagagacagagacctttagcgattcctcacccatcgagatcatagatgagtttccaactctgatcagcagtaagaccgactcttttagtaaacttgcaagagagtacactgacctagaagttagtcacaaatcagagatagctaacgcccccgacggggccggtagtcttccctgcacggaacttcctcatgatttgagtctgaagaacattcagcctaaagtagaggagaagatatcttttagtgatgactttagcaaaaacgggtctgctacttccaaggtgctgctgctcccaccggatgtctcagcccttgcaacccaggctgagatcgagtccattgtgaaacctaaagtgctggtgaaagaggccgagaaaaaactgccgagtgacactgaaaaggaggacagatccccctcagcgatcttcagtgccgagctctctaaaacttccgtcgttgacctgctttactggagggacatcaaaaagactggtgttgtattcggtgcaagcctgtttctactccttagtttgactgtttttagtatagtctctgtgaccgcctatattgccttagctctgttatccgtcacaatcagcttccgcatttataagggtgttatccaagccattcagaagagcgatgagggccatccctttcgcgcgtacctcgaaagcgaggtggcgatctctgaagagctcgtgcagaagtattcgaactcggctcttggacatgtgaactgcacaattaaggaactccgacggctattcctggtggatgatctggtggattccttgaagttcgcagtgttaatgtgggtttttacctacgtgggcgcactgtttaatggactcactctcctcatcctcgcattgatctctttgtttagcgttcccgttatttacgagcggcaccaggctcagatcgaccactacctgggcctggctaataaaaatgtgaaggacgcaatggccaagatccaggccaaaattccaggtctcaagaggaaggcggaatag

SEQ ID NO: 203036 - DNA, 1038 bp, synthetic construct
  misc_feature 1..1038: note = Description of Artificial Sequence: Synthetic coding sequence
  source 1..1038: mol_type = other DNA
atggagcccgaggacgaggaggaggaggaggaggaggaggaggaggacgaggatgaggatctagaggagctggaggtcctcgaacgaaagccagctgccggcctgtcggcagcgccagtgcccacggcccccgctgcgggggccccattgatggacttcggtaatgactttgtcccacccgccccccgcggccccctgcccgccgccccaccagtcgctcctgaaaggcaaccgtcatgggaccctagtccagtttcctctacagtcccagccccgagccccctgtctgccgccgcagtcagtccatctaagctgcctgaggacgacgaaccacctgcgcgcccaccaccccccccaccggccagtgtttccccacaagcagaacctgtgtggactcctcctgcacctgctcccgctgctccgcccagcacaccggccgcccctaagcgtcggggttcatcgggttctgtggttgtggacctgctctattggcgcgacatcaagaaaaccggcgtggtctttggtgcatccctgttcctgctcctgtctctaaccgtatttagcatagtgtccgtcaccgcctacatcgcactagcactgctcagtgtcacaatatccttcaggatttataagggggtcatccaggccatccagaagagcgacgaaggtcatccattccgagcctacctggaatctgaagttgctatttccgaggaactggtccagaaatatagcaactcagccttaggtcatgtgaattgcactattaaggagctccggagattgtttctggtcgatgacctagtggacagcctgaaatttgcagtgctcatgtgggtctttacctacgtcggagctctgtttaacggattaacacttctaatcctggcgctcatatcccttttttcagtgcctgtaatttacgagaggcaccaggctcaaatagatcactatctggggctggccaataagaacgttaaggatgctatggcaaaaatacaagctaagatccctggcctgaagagaaaagcggagtag

SEQ ID NO: 203037 - DNA, 2961 bp, synthetic construct
  misc_feature 1..2961: note = Description of Artificial Sequence: Synthetic coding sequence
  source 1..2961: mol_type = other DNA
atggacctgaaggagcagcccggcaacaccatcagcgccggccaggaggatttcccaagcgttctgctggagactgccgcctctctaccctctctgtctcctctcagtgccgcctcctttaaggagcacgaatatttaggaaatctctcgacagtgttacccactgagggcaccttacaggagaacgtgagcgaagctagcaaagaagtgagcgagaaggctaaaactttattgatcgaccgggaccttaccgaattctctgagttggaatacagcgagatgggcagcagtttctcagtgtcccccaaggcagagtctgccgtaattgtcgccaatccaagagaagaaatcatcgtaaagaataaagatgaagaggagaagctcgtctcgaacaatatcctccataatcagcaggagctccccaccgcgctgactaaactagtgaaagaggacgaggtagtctcttccgagaaggccaaggactctttcaatgaaaaacgggttgcagtcgaggcccccatgcgggaggaatacgcagactttaaaccattcgagagagtgtgggaagtcaaggactctaaggaggacagcgatatgttggcagctggcggtaagatcgaatcaaaccttgaaagcaaagtcgacaagaagtgcttcgctgattcactcgaacagacgaaccacgaaaaagattcggagtcttcgaatgacgatacctcatttccttccactccagagggtataaaggaccgcagcggggcatatatcacctgtgcccctttcaatcctgctgccaccgaatcaatagccacaaatattttccccttgctgggcgatcctacctcggaaaataagactgatgagaaaaaaatcgaggagaaaaaggcgcagatcgttaccgaaaaaaatacatccacaaagacaagtaacccatttctcgttgccgcccaggatagcgagactgactacgtaactacggacaacctgaccaaggtcacagaagaggtcgttgcaaatatgccagagggactcacccccgacctcgtccaggaggcttgtgagtctgaactgaacgaagtgactggaacaaagatcgcatacgaaaccaagatggacctcgtccagaccagcgaagtgatgcaggaatccctctatcctgccgcgcagttgtgccctagcttcgaagaaagtgaagcaacacccagccctgttctcccggacatcgtgatggaggcccctctgaattcagctgtgccgagtgcaggggcctccgttatacaaccttcctcaagtcctctagaagcgagctccgtcaattatgaatccataaaacatgagccggaaaaccctcccccatatgaggaagcaatgagtgtgtcattgaaaaaggtgtcaggcatcaaggaggagataaaagagcccgaaaacatcaacgccgccctgcaagagactgaggctccctatatttcgatcgcttgcgacctcattaaggaaaccaagttatctgcggagccagccccggatttttctgactattcagagatggcgaaagtggaacaacctgtcccagatcacagtgagttagtggaagattcaagtcctgatagcgagcccgttgatttattcagtgatgactccatccccgatgtgcctcagaagcaagatgagaccgttatgttagtaaaggaatcgctgactgaaacgtcattcgaaagcatgatcgagtatgagaataaggagaagctcagcgcactgcctcccgagggcggaaagccctaccttgaatcatttaagttgtcgttggacaatactaaggatactttactgcccgacgaagtcagtactttaagcaaaaaggagaagatccccctgcaaatggaagagctgtccaccgccgtctactcaaatgacgatctcttcatctctaaagaagcccaaatccgggaaacagagaccttttctgacagcagccccatcgaaattattgatgagtttcctactctcatttcctcaaagaccgactccttcagcaagctggcgcgggaatatacagacctcgaggttagccataaatccgagatcgcgaacgcccctgacggtgctggaagcctcccatgtaccgaactcccacatgacttgtctttgaaaaacattcaacccaaagtggaagaaaagatatctttctccgatgatttttcaaaaaatggatctgctacctcaaaggtccttttactgccgccagacgtaagtgctctcgctactcaggccgaaatcgagtctattgttaaaccaaaggtgctcgtcaaagaggctgagaaaaaactgccaagcgacaccgagaaggaagatcgttctccaagtgcaattttcagcgctgagctgtctaagaccagcgttgtggatctgctctattggagagatattaagaagactggcgtcgtatttggcgcctccctctttctgctgcttagccttactgtgttctctatcgtgtccgtgacagcttatatagcccttgcccttctgtctgtgacaatttcctttagaatctacaagggcgtgatccaggcaattcaaaagtcggacgagggccacccgtttagagcttatttggagtcggaggtcgccatctcagaggaactggtacagaaatacagcaattcagctctgggacacgtgaactgcacgattaaagaattgaggaggctgtttctggtcgatgacctggtggacagccttaagttcgccgtactgatgtgggtgtttacgtatgtgggggcactcttcaacggattgacgctgcttattctagccctgatctctctgtttagcgtccctgtcatctatgagcggcaccaagcccagatcgatcactacctcggtttagctaacaagaacgttaaagatgctatggctaagatccaggccaagatacccgggctgaagaggaaagccgaatag

SEQ ID NO: 203038 - DNA, 2961 bp, synthetic construct
  misc_feature 1..2961: note = Description of Artificial Sequence: Synthetic coding sequence
  source 1..2961: mol_type = other DNA
atggacctgaaggagcagcccggcaacaccatcagcgccggccaggaagattttcccagtgtactactggagacagccgcctcactgcctagtctctcaccactgagcgccgcctcgttcaaggagcacgaataccttggtaatctcagcaccgtattaccaacagaaggtacactgcaagagaatgtgtctgaggcatcaaaggaggtgtccgagaaagcaaagacgctgctgatcgatcgggatttaacggaattttccgaactggagtatagcgaaatggggtcgagtttcagcgtgtctcccaaagccgagagcgccgtcatagtggcgaaccctcgggaagagatcattgtgaagaataaggatgaggaagagaagctggtgtctaacaatatcctgcacaatcagcaagagctgccaacagccctgaccaaactggtcaaggaagatgaggtcgtgtcctcagagaaggctaaagattctttcaacgagaaaagagtggctgtggaggctcccatgcgggaggagtacgctgacttcaagccctttgaacgcgtatgggaggtgaaagactctaaggaggactccgatatgctagctgcaggaggtaaaatcgagagtaatctagagagtaaagttgataagaagtgcttcgccgatagcctggagcagactaatcacgagaaggacagcgaaagctctaatgatgatacaagctttccatccactcctgagggtatcaaggatcgaagcggggcctacatcacatgtgcccccttcaaccctgctgcaactgaatccatcgctactaatattttccccctcctgggagacccaacctctgagaacaagaccgacgaaaagaagatcgaagaaaaaaaggcccagatagtcactgagaaaaatacatccactaagacttcgaatccatttttagtggccgcccaagactcagaaaccgactacgtaaccaccgacaatctcaccaaagttactgaggaggtggtggcaaacatgcctgaaggcctcacccctgacctggtccaggaggcttgtgaatccgagctgaacgaggtgacagggacgaagattgcatacgagaccaagatggaccttgtgcagacatcagaagtgatgcaggagtcactttaccccgcagctcaactttgcccatccttcgaggagtccgaagcaacaccatctcccgttcttcctgatattgtgatggaagccccactgaattctgcagtacccagcgccggcgcatctgtcattcagccgtcttcaagcccgctggaagccagcagtgtgaactatgaatctataaagcacgagcccgagaacccacccccctacgaagaagcaatgagtgtctcccttaagaaggtgagcgggattaaggaggaaattaaagaacctgaaaacatcaatgccgctctccaagaaactgaagcgccatacatctctatagcttgcgatctgattaaagagaccaagctcagtgctgagccagcacccgatttctctgactacagcgaaatggctaaagtggaacagcctgtgcccgaccactccgagcttgtggaggactcaagcccggattctgaacccgtcgacctgttcagtgatgactccatcccagacgtcccgcaaaagcaagatgagacagttatgcttgtcaaagaatccctgacggagactagctttgaaagtatgattgaatatgagaacaaggagaagttatcagcactccctcccgaggggggtaagccctacctggagagtttcaagctgagcctggataatacaaaggacacccttttgcctgacgaagtctcaaccctcagcaaaaaggagaaaatacccctacagatggaagaattatcgaccgctgtgtacagcaacgatgatctgttcatcagcaaggaggctcagattagagaaactgaaactttctccgattcgtctcccatagagattatcgacgagttccctacactgatttctagcaagaccgattctttcagtaagttggctagggaatacaccgatctggaggtcagccacaagtctgaaatcgcgaatgcccctgatggcgccggctctctcccctgtactgagctcccacacgatctcagcctcaaaaatatccagccgaaggtcgaagaaaagatctctttcagcgatgacttctcaaagaatgggtcagcaacaagcaaggtgctcctcctgccccccgatgtgagcgcccttgccacccaggccgaaattgagtccatcgtgaagccgaaagtgcttgtgaaggaggcggagaagaaattgccatcagataccgagaaagaagatagatctccatccgctatcttcagtgccgagttgtccaaaacctccgtggtggatctcttgtactggcgggatattaagaagactggggtggtcttcggcgcgagccttttcctgctattgagcctcaccgtgtttagtatcgtttcggtgacagcttatatcgcgcttgccctgttgtcagttactatctccttccggatatataaaggcgtcatccaggccatccagaagtccgacgagggacaccctttccgtgcatatctcgagtctgaagtggccatttctgaggagctagtccagaaatattccaacagcgcactcgggcacgtcaattgcaccatcaaggagctcaggagattgtttctggtggatgatttagtcgactctctcaaatttgccgtgctgatgtgggtgttcacatatgtcggggcacttttcaacggcctgacgctcttgattctggctctgatctccctgttctctgttcccgtaatctacgaacgtcatcaagcacagattgaccactacttagggctggctaacaaaaacgtgaaagacgccatggcaaaaattcaggcgaagattcccggcctcaaacgaaaggcggaatag

SEQ ID NO: 203039 - DNA, 276 bp, synthetic construct
  misc_feature 1..276: note = Description of Artificial Sequence: Synthetic coding sequence
  source 1..276: mol_type = other DNA
atggacctgaaggagcagcccggcaacaccatcagcgccggccaggaggactttccatcggtcctgttggagaccgccgctagtttgccttcgctgagcccattgtctgcagcctccttcaaagagcatgagtatttggggaatctgtctactgtcctgccaaccgagggcactctccaagagaacgtctccgaggcatccaaagaagttagtgagaaggctaagacactgctaatcgatagggacttaactgagtttagcgaactagagtattag

SEQ ID NO: 203040 - DNA, 1191 bp, synthetic construct
  misc_feature 1..1191: note = Description of Artificial Sequence: Synthetic coding sequence
  source 1..1191: mol_type = other DNA
atggagttcctgaagacctgcgtgctgcggcggaacgcctgcaccgccgtgtgcttctggaggagcaaggtggtccagaagcccagcgtgaggagaatctcgaccacctccccaagatcaaccgtgatgccagcgtgggtaatcgataaatatgggaagaacgaggtgctgaggtttactcagaatatgatgatgccaatcatccattatcccaacgaagtcattgtgaaggttcacgcggccagtgttaatcccattgacgtgaacatgcgtagtggttatggtgccaccgcactgaatatgaaacgagacccgctccacgtgaagattaagggcgaggagttccccctcaccctggggagggatgtgagcggggtggtgatggaatgcggccttgacgtgaaatacttcaaacctggcgacgaggtgtgggcagccgttccaccatggaaacagggaactctaagcgagttcgtcgtcgtgtcagggaacgaggtatcacataagccaaagtcccttacacacactcaggcggccagcctgccatacgtcgccctgaccgcctggagcgctataaacaaagttgggggactgaacgataaaaattgcacaggaaagcgcgtgctcatccttggtgcatcaggaggcgttgggaccttcgcaatccaggtgatgaaggcttgggacgcccacgtgacggcagtctgcagtcaggacgcctccgaactagttagaaagctgggagccgacgatgttatcgactacaagtccggctccgtggaggaacagcttaaaagcctgaagccgtttgacttcatactggacaacgtgggagggtctaccgaaacctgggcacctgatttcctaaaaaaatggagtggagcaacttacgtgactctggtgactccattcctgcttaacatggatagactcggcattgctgacggaatgctccaaacgggcgtcacagttggatccaaggcactgaagcatttttggaaaggagtgcactacagatgggcgttttttatggccagcggtccctgtctcgatgatattgccgaattagtggacgccggtaaaatcagaccggtgatcgagcagacattccccttctccaaagtgccggaggcatttcttaaagtagagagaggccacgcgcgggggaagacagtgattaatgtcgtgtag

SEQ ID NO: 203041 - DNA, 681 bp, synthetic construct
  misc_feature 1..681: note = Description of Artificial Sequence: Synthetic coding sequence
  source 1..681: mol_type = other DNA
atggagttcctgaagacctgcgtgctgcggcggaacgcctgcaccgcagtatgtttttggcggtccaaggtggtgcagaagcctagcgtgaggagaattagcaccaccagccctaggtccaccgtaatgcctgcatgggtcatcgataaatacgggaagaacgaagtcctccgcttcacgcagaatatgatgatgcctattattcactatcctaatgaagtgatcgtcaaggttcatgcagccagcgtaaatcccatcgatgtgaatatgaggagcggttacggggcaaccgcgctaaacatgaaaagagatccgttgcacgtgaaaattaaaggcgaggagttccctctaacactgggtcgagatgtcagtggcgttgtaatggagtgcggattggacgtcaagtactttaaacctggggatgaggtctgggccgccgtgcctccctggaaacagggaacattgtctgaatttgttgtggtctctggcaatgaagtttctcacaaacccaagtccttgacacacacacaggctgcgtccctgccgtacgttgctctcacagcctggagtgccatcaataaggtggggggattgaatgacaagaattgtaccggcaagcgcatctccggaaaggagagcatcattgccggccacttcagttggcccgttgcccacgtctag

SEQ ID NO: 203042 - DNA, 1422 bp, synthetic construct
  misc_feature 1..1422: note = Description of Artificial Sequence: Synthetic coding sequence
  source 1..1422: mol_type = other DNA
atgaagcgggccagcgccggcggcagccggctgctggcctgggtgctgtggttacaggcctggcaggtggccgccccgtgtccaggagcctgcgtctgttacaacgagcccaaagtgaccacatcatgccctcagcagggattgcaggctgttcccgtggggattcccgcggcatcacagaggatcttcttgcatggaaatcgtatctcccacgtaccagcggcaagtttcagagcatgccggaacctgactatattgtggttgcatagtaatgtacttgcacgtattgacgctgctgctttcactgggttggccctgttggaacaactcgacctgagcgataacgcccagctgcggagcgtggatccagcaacctttcatggattaggtcggttgcatactctccaccttgatcggtgcggcttacaagagttaggccctggcctattccgcggtctggcagcactccagtacctgtatctgcaggacaacgctctgcaagcgttgcccgacgacacattccgggatctcggaaatctcactcacttgttcctgcacggtaatcgtatctccagcgtgcctgagcgggccttcagaggattgcattcacttgaccgcctgctgttacaccagaacagggtggctcacgtgcaccctcacgcatttcgggatttgggaaggctgatgaccctatacttattcgccaataacctgtccgcactacccacggaggctctagcacctctgcgcgccctgcagtatttgcgtctgaatgacaatccctgggtgtgcgactgtcgagcccgccctttgtgggcctggctccagaagttccggggcagttccagcgaggtgccgtgcagcctcccccagagactagctgggcgcgatttgaaacggctagctgctaacgacctgcagggctgtgctgttgctaccgggccataccaccccatttggacaggacgggccacggatgaggaaccactcgggttgcctaagtgctgccaacccgatgctgctgataaagcatcggtcctcgaaccaggccggccggcatccgcaggaaatgcactcaaaggaagggttccccctggtgactctccacccggaaatggttcgggcccccggcacataaatgatagtccattcggcacattgccgggctcggctgagccgccccttactgctgtgcgacccgagggatccgagcctcccggattccccactagcgggccacgaaggcgacccggctgctccaggaaaaatcgaactcgctcccactgtagacttggccaggcaggtagtggcggtggcggaactggggactccgaggggagtggagcacttcccagtctgacctgcagtctaacacctcttgggcttgctttagtgctctggactgtactgggaccgtgctag

SEQ ID NO: 203043 - DNA, 1041 bp, synthetic construct
  misc_feature 1..1041: note = Description of Artificial Sequence: Synthetic coding sequence
  source 1..1041: mol_type = other DNA
atgcacctgcccggctgcgcccccgccatggccgacggcagcttctctcttgccggccacctactgcgttcccctgggggctctacttcgaggctccacagtatcgaagccatcctgggttttactaaggacgacggaattctggggactttcccagcggaaagaggtgcacgcggagccaaggagcgggacagacgactaggagcgaggccagcatgcccaaaggcacccgaggaaggctcagaaccatctccacctcccgcccccgcccccgctcccgaatatgaggcgcctcggccttattgcccaaaggaacctggggaggcgaggcctagccccggcctgccagtgggaccagccaccggcgaggctaagctctctgaggaggaacagcccaaaaaaaaacatagacgcaatcggactaccttcacaacttaccaattacacgagctagagcgggccttcgaaaagtctcattacccagatgtgtactctcgggaggagcttgctgggaaggttaacttgccagaggtccgcgtccaggtgtggttccagaaccggcgggctaagtggcgacggcaggagaagctcgaagtgagtagcatgaagctccaggactcccccctcctgagtttcagccggagccccccatccgccacactatccccactcggcgcgggccctggcagtgggggtggccctgctggcggggccctgcctctggaaagctggctgggcccccccctgccgggggggggagcaaccgcgctccagagcttaccaggttttggtccccctgctcagagtctgcccgcctcttacaccccacctccgcctcctcccccctttctgaattcacctccactgggccccgggttacagccactggccccaccccctccatcctacccatgtggccccggctttggggataaattcccactggacgaagcggatcctagaaacagttccatcgcagcgctccggcttaaggcgaaagagcatatacaagccattggcaagccttggcaggctctatag

SEQ ID NO: 203044 - DNA, 225 bp, synthetic construct
  misc_feature 1..225: note = Description of Artificial Sequence: Synthetic coding sequence
  source 1..225: mol_type = other DNA
atgcacctgcccggctgcgcccccgccatggccgacggcagcttctctctcgcaggccacctgctgcgaagcccaggtggtagcacctcaagactacatagcattgaggccatcctcggatttaccaaggacgatggtatacttgggacttttcccgctgagaggggggctcgaggcgccaaggagcgggacagaaggttaggggcaaggcctgcttgcccatag

SEQ ID NO: 203045 - DNA, 588 bp, synthetic construct
  misc_feature 1..588: note = Description of Artificial Sequence: Synthetic coding sequence
  source 1..588: mol_type = other DNA
atgagcctgatcagctggctgcggtggaacgaggcccccagccggctgagtacacgatcccccgctgaaatggtattggagactctgatgatggagttgaccggtcagatgcgcgaagctgagagacagcagagggaacggagtaacgccgtccggaaggtctgcaccggcgtagattattcctggttagcttcaaccccccgtagcacgtatgacttgtctcctattgagcgcctccaactagaggatgtttgtgtgaagatccaccctagctattgtgggcccgccattctgcggtttaggcaacttctggccgaacaggaacctgaggtgcaggaagtgtcccagctttttagatctgtgctgcaagaggtactggagaggatgaaacaggaggaagaagcacacaagcttacccggcagtggagcctacggcccaggggctctctcgcaaccttcaagacccgggcacggatttcaccattcgcctctgatattagaacaatatcggaagacgtcgagagggacacaccaccccctctgagatcatggtcaatgcccgagttccgggcgccaaaggcggattag

SEQ ID NO: 203046 - DNA, 762 bp, synthetic construct
  misc_feature 1..762: note = Description of Artificial Sequence: Synthetic coding sequence
  source 1..762: mol_type = other DNA
atggccgagaccagcgccctgcccaccggcttcggcgagctggaggttctggcagtgggcatggttctgttagtggaggcactgagcgggctgagtttgaacacactcactatcttttctttctgtaaaacccccgagttacgcacaccctgtcatctgttggtgctgagtcttgccttggcagattctgggatcagccttaatgcactggtcgccgcaacttccagccttctgaggcgttggccctacgggtcagacggctgccaggctcacggctttcagggctttgtaaccgctttggcctctatttgctcctcagccgctatcgcatggggccgctaccatcattactgtacgagatcccagctcgcatggaactctgcagtaagcctggtgctgttcgtgtggctcagctcagcattttgggccgccttgcccctattggggtggggccactacgactacgagcctctcggaacctgctgtacactagattactcaaaaggtgataggaactttaccagctttctgtttacaatgagcttcttcaatttcgccatgcccctgtttattaccattaccagctactctctgatggagcagaaactggggaaatctggacacctgcaggtccccgccctcattgctaaaatggtgcctaccatcaatgccattaactacgctctgggaaatgaaatggtctgcaggggtatatggcaatgcttgtctccacagaagcgtgagaaggaccgcactaagtag

SEQ ID NO: 203047 - DNA, 888 bp, synthetic construct
  misc_feature 1..888: note = Description of Artificial Sequence: Synthetic coding sequence
  source 1..888: mol_type = other DNA
atggccgagaccagcgccctgcccaccggcttcggcgagctggaggtcctggccgtgggaatggtgctcctggtcgaggctctctccgggttatccttgaacactctaacaatcttttctttctgtaagacgcctgagctgcggaccccttgtcaccttctggtccttagcctagctttagccgactccgggattagcctgaatgcactggttgcagcaactagctcgcttcttcgggtatcccaccggcgatggccctacgggtctgacgggtgtcaggctcacggctttcagggattcgtgaccgctctggcctctatctgcagctcagcagcaatcgcctggggacgctatcatcattactgcacaaggagccagcttgcctggaatagtgcagttagtctagttctgtttgtctggttgtcttccgcattttgggctgccctgcccctgttagggtggggtcattacgactacgagccactcgggacatgctgcaccttggattactcgaaaggggatcgtaatttcacctcattccttttcacaatgagcttttttaacttcgcaatgcctctatttatcaccattaccagctacagcctgatggaacagaagcttgggaaaagtggacatctccaggtcaacactaccttgcccgcaagaacacttctgctggggtggggtccttacgctatcttatatctgtacgctgtgattgcagatgtgaccagcatcagcccgaagcttcagatggtccctgccttaattgctaagatggtgcccacaatcaatgccatcaactatgctctcggaaacgagatggtgtgcagaggaatatggcaatgccttagccctcagaagcgcgagaaggacagaactaagtag

SEQ ID NO: 203048 - DNA, 363 bp, synthetic construct
  misc_feature 1..363: note = Description of Artificial Sequence: Synthetic coding sequence
  source 1..363: mol_type = other DNA
atggccgagaccagcgccctgcccaccggcttcggcgagctggaggtcctggctgtgggcatggtcctgctggtcgaggatcccggcgctgcggattctctgccccccacgggggccgagcttgggtcttgcggccagtgggatcagcccgaatgcccacgttgcagtcatatccagccttctccatgtctgcctcaagccctcgcccttaggctgggccgcctccctggaagcagactcccaggtctctgcgacagcgtgggacaacaccttcaacagtgttcccacaggatgggtgctctgagcccactgctacaccccccgaagtgttgtcatcgaagtcatcactttgaatggcgatag

SEQ ID NO: 203049 - DNA, 1056 bp, synthetic construct
  misc_feature 1..1056: note = Description of Artificial Sequence: Synthetic coding sequence
  source 1..1056: mol_type = other DNA
atggcccccgtgctgcccctggtgctgcccctgcagccccggatccgcctagcccagggactatggcttttgagctggctgctcgcgctggccggcggggttatactgctgtgctcaggccacctgctagtgcagctgaggcaccttggcactttcctggcacctagctgccaattccctgtactgccgcaggccgcattggctgccggtgccgttgccctggggaccggacttgtgggcgtgggagcctcaagagccagcctgaacgctgcattgtatcctccctggaggggcgtactgggacctctgcttgtggccggtaccgctgggggcggcgggctccttgtggtgggactgggtctggctcttgccctcccaggttctctggatgaagctcttgaggaaggcctggttacagccctcgcacactataaagataccgaggtgcctggccattgtcaggctaaaaggctggtggatgagctgcagctgcgatatcactgttgtggccggcatggatataaagactggtttggggtgcagtgggtgtccagccggtatttggatcccggggatagagatgtggccgatcggattcaaagtaatgtcgagggcctgtacctgactgacggggtcccattttcatgctgtaacccccatagtcctagaccctgcctccagaacaggctttctgattcctacgcccacccgttgtttgatcctcggcagcccaatcagaacctttgggcccagggatgtcatgaggtgctcctggaacatttgcaggatttggccggtaccctggggagcatgctggctgtcacctttctgttgcaggccctggtcctattaggtctaaggtatctgcaaaccgctttggaaggattaggcggcgtcatcgatgctggtggggaaacccagggttacttgttcccttcaggactgaaagatatgctgaagacagcatggctacaaggtggcgttgcctgtaggccggctcccgaagaggctcccccgggggaagcaccaccaaaggaagatctttcagaggcctag

SEQ ID NO: 203050 - DNA, 1602 bp, synthetic construct
  misc_feature 1..1602: note = Description of Artificial Sequence: Synthetic coding sequence
  source 1..1602: mol_type = other DNA
atgagcatccaggtggagcaccccgccggcggctacaagaagctgttcgagaccgtggaagaactaagctctcccctcactgctcatgtgaccggacggattccactctggctgacaggctccctgctcagatgtgggcctggactattcgaggtgggatcagagcccttctatcatctctttgacggacaagccctcctccacaaatttgatttcaaggaagggcatgttacttaccaccgcaggtttattagaacagacgcttacgtgcgagctatgaccgaaaagagaatcgtcattaccgagtttgggacatgcgcatttccagacccttgcaaaaacatattcagtcggttcttttcttatttccgaggagtcgaagtaacagacaacgccctggtcaatgtgtacccagttggcgaggattactatgcatgcacggagacaaatttcattacgaagattaatcccgaaaccctagaaactatcaaacaggtcgacctctgtaattacgtctctgtgaacggcgctactgcccaccctcatatcgagaatgacggcacagtctacaatatcggaaactgtttcggaaagaatttcagtatcgcttataatatcgttaaaatcccgccactacaagctgacaaagaagaccccattagcaagagcgaaatagtagtccaatttccatgtagcgataggttcaagccctcctatgtgcattcattcggtctcacgccgaattacatcgtgtttgtagagacacctgtaaagataaatctatttaaattccttagcagttggagtctgtggggcgctaactatatggattgctttgaatccaacgagaccatgggcgtttggctgcacatcgcagacaaaaaacgtaagaaatacctgaataacaagtataggacgtccccctttaacttattccaccatattaacacatatgaggataacggatttctcatcgtggacttgtgttgttggaaaggttttgagttcgtttacaattacctctacttagctaatttacgcgagaattgggaagaagtcaagaagaatgccagaaaagctcctcaaccggaggtgaggcggtacgtccttcccctgaacattgataaggccgatacaggcaagaacctcgtgacactacccaatacgacggcaaccgccatcctctgcagcgatgagaccatttggcttgagcccgaggttctgttctccggtccccgtcaggcgttcgagttcccacaaattaattatcaaaagtactgcggcaaaccctacacatatgcttatggcctgggactgaaccacttcgtgccggacagactctgtaaactgaacgtcaaaaccaaggaaacctgggtctggcaggagccagactcatatccttccgaaccaatcttcgtgtctcaccctgatgccctcgaggaggatgatggggttgtgttatccgtagtggtcagccctggcgccggccagaaaccagcatatctgctgatcctgaatgcgaaagacctgtccgaggtcgctcgggcagaagttgagattaacattcctgtcactttccatggactgttcaaaaagagttag

SEQ ID NO: 203051 - DNA, 954 bp, synthetic construct
  misc_feature 1..954: note = Description of Artificial Sequence: Synthetic coding sequence
  source 1..954: mol_type = other DNA
atgagcgagggcgtgggcaccttccggatggtgcccgaggaggagcaggagcttcgcgcgcagctcgagcaactgacaacgaaggaccatggtcctgtgtttggcccctgttcacaactgcccagacacactctccaaaaggccaaagacgagctgaatgaacgagaggaaactcgtgaggaggccgtgcgggagctgcaggagatggtgcaggcacaggctgccagcggcgaagaactggctgtagctgtcgccgagcgcgtccaggaaaaggactccgggtttttcttgaggtttattagagccagaaaattcaatgtaggccgcgcctacgaacttctacgtgggtatgtgaacttcagactgcagtatccggagctcttcgattcactgtctccggaggccgtgcgatgcactattgaagccgggtatccgggtgtacttagtagcagagataaatacggtagagtagtgatgctgttcaacatcgaaaactggcagagccaggaaatcacattcgacgaaatcctgcaggcctactgtttcattttggagaagttgttagagaacgaggagacgcagattaacggcttctgtatcattgagaactttaagggatttaccatgcagcaggctgcttcgctgcgcacgtctgatctgaggaaaatggtggacatgctccaggatagcttccccgcccgtttcaaagcgatacatttcatccaccagccatggtacttcaccacaacctacaacgtggtaaagcctttcctgaagagcaagctcctggaaagggtgtttgtccacggagatgacctgagcggtttctatcaggagatcgacgagaacatcttgccctccgacttcggcggtactttaccaaaatatgatggcaaagccgtcgctgagcagctgtttgggcctcaggctcaggccgagaataccgccttctag

SEQ ID NO: 203052 - DNA, 807 bp, synthetic construct
  misc_feature 1..807: note = Description of Artificial Sequence: Synthetic coding sequence
  source 1..807: mol_type = other DNA
atggccgagctggacatcggccagcactgccaggtggagcactgccggcagcgtgatttccttcccttcgtatgtgatgattgcagcgggatcttctgtctcgaacaccgcagtcgtgagagtcatgggtgtccagaagtgacggttatcaacgaacgcctgaaaactgaccagcacacctcttatccttgttctttcaaagattgtgccgagagagagctagtagccgtgatttgcccttactgcgaaaaaaacttctgtctgaggcaccgccaccaatctgatcatgaatgcgaaaaattggagattccaaagccccgcatggcagcaacccagaagctggtgaaggatattattgactctaaaacaggggaaacagcttcaaaaaggtggaagggagccaagaattctgaaacggcagctaaggtggccctgatgaaacttaagatgcatgcagatggggacaagtctcttcctcagacagaacgtatttatttccaagtattccttcccaagggttcaaaggagaaatccaaacccatgtttttctgtcaccggtggtccatcggcaaggcaatcgatttcgcggcaagccttgccagactgaagaacgacaacaacaagttcaccgctaagaagttgcggctctgtcacattacctccggtgaggcactgccattggatcacacattagaaacttggatcgccaaggaagattgtcccttatataatggaggaaatataatactcgagtacctcaacgatgaagagcagttttgcaaaaacgtggaaagttacctggagtag

SEQ ID NO: 203053 - DNA, 2751 bp, synthetic construct
  misc_feature 1..2751: note = Description of Artificial Sequence: Synthetic coding sequence
  source 1..2751: mol_type = other DNA
atgcagcggcccgtggtgaagctgtacgccaccgacggccggcgggtcccgagcctccaagccgtaatcctgtcctcaggcgcggtcgtggcagccggaagagaacctttcaagccagggaactacgatatccaaaaatacctgctgcctgccaggttgccagggatcagtcaaagggtatacccaaaaggaaatgcaaaaagcgagtctcggaagagcagtaactggaaggtattcatcatcactagtgacctgcccgacgcagggacaagcagccagatctacatcatcctgtatggtcagcatcgatccagcgcgccaatttacctgtatgggactgatggcgccaggtttcaggtcgggcacgaagacatttttacaatcactgtgggcgatattggtgccctgttcaagatacgtattgggcacactaactccgggtcaagtccaagctggcattgtaaagagatccagttgcataacatgaatagtggtaagcagttctacgtgccagtacagagatggttagcaagagaccaagaggatggcgagatctgcagagaattcccactcctgagcaaaggccaacccgtcttacctgtgaccatttatgaagtaaatgtcgctaccggggagctctggaacgccggcaccgtggccaatgtgtatatatccattcacggagagaagggcgataccggttcaagacaactgttcagatctaagagcagcttcaactttcttcgtggccagaccgatacattcttcttggaagcggtacatttgggtgatctctgcaaaatcgtcatcggccatgacgggttgggccctggtaacggttggtttctcgatgatgtggtgatcaaagaccccacaaccaattacgaatacgcctttttctgtcaccgatggctggaccagggggaggatgactgcaaaattgtacgagaactgtatgccagagataactcaatcttctcagcccgtcagaagctggaactgaagcggaaagagacctggaccgccgaatcatggaaattcacaaagggaaacacgttacagttttataacaagcttactggcggattcgtgagactgcatcctgatggaacagtggacgctattggtgaaaaaaccgataaatatggcgtctttgacgtgatatttaataaaagaaatatttgtatctttcagtcacatgagatgagacacctgtcgctggctcttgacaacggaattgttactggaatggtgtctggagaagcaacaaccgaactacgcgtactttaccagccgaaccgctgtgctttactggaatctgccctcgtgccggggcacacagttgtcttcgacagacacggcaaaatagccgacgctagctccgccgggtatgcaaacctttccaaggaatttgttatcttcgttaagggggtctttttaaattcagccgtggtcttactggccacaagcctatgccaggctttgtgcctccaacccgatggatcttgcacaggagtcggctcccagagcgagaaatcatattggaaggtacacaagattagcagcggaatatgtatgttcgaaagcgtgaagaatgcccaaatgtacctaaggattaaggatggtagatgcgacggaaccggaaccggggatgtggattgtcacttcaagataaagaagaatctcaagaacgctagtattagcctggagagcacaaagtccccgggattgtttgtagggctgcagagcgacgggcaggcgaaaccgatgatatatacgaaggacgagaacgtttgcttttacccccaggttattcagtttggccgggagaatccaatgggaatgagcgcgacaccctcccaagaagaagagaaaatacatgagagcaaaaaacaaaagaagatccctccggagagtgaggcccggtctcctctgccttcctctactgcaaaggagatccggcatttccagagcagcgaaactttactgtccgaagatgagtggaaggtgttggtgcttactggaaatacaggaactcaagctaacgtgacactgtgggtatacggcgacaagggagtaacgggacctatctcactacggaaagactcctctgagcaactcttcctgcctggccacgaggacgaatttcaggtggaaatcaggaatactggaaatatatacaaaattcggatcggacatgacggtacctctgaacagcccgagtggaatctgcagagagttactatgcaacacatgaaatctaaaaagatcctggattttgccgcgaatgtctggttgtcccgcatccaggccgatggcgacgtcgtctgcgagctcccggtggtaaaaggtggccaggctatcttcccactggtcaggtatcaggtggatgtctatactggacagctaaaacacgcggagaccgagtccgaagtgtttctgtgcctgttcggagagagaggcgattcagggctgcggcaactgtacaaatccaacatgcaggtgaaattccagagaggccagatcgacaaatttcaggtggccgctgtgagccttggcaaactccaaaaggtactgctgagatgcgaggctagtgataagagccagtattggtattgcgagcaggtgatagttcgggagcctggtactacatcggagtctatcttcacatgtcagagatggctgcccttcatgagccaaggcattatccatagcgagattgaactgtacctgcaaggcgaggattattag

SEQ ID NO: 203054 - DNA, 7203 bp, synthetic construct
  misc_feature 1..7203: note = Description of Artificial Sequence: Synthetic coding sequence
  source 1..7203: mol_type = other DNA
atgaacagcaccccccggaacgcccaggcccccagccaccgggagtgcttcctcccaagtgtcgcacgcactccttccgtaactaaggtgacaccagccaaaaagataacgttcctgaagcggggagatcctcggtttgccggggtccgtttggctgtgcaccagagggctttcaaaaccttttccgcactgatggacgagttaagtcaacgggtcccactgagctttggggtcagatccgttaccactcctagaggcctgcatagtttgtcggctttagagcagctggaggatggaggatgctacctgtgctcagataaaaagccacccaaaacgccctcgggacccggccgcccccaggaacgaaaccctacagctcagcagctcagagatgtggaagggcaacgggaggctcccggcaccagctcctcaaggaaatccctcaagacccctagacgtattctccttattaagaacatggatccccgtcttcagcagactgtagtgctcagccatagaaatacccgtaacctggccgcttttctgggcaaggccagcgacctcctccggttcccagtcaaacagctgtacacgacctccggaaagaaggtggatagcctgcaggccttgcttcactctccaagcgttctggtgtgcgcagggcacgaagcgtttagaactcccgccatgaaaaacgccagaaggtctgaagctgagaccttgagcggcttaacctcaagaaacaagaacggctcatggggcccaaagactaaaccatcagtgatccactccagatctccaccaggcagcactcctcggctgccagagcgcccaggaccctccaatccaccagtggggcctgctcccgggaggcatccacaggacacgccagcccagtccggcccgttagtggctggagacgatatgaaaaaaaaagtgagaatgaacgaggacggttccctcagcgtcgagatgaaagtcaggtttcatctggtgggcgaggacaccctcttgtggtcgcggcgaatgggacgtgctagcgctctcacagctgcaagtggagaggatcctgtgctgggggaggtggatcccctgtgttgcgtgtgggagggatacccgtggggattctccgagccaggtgtgtggggcccccgaccatgtcgcgtggggtgtcgggaagtattcggtcggggagggcagcctggccccaaatacgaaatatggactaatccgctgcacgcttcccagggggaacgggtcgccgcaagaaaacggtggggactagcccaacatgtgaggtgctctggcctttggggccacgggaccgctggccgcgagcgttgctcccaggactccgcatcaccagcctcctcaacaggcttgcctgagggatccgaacccgaaagcagttgttgtccaagaacccctgaggatggagtggactctgcatcaccaagcgcacagattggtgctgagcgtaaagctggcggaagcctgggtgaagaccctggactctgcatagacggcgcgggtctgggcggacctgagcaaggcggccggctgaccccccgcgcacgatcagaggagggcgccagtagcgactcttcagcgtccaccggctcacacgagggatcgtcagagtggggcggccggccccaggggtgcccaggcaaagctcgagctgaaacttcacagcaagaggcgagcgagggaggtgatccggcctcccctgctctcagcttatccagcctgcggtctgatgatttgcaggccgaaacacaaggacaaggcacagagcaggctacgggggcagccgtaaccagggaaccgctggtgctgggactttcttgttcttgggatagtgagggcgcgagttctacccccagcacctgcacatcctctcagcagggacagaggaggcacaggagccgcgctagcgccatgagctcacccagcagtccagggctgggtagagtggccccacggggtcacccacggcatagccactacaggaaggacactcatagccctctagacagttcagtgactaagcaggtgccgcgccctccagagcggcggcgcgcctgccaagacggctccgtccctcgatacagcggttcctcctcttcaacccgcacccaggcttctggaaacctgagaccacccagtagcggctccttgccatctcaagatctgctcggtacatcttccgcgaccgttacaccagctgtccatagcgatttcgtcagcggcgtgtcaccccataacgcgccctccgccgggtgggccggcgatgccggaagtcgaacgtgctcgccagccccaatcccgccacacacaagcgattcttgtagcaaatctggtgccgcgagcctgggggaggaggccagggataccccccagccttcttcacccctggttcttcaagttggccgccctgaacagggagctgtgggtccccatcgatctcattgctgttcacagccgggcacccagccggcccaggaggcccaacggggtcccagtccagaagccagctggctgtgcggccgatattgcccaactccgcctagaggtcgcccttgcccgcaaaggaggtccagcagctgcggttccactggatctagccatcaatccactgcccgaggccctggcggatcaccacaagaaggcactcgtcagcccgggccaacaccatcccctgggccaaatagtggagcttctaggaggtcaagcgcgagccagggggcgggctcccgcggcctctctgaagaaaagacactgcgctctgggggagggccacaaggccaggaggaggccagcggagtcagcccctcgtcgctgccccgatcgtcacctgaggcggtggtacgtgaatggctggacaacattcctgaggaacctatccttatgacctacgaattggccgatgagactacaggcgctgccggagggggactgcgcggccctgaagtcgaccccggtgacgaccacagtctggaaggtcttggagagccagcccaggcgggtcaacagtccctcgagggcgatcctggtcaggacccagagccggagggcgcactgctaggcagcagcgacacagggcctcaatcaggcgagggagttccgcagggcgccgcccccgaaggagtttctgaggcacccgccgaagctggagctgacagggaggcccccgccgggtgccgcgtgtccctccgggcactgccaggtcgggtctccgcgtccactcagataatgagagccttgatgggctctaagcaggggagaccttcaagtgtgccagaggtttcccgacctatggcaagacgactttcgtgcagcgcgggcgctctgattacttgtctcgcgtccctgcagctgtttgaagaggatctgggtagtcctgcaagcaaggtgagatttaaagactcaccccgttaccaggagttattaagtatctccaaagatctttggcccgggtgtgacgtgggcgaagatcagcttgattcgggtctctgggagttaacatggtcacaagctctgccagatctgggcagccacgctatgacggagaatttcactccaacttcttcttcgggggtggacatctcaagcggatccggggggtcgggagaatcatcagtcccctgcgctatggatggcacgttggtaacacagggcactgagttacccctgaaaacatctaaccagcgcccagattcgagaacttacgagtcacccggcgatctcgagaatcagcagcagtgttgctttccgaccttcctgaatgcgagggcttgtgcatgcgcaacaaacgaagatgaggcagaaagagattctgaagaacagcgggcctccagcaacctcgagcagctcgcggaaaataccgtgcaggaggaagtgcagttagaagagacaaaagaaggaaccgagggtgagggcctgcaggaagaggcggtccagctggaggagactaagactgaggagggtctgcaagaggaaggcgtgcagctcgaagagaccaaagagaccgagggcgagggccagcaagaggaggaagctcaactggaagaaatcgaggaaacaggaggggaagggctacaggaagagggggtccagctggaggaggtgaaagaaggacctgagggcggattgcaaggagaagctctagaagaaggcctcaaggaagaggggctgcctgaagagggtagtgttcacgggcaggaactctccgaggcttctagcccagatggaaaagggtcccaggaggatgaccctgtgcaggaggaggaagccggacgagcttccgcttcagcagagccttgtcctgctgagggcactgaggagcccaccgagccgccttctcacttgtctgagactgaccctagcgcctctgagagacagtcagggtcccaactggagcccggcttagaaaagccaccaggagctacaatgatgggccaagaacatacccaggcgcaaccaactcagggggccgccgaacggagcagcagcgtggcctgttcggcagccctggactgcgacccaatctgggtttctgttcttttgaagaaaacggagaaagctttcctggctcacctggcctcagcagtggccgagcttcgggcccggtggggcctccaggataatgacctgctggaccagatggcggctgaactgcaacaagacgttgcacagcggctgcaagacagcacaaaacgtgagctccagaagttgcaaggccgcgcaggcaggatggtgctggagccgccccgcgaagccctgaccggcgaattgctgctgcagacgcagcagcgccgtcaccggctgcggggcctgcgaaatctgtcagctttctccgagcggactctagggctgggccctttgagcttcacgctggaagacgaacccgccctctcaactgcgcttggatcgcagctcggcgaagaggccgagggagaggaattttgtccatgtgaggcatgcgtccggaagaaggtgtcccctatgtcaccaaaagcaaccatgggcgccacccgaggccctatcaaagaagccttcgacctgcagcaaattctgcagcgcaagagaggcgagcacactgatggggaggctgctgaggttgcccccggtaaaacacacaccgatccaacatccacaagaacagtgcagggtgcggaaggcggactgggaccaggtctgagccagggcccaggcgtggatgaaggcgaagatggggaagggagtcaacgattgaacagggataaagaccccaagctcggagaagccgaaggagacgccatggcgcaggagcgggaggggaagacacacaattcagaaacgtccgcaggaagcgagcttggcgaggcagaacaggagggggagggaatcagtgaacggggcgagactggcggccagggcagtggccacgaggataatctccagggcgaggcggctgcagggggcgatcaggatcctggtcagtctgatggggcagagggtatcgaggcccctgaggctgaaggtgaagctcagccagaaagcgaaggggttgaagctcccgaagcggagggtgacgctcaggaagccgagggcgaagcgcagcccgagagcgaggacgtagaggcccccgaagctgagggggaggctcagccagaaagtgaggatgtggagacaccggaggccgagtgggaggtccagcccgaaagcgaaggagcagaggcgcccgaggctgagaaggaagcacagcccgagactgagtctgtggaagccctggagacggagggggaagacgaacccgagtcagaaggggctgaggcgcaggaagcggaggaggccgcgcaagaggccgagggccagacccagccagaaagcgaagtgattgagtcgcaagaggccgaggaagaggctcagcctgagtcagaggatgtggaggctctggaggtggaggttgagacacaggaggctgaaggcgaagcccagcctgaatctgaagatgtggaggccccagaagcggaaggtgagatgcaggaggcggaggaggaggcacagccagagtccgacggcgtggaagcgcaacccaagtcagaaggtgaagaggcacaggaagtggagggtgagactcagaagacagaaggcgacgcccagcccgagtctgacggggtggaagctcccgaggccgaagaagaggcccaggaagccgagggggaggtgcaagaggccgaaggcgaagcacaccctgagtcggaagacgtggatgcgcaggaagccgagggagaagcacaacccgaaagtgagggtgtagaagcccccgaggctgagggggaagcacagaaggcagaggggatcgaggcgcccgagaccgagggggaagcgcaacccgagagcgaaggtatcgaggccccggaggcagagggtgaggcccagcccgaatctgagggcgtagaggcccaggatgcagaaggcgaagcccagcctgagtccgaaggaatcgaggcccaagaagctgaggaggaagcgcagcccgagcttgaaggtgtcgaggcaccagaggccgagggggaggcacaacccgagagtgaggggatcgaagcccctgaggccgaaggggaggcccagccggagctggagggagtggaagcaccagaggccgaagaggaagcccagccagagcccgaaggggtagagacccccgaggctgaaggggaggcacaaccagaatcagagggtgaaacgcagggagagaaaaaaggatcaccacaggtgtccctgggtgatgggcagtccgaagaagcatccgagagcagttctcctgtgcctgaagaccggcccacacccccaccaagtccaggcggcgacacaccccaccagagacctgggtctcaaacaggtccctcttccagccgtgccagctcctggggcaactgttggcaaaaggactctgaaaacgaccatgtgctgggcgacacacgcagcccggacgcaaaatcaacaggcactccacacgctgagagaaaagctacaaggatgtaccctgagtcgagcactagcgaacaggaagaggcacccttgggttcccgcacacccgagcagggcgctagcgaaggatacgacttgcaggaagaccaggccctcggtagcctggctccaacggaagcagtcggaagggccgacgggtttggtcaggacgacctggatttttag

SEQ ID NO: 203055 - DNA, 5019 bp, synthetic construct
  misc_feature 1..5019: note = Description of Artificial Sequence: Synthetic coding sequence
  source 1..5019: mol_type = other DNA
atgaaggtggaccggaccaagctgaagaagacccccaccgaggcccccgcggattgtagggcccttattgataagctcaaggtgtgtaatgacgaacaacttctactggaactccaacagattaagacatggaatattgggaaatgcgaactgtatcactgggtagatttactggacagattcgatggaatactggctgatgcaggtcagacagttgaaaacatgagctggatgctggtctgcgacaggcccgagagggagcaactcaagatgctgttgctagcagttctgaatttcaccgccctgctcatagagtactctttttcgagacacctgtatagctctatcgagcacttgacaaccctcctggcctcatctgacatgcaagtggtacttgcagttctgaatctgctgtacgtattttctaagcggtcgaactatataacaagattgggctcagataaacgaacccccctgctgactcggctgcagcacctggccgaaagctggggcggcaaggagaatggcttcggcttggcagaatgctgccgggacttgcacatgatgaagtatcctcccagtgcaaccacactccattttgagttctacgccgaccccggagcagaggtaaagatcgagaagaggaccacaagcaacacactccactacatacacatcgaacagctcgacaagattagtgaatctccctccgaaattatggagagccttacaaagatgtactcaatccccaaggacaagcagatgctgctcttcacgcacatcagacttgcccatggtttctctaaccacaggaaacgactgcaggctgtgcaggcgcgccttcatgccatttcgatcctagtttactccaacgctctgcaggaaagtgccaactctatactgtacaatgggctgattgaagagcttgtggacgtgctgcaaatcacagataagcaattaatggagatcaaggcggcaagcctgcggactcttacttctatcgttcacctcgagaggactcccaagctctcatctatcattgattgcacgggcaccgcttcctatcatgggtttctccctgtattggtcaggaattgcatacaggctatgattgatccttctatggatccctatccacatcagtttgcaactgccctgttctcttttctatatcatctggcatcatacgatgccggcggtgaggcactggtgtcttgtgggatgatggaggccctgctgaaggtgattaagtttctgggagacgagcaggatcaaatcacattcgtgacccgagccgtgagagttgtggacctgattacaaacctggatatggccgcatttcagtctcatagcggcctctcaatatttatctatagactggagcacgaagtggatctgtgtcgcaaagagtgtccgttcgtgatcaagcccaaaattcagcgaccgaacacgacccaggaaggagaagaaatggaaacagacatggatggggtccagtgcatcccccagcgcgccgcgttgctcaaatcaatgctcaattttttgaaaaaggcaatacaagatcctgcttttagcgacgggatacgtcacgtcatggacggatccctcccaacatcgctgaaacacatcattagtaacgctgagtactacggcccatcactgtttctgctggctacggaggtcgtgacagtgttcgttttccaagaaccatctctgctgagcagtctccaggacaatggcctcacggatgtgatgttgcatgccctgctgattaaagatgtcccagcaacgagagaagtgctggggagcctgcctaacgtattctccgccctgtgcctcaacgctcggggcctccagagctttgtccagtgccagccttttgagcgtctctttaaagtgctgttgagccctgactacctcccggccatgaggcggagacgcagcagtgaccctctgggcgacacagcctctaacctaggaagtgccgtggatgagttaatgaggcaccagccaaccttgaagacagatgccaccacagccatcataaagttattagaggaaatttgtaacctgggacgcgaccctaaatacatttgccaaaagccttccattcagaaagcagacggtaccgccaccgcccctccgcctcgctccaaccatgccgctgaagaagccagcagcgaagatgaagaagaggaagaagtgcaggccatgcagtcatttaattctacacagcagaatgagaccgaacccaatcagcaagttgtgggtaccgaagaacgtatcccaatcccactgatggactacatcctgaacgtcatgaagtttgtcgagtccattttgagcaataacacaaccgacgatcattgtcaggagttcgtcaatcagaagggtttgctccctctagtgacaatcttgggcctgccgaatctgcctatagatttcccaacaagcgccgcttgccaagccgttgccggggtatgcaagagcattctgactctctctcatgaacccaaggtgctgcaggaaggcctgctacaactggattcgatcctctcctccctggaaccactacaccgtccgattgaaagtcccggaggaagcgtgttgctacgggagcttgcctgcgccgggaacgtggctgatgctaccctgagtgcccaagccactcccctgctgcatgctctgaccgccgcccacgcgtacatcatgatgttcgtgcacacatgtcgcgtgggtcagagcgaaattaggtctatttctgtcaaccagtgggggtctcagttaggcctgtctgttctgagtaaactgtcacagctgtattgttctttggtgtgggaaagcacagttctcctgtcactgtgtacgcctaacagccttcccagcggctgcgagttcgggcaggccgatatgcagaaactagtccctaaagacgagaaggccggcacgactcagggcgggaaacggtctgacggtgagcaggacggagccgccggaagcatggatgcgtctacacaaggtctgttagaaggcattggtctggacggcgacaccctagctccaatggagaccgatgaacctaccgcctccgactccaaaggtaaatctaaaatcactccagccatggccgcaagaatcaagcaaattaagccattgctgtccgctagttcacggcttggcagagccctggccgagttgttcggactgttagttaaactctgtgttggatctccagtacgccaaagaaggtctcaccatgctgcctctaccacaaccgcccctaccccagccgctaggagcactgccagtgcgttaacgaaattgcttaccaaggggctttcatggcagccaccaccatacacccctacaccaagatttcgactaaccttttttatatgtagcgtgggcttcacttccccaatgttgtttgacgagaggaagtatccttaccatcttatgctccagaagtttttgtgttccggcgggcataacgcacttttcgaaacttttaactgggctctgtcaatgggcggcaaagtgccagtgtccgagggcttggaacacagtgacttgcccgacggcaccggtgagttcttggacgcatggctgatgctggttgaaaaaatggttaacccgacaactgtgctagaatccccacacagtttgcctgcaaagcttcctgggggcgtgcagaacttccctcaattttctgccctccggtttctggtggtcacccagaaagctgccttcacttgtatcaaaaacctctggaaccgtaaacccctcaaagtctatggaggcagaatggcggaatccatgttggcaatcctgtgtcacatcctgagaggagaacccgtcattcgtgaaaggctttctaaggaaaaggaaggaagtagaggcgaagaggacacaggacaggaagaaggagggtcacgtagggagccccaagtgaaccagcaacagctgcagcagctgatggacatggggttcacaagggaacatgctatggaggccctgctcaacactagtaccatggagcaggccacagaatatttgctgactcacccacccccgatcatggggggcgtggtgagagatcttagtatgagtgaggaggatcagatgatgagggctatagctatgtctctgggacaggacattcccatggaccagagagccgagagtcccgaagaagtagcgtgtcggaaagaggaggaagagcggaaggctagagagaaacaagaagaagaagaggccaagtgtctggagaagttccaagatgctgatcctctggagcaggacgaactgcacacttttacagatacgatgctccccggttgctttcacctgctggacgagttgcctgacaccgtgtaccgcgtgtgtgacctcattatgactgccatcaagcgtaatggggcagattacagggacatgatacttaagcaggttgtgaatcaagtgtgggaggccgcggacgtcttgattaaggccgctttacccttaaccacctcggacacaaaaaccgtctcagaatggataagtcagatggctacactacctcaagcctccaacttagccacacgcatcctgctgttgacgcttctctttgaggaacttaagctgccgtgcgcttgggtagtggaaagtagcgggatcttgaatgtcctgattaagctgcttgaggttgtccagccctgcttgcaggccgccaaggagcagaaggaggttcaaaccccaaagtggattacaccagtgttgctgcttatcgatttttacgagaagaccgcgatctcctccaagcgaagggctcagatgacgaagtacttgcaaagcaacagcaataactggcggtggttcgatgaccggagcggccgctggtgcagctacagcgctagcaataattccacaattgacagcgcttggaaatccggggaaacaagtgtgagatttaccgccgggaggaggagatatactgtacagtttacaacaatggtgcaggggaccagcgctgaatag

SEQ ID NO: 203056 - DNA, 666 bp, synthetic construct
  misc_feature 1..666: note = Description of Artificial Sequence: Synthetic coding sequence
  source 1..666: mol_type = other DNA
atgagcagccggcccggccgggaggacgtgggcgccgccggcgccagacgaccccgcgaaccgccagaacaagagctgcagcgacgaagggaacagaaaaggcgcaggcatgacgcgcagcagcttcagcagctgaagcacctcgaatctttctacgaaaagcccccacctgggctaatcaaggaggatgaaacaaaaccagaggattgtataccagacgtgccaggaaatgaacatgctcgggaattcctcgcacacgcaccaacaaaaggcctttggatgcctctgggtaaggaagtcaaggtgatgcaatgctggcggtgtaagagatatggccatcgaaccggcgataaagagtgtccattttttattaagggcaaccagaagctcgagcagttccgcgtggcccacgaagatccaatgtacgatatcatccgggacaacaagcgccatgaaaaggacgtgcgcatccagcagctgaaacagctcctggaggattctacaagcgatgaggatcgctcctccagttctagcagcgaaggaaaagaaaagcacaagaaaaagaagaaaaaagagaaacataagaagcgaaaaaaggaaaagaaaaagaagaagaagcggaaacacaagagctccaagtcaaacgaaggctccgactccgagtag

SEQ ID NO: 203057 - DNA, 2262 bp, synthetic construct
  misc_feature 1..2262: note = Description of Artificial Sequence: Synthetic coding sequence
  source 1..2262: mol_type = other DNA
atgcgggagcccgaggagctgatgcccgacagcggcgccgtgttcactttcggcaaatccaagtttgccgaaaacaatcctgggaagttctggtttaagaacgatgtcccagtgcacttgagctgtggcgacgaacatagtgccgtcgtaacaggcaacaataagctgtacatgtttggtagcaataactggggtcagctgggccttggatctaagagcgcaattagcaaaccaacctgtgtgaaggcccttaaacccgaaaaggtcaaacttgctgcgtgcggccgtaatcacacattagtgtctacagagggggggaacgtctacgcaacaggaggaaacaatgagggccaactgggactgggcgacaccgaggaacgaaacaccttccacgtaatctccttttttaccagcgagcacaagatcaaacaactgagtgcgggctccaatacatcagcagcacttaccgaggacggcaggctctttatgtggggggataactccgaaggtcagattgggctgaaaaatgtgagcaatgtctgtgtgcctcagcaggtcacaattggcaagccggtgtcctggatttcttgtggctactatcattccgctttcgtgacgaccgatggagagctttacgtgttcggggagcccgagaatggcaaacttggactgcccaaccagctgctaggcaatcatcggacgccacagctggtttcagaaattcctgagaaagtcatccaggttgcttgcggcggcgaacacaccgtcgtgcttacagagaatgcagtgtacactttcggtttaggacagtttggacaactgggattagggacgttcctctttgaaacatccgaacctaaggtaattgagaacatccgtgaccagaccatatcgtatatatcctgtggtgaaaaccataccgcgttgattacggacataggcctaatgtacacattcggagatggcagacacggaaagctgggactgggactggaaaacttcaccaatcatttcatccccacactttgcagcaacttcttgcgtttcattgtcaaactcgaacggtctcccgacagcttctccatgcgccgaaccctgccacccatcgaaggaacgttgggactgagcgcatgtttccttccaaatagtgtgtttccccggtgctcagaaagaaacctgcaagagtcagtgctctctgagcaagatctgatgcagccagaagagcccgattaccttctggacgagatgaccaaagaagccgaaatcgacaattctagcaccgtcgaaagcctcggcgagaccacggatattctcaatatgacccacatcatgagcttaaacagtaatgaaaaaagcctgaagctgagtcccgtccaaaaacagaaaaagcaacagacaatcggcgagctgacccaggacactgccctgaccgaaaatgacgacagcgatgaatacgaggagatgtctgaaatgaaagagggaaaagcgtgcaaacagcacgtgagtcagggaatttttatgactcaacctgcaaccaccatagaagccttttcagatgaagaggtggaaataccagaagaaaaggaaggagctgaggattcgaaggggaacggtatagaggaacaggaggtcgaagccaacgaggaaaacgtcaaagtgcacggcgggcgcaaggagaaaactgaaattctgtcagacgaccttaccgacaaggcggaggaccatgagtttagtaagacagaagaactcaaactagaggatgtagatgaagaaataaacgccgaaaatgttgaatccaagaaaaaaacagtgggcgacgacgagtctgtcccaacagggtatcattctaaaaccgaaggagcagaacgaactaatgacgattcctccgcagagaccatcgaaaagaaggagaaggccaacttagaagagcgggcaatctgcgaatacaatgaaaacccaaaagggtacatgctcgatgatgctgattcatcatccctggagatcctggagaattcggaaactacacccagcaaagatatgaagaagacaaagaagatcttcctgttcaagcgtgttcccagtattaatcaaaaaattgtgaagaataacaacgaacccctccccgagattaaaagtatcggggaccaaataattcttaaaagcgacaacaaagatgcggaccagaatcacatgagtcagaatcaccagaatattccccctaccaatacagagcgcagaagcaagtcttgtaccatcctgtag

SEQ ID NO: 203058 - DNA, 2448 bp, synthetic construct
  misc_feature 1..2448: note = Description of Artificial Sequence: Synthetic coding sequence
  source 1..2448: mol_type = other DNA
atgcgggagcccgaggagctgatgcccgacagcggcgccgtgttcacgttcgggaaatccaagtttgcagaaaataaccccggtaaattttggttcaaaaatgatgtgcccgtccacttgtcctgtggggatgaacactcagcagtggtgacagggaacaacaaattgtacatgttcgggtctaataattggggtcaactagggttgggtagtaagagcgctatcagtaagccaacatgcgtcaaggcattaaaacccgagaaagttaagctggctgcctgtggccggaatcacacattggtgtctacagaggggggcaatgtctatgccaccggcggcaacaatgaggggcagctgggtctgggtgatactgaggagcgcaacaccttccatgtgatcagtttcttcaccagtgaacacaaaatcaaacagctgagcgccggcagcaacacgtccgcggcactaaccgaggacggtaggctgtttatgtggggggataacagcgaaggccagatcggccttaagaacgtctcaaacgtgtgtgtacctcagcaagtgacgattgggaagccagtgagctggataagttgcggctattaccattcagcattcgtgaccaccgatggggaactttatgtcttcggggagcccgagaacgggaaattgggtttgcccaatcagctcctaggcaaccatcgcaccccacagctggtgtctgaaattcccgagaaagtcatccaggtggcctgcgggggcgaacataccgtggtcctcacagagaatgccgtgtacaccttcggtctgggccaatttgggcagctgggactgggcacatttctgttcgaaactagtgagcctaaagtcatcgagaacatccgtgaccagaccatcagttatattagctgcggggagaaccataccgcactgatcactgatattggtctgatgtacacttttggggatggtaggcacggaaagctcgggctgggccttgagaactttactaatcacttcattccaaccttgtgtagcaactttctgagattcattgtgaaacttgtagcatgtggggggtgtcatatggttgttttcgcggctcctcatcggggagtcgctaaagagatcgaatttgacgaaatcaacgacacatgcctgtctgtcgccacatttttgccttacagcagcttaacttcaggaaacgtcctccaacgcaccctcagcgcgcggatgcggagacgggagcgggaaaggtctccggattcgtttagtatgcgacgcacactaccccccattgaggggacactcgggctgtccgcatgctttctccctaattcagtgttccctaggtgctcagaaagaaatctgcaggaaagcgttctttctgaacaagatctcatgcagccagaggaacctgactacctgctcgatgaaatgacaaaggaagccgagatcgacaattcttctacagtcgagtccctgggggaaactactgacatcctgaacatgactcatattatgagcctaaactctaacgagaagagcctgaaactcagcccagtccagaagcagaaaaagcagcagacaataggtgaactgactcaagacacagcccttacggagaatgatgatagcgacgagtatgaagaaatgtccgaaatgaaggaggggaaagcctgcaaacagcacgtgagtcagggcattttcatgacacagcctgccactactatcgaggcgttttcagacgaggaggtagaaatccctgaggaaaaggaaggagctgaagattccaaaggtaacgggatagaggagcaggaagtggaggctaatgaggaaaacgtgaaagtgcacggggggaggaaagaaaagacggaaatcctgtctgacgacctaactgacaaggcagaagatcacgagttctccaaaaccgaagagctaaaactggaggacgtagacgaggagattaacgccgaaaatgtagaatccaaaaaaaagaccgtgggggatgatgagtccgtgccgaccggctaccactctaagactgagggggctgaacgaaccaatgacgactctagcgcagagaccatcgagaaaaaggagaaagccaatctggaggagagggctatatgcgaatacaacgagaatcccaagggttatatgctcgatgatgcagatagtagcagcctggagattttggaaaacagtgaaaccaccccttctaaggacatgaaaaaaactaaaaaaattttcctgtttaaacgggtcccatctatcaaccagaagatcgtgaagaataataacgaaccgctccctgagatcaaatctataggggatcagattattctcaaaagcgataacaaggatgcggaccagaaccatatgtctcagaatcaccagaatatcccccccaccaatactgagagacgaagtaaaagctgcacaattctgtag

SEQ ID NO: 203059 - DNA, 1443 bp, synthetic construct
  misc_feature 1..1443: note = Description of Artificial Sequence: Synthetic coding sequence
  source 1..1443: mol_type = other DNA
atgcgggagcccgaggagctgatgcccgacagcggcgccgtgttcacgtttggcaagtctaaattcgcagaaaacaaccccggaaaattttggttcaagaatgacgtgccagtgcacctctcttgcggagacgagcattcggccgtcgtgactgggaacaataaactctacatgtttggttccaacaactggggccaactggggctcggctcgaagtctgcaatcagcaagcctacttgtgtgaaagctttgaaacccgagaaagttaagctcgccgcgtgcggacggaaccacaccctggtctccacggaaggtggaaatgtatacgcgaccggcggcaacaacgagggtcaactcgggctgggtgatactgaagaacggaatactttccacgttatctcattcttcaccagcgagcacaagattaaacaactgagcgctggttccaatacctctgcagctctgacagaagacggacggctgttcatgtggggtgataactcggaagggcaaattggcctaaagaatgtctcaaatgtctgcgtgccccagcaggtgacaatcggtaagccagtgagctggatttcatgtgggtactaccacagtgcatttgtgaccacggacggagagctgtacgtgtttggagagccagagaatggaaagcttggcctaccaaaccagttactggggaaccacaggacccctcaattagtttccgagattcctgagaaggtcatccaggttgcttgcggcggggaacataccgtcgtcctgacggagaacgccgtctacactttcgggctaggacagtttggccaacttggtttgggaacctttctcttcgaaacatcagaacccaaggtgatcgaaaacataagggaccagactatttcttatataagctgcggcgagaaccataccgcgctgataacagacattgggctgatgtacacgttcggggacggaaggcacggcaaactgggcctagggctggagaactttaccaaccactttatccccacactgtgctcaaattttttaaggttcatagttaaattagtcgcctgtggagggtgccacatggtggtgttcgccgctccccaccgcggagtcgccaaggagatagagttcgacgagatcaacgatacatgccttagcgttgcaacctttctaccatactcgtcactcactagcggaaatgttttgcagcgcactctctcggcccggatgcgccggagggagcgagagcggagcccagattccttctcaatgcgaagaaccctgcctccgatcgaggggacattgggactgtctgcatgcttcctgcccaatagtgtgtttccaaggtgtagtgaaagaaatctccaggaaagtgtgctcagcgaacaggatctgatgcagcctgaagaacctgatactcatcatgaaccagaatttcagtag

SEQ ID NO: 203060 - DNA, 3063 bp, synthetic construct
  misc_feature 1..3063: note = Description of Artificial Sequence: Synthetic coding sequence
  source 1..3063: mol_type = other DNA
atgcgggagcccgaggagctgatgcccgacagcggcgccgtgttcacattcgggaaatctaagttcgcagaaaataatccaggaaagttctggtttaagaatgatgtccctgtgcacctgagctgcggtgatgagcacagcgctgtggtgacgggaaacaacaagctttacatgtttggatctaataattgggggcaactgggattagggtctaagtccgcaatcagcaagcccacttgcgtgaaggccttgaagcctgagaaagtgaagcttgcagcatgtggaagaaaccacacactggtcagcacagagggaggtaacgtctatgccaccgggggaaacaacgagggccagttggggctgggcgacacagaagagagaaatactttccacgtgatcagtttcttcacatccgaacacaagatcaagcagctaagcgcaggatctaacacttctgcagccctgaccgaggacggccggttatttatgtggggtgacaactccgagggtcagattggactgaagaatgttagtaatgtttgcgtgccacagcaagtgactataggaaaacccgtcagctggatttcctgcgggtactatcacagtgccttcgtcacaaccgatggagagctgtatgtgttcggggagccagagaatggaaagctcggcctgcctaaccagcttctggggaatcacaggacacctcagttggtgagcgaaatcccagagaaggtgatacaggtggcttgtgggggcgaacacactgtcgtcctaaccgaaaatgcggtgtacacctttggactgggccagtttggccaacttggcctggggacatttcttttcgagacctctgagcctaaagttattgagaatataagggatcaaacaatctcatacattagctgtggggagaaccacactgcattaatcacagacatcggcctcatgtacactttcggagatggccgccacggaaaattgggtttaggacttgagaatttcactaatcatttcatccctaccctttgtagcaacttcctgcgattcatcgtcaaattggtcgcctgcggtgggtgccacatggtcgtctttgccgcccctcacaggggggtggccaaagagatcgaattcgatgaaatcaacgacacttgcctgtcagttgccacattcctgccatacagttctctgacaagtggaaacgtgctgcagcggacactgtctgctaggatgcgaagaagggaacgagagcggtctccagactctttcagcatgcggcggactctgccacctatagaaggtacgctgggcctttcagcctgtttcttacctaactcggtgttccccaggtgtagtgagcgtaacctgcaggagtccgtactttcagagcaggatctcatgcaaccagaggaacccgactaccttcttgacgagatgaccaaggaggctgagatcgataattcttccactgtggagtctctgggagagactacagacatcctgaatatgacccacatcatgtcacttaattctaatgaaaagagtctgaaactaagtcccgtccaaaagcagaagaaacaacagactatcggagaacttacccaagacacagcattgactgagaatgatgactcagacgaatatgaggagatgtcggaaatgaaggagggtaaggcttgcaaacagcacgtctctcagggcatattcatgacccagcccgctaccacaatagaggccttcagcgacgaggaggtcggcaacgataccggtcaggtgggtccgcaagccgatactgatggtgagggcctccagaaggaggtctatcggcacgagaacaataatggcgtcgatcaactcgatgcgaaggaaatcgagaaagaatccgacggcggccactctcagaaagagtccgaagctgaagaaatcgactcagaaaaggagactaaacttgctgagatcgctggtatgaaagatctgagagaacgggaaaaaagcacaaagaaaatgtcaccattttttgggaatttaccagaccgaggcatgaacactgaatctgaggaaaacaaagatttcgtgaagaaaagagagtcttgtaaacaggacgtgatcttcgactccgaacgcgagagcgtggagaaacccgacagttacatggaaggagccagcgagtctcagcaagggatcgcagacggcttccagcagcccgaagccattgaatttagtagtggggaaaaggaggacgatgaggtcgaaaccgaccagaacatacggtacggtaggaaacttatagagcagggaaacgagaaagagactaagcctattatcagcaagagcatggcgaaatacgacttcaagtgcgatagactctctgagatccctgaggagaaagaaggcgctgaagacagcaaaggcaatggaatagaggagcaagaagtggaggcaaatgaagaaaatgtgaaagttcatggagggaggaaagaaaaaaccgagatcctgtccgacgacctgacagataaagcggaggatcacgagtttagcaaaacggaagaactcaaactcgaagatgttgatgaggaaattaacgcggagaatgtggagagcaagaaaaaaacggtgggggacgacgaatcagttcctaccgggtatcattccaagaccgagggtgctgagagaaccaacgatgatagcagtgcagagaccatcgagaaaaaagagaaggccaacctcgaagagcgtgccatctgtgaatacaacgaaaacccaaagggttacatgttggatgatgccgattcatctagcctcgagattttagagaacagtgagacaaccccatcaaaggacatgaaaaaaacgaagaagatctttctgttcaaaagagtgccgagcattaatcaaaaaattgttaagaacaataacgagccactgccagagataaagagcatcggggatcagataatcctgaaatccgacaataaagacgcagatcagaaccacatgagccagaaccaccagaatattcctcccaccaatacagagaggcggagcaaatcatgcaccatcctttag

SEQ ID NO: 203061 - DNA, 1941 bp, synthetic construct
  misc_feature 1..1941: note = Description of Artificial Sequence: Synthetic coding sequence
  source 1..1941: mol_type = other DNA
atgcgggagcccgaggagctgatgcccgacagcggcgccgtgttcacattcggaaagagcaagttcgctgagaacaaccctggaaagttctggtttaaaaatgacgtcccagtgcacctgagctgcggggacgagcactcagctgtcgtaactggcaacaataaattgtacatgtttggttccaacaattgggggcagttgggcctgggctctaaatcagccatctcaaaacccacctgcgttaaagcccttaagcctgagaaagtcaaactcgctgcctgtgggaggaaccatactctcgttagcacagagggagggaacgtctacgcaacaggggggaataatgagggacagttaggcttgggggacaccgaggaacggaatacttttcatgtgatctccttctttactagcgagcacaagattaaacaactgtctgcaggctctaatacctctgctgcactgacagaggacggacgcctatttatgtggggcgacaacagtgagggacagatcggtctgaagaacgtgtcaaatgtgtgtgtaccacaacaagtaactatcgggaagcccgtgagttggatatcatgcggttattaccactccgccttcgtgaccactgatggagagctgtatgtcttcggggaaccagagaatgggaaattgggactccccaaccaactgttaggcaaccacaggacaccacagctcgtttcagaaattcctgagaaggtaatccaagttgcctgtggtggggagcacacagttgtgctgacggagaacgcggtgtacacctttgggctggggcagtttggtcagttgggccttgggacatttctcttcgagacctccgaacctaaggtaatagagaacattagggaccagacaatttcttatatatcatgcggggaaaaccacacagccctgataactgacatcggccttatgtacacattcggtgacggcagacatggaaaactcgggcttgggctcgaaaattttacgaaccacttcatcccaaccctatgctcaaattttttaagattcattgtgaagctggtcgcctgtggaggctgccatatggtggtgtttgctgctccccacaggggtgtggcaaaggagatagaattcgacgaaatcaatgatacatgcctgagtgttgccaccttcctgccgtattcaagtctcacgtcaggaaatgtgctgcagcggactctttcggctaggatgcgacgacgcgaacgcgaacgctcacccgactctttttccatgcgaagaacactgcctcccatcgaaggcacactgggtttgagcgcttgtttcttacctaacagcgtattcccccgctgctcagaaagaaatctgcaggaatcagtgctgtccgaacaagacctcatgcagccagaggagccagattatttattggatgaaatgaccaaagaagctgagatagataatagctcaaccgttgagtccctgggtgaaacaacggatatcttgaacatgacccacatcatgtctctgaattctaacgagaagagcctgaagctgtcgccggttcagaaacaaaagaaacagcagactattggtgaattaacgcaggatactgccctcaccgagaacgacgattcggatgaatatgaggagatgtcggagatgaaagaaggcaaggcttgtaagcagcacgtgagccagggcattttcatgacccagcccgctaccactattgaggccttcagcgatgaggaagttgagatcccagaggaaaaggaaggtgcagaagatagcaaggggaatgggatcgaggagcaggaggtagaggctaacgaagagaacgtgaaagtgcacggggggcggaaggaaaaaaccgaaattctttctgacgatctcaccgataaggccgaatatagtgcctcccactctcaaattgtgagtgtctag

SEQ ID NO: 203062 - DNA, 3459 bp, synthetic construct
  misc_feature 1..3459: note = Description of Artificial Sequence: Synthetic coding sequence
  source 1..3459: mol_type = other DNA
atgcgggagcccgaggagctgatgcccgacagcggcgccgtgttcacgttcggtaagagtaagttcgccgagaataatcccggaaaattttggtttaaaaacgacgtgccagtccacctgagctgcggtgacgaacatagtgccgtcgtgacaggcaacaacaaattgtatatgttcggatctaacaactgggggcagctcggactggggagcaaaagcgcaatttctaagccaacttgcgtcaaggccctgaaacccgaaaaggtgaaattggcggcctgtggccggaaccacaccctggtttctaccgagggcggaaatgtgtatgccactggtggcaacaacgagggacagttaggactgggtgacaccgaagagaggaatacattccatgtcatttcttttttcacaagtgaacataagattaaacagctgtcggccgggagcaacacgagcgccgccctgactgaggacggacgtctttttatgtggggcgataactctgaggggcaaatagggttgaaaaacgtgtctaatgtttgcgtgcctcagcaggtgacaatcggaaaacctgtatcttggatctcttgcggctattaccactcagctttcgtgaccacggacggagaactgtacgtgtttggtgagccagaaaacggtaagctaggcctcccaaatcagctgttgggcaaccaccgaacgccccagttggtgagtgaaatacctgaaaaggtcatccaggttgcttgcgggggcgagcacacagtcgtgctaaccgagaatgcagtgtatacattcggcctcggtcagtttggccagctcggtctggggactttcctgtttgagacgtcagagcccaaagtgatcgagaatattcgggaccaaacaatctcgtatatcagctgcggggaaaaccacaccgccctgatcaccgacataggccttatgtacacattcggcgacggtcgtcacggcaagctaggactgggattagaaaattttactaaccactttatacctacactgtgtagcaactttcttagattcatcgtaaaactggtggcatgcggaggatgtcatatggtcgtgtttgctgccccccatcgcggggtcgctaaggagattgagttcgatgagattaacgatacctgcctgagcgtggccacgtttttaccttactctagtctaacatcaggcaacgtgctccagcggacattgagtgcaaggatgcgccggagagagcgggagagatcacccgactccttcagtatgagacgcactctaccaccgatcgaggggactctgggtttatcagcttgcttcctgccaaacagtgtcttccctcgttgctcagaaagaaacttgcaggaaagcgttctctctgagcaagatcttatgcagccagaagaaccggactatctgctcgacgaaatgaccaaggaagctgagatagataactctagcacagttgaatcgctgggggagacgaccgatatattgaacatgacacacattatgtccctcaatagtaacgaaaagagcttaaaactgtctcctgtgcaaaaacaaaagaaacaacagaccattggcgagctaactcaggatacagctctgaccgaaaatgacgacagtgacgagtacgaggagatgtccgaaatgaaagagggcaaagcgtgcaagcagcatgttagccaggggatcttcatgactcaaccagctaccaccatcgaggccttttctgacgaggaggtcgagattcctgaggaaaaagaaggagctgaagacagcaaaggaaatggcatcgaagagcaggaggtcgaagcaaatgaagagaatgtgaaggtgcatgggggacggaaggagaagacggaaatcttgtcagacgacttaaccgataaggccgaagtcagcgagggcaaagccaagtctgtaggggaagctgaagacggaccagagggccgtggcgacggcacatgtgaagaaggaagctccggagcagagcattggcaagatgaagagagagagaagggagaaaaggataaaggacggggggagatggaaagaccaggggagggcgaaaaagagctggcagaaaaggaagagtggaaaaagcgcgatggggaagagcaagaacaaaaagagagagagcagggccaccagaaagagaggaaccaggaaatggaggaaggcggggaggaagagcacggtgagggggaagaagaagagggggatcgtgaagaagaggaggagaaagagggagaaggcaaggaggagggagaaggggaagaagtcgaaggcgagagggaaaaagaggagggtgagagaaaaaaggaggagcgagctgggaaggaagagaagggcgaggaggagggcgatcaaggcgagggagaagaggaagagaccgaagggcggggagaggaaaaggaggagggcggcgaggtcgaaggtggcgaggtggaagagggcaaaggagaacgtgaggaagaggaagaagagggagagggcgaagaggaggaaggcgagggagaagaggaggaaggcgaaggcgaggaggaggagggggaaggtaagggcgaggaagagggcgaagagggcgagggagaagaggagggagaggagggggagggagagggcgaagaagaggagggggaaggcgaaggcgaggaagaaggggagggtgaaggcgaagaggaagaaggcgagggcgagggggaggaagagggtgagggagaaggtgaggaggaggaaggagagggcaaaggtgaggaggagggggaggagggagagggcgagggggaggaagaagagggtgagggtgaaggagaagatggagagggggagggcgaagaggaggagggagaatgggaaggggaggaggaagaaggagagggggaaggggaggaggaaggagaaggcgaaggtgaggagggagagggagaaggagaagaggaagagggggagggagaaggggaggaagaagagggtgaggaagaaggcgaggaagaaggtgagggtgaggaagaaggggagggcgagggagaggaggaggaagagggcgaagtggaaggcgaagtagaaggggaagaaggtgaaggcgagggcgaggaggaagaaggagaagaagaaggagaagagcgggaaaaagagggcgaaggggaagagaacaggaggaaccgggaagaagaggaggaggaagagggaaaatatcaggagactggggaagaagaaaacgagcgacaggatggggaagagtataaaaaagtcagcaagattaagggcagcgtgaaatacggcaagcacaagacctatcagaaaaagtctgttacaaatacccaggggaacggcaaagagcagcgatcgaagatgccagtacagtcaaaacgactcctcaaaaacggccctagcggcagcaaaaaattttggaataacgtcctgccccattacttggaattgaagtag

SEQ ID NO: 203063 - DNA, 2121 bp, synthetic construct
  misc_feature 1..2121: note = Description of Artificial Sequence: Synthetic coding sequence
  source 1..2121: mol_type = other DNA
atgaacgagagcaagcccggcgacagccagaacctggcctgcgtgttttgccgaaaacatgatgactgtcctaataaatatggcgaaaaaaaaaccaaagaaaagtggaaccttaccgttcattactactgcctgcttatgagcagcggcatctggcagcgcgggaaggaagaagagggggtctacggatttttgattgaagatatccggaaggaggtgaatagggcgtccaagttgaagtgttgtgtttgcaagaagaacggcgcgtccattggttgcgtagctccccgatgtaagcggtcttaccacttcccctgcggactgcagcgcgagtgtatcttccagtttaccggaaattttgcttccttttgctgggaccatcgcccagtacagatcataacctctaataattatcgcgaaagtctcccttgcacaatttgtctggaattcatcgaaccgattccgtcatacaatatcctgcggagtccttgctgcaaaaacgcctggttccatcgagattgccttcaagtacaagctattaatgccggtgtgttcttcttccggtgcactatctgtaacaacagtgatattttccaaaaagagatgttgaggatgggcattcacataccagaaaaggatgcctcttgggaactggaggaaaacgcctatcaggaactgctgcaacactatgaacggtgtgacgtgagacggtgccgatgtaaggaaggaagagattataacgcaccagatagtaagtgggagattaagagatgccaatgctgcggttcgtctgggactcatctggcatgtagttcattaagaagctgggagcagaactgggagtgcctggagtgtcgcgggattatttacaattctggcgagtttcagaaggccaaaaaacacgtgctgccgaacagcaataacgtgggtattacagattgcttactggaagagtcttcaccaaaactgccgaggcagtctcctggttcgcagagcaaagatttgctacgccagggtagtaaattccgacgaaacgtcagtaccctgctgatcgagctcggattccagatcaagaagaagaccaagcgcttatacattaataaagcaaatatctggaacagcgccctggacgcgttccggaaccgaaactttaatccttcctatgcaattgaggtggcttatgtgattgaaaatgataactttggttcagaacaccccggatccaaacaagaatttctgtcactgttaatgcagcatctcgagaatagtagtctgtttgaagggtctctgtcaaagaacctgagccttaactcccaggctcttaaggagaatctgtattatgaggccgggaagatgctcgctatttctttggtccatgggggacctagcccagggtttttctcaaagactctgttcaactgtctggtgtatggacccgaaaatacccaaccaattctggacgatgtttcagacttcgacgtggcacagattatcatccgaatcaacaccgctaccacggtagcagacttaaagtcaataattaatgagtgctataactatcttgagctgatagggtgtctgcgtctcatcaccaccctgtctgacaagtatatgctggtgaaggatatactggggtatcacgtaatccagcgcgtgcacacaccttttgaatcctttaaacaaggtcttaagactctgggtgtgctagagaagattcaggcataccccgaagctttctgctcaatcctgtgccataagcccgaatctctgagcgcgaagatcctttctgaattgtttacggtgcatacgctccctgacgtgaaggctctgggattctggaacagctatctccaggcagtcgaagacggcaagtccaccactaccatggaggacatccttatcttcgcaacgggctgttccagcattccacccgctgggtttaagccaactccttctatagagtgtttgcacgtcgactttccggtagggaacaaatgtaacaattgcctcgccattccgattacgaacacatataaggaattccaggaaaacatggacttcaccatccgcaatacactgcgcctcgagaaggaggagagttcccattacattgggcattag

SEQ ID NO: 203064 - DNA, 1938 bp, synthetic construct
  misc_feature 1..1938: note = Description of Artificial Sequence: Synthetic coding sequence
  source 1..1938: mol_type = other DNA
atgctgctgatggcccccgaccggtgccggtacgtgtggaagcactgtcagcccatggaaatgcgtatcaagtggatcttcctgtgttgtatcaggcccttgtacgattttacaagccagtatgttatggagactgacagcttatttcttcattaccttcaggaggcctcagctaggcttgacatacaccaagcgatggcttccgagcactccactctggcagcaggctggatttgctttgacagggtcttggagacagtcgaaaaggtgcacggattagccaccctaataggtgccggcggagaagagtttggagtcctggagtattggatgcgattgcgatttccaatcaagccttcacttcaggcttgcaataagagaaagaaggctcaggtgtacctttctacagacgtgctgggcggaagaaaagctcaggaggaggagtttaggagcgagtcttgggagccgcagaacgagctctggattgagattacaaaatgctgcggccttcgttcgaggtggctaggtacccaaccctcaccatatgcagtgtacaggttttttaccttcagcgaccatgacaccgcaattatccccgcctcaaacaacccgtacttccgggaccaggccaggtttcccgtcctcgtgacctccgatctcgaccattatctgcggcgcgaagctcttagcatacacgtcttcgatgacgaagacttggagcccggcagttatctgggtagagcccgcgttcccctcttgcccctggccaagaacgagtccattaagggcgattttaacctgacagatccagcggagaagccgaacggatcaattcaagtgcaactggactggaagttcccttacatacctcccgaatcttttcttaagccggaggcacagaccaaaggtaaggacaccaaggatagctccaaaatttccagcgaggaagagaaggcaagtttcccaagccaagatcagatggctagtcccgaggtgcctatcgaagcagggcaataccgcagcaaacggaaaccaccacatggcggggaaaggaaagagaaggagcatcaggttgtatcctatagccggaggaagcatgggaaacgcataggcgtgcaaggtaaaaacagaatggaatacctctctctaaacatactaaatgggaataccccagagcaggtgaattacacagaatggaaattttccgagaccaattctttcatcggagacgggttcaaaaaccagcatgaggaagaggagatgaccctctctcatagcgcactaaaacagaaggaacctctgcacccagttaacgacaaggagtctagtgagcagggcagtgaagtgagcgaagcccagacgacagattccgacgatgtgattgttcctccgatgtcccagaagtaccccaaagccgattctgagaagatgtgcatcgaaatcgtgtcactcgctttctatcccgaagccgaagtgatgtctgatgaaaatatcaaacaggtctacgtcgaatataagttttacgacctacctctgtccgaaacagagacgcctgtgtcgctccgcaagcccagagcaggcgaagaaatccacttccacttttcaaaagtcatagacctagatccccaggagcagcagggacgacgtcggtttttgttcgatatgctcaatggccaagatcccgatcagggccacttgaaatttaccgtggtttcagacccacttgatgaagagaagaaagagtgtgaagaggtcggctatgcatatttgcagctgtggcaaattctggaatctggcagggacattctggagcaggagctggatatcgtgtcccctgaggacctggctacccctattgggcgactgaaagtctctctgcaggccgcagcggtgcttcatgcaatttataaagagatgaccgaagacttgttttcctag

SEQ ID NO: 203065 - DNA, 1839 bp, synthetic construct
  misc_feature 1..1839: note = Description of Artificial Sequence: Synthetic coding sequence
  source 1..1839: mol_type = other DNA
atgctgaagctggacaacaaggacgtgatcagccaccccctgggctatccttccgaatcacttctctccatagcttccatgttggattccagtgactcatcgagccagccacactggtctaacgaactgattgcagaacaactccagcaacaggtctctcaattacaagaccagttagatgccgaactggaggataaacgcaaagttctcctggagctaagtagggagaaagcccaaaatgaagatctgaaacttgaggtcactaatatactccagaagcataagcaggaggtggagcttttgcaaaacgccgctacaatctcccaaccccctgacaggcaatctgagccagcgactcacccagcagtattacaggagaatacccaaatcgagcccagcgagcccaaaaaccaggaggagaagaagcttagccaggtccttaatgagctacaggtatcgcatgctgagactacactagaactggaaaaaaccagagacatgctgatcctacagaggaagatcaatgtgtgctatcaggaagagctcgaagccatgatgacaaaggcagacaacgataaccgggatcataaagaaaaattggagcggctcaccaggttgctagatctcaagaataaccgtatcaaacagctcgagggcatcctgcggtcacacgacctgccaacgagtggtgatttcaatctgactgatcccgctgaaaaacctaacggcagcatccaggttcagctcgattggaagttcccgtacattcctcccgagtctttcttgaagcctgaggctcagaccaagggaaaggatacaaaagacagctcaaagattagcagcgaggaggagaaggcttccttcccaagtcaggaccaaatggcatccccggaagttcccatcgaggccggtcagtaccgctctaaacgcaagccgcctcacggaggagagcgaaaggagaaagagcatcaggtggtgagttattcaagacggaaacacgggaaacgcattggggtgcaggggaaaaataggatggagtatctcagtttaaatattttgaacgggaatacacctgagcaggtcaactacaccgagtggaaattcagcgagaccaatagctttataggcgatggcttcaagaaccagcacgaggaggaggagatgacactgtcgcactccgctctgaagcaaaaggaaccgctccatcctgttaatgataaagaatcgtcagagcaaggaagtgaggtatcggaggctcagactaccgacagcgacgatgtaatcgtgccccccatgtcacagaagtaccccaaggccgactcagagaaaatgtgtattgagatcgtgtcactggctttctatccagaagcagaagtgatgtcggacgagaatatcaaacaggtgtatgtcgagtacaaattttacgatctcccactttctgagactgagactcccgtcagcctccggaagcctagagcaggcgaagagatccatttccatttctcaaaggtgatcgacttagaccctcaggagcagcagggcagaaggcggttcctgttcgacatgcttaatggccaggatccagatcagggccaccttaagttcaccgtcgtcagcgatcccctggacgaagaaaagaaagagtgtgaagaggtcggatatgcctatctgcagttatggcaaatcttagaatccggtagggacattctggaacaggagctggatattgtttcaccagaggatctagctacgcctatcggtagacttaaagtgtctctgcaggccgctgctgtcctccatgccatttataaggaaatgacagaagacttgttttcctag

SEQ ID NO: 203066 - DNA, 3861 bp, synthetic construct
  misc_feature 1..3861: note = Description of Artificial Sequence: Synthetic coding sequence
  source 1..3861: mol_type = other DNA
atgagccacctggtggaccccaccagcggcgacctgcccgtgcgggatattgatgccattccactggtgttgccagcttcaaaagggaagaacatgaaaacccagccacctctctcaaggatgaatcgggaagaattagaggacagcttctttagactgagggaagaccatatgctggtcaaagaactgtcttggaagcagcaggatgagataaaaaggctgcgtacaacattgctgagactgacagcagcgggtagagatctgagagtcgctgaggaggcagcaccgctgagcgagacagctcgccgtgggcaaaaagccgggtggaggcagcgcctttctatgcaccaaagacctcagatgcatcgcctccaaggccacttccactgcgttggcccagcatcaccccgacgcgcacagccccgtgtccaggtaggacatcggcagctgcatactgccggagcccctgttccagagaaaccgaaaagggggccaagagaccggctgtcatacacagctcctccgtcctttaaggaacacgcaactaacgagaatcgaggagaggtggcctcaaagccgtccgaattggtctcaggctcaaattctataatctccttcagtagcgtgatcagcatggcaaaacccatcggtttgtgtatgccaaacagtgcccacattatggcttccaacactatgcaggttgaggagcctcccaagtccccagagaaaatgtggcccaaagatgaaaatttcgagcagcggtcaagcttggagtgcgctcaaaaagcagcagaactcagggccagcattaaggaaaaggtcgagctcataaggctgaaaaaactgcttcacgagcggaacgcctccctggtgatgacgaaggctcagctcactgaagtccaggaagcctatgagaccctcttgcagaaaaaccaaggtattctatcagctgctcatgaagccctgctcaagcaggtcaacgagttaagggccgaactgaaggaagagagtaaaaaggccgtgagtcttaagagccagttggaggacgtatccattctacaaatgaccttaaaagagtttcaggagagagtggaggatctggagaaggaaagaaagctcttaaatgataactacgataaactattagagtcaatgctcgattcttccgactccagtagccagccacattggagtaatgagttgatcgctgagcaattgcagcaacaggttagccagctgcaggaccagctggacgccgagcttgaggacaaacgtaaagtactcctggagctgagtcgcgagaaagcccaaaatgaggatctgaagctcgaggtgaccaacatactgcagaagcacaaacaggaagtggagcttctgcagaatgccgccaccatatctcagcccccagacaggcagtcagaacccgctacacatccagctgtcctgcaagaaaacacacaaatcgagccatccgagcccaagaaccaagaagaaaagaagctgagccaggtcctcaatgaactccaggtgagtcacgctgagaccacactggaactggaaaaaactagagatatgttaatattgcaacggaagatcaatgtctgttatcaagaggagctcgaggccatgatgactaaggcagacaacgacaatagggatcataaagagaaactggaacgactcacaaggctgctagatttaaaaaataatcgaatcaagcaattagaggggattctcagatcccatgaccttcctacatcggaacagctgaaagatgttgcgtacggcactagacccctatccctttgcctggagacgctcccggcacatggagacgaggacaaagtcgatatctcccttctccaccagggagaaaacctcttcgagctccacattcaccaggcatttttaacctcagcagcccttgcccaggccggggacacacaacccaccactttttgcacatactcattctacgacttcgagactcactgtaccccactgtctgtgggacctcagccactgtacgactttactagccagtacgtgatggaaaccgacagtttgttcctgcactatcttcaggaagcatctgcgcgcttagacatccaccaagccatggcttcagaacattccacactcgcggctggttggatatgtttcgatagagtgctggagacggtcgagaaggtgcacggactggctacactcattggggccgggggtgaggagttcggggtgctggaatattggatgagacttaggtttcccatcaagcccagcctacaggcgtgtaataaaagaaaaaaggcacaggtttacctctctacagatgtgctgggcggcaggaaagcgcaggaggaggaattccggagcgagtcctgggagccacagaacgaactctggatcgaaatcaccaagtgttgcgggcttaggagcagatggctgggaacacagccatccccttatgcagtgtatagatttttcacattcagtgaccacgatactgcgatcatccctgccagtaataatccctacttcagggatcaagcacgcttccccgtattggtgacttccgatctggaccactatctgagaagggaggctttgtcaatccacgtgtttgacgatgaggatctggagcctggttcctacctagggcgggcacgcgttcctctcctgccacttgccaaaaacgagagcatcaagggagattttaatctgactgatccagctgagaagcccaatgggagcatccaagtacagttagattggaagttcccttatattccacctgagtcttttttgaaaccggaggctcaaaccaagggtaaagacactaaagatagttctaaaattagttccgaggaagaaaaggccagtttcccctcacaggaccagatggctagccccgaggttcctatcgaggcaggacagtatagatccaagcgaaaaccgcctcacggaggagaaaggaaggagaaagagcatcaagtcgtttcttattcccgtcgcaagcacggtaagcggatcggcgttcagggcaaaaaccgtatggagtatctgagcctgaacatcctgaacggcaacacacctgagcaggtgaattataccgagtggaagttcagcgaaacgaacagtttcatcggcgacggcttcaagaaccagcacgaagaggaggagatgaccctgtctcacagtgccctgaagcaaaaagagcccttacacccggtcaatgataaagaatcctccgagcaaggatccgaggtcagcgaggcccaaactaccgatagtgatgatgtgatcgtcccccctatgagccaaaagtacccaaaagcggattctgagaagatgtgcattgagatcgtttcactcgccttttaccccgaagctgaggttatgtcagacgaaaacatcaaacaagtatacgtagagtacaaattctatgacctgcctctgtcggagacagagacacctgtgagtttgcggaagccaagggcaggcgaggaaatccattttcatttttcaaaggtgattgatctcgacccccaagaacaacaaggaaggcgtcggttcctattcgacatgcttaacggccaggatcccgaccaaggtcatctgaagtttactgtggtgtccgacccattggatgaggagaagaaagagtgtgaagaggtgggctatgcctatctccagctgtggcaaatcctggagagcggcagagatattctggagcaggagcttgacatcgtaagtcctgaagatctggctacccctatcgggaggttaaaagtgtctctccaggctgcagccgtacttcacgcaatatacaaggagatgaccgaagatcttttttcctag

SEQ ID NO: 203067 - DNA, 1617 bp, synthetic construct
  misc_feature 1..1617: note = Description of Artificial Sequence: Synthetic coding sequence
  source 1..1617: mol_type = other DNA
atgaacctggagctgctggagagcttcggccagaactaccccgaggaggcagacggtaccctggactgcatttccatggccctgacctgtaccttcaaccgctggggcactctactcgccgttggatgcaacgacgggcggattgttatatgggacttcttgactcgggggatcgcaaagattatttccgcgcatatccatccggtttgtagcttgtgctggtcccgcgatggtcataaacttgtctccgccagtacagataacatcgtctcacagtgggacgtcctgagtggcgattgcgaccagaggtttcgattcccctccccgatcttgaaggtgcagtaccatccaagagaccagaataaggtgttggtctgtccaatgaaatccgctccagtgatgttgactttgagcgattcaaagcacgtggttttgcctgtggacgatgatagtgacctcaacgttgtggcgagcttcgatagacgaggggagtatatctatacgggcaatgccaaaggcaaaattctggtgctcaagacagactctcaggacctggttgccagtttcagagttactacagggacgtcaaataccacagccatcaagagcatcgaattcgctcggaagggcagctgctttctgataaataccgccgacaggatcataagggtgtacgacgggagggagattctgacatgtggaagagacggggaaccagagcctatgcagaagctccaggatttagtcaacaggacgccgtggaaaaaatgctgtttctcgggtgacggggagtacatcgtggccggctccgcgcggcagcacgcactttacatctgggaaaagagtattggcaacctcgtgaaaattctgcacgggacacggggggagctgctcctggacgttgcatggcaccctgtgaggccaatcattgccagcatcagcagcggggtggtgtccatctgggctcagaatcaagttgagaattggtcggcctttgctcctgacttcaaagagctggacgaaaacgtggaatatgaggaaagagagtccgaatttgacatcgaagatgaagacaagagtgagcccgaacagacaggcgccgacgccgctgaggacgaagaagtcgacgttacttctgtggaccccatagctgccttttgcagctcggacgaggaactggaggactctaaagccctgctgtacctgcctatcgctcccgaagtggaggatcccgaagaaaatccttacggtcctccacccgacgctgttcagacatcactaatggacgagggggcgtcttcggaaaagaagcggcaatcttcagcagatgggtcccagccccctaagaagaaaccaaaaacaacaaatatagaactgcagggtgtgcctaatgatgaggtacatcctctactcggcgtgaagggtgatggaaaatctaagaaaaaacaggccggcagacccaagggatccaaagggaaagaaaaggacagtcctttcaaaccaaagctctacaagggtgacaggggcttacccctcgaaggctctgcaaagggcaaggtgcaggcagaattgtcgcagccattaaccgcggggggtgccatctccgaacttttgtag

SEQ ID NO: 203068 - DNA, 1503 bp, synthetic construct
  misc_feature 1..1503: note = Description of Artificial Sequence: Synthetic coding sequence
  source 1..1503: mol_type = other DNA
atgaacctggagctgctggagagcttcggccagaactaccccgaggaggcggacgggaccctggactgcatttctatggccttgacatgtacatttaatcggtggggaacgcttctggccgtgggttgtaacgacggcaggattgtgatctgggactttctcacgcgcggcatcgccaaaataatctcagcccacatacaccctgtgtgctctctgtgttggagcagagacggtcacaagctggtatcagccagcacggacaacatagttagccaatgggacgtgctatctggcgactgcgaccagcgctttagattcccctctccgatccttaaggttcagtatcatccacgcgaccagaataaggtgcttgtgtgtcccatgaagagcgcacctgtaatgctgacactgtcggattccaaacacgttgtgctgcctgtggacgacgattccgacctaaacgtggtcgccagctttgacagacggggcgagtacatctacaccggaaacgcaaaaggaaagatcctggtgctaaagacagatagtcaagacctggtagcgagtttcagggtgacgaccggaaccagcaataccaccgccattaagtcaatagaattcgcccggaaggggtcctgtttcctaattaatactgctgatagaataatccgtgtttacgacggccgagagatactcacctgcgggcgagatggggagccagaacctatgcaaaagctgcaggatctcgtgaaccgaacaccctggaagaagtgttgtttttccggagatggcgaatatatcgtggccggcagcgcgaggcagcacgcactgtatatctgggaaaaatccattggaaatttagttaagatcctacacggaacccgaggagagttactcctggatgtcgcctggcatcccgtcaggccgatcattgccagtatctcgagtggtgtcgtttcaatctgggctcaaaatcaggtagagaactggagcgcattcgctccagactttaaagagttggatgaaaacgtggaatacgaagagagggaaagcgaatttgacatcgaagatgaggataaaagtgagcccgagcagactggggccgacgcagccgaggatgaggaggtggacgtgacgtcggtcgaccctatagccgcattttgtagctctgacgaggagttggaggattctaaagccctgctgtatttgcctatagcccccgaggtggaagatcccgaagaaaatccctatgggcctccgcccgacgcggttcaaacatctctgatggatgagggtgccagctccgaaaagaaaaggcagagcagtgccgatgggtctcagccacccaagaaaaagcctaaaacgacaaacattgagctgcaaggcgtgccaaacgacgaggtgcacccgctcctgggagtcaaaggggacggaaagagcaagaagaagcaggctgggaggcccaagggatccaaagctggaggtgcaatatctgaattgctctag

SEQ ID NO: 203069 - DNA, 5379 bp, synthetic construct
  misc_feature 1..5379: note = Description of Artificial Sequence: Synthetic coding sequence
  source 1..5379: mol_type = other DNA
atgagctgcgtgcactacaagttcagcagcaagctgaactacgacactgtgacctttgacgggctacatatctctttatgtgacctgaaaaaacagatcatggggcgcgagaagttaaaggctgcagactgtgacctccaaatcacaaacgcccagaccaaagaagaatatactgatgacaatgctctgattcctaagaactccagcgttattgtgcgacgcatcccaattgggggagttaaaagtacctccaaaacttacgtgattagccggaccgagccagccatggcgactactaaggccatcgacgactctagcgcttctatctccctcgcccagttgacgaagacagcgaacctcgccgaggcgaacgcctccgaagaggataagataaaggcaatgatgtcacagagcggccatgaatatgacccaatcaactacatgaaaaagccacttggtcctccccccccttcatatacgtgtttcagatgtggcaagcctggacactacatcaagaactgtcccactaatggcgacaagaatttcgaatctggtccccggatcaaaaagtcaacgggcatcccacggagttttatgatggaggtgaaggaccccaacatgaagggcgctatgttgactaatacgggaaagtacgctattcctacaatagatgctgaagcctacgcgattggcaagaaagaaaagccaccatttctccccgaggagccgagtagtagttcagaggaggacgaccccattccagacgaactgttatgtctcatctgcaaggatataatgaccgacgcagtggtgattccttgttgcggtaacagctactgcgacgaatgcatcagaacggccctgcttgagagcgacgaacacacttgccccacctgccaccaaaacgatgtctctcccgatgcgctaatcgcaaacaaattcctccgtcaggcagttaataacttcaagaacgagacaggatataccaagcggctccgtaaacagctgccgccacctcctcctccaatccctccgcctcgtcccttgatccaaagaaacctccaacctctgatgaggtccccgatttctcgccagcaggatcctcttatgatacctgtcacttcttcttcgactcaccccgcaccgtccatttcttcccttacttcaaatcagagcagcctggcccccccagtctccgggaacccatcttccgcccctgcccctgtgcccgacatcacggcaaccgtcagtatcagcgtacactcagagaaaagcgacgggccgtttcgagattccgacaataagatcctgcccgctgccgcgctggcatctgaacacagcaagggcacatctagtatcgccattactgccctgatggaagaaaagggatatcaggttcccgtccttggcacaccgagcctcctggggcagagtctgctgcacggccagttaatacccacaactgggcccgtgagaattaatactgcgcggcccggaggaggacgacccggatgggaacattcaaacaaactgggatatcttgtgtccccacctcagcagatcaggaggggggagcggagttgttataggagcattaatcgcgggcgccaccactccgagcgatcgcagcgtactcaaggcccctccctccctgctacccctgtctttgtacctgtcccaccgccacccctgtatcctcctccaccccatacccttccactcccgccaggtgtccctccccctcaattctctcctcagtttccaccaggacagccgccgccagccggatacagcgttccaccaccaggctttcctccggcaccggccaacctgtccacaccatgggtctcctccggcgttcaaacagcccacagtaatactattcctaccacgcaggctcctcccctcagccgcgaggaattttatcgggaacagcgccggttaaaggaagaggaaaagaaaaaatcaaagctggacgagttcacaaacgacttcgccaaggaactcatggaatacaagaaaatccagaaggagcggcgtcggtccttctcccgcagtaaatccccatactctggatctagttatagtcgctcatcttacacttattcaaaaagccggagcgggagtacacgcagtcgttcctattcccgctcattttcaagaagccattcaaggagttacagccggtctcctccctaccctaggcgtggcaggggcaagagtagaaactatcgctcacgcagcaggtcccatggataccaccgaagccgtagccggagcccaccgtaccggagataccattcaaggtcacgctctccccaggcgtttcgcggacaatctcccaacaaaagaaatgtccctcagggagagacagaaagagagtacttcaacaggtacagggaggtcccgccaccgtatgacatgaaggcatattatgggcgatccgtggacttcagggatccgttcgagaaggaaaggtatagggaatgggagagaaagtacagagagtggtacgaaaagtactataagggctacgcagccggcgctcagccacgaccgtcggctaaccgggagaatttctcaccagagagatttttgcctctcaacatcaggaactcaccttttacgcgcggacgccgcgaagattacgtgggcggccaatcccaccgctcacgcaatatcgggagtaattatccagagaaactgagcgcaagggacggccataatcaaaaggataatactaaatcaaaggagaaggaaagcgagaacgctccgggggacggcaaaggcaataaacacaagaagcacagaaaacgcagaaagggcgaggaatcagagggctttctgaaccccgagctgctcgagacttcacgcaagagtcgcgagccaactggcgtcgaggaaaacaaaactgattcattatttgtgctgcccagtcgcgatgacgctacaccagtacgcgacgagccgatggatgccgagtccattactttcaagtcagtttctgagaaggacaaacgggaacgtgacaaaccaaaggccaaaggagacaagaccaagaggaaaaacgacggatctgcagtgagcaaaaaagagaacattgtaaaacctgccaaggggcctcaggagaaggtggatggggagcgggagcgcagtccgcggtctgaacccccgattaagaaggcgaaagaggagacacctaagaccgacaacacaaaatcgagttcaagctcacagaaggatgagaaaatcacaggcaccccgcgaaaggcccattcaaagtctgcaaaggagcatcaggaaactaaacccgtcaaggaagagaaggtcaaaaaggattacagcaaggacgtgaagagcgagaagcttacaaccaaagaggaaaaggcaaaaaagcctaacgaaaaaaacaagcccctcgataataagggagagaaacggaaacggaagacagaggaaaagggagtcgacaaggatttcgaaagcagttctatgaagatcagcaaacttgaggtgactgagatcgtgaagccttcacccaagcgcaaaatggagccagatactgaaaagatggatcgaacccctgaaaaagataaaatcagcttgagcgctccggcgaagaagattaagcttaacagagaaactggcaaaaagattggatccacagagaatatttccaatacaaaagagcctagcgaaaagctcgaaagcaccagctcaaaagtgaaacaggaaaaagtgaaaggaaaagtgcgcagaaaggttacaggaacagaggggagcagtagtactctggtggattatacatccacctcttctaccggcggcagccctgtgagaaagagtgaagagaagacagatactaagcggaccgtgatcaagactatggaggaatataacaacgataataccgctccggctgaagacgtgatcatcatgattcaggtgccacaatcaaagtgggataaggatgatttcgaatctgaagaggaggacgtgaagagtactcagcctatctcctctgtaggcaagcccgcgtccgtgatcaaaaatgtcagcaccaagccgtctaatatcgtgaagtaccccgagaaagaatctgaaccatccgagaagatccagaaattcactaaggacgtgagtcacgaaattattcaacacgaggtgaaatcctccaaaaacagtgcctcatctgagaaagggaagacaaaagatcgagattactccgttctcgagaaagagaaccctgaaaagagaaagaattcaacccagccagaaaaggaatcgaaccttgaccgcttgaatgagcagggaaattttaagtctctgtcacagtcttcgaaagaggctcggacgtcagacaagcacgacagcacgcgagcgagttctaataaggatttcacccctaatcgggataaaaagaccgattatgacacccgggaatactcctcaagcaagagacgagatgaaaagaacgaacttactaggaggaaggatagtccatccagaaataaggactccgccagtggtcagaagaataagccaagggaggagagggatctgcccaaaaagggaactggggattccaaaaagtccaattcaagtccatccagagaccggaaaccacatgatcataaagccacatatgatacaaagagacccaacgaggagaccaaatctgtggacaaaaacccgtgcaaagatcgcgaaaagcacgtgttggaagcaagaaataacaaggagagcagcgggaataagttactgtatatactcaatcctcccgaaacccaggtcgagaaggaacagattaccggacaaattgataaatctacagttaaaccaaaaccgcagctgagtcactcatccagactctcaagcgatctgacgcgagagactgacgaagctgccttcgagcccgattataacgaaagtgacagcgaatcaaatgtgtctgtgaaggaggaggagagctctggaaatatttcaaaggacttgaaagacaagatcgtcgaaaaagcaaaggagtcattagacactgccgcagtggttcaggtgggcatcagcagaaatcagagccatagttcaccatccgtatccccaagcaggtcccattctccttctggttcccagacaagatctcattcctcatcagcttccagcgccgaatcacaagattccaaaaagaaaaaaaagaaaaaggaaaaaaaaaagcataagaagcataagaaacataagaagcataaaaagcatgccgggacagaagtcgaattggaaaagtcgcaaaaacataagcacaagaagaagaaaagcaagaagaacaaagataaagagaaggagaaagaaaaagacgatcaaaaggtgaagagcgtgacagtttag

SEQ ID NO: 203070 - DNA, 5277 bp, synthetic construct
  misc_feature 1..5277: note = Description of Artificial Sequence: Synthetic coding sequence
  source 1..5277: mol_type = other DNA
atgagctgcgtgcactacaagttcagcagcaagctgaactacgacactgtgacttttgatgggctgcatatctccctgtgcgatcttaaaaagcagatcatgggtcgagaaaagctcaaagccgcggactgtgatctgcagattacaaacgcgcagaccaaggaagagtataccgatgataatgctcttatacccaaaaattcgagcgtgattgtccgcaggattcctatcggtggcgttaagtcaacaagcaagacctacgtgatttctagaacagagccagcaatggccaccaccaaagcaatcgacgactcttccgcgagcatttcgctagctcagctcactaagaccgctaacctggcagaagccaacgcctctgaagaagataagataaaggccatgatgtctcagagcggacacgagtacgatcctattaactatatgaaaaaacccttgggtcctccacctccgtcctatacctgtttccggtgtgggaagcctggacattacatcaagaattgtcctaccaacggcgataaaaattttgagagtggaccacgcataaaaaagtccacaggaatcccccggagcttcatgatggaggtgaaggatccaaatatgaagggagccatgctgactaataccgggaagtatgctatacccactattgatgccgaagcctatgcaattggaaaaaaagagaagccacctttcctgccagaggagcccagctccagtagcgaggaagacgacccaataccagacgagctcttgtgtttgatatgcaaggacatcatgactgacgctgtggtcatcccttgctgtggaaacagctattgcgacgagtgtatccgcacagccctgctggaaagtgacgagcacacctgtccaacatgtcaccagaatgatgtatcccccgatgcccttattgcaaataagtttctccgccaggctgtgaacaattttaagaatgaaactggctacactaagagattacgtaagcaactccccccccccccgcctccaattcccccacctagaccacttattcagcggaatctgcaacctctcatgcggtcgccaatcagccgccaacaggatcctctcatgatcccagtaacaagttcatcaactcacccagctcctagcatcagtagtctcaccagcaatcagtcttcgcttgcacccccagtttctggtaatccctcctccgctcccgcgcctgtacctgacatcacggcaaccgtttcgatctctgtgcacagcgagaaatctgatgggccctttagggactctgacaacaagatcctcccggccgctgcactggcaagcgagcatagcaaaggcacaagctcaatcgcaattacagccctgatggaagaaaaggggtaccaggtgcccgtgctcggtaccccgagcctcctcggccagagcttactacacggtcagctgatccctacaactggcccagtcaggataaacacagctagacctggtggcggtaggcccggatgggaacatagcaataaactcggatatctcgtgtcgcctccccagcagattcggcggggagagcggagttgctaccgcagcattaacaggggcaggcatcacagcgagcgttctcagaggacacagggaccgtccctgcctgccaccccagtttttgtacctgtaccaccgccgccactctatccgcctcctccccacacactccctttacccccaggagttcctcccccacagtttagcccacaatttcctccggggcagccaccaccggctgggtacagcgtgcctcctcccggctttccccctgcgcccgctaacctgtccactccctgggtgtcaagcggtgtgcagactgcgcactcgaacaccattcccactacacaagccccacctctttccagagaagagttttatagggaacaacgccggcttaaggaggagagcaagagtccgtattccgggtcaagctacagccggtccagctatacgtactccaagagccgctctgggtcaaccagatcacggtcctattccaggagcttctctagatcgcattccagatcttatagtcggtcacccccctacccaagaagggggcggggtaaaagccgcaactaccggagtcgctcacgctcgcatggctaccatcggtctagaagccgtagccccccctaccggagatatcattccaggtcccggagtccacaggctttccgtggccaatctcccaacaagaggaatgttcctcagggcgaaactgagcgtgagtatttcaatcgctatagagaagtgcccccaccttacgatatgaaagcatattatggcaggtcggtggactttcgtgacccatttgagaaggaaagataccgggagtgggagcgaaaatacagagagtggtacgagaagtactacaagggatatgcagcaggcgcgcagcctcgcccttccgcgaaccgtgaaaactttagccctgaacgcttcctaccacttaatatacggaatagtccttttactaggggaaggcgcgaggattatgtgggcgggcagtcacatcgctctcggaacattgggtctaattaccccgaaaaactgtccgcacgtgacggccacaatcagaaagataatactaaatcaaaggagaaggaaagtgagaacgcaccgggcgatggaaagggcaataagcacaagaagcaccgaaaacggcgcaagggcgaagagtcagaggggttccttaatccagagttactggagaccagcaggaagtcaagagaacccactggagtggaagagaacaagaccgactctctgttcgttctccctagccgggatgatgcgacccccgtacgcgacgagcctatggacgccgagagcataacgtttaagtcggttagtgagaaagacaagagggaacgagataaacctaaggccaagggggacaagacgaaaaggaagaacgacggcagtgcagtgtctaagaaagaaaacatcgtcaagcccgcaaaagggccacaggagaaggttgatggggagagagagcgcagtccacgatccgagccacccatcaaaaaagccaaagaagaaacgcccaagacagacaatacaaagtcatcttcttcgtcacagaaggacgagaagataaccgggacacctcgcaaggcacattctaaatccgccaaggagcaccaggagacgaagccagtcaaggaggaaaaggtgaaaaaggattactcaaaggacgtgaaaagcgaaaagctaacaacgaaagaggagaaggccaaaaaacctaacgaaaaaaacaagcccctggataataaaggcgaaaaaagaaagagaaaaaccgaagagaagggggttgacaaggattttgaatctagtagtatgaaaattagcaagctggaggttaccgaaattgtgaagccatcgccaaagcgtaagatggagccggatacagagaaaatggaccgaacacccgaaaaagacaaaatcagtttgtctgctcctgcgaaaaaaattaaacttaatcgtgagactggtaaaaaaattgggtccactgaaaatattagcaatacgaaggaaccttctgagaagctggaatctacatcaagtaaagtgaagcaggaaaaggtgaagggtaaggtgcgaagaaaggtcactgggactgaggggtcgagcagtacgctggtggactacacatctactagtagcaccggcggcagtccagtcagaaaaagcgaggagaagacggacaccaaacggactgttataaagaccatggaggagtacaataacgacaatactgcaccagccgaggatgttattattatgatccaagtgcctcagtctaagtgggacaaagacgattttgagagcgaagaagaggatgtaaaaagtacgcagcctatctcatcagtgggaaaaccagcatcggtgattaaaaatgtttctacaaagccatcaaatatcgtgaagtaccctgagaaagagtcagaaccctctgagaagatccagaagttcaccaaggatgtcagccacgagataattcaacatgaagtcaaatcttctaagaattcggcatcaagcgagaagggcaaaacgaaagacagggattattcagtgcttgaaaaggaaaatcctgagaagagaaagaattccacccagcctgaaaaggagtctaacctggatagattaaacgagcaaggaaactttaagtccctctcccaaagctcaaaagaggcccgaacttcagataagcatgattcaacacgggcttctagcaataaggactttacaccgaatcgggataagaagactgactacgatactagggagtatagctcttctaagcgtcgggacgaaaagaatgagctcacgcgtaggaaagacagcccttctcggaacaaagattctgcttcaggccagaagaacaaaccgcgcgaggaaagagatttaccaaaaaaaggtacgggagattcaaagaagagcaacagctcacccagccgggataggaagccccacgaccacaaggccacctacgacacaaagaggccaaacgaagagaccaaaagcgtggacaagaacccctgcaaagatcgagaaaagcacgtgctcgaagcccggaacaataaggagtcgtccggaaataaacttctgtacatcttgaatcctcccgagactcaggtggaaaaagaacaaataaccggccaaattgacaaaagtaccgtcaagccaaagccacagctaagccattccagcagactgagctccgacctaacacgtgagacagatgaagccgccttcgagcccgattataacgagtccgactctgaatcaaacgtgtccgtgaaagaagaggaatccagtggaaatatctcaaaggacctcaaagacaaaatcgtagaaaaggctaaagaatcattggatactgctgccgtggttcaggtagggatcagcaggaatcagagtcacagcagtccctctgtctctccatcacggtcccacagccctagtggttctcagacccggtcccactctagtagtgctagtagcgccgagtcccaggatagcaagaagaaaaagaagaaaaaggagaaaaagaagcacaagaagcacaaaaaacacaaaaagcataaaaagcatgccggtacagaggtggagcttgagaagtcacagaagcacaagcacaagaaaaagaaatccaagaagaacaaggacaaggagaaggaaaaagaaaaggacgatcaaaaggtgaaatcagtgacggtgtag

SEQ ID NO: 203071 - DNA, 2859 bp, synthetic construct
  misc_feature 1..2859: note = Description of Artificial Sequence: Synthetic coding sequence
  source 1..2859: mol_type = other DNA
atgagctgcgtgcactacaagttcagcagcaagctgaactacgacacggtgacattcgatggactgcatatcagcctctgtgatctgaagaagcagataatgggccgcgaaaagcttaaagccgctgactgcgacctacaaattacaaacgcccaaacaaaggaggagtacacagacgataacgcattaattcctaagaattcctccgtcattgtcagacgcattcccataggaggcgtgaaatcaacctctaagacttacgtgatcagtagaacagagccagcgatggccacaacgaaggccattgacgattcctctgccagcatctcactagcccagctgactaaaactgccaacctcgcggaggcaaatgcaagtgaggaggacaaaattaaggcaatgatgtcacagagtggacacgagtacgatccaattaattatatgaagaagcccttaggccccccacccccctcatacacttgcttccggtgcgggaaacctgggcattacattaaaaattgccccactaacggagataagaattttgaaagcgggcctagaatcaagaagtcgaccggcattcctagaagttttatgatggaggtcaaagatccgaatatgaaaggggctatgctgaccaacaccggaaaatatgccattcccacaatcgacgccgaggcctacgcaataggcaaaaaagagaaaccgccatttctgccagaagagccttccagcagttcggaggaagatgaccctatccccgacgaactgctctgtctgatctgcaaggatatcatgacggatgcagtagttataccctgctgcgggaatagctattgtgatgagtgtatcagaaccgccttactggaatccgatgagcacacctgtccaacatgccaccaaaatgatgtgtcccctgatgccttaatagcgaacaaatttcttcgacaggctgtcaataattttaagaatgagacagggtacaccaaacgcctgcgtaaacagctcccaccccctccgcctccgatacccccaccccgccccctgattcagagaaacctgcagccattaatgcggagtccaatctcccgccagcaggaccctctcatgattccggtgacttcaagcagcacccacccagcaccatctatatcctctcttacgtccaatcagtcctccctcgcacctccagtgagtgggaatccatccagcgcacccgccccagtgcctgacatcactgccacagtctcaatctccgtgcacagtgagaagagcgacggccccttccgcaccagcagcaccgggggatcgcccgtgcgtaaatcagaagaaaagaccgatacaaaacggacagtcattaagacaatggaagagtataacaacgacaacaccgctccggctgaggacgtcatcattatgattcaggtgccccaatcaaaatgggataaagatgacttcgagtcagaggaagaggatgttaagagtactcaaccaatcagcagtgtcgggaaacccgcctccgttattaagaacgtgagcactaagccatccaacattgtgaagtatcctgagaaggagtccgagccctctgagaaaatccagaagttcaccaaagacgtgagccacgagatcattcagcatgaggtgaagtcgtcaaagaattccgctagttcagaaaaaggtaagacgaaggatagggactattccgtgcttgaaaaggagaatcccgagaagagaaagaactctacacagcctgaaaaagagtctaacctagacaggctcaacgagcaaggcaacttcaagtctctctcacagagctctaaggaggctcggactagtgataagcatgattctacccgtgccagctctaataaggactttacgccgaaccgcgataaaaagacagactatgacacacgagaatactctagcagcaagagacgggacgagaaaaacgaactgacccgaagaaaggattcccctagccgtaataaagacagtgcgagtggacagaaaaacaagcccagggaagaacgtgacctgcccaagaagggcactggggatagtaaaaagtctaactcgtctccatcgcgagatcgaaaacctcacgaccataaggccacttatgacactaagcgccccaatgaggaaaccaaatctgtcgataaaaatccgtgtaaggaccgggagaagcatgtcctggaggccaggaataacaaggagagctctgggaataagttattgtatattctcaaccctccagaaactcaagtggaaaaggagcagatcacaggccagatcgacaaatcaacagtgaagcccaagcctcagcttagccatagttctcgcctgtcctctgacctcactcgggaaactgacgaagccgcctttgaacccgactacaatgaatctgattccgaatccaatgtttcagtaaaagaagaggagtcgagtggaaacatttcaaaggatctgaaggacaagattgttgagaaggctaaagaatctctcgatacagcggcagtcgtgcaggtgggaatttcgagaaaccagagccattcctcaccaagcgtctcaccaagtcgctcacattccccgagcgggtcgcagaccagatcccactcctcctccgccagctcagccgagtcccaggactctaaaaaaaaaaaaaaaaaaaaagaaaagaagaagcacaaaaagcacaaaaagcataaaaaacacaagaaacacgcagggactgaggtggagctggaaaagtcccaaaagcacaagcataaaaaaaagaagtctaagaaaaataaggacaaagagaaagagaaagagaaggacgatcagaaagtgaaatcggttacagtctag

SEQ ID NO: 203072 - DNA, 357 bp, synthetic construct
  misc_feature 1..357: note = Description of Artificial Sequence: Synthetic coding sequence
  source 1..357: mol_type = other DNA
atgagctgcgtgcactacaagttcagcagcaagctgaactacgacacggtcacattcgatgggctccacattagcttatgtgacttgaaaaagcaaatcatgggccgggaaaaattaaaggccgccgattgcgacctccaaatcactaatgcccagaccaaggaggagtacacagacgataatgcgctgatcccaaagaattcctccgtgattgtgagacgaatcccaattggcggtgtgaaatccacctccaaaacctacgtcatttcaaggaccgagcctgcgatggccaccaccaaggctgtgtgtaaaaacaccatcagtcacttcttctatacactcttgctcccgctgtag

SEQ ID NO: 203073 - DNA, 1410 bp, synthetic construct
  misc_feature 1..1410: note = Description of Artificial Sequence: Synthetic coding sequence
  source 1..1410: mol_type = other DNA
atggccgccgaggccggcgtggtgggcgccggcgccagccccgacggagactggcgggatcaagcctgtggactgctgttgcatgttcacctgagttcccgattgggccgcgcagcgcccgtccggactggccggcacttgcgaactgtcttcgaggacacagtggaggagcgggtcatcaatgaagaatataagatttggaagaaaaataccccattcttatatgaccttgtgatgacccatgcactgcagtggccctccttgaccgtacaatggctgcctgaggttactaagccggagggaaaggactacgctcttcactggcttgtccttggcacacacacaagtgatgagcagaatcacctggtcgtggcacgcgtgcacatcccaaatgacgatgcacaatttgatgcctcccactgcgacagcgataagggggaatttggcgggttcggatccgtaaccgggaaaatcgaatgtgagatcaaaatcaatcatgagggggaagtgaatcgcgcaaggtacatgcctcaaaacccccatatcatcgctactaaaactccatccagcgatgttctggtctttgactacaccaaacacccagccaagcctgacccttcaggggagtgcaatcccgacctgcgactgagaggccaccagaaggagggttacgggctatcttggaattccaacctttccggacatcttctaagtgcttcggacgaccacaccgtttgtctgtgggacattaacgctggaccaaaggaaggcaaaatcgtggacgccaaagccatcttcacgggccattctgccgttgttgaggatgtggcttggcacttgctgcatgagtccctcttcggatcagtggctgatgatcagaaattgatgatatgggacactcggagtaacaccacttcaaaaccatcacatctggtagacgctcacaccgcggaggtaaattgcctatcctttaatccttacagtgaatttatcttagcgaccggcagtgcggataagacggtggccctctgggacctgcgaaacttgaaacttaagctgcacactttcgagtcccacaaggacgaaattttccaggtacactggagtccgcacaatgaaaccattctagccagttccggcaccgataggcggttgaatgtttgggacctgtcaaagattggggaagaacaatctgctgaggatgctgaagacgggcctcccgagctcctgttcattcacggaggacacacggccaaaatttccgatttttcttggaaccccaatgagccttgggtgatttgcagtgtcagcgaggataacattatgcaaatctggcagatggccgaaaatatctacaacgacgaggagtctgatgtcactacaagcgaacttgagggccagggtagctag

SEQ ID NO: 203074 - DNA, 1278 bp, synthetic construct
  misc_feature 1..1278: note = Description of Artificial Sequence: Synthetic coding sequence
  source 1..1278: mol_type = other DNA
atggccagcaaggagatgttcgaggacaccgtggaggagcgggtgattaacgaggagtacaagatctggaagaaaaacactccctttctctatgacctggtgatgacccatgctctgcaatggccctcattgacagttcaatggctccccgaagtcaccaagcctgaagggaaagattacgcgctccattggttagtgctgggaacacacacctccgacgagcagaatcatttggtggtggcccgtgtgcatattcctaatgatgatgcccagttcgatgccagtcattgtgattccgacaagggtgagtttggtgggtttgggtccgtaacagggaagattgagtgcgagatcaagattaaccacgaaggggaggtgaaccgcgctagatatatgccccagaacccacacattatagccacaaaaacccccagtagtgatgttttggtgtttgactatacaaaacacccagccaagccggatcccagtggtgagtgtaacccggacttacgtctgcggggccatcagaaagagggatatggcctttcctggaattccaatctttcagggcacctcctgagtgcatcagacgaccacaccgtttgtctgtgggacattaatgcgggacctaaagagggaaaaattgtggatgccaaggctatcttcaccgggcactcagccgtcgttgaagatgtggcctggcatttactacacgagtccctctttgggagcgtggcagatgatcagaagcttatgatctgggatactcggagcaacactacctctaagcctagtcacctagtcgatgcccacacagcagaagtgaactgtctatcattcaatccttatagcgaatttatccttgcaacaggaagcgccgataagactgttgctctctgggacctacgcaatctgaaactgaagctccatacatttgaatcgcacaaggatgaaatattccaggtccattggtctccccacaatgaaaccatcctagcatcttctggcacggatcggaggttaaacgtgtgggacttgtctaagatcggcgaagaacaatcagcagaggatgcagaggatggacctcctgagttacttttcatacacggaggacacactgccaagatttctgacttctcctggaatcccaatgagccttgggtgatatgttcggtttctgaggataatataatgcaaatttggcagatggctgaaaacatctacaacgatgaggagtccgatgtgacaacatcagaactggagggccagggatcctag

SEQ ID NO: 203075 - DNA, 1251 bp, synthetic construct
  misc_feature 1..1251: note = Description of Artificial Sequence: Synthetic coding sequence
  source 1..1251: mol_type = other DNA
atggccagcaaggagatgttcgaggacaccgtggaggagcgggtgatcaacgaagagtataagatttggaaaaagaacacacccttcctctacgaccttgttatgacccatgccctccagtggccctccctgaccgtccagtggctacccgaagtcacaaaacccgaggggaaggactacgcgctccactggctggtgctgggtacacatacctccgacgagcagaaccacctcgtcgtggcgcgggtgcacatccccaatgacgatgcacagtttgacgcctcccactgtgattccgacaaaggcgggaagatcgagtgcgaaattaagattaaccacgagggcgaggtcaaccgggcgcgctatatgcctcaaaatccccatatcattgccacaaaaactccttcctcagacgtactggtcttcgactatactaaacacccggctaaaccggacccgtctggagaatgtaaccctgatctccgcctgcggggacatcagaaggagggatatggtctgagttggaacagcaatttgagcgggcatttgctgtctgccagcgatgaccacactgtatgcctctgggatatcaatgccggccccaaagaaggtaagatcgtcgacgcaaaggctattttcactgggcactcggccgtggtcgaggacgtggcatggcaccttttgcatgaatccttatttgggtcggtcgccgacgatcagaagctcatgatctgggacactcggtccaacaccacatcgaagcccagccacttggtcgacgcgcacaccgccgaggtcaattgcttaagtttcaatccgtacagtgaattcattctggccacagggtccgcagacaaaaccgtggctctatgggatcttcgcaaccttaagctaaaactccacacctttgaatcacataaggatgagatttttcaagtccactggtctcctcacaacgagacaatcttagcaagcagcgggacagaccggcgcctgaatgtatgggatctctcaaaaatcggtgaggagcagtcagctgaagacgccgaggacgggccacccgaactcctgtttatacatggagggcatacagccaaaatatccgacttctcatggaaccccaatgagccatgggttatctgctctgtgagcgaagacaatatcatgcaaatttggcagatggccgagaatatttataatgacgaggaaagcgatgtgaccacgagcgagttggagggccagggctcttag

SEQ ID NO: 203076 - DNA, 561 bp, synthetic construct
  misc_feature 1..561: note = Description of Artificial Sequence: Synthetic coding sequence
  source 1..561: mol_type = other DNA
atggccagccccagcaaggccgtgatcgtgcccggcaacggcggcggagatgtgactacccatggatggtacggatgggtcaaaaaggaactggagaagatccctggattccagtgcttagcaaagaacatgcccgacccgatcacagcccgcgagtccatatggctgccctttatggagacagagctgcactgtgacgaaaaaactattatcatcggccattcatccggggcaattgccgccatgcgctacgccgagacacaccgcgtctatgcaatagttctggtctctgcctacactagcgaccttggtgatgaaaatgaacgggcatcagggtactttacacgcccctggcaatgggaaaagatcaaagccaattgcccatatatcgtgcaattcgggtcaaccgatgacccattcctgccatggaaggaacaacaggaagtggcggaccggctagaaactaagctgcacaaatttaccgattgtgggcatttccagaatactgagtttcacgagttgattaccgtcgttaagtctctgttgaaggtgcctgcctag

SEQ ID NO: 203077 - DNA, 519 bp, synthetic construct
  misc_feature 1..519: note = Description of Artificial Sequence: Synthetic coding sequence
  source 1..519: mol_type = other DNA
atggccagccccagcaaggccgtgatcgtgcccggcaacggcggcggggacgttacaacccatgggtggtacggatgggtcaaaaaagagctggagaagatccccgggtttcagtgcctggctaaaaacatgcccgaccctataacagcacgcgagagcatctggttgccatttatggaaacagagttgcattgtgacgaaaagaccattataatcggacatagcagtggagctatagctgccatgagatatgcagagacacatagagtgtatgcgattgtgcttgtgagcgcttatacctccgatctgggcgatgaaaatgaacgagcctcaggatacttcaccagaccctggcagtgggaaaagatcaaggctaactgcccatacattgtgcaatttgggtctaccgacgaccccttcctgccgtggaaggaacagcaagaggttgcagactggaagcctaactgcacgaattcgctgactgtggcaacattccgcacccagtccttcatgaactag

SEQ ID NO: 203078 - DNA, 741 bp, synthetic construct
  misc_feature 1..741: note = Description of Artificial Sequence: Synthetic coding sequence
  source 1..741: mol_type = other DNA
atggccgccgccgccatccccgccctgctgctgtgcctgcccctgctgtttttactgttcggctggagccgcgcccgtagagacgacccccactcactttgctatgatatcaccgtcatacctaaatttagacctgggccacgctggtgcgccgtgcaggggcaagtggacgaaaagactttccttcactatgactgcggaaataaaacagtgacgccggtctcgcccctggggaagaagctgaacgtcaccatggcttggaaagcacagaaccctgtgctccgagaggtcgtggacattctgacagagcagctacttgatatccaactcgagaactatactccaaaagaaccacttaccttacaggccagaatgagttgtgagcagaaagcagaagggcactcttctggatcctggcagttctccatcgacggccaaacattccttctgttcgattcagagaagcggatgtggaccaccgtgcaccccggagctcgtaaaatgaaggaaaagtgggaaaatgataaggacgtcgcgatgtctttccactacatttctatgggagactgtataggctggctggaggattttttgatgggcatggactcaacccttgaaccctccgcaggcgccccactcgctatgtctagtggcaccactcagctgagggctaccgcaaccactctcatcctttgctgcctgttaattattttgccatgcttcattcttccaggcatttag

SEQ ID NO: 203079 - DNA, 741 bp, synthetic construct
  misc_feature 1..741: note = Description of Artificial Sequence: Synthetic coding sequence
  source 1..741: mol_type = other DNA
atggccgccgccgccatccccgccctgctgctgtgcctgcccctgctgttccttctgtttggttggagcagggcaagaagggacgatccccacagtctctgctacgacatcacagttatccctaaattcagacctggaccccgctggtgcgcagtccaggggcaagtagacgagaaaacattcctccattatgattgtggaaacaagactgttaccccagtttcccccctcggcaaaaaactgaacgtgacaatggcctggaaagctcagaacccagttcttcgagaggttgtagatattctgaccgagcagttgttagatattcagcttgagaactacacacctaaagagcccttaacattgcaagcaaggatgtcttgcgagcagaaggcagagggccattcttctggtagctggcaattttccatcgacggacagacatttctgctgtttgattccgagaagaggatgtggacaacggtgcacccaggcgctcgaaagatgaaggagaagtgggaaaatgataaggacgtcgcaatgtctttccattatatttccatgggcgattgtattggatggctggaggactttttgatgggtatggacagcactctggagccaagcgctggtgccccactggctatgagctccgggaccacccagctgagagccactgcaaccaccctcattctttgctgtctgctaatcatcctgccttgctttatactgcccggaatctag

SEQ ID NO: 203080 - DNA, 4923 bp, synthetic construct
  misc_feature 1..4923: note = Description of Artificial Sequence: Synthetic coding sequence
  source 1..4923: mol_type = other DNA
atgcagagcttccgggagcggtgcggcttccacggcaagcagcagaactaccagcaaacctctcaggagacttcacggctcgaaaattacagacaaccttcccaggcgggactgtcatgcgacagacagcgtctgttggcaaaggattattacaatccacagccttatcccagctatgaaggaggcgctggcacgccctcaggcacggccgccgctgtggctgctgataagtatcatagagggagtaaagcgctacccacccagcagggactacaaggaagaccagcctttcccggctacggcgtgcaagactcaagcccctacccaggtcgttatgccggagaggagtccctccaggcttggggagcaccccaacctcctcctccgcaacctcagccgcttcccgccggtgtcgcaaaatacgatgagaaccttatgaagaaaacagctgtgccacccagccgccaatatgctgagcaaggagctcaggtcccgttcaggacccactccctgcatgttcagcagccccccccgccacaacaacctctggcctatcccaaactacaaaggcaaaagctgcaaaatgacattgcatcgcccctaccttttccacaaggaactcattttccacagcattcacagagcttcccaacttccagcacatattccagttctgtgcagggcggaggccagggagctcattcgtataaatcctgtacagcgccaaccgcacaaccccatgatcgacccctcacagctagcagctccctggcgcccggacagcgagttcaaaatctgcacgcctatcagtcaggcagactgagctacgatcagcagcagcaacagcaacagcagcagcagcaacagcagcaggctcttcagtcccgccaccatgcgcaggaaacactgcactatcaaaatctggccaaatatcagcactatgggcagcagggacagggctattgccaacccgacgcggccgtacgcactcctgaacagtattaccagaccttctcccccagcagttcacacagtcctgcacgctctgtcggaaggagccccagctactcctccacgccatcacctttgatgccgaatctggagaatttcccatatagccaacaacccttgtcaaccggtgcctttcccgctggaatcactgaccacagtcattttatgcctttgcttaacccttcaccgaccgacgccacatcttcagttgacacccaagccggcaattgcaagcccctccaaaaagacaagctcccagaaaacctgttgagcgatctatctttacagagcttgactgccctgactagccaagtagagaatatttctaacaccgtgcagcaactgctgcttagcaaggctgccgtacctcagaagaagggcgtgaagaatctcgtttctcggactcccgaacagcataaatcacagcattgctcccccgagggatctggctatagtgccgagcccgccggtacacctttgagcgagcctccttcttcgaccccccagtctacccatgccgagccccaagaagccgattacttgtcaggctcggaagacccgttagagaggagcttcctgtactgcaaccaagctagaggttcaccagcccgcgtgaattctaattcaaaagccaagcccgaaagcgtgtctacatgctcagtgacgtcgccagacgacatgtcaaccaaatcagacgatagtttccaaagcctgcatggtagcctgcctctcgacagtttctctaagttcgtggcaggggagcgtgactgtccccgcctgctgctttctgcacttgctcaggaggatctcgcttcagagatcttaggactgcaggaagccataggcgaaaaggcagacaaggcatgggccgaggcaccatccttggtgaaggactccagcaaacctccgttctcactagagaatcacagcgcctgtctggattcagtggcgaagtcagcgtggccccgccctggagaaccggaagctctgccagattctctacagcttgacaaaggaggtaatgccaaggatttttctcctgggctattcgaggacccatccgtggcctttgcgacaccagatcccaagaagacaacagggcccttgagtttcggaacaaaaccaacactcggtgtgcctgcccccgatccaaccaccgccgcattcgactgctttcccgacacaacggccgcatcaagcgctgactccgcaaaccctttcgcatggcccgaggagaatctgggggacgcctgcccacggtgggggttgcatcctggtgaacttacaaagggtctggaacagggtgggaaagccagcgacggcattagcaagggggacacacatgaagcaagtgcctgtctggggtttcaggaagaggacccacctggcgaaaaagttgcgtctcttcctggcgacttcaagcaggaagaagtcggaggcgtgaaagaggaggccggaggccttcttcagtgtccagaagtcgctaaggcagatcggtggttagaagattccagacattgctgcagcactgctgatttcggcgaccttcctctcttaccccctacgtctagaaaggaagacctcgaggcagaggaagagtattcgtctctttgcgagttgctcggcagcccagagcagcggccaggaatgcaggaccccctgtcaccaaaggccccactgatctgcacaaaagaggaggtggaggaggttctggacagcaaggccggatgggggagtccatgtcaccttagtggtgagagcgtaatcttgctggggccaactgttggcaccgaatctaaggtgcagtcttggtttgagagctctctttcccatatgaaaccaggagaggagggcccagacggcgagagggccccaggagactcgacaacaagcgatgcttccctggcacagaagcccaataaacccgccgttcccgaggccccaatcgctaaaaaagaacctgtgccacgaggcaaatctttaaggagtcgaagggttcacagagggcttcccgaggctgaggacagcccctgccgggcaccagtcctgcccaaagatctcctgctgccggaatcatgtacgggtccgccacagggccaaatggagggggcaggtgcaccggggcgaggtgcttctgaaggactccccagaatgtgcacccgttccctgacggccctttccgagccccggacacccggtcctccaggcctgaccaccacaccggctccccctgacaaattggggggaaaacagcgggctgccttcaagtctgggaagagggtcggcaagccctcccctaaggcggccagttctccttcgaaccctgctgcattgccagtggccagcgattcctcgcccatgggctcaaagaccaaggagaccgactccccctcaacccctggcaaggatcaaaggtcaatgatcttgcgaagtaggaccaaaacacaggaaatctttcacagcaagcgccggagacctagcgagggccgtctgccgaactgccgggccactaaaaaactcctagacaacagccatctgcccgcaactttcaaggtctcctctagtccgcagaaggagggccgcgtgtcacagagagcaagagtgcccaaaccaggcgccgggtcaaaactgtcagaccgacccctccacgctctgaaacgcaagtctgcctttatggcccccgttccaactaagaagcgtaacttagtgttaaggagcagatcctcttcttcatccaatgcatctggcaatggtggagacgggaaggaggagagaccggaggggagtcccaccctattcaaaaggatgtcttcccccaagaaggcaaaaccaacaaaaggcaatggagaacctgctaccaaactgcctcctccagagactccagatgcttgcttaaagctggcttctagagccgcttttcagggcgcgatgaaaacaaaagtcttaccccctcggaaaggacggggcctgaaactagaggcaattgtccagaaaattactagccctagtctcaaaaagtttgcttgtaaagccccaggcgcttcgcctggcaaccctctgtctccctcgctgagcgataaagatcgtggtttgaagggagccggcgggtcccccgtcggagtggaagaaggtctcgtgaatgtgggtaccggccagaaacttcccaccagcggggctgatcctctgtgcaggaatccgaccaaccggtcattgaagggtaagctgatgaatagtaagaagctgagcagtaccgattgtttcaaaaccgaggctttcacatcacccgaggccctacagcctggtggcaccgcgcttgcccctaagaaacgctctcgaaagggccgagccggcgcccacggactgtctaagggacccttagaaaagcggccatacctaggtcccgccctcttgttgacacctagagatagagccagcggaacccagggtgcatctgaagataattccggtggtggcgggaaaaagcctaaaatggaagagctcggcctcgctagccaaccgccagaggggaggccatgccagccgcagactagggctcagaagcagcccggtcatactaattacagtagctacagcaagagaaaaagactgacaagagggcgagcgaagaacaccacatcatctccgtgcaagggtagagctaaacgccgaagacagcagcaagtgttgcccctggatcccgccgagcctgagataagactgaaatacatctcttcctgcaaaaggttacgctctgactcacggacacccgcctttagtcctttcgaaccatcactcggcgcccagaatcctagatcagggcagaatgccccacccgctcctgcagacgcccgtcccctttgcacaacccgtgatcgccgggcatatagtgcgagggagcaaggacagcgatag

SEQ ID NO: 203081 - DNA, 5589 bp, synthetic construct
  misc_feature 1..5589: note = Description of Artificial Sequence: Synthetic coding sequence
  source 1..5589: mol_type = other DNA
atgcagagcttccgggagcggtgcggcttccacggcaagcagcagaactaccaacagactagtcaggaaactagtcgtctggagaactacaggcagcctagccaagccgggctctcatgcgatcgccagcggcttctggctaaagactactataacccacagccatacccttcatacgaaggcggagcaggaactccatccggaacagctgcagcagtggcagccgataaataccaccgcggtagtaaagcgctgccaacacagcagggactgcagggacgccccgctttccctgggtatggcgttcaggattctagcccttaccctgggagatatgccggggaggagagtttacaggcttggggcgccccccagcccccccctccacagccccagcctctgccagcgggggtcgctaaatacgatgagaaccttatgaaaaagaccgcagtacccccttcccgccaatacgctgaacagggggcgcaggtgccgttccggactcattcccttcacgtccaacagccacctcctccccaacagcctcttgcctatcccaagctccagaggcagaaactgcagaatgacatcgctagtcctctcccattccctcagggctggtgggctggtcacagctataaatcatgtactgctcctaccgcccagcctcatgataggcctctgaccgcaagctcctcgctagctcctggccagcgcgtccagaacctgcacgcatatcagagcggccggctctcttacgaccagcagcagcaacaacaacaacagcagcagcaacaacagcaggctctgcagagtagacaccatgcccaagagacactgcactatcaaaacctggccaagtaccagcattatggccagcagggacaggggtattgccagcctgatgcagccgtccgcacccctgaacagtactaccaaacgttctctccatccagttcccactcaccagctaggtcagtggggcgttctcccagttacagcagtacaccgtctcctctgatgcctaacctggagaacttcccctatagccaacagcccctgtccaccggcgcttttcccgcgggaattaccgaccatagccactttatgcccctcctgaacccgtcacccaccgatgcaactagttcagtggattctcttactgccttaaccagccaggtggaaaacattagcaacactgtgcagcagctgctcctgagcaaagctgcagttccacagaagaaaggtgtaaagaacctcgtctcccggactcccgagcagcataagagccagcattgttcaccagaaggttctggttatagtgcggagcctgccggcacgcccctaagcgagccaccgtcctccaccccacagtcgacacacgccgaacctcaggaagcagattacttgtcaggatctgaggacccactggagaggtccttcctgtattgcaatcaggccagagggagtccagctcgggtgaattctaatagcaaagctaaaccggagagtgtgtccacctgctcagttacatctcccgatgacatgagcactaaatctgacgattcatttcagagcttacacgggagcctgccactggactccttttccaagtttgttgccggagagagagactgcccccgactgctgctttccgcattggcgcaggaggacttggcatccgaaatccttggactccaagaggccatcggagagaaggccgacaaggcctgggctgaagctccttctctggtgaaggattcttctaagcctcctttctcactggaaaatcattctgcttgccttgacagtgtcgccaagagtgcttggcccaggcctggtgagccggaagctcttcctgactccctgcaattggacaaaggaggaaatgccaaggatttcagccccggcctgttcgaggacccttctgtagcgtttgctacccccgatccgaagaagaccacaggccctctctccttcggtactaaaccaacccttggggttcctgcgcctgaccctactaccgccgcattcgattgtttccctgatactaccgccgcaagctcagccgactcagcaaaccccttcgcttggcctgaggagaatctgggcgatgcatgccctaggtggggcctacatccaggagaactgaccaagggtctggaacagggaggaaaagcttctgacggcatctcgaagggcgatacccatgaagcctcagcctgtcttggttttcaggaagaagacccccccggcgagaaagtggcctccctgcctggggactttaaacaagaggaggtgggcggagtcaaagaggaagctggaggtcttctccaatgtcctgaagttgctaaggctgaccgatggctagaagatagcaggcactgctgctctacggctgacttcggtgatctacccctgttgccccctacatctcggaaggaggacctggaggcggaggaagaatactcttccctgtgtgaactcctaggcagtcctgaacagcggcccggaatgcaagatcccttgtctccgaaagcccctctgatatgcaccaaggaggaagtcgaggaggtgctggatagtaaagctggttggggctctccttgtcatttaagcggggagtccgttattctgctgggccctactgtgggaaccgagtccaaggtacagagctggtttgagagttccctgtcgcatatgaagcccggagaggagggacccgacggtgaaagggcacctggcgatagcaccacatccgacgcatcactcgcccagaaaccaaataagcctgcagtgccagaagccccaattgcaaaaaaggaaccagtgcctagaggcaagtcccttagatctagaagggtccacagaggcctgcccgaagcggaggattccccttgtcgagccccagtattacccaaggacctgcttctgccggagagttgcactggtccaccccagggccagatggaaggcgcgggcgctccaggtaggggtgctagtgagggactgccgagaatgtgcactcgctctctgacggcgctatcggagccccgaacccccggcccaccaggcctaaccaccactcccgcaccgccagacaaactgggcggtaagcagcgcgccgccttcaaatcaggtaaacgggtagggaaaccttccccaaaagcagcgtcgagtccaagtaacccagctgcgctacctgtagcttccgactcttcacctatgggcagtaagacaaaggaaacagatagtccttcgacaccaggtaaagaccagaggtctatgattctgcgctcacgcacaaaaacccaggaaatattccattctaaaagaaggaggccttcagagggaaggttgcctaactgcagggctacgaagaagttgctggacaactcccacctgcccgccactttcaaagtctccagcagcccccagaaggaaggtcgtgtgtcccagagggccagagtgccaaaacccggggctggcagtaaactcagcgaccggcctctgcacgctctgaagcgaaagagcgctttcatggcgcccgttcccacaaagaagcgaaacttggtcctgcggtccagatctagcagcagctcaaacgccagtggcaatgggggggacggtaaggaagagcggccagaggggtcccctacactattcaagcgaatgagcagccctaagaaagcgaaaccaacgaaaggcaatggagagcccgcaacaaagctcccccctcctgagacccctgacgcatgtttgaaattagcttccagagcagccttccagggagctatgaaaactaaggtcctccctcctcggaaggggaggggcctcaagcttgaggccattgtgcaaaagataacatccccaagtcttaagaaattcgcttgtaaagcacccggcgcctcacctgggaaccccctgtctccatcactgtccgataaagataggggcctcaaaggcgctgggggatcaccagtgggggttgaggaagggctggttaacgtgggaaccggtcagaagttacctacatcgggagccgatcctctgtgcagaaaccctactaataggtcattgaaaggcaaactcatgaataaccgggctagtggtacacagggggccagcgaggacaatagcgggggaggcggaaaaaaacctaagatggaagagttgggcctcgccagccagccaccagagggcaggccttgccagccacaaacaagggcacaaaaacagccaggacacacaaattactcaagctactccaagaggaagcgcttgaccagggggcgggcaaaaaatacgacttctagcccctgcaagggccgggcgaagagaagaagacagcagcaagtgctgcctctggacccagcggaaccggagatccgtctcaaatacattagctcatgtaagagacttaggtcggattcccgtacgccagctttttcacccttcgtgagggtggaaaaaagggatgcattcaccactatatgcacagtcgtaaactcacccggtgacgcacctaaaccgcatcgaaagccttcaagcagtgcatccagtagttcttcttcgtcttcgttctctctggatgccgccggagccagcctggccactctgccaggcggctccattctccagcctagaccctctttgcctttgtcctctaccatgcaccttggtcccgttgtctctaaggccctcagtaccagctgtctcgtctgttgcctctgtcaaaatcccgccaattttaaagatctcggtgatctctgcggcccttattatccggaacactgtttgcccaagaagaagcctaaactcaaagagaaggtaaggcccgagggcacctgcgaggaggccagccttccactggaaagaactctcaaagggccagagtgcgccgccgccgccacagccggcaaacccccgaggcctgacgggcccgcagacccagctaagcaaggacccctgcgaacttcggcccgcgggctgagccggcgacttcagtcttgttactgctgcgatgggcgggaggacggtggcgaagaagccgccccagccgacaagggacattgggtccacgaagcttgcgccgtgtggactggaggcgtgtatctggtggctggcaagctctttgggctgcaggaggcaatgaaggtcgccgtcgatatgcatggcggtacggtagccttggcccccggcgacttctctctgcctggactcagattcgcctccttattccaaggcccaagctggtgcgattgtccagtactcgccacctccacaccaagctcctggagcagatgcgtaccagctgcgaaaaagccaggcccccctctgggtgctgccacaaaagatgctagcacacccaccacaactcgcgttcctgctatgcaggtgagagctcggccaggaactggaggacactggagtccatcaaagcagagccgcgggacactccccggccacagctcccccaacccagggccaatctccctgttttcctttcctccactgctgccacagcaatttttttatccttctgtttgcttggacctctgctgggccatgcctggcacctggaaatag

SEQ ID NO: 203082 - DNA, 5721 bp, synthetic construct
  misc_feature 1..5721: note = Description of Artificial Sequence: Synthetic coding sequence
  source 1..5721: mol_type = other DNA
atgcagagcttccgggagcggtgcggcttccacggcaagcagcagaactatcagcagacctcccaagaaacgagcagactggagaactaccgtcagccaagccaggccggattgtcttgcgatcgccagagactgctggcgaaggattattataatcctcagccctatccatcttatgaagggggcgcggggactccaagtgggacagccgcagccgtggccgctgacaagtatcataggggttcgaaggcgctcccgacccaacagggacttcagggcagacccgcttttcctggatatggagtgcaagattcttccccttatccagggcgctacgctggcgaggagtcacttcaggcctggggagccccacaacctccaccccctcagcctcagccattgcctgcgggggtggcaaaatatgacgaaaatctcatgaagaagaccgcggtgccacccagtaggcaatacgccgaacagggcgcccaggttcctttccggacacactcccttcacgtacagcaacctccgcccccgcaacaacccctcgcctacccaaagctgcaacggcagaagctgcagaacgatattgcaagccctttgccctttccacagggcacacatttcccacagcactcccagtcgttccccacgtcttcaacatactcttcaagtgtgcagggtggaggtcaaggggcacactcgtataaaagctgcacggccccgactgcccaacctcacgatcggcctctgacggcctctagtagcctggctccagggcagcgcgtccaaaacctacacgcctatcagagtggccgcctgagctatgatcagcagcagcagcagcagcagcagcagcaacaacaacagcaggcccttcaatcccgacaccacgcccaggagaccctgcattatcagaatcttgccaagtatcagcattatggacagcagggacaggggtattgccagcccgacgctgcagtgagaacgccagaacagtactaccagactttcagtccatcaagcagccacagcccggcaaggagcgtgggacgaagtccaagctacagttccacaccaagcccattgatgccaaatctggagaactttccctattctcaacagcctctatccaccggcgccttccctgccgggataacggaccactctcactttatgcccctgctcaatccttccccaactgacgctactagcagcgtcgacactcaggcggggaattgcaaaccattgcagaaggataaactgcccgaaaacctgctgagcgatctgagcctgcagagccttactgccttgacttcccaagtggaaaatatttcaaacaccgtgcaacaactcctcctgagtaaagcggcagtgccacagaaaaagggcgtcaagaatttggtcagtcgcacgcctgagcagcacaagtctcagcactgcagcccagagggaagtggctactcagccgagcctgcgggcacaccacttagtgaaccgccttcctctaccccacagtctacccacgctgaaccacaggaggcggactacctgagtggttccgaggatccccttgagcggtccttcttgtactgtaaccaagccagagggagccctgctcgtgtgaactcgaactccaaggccaaacctgaatccgtgagtacatgcagtgtgacgtctcccgacgatatgtcaacaaagtcagatgactctttccagtccctgcatggtagcctgcctctagacagtttcagcaaattcgtggctggagagcgcgattgtccaaggttgcttctctcagccttggcgcaggaagatctggccagtgagatccttggactacaagaagcaatcggggaaaaagctgataaggcctgggctgaagccccgtctctcgtaaaagactcctctaaacctcctttctcactggagaaccactcagcgtgtctggatagtgtcgctaagtctgcctggccacgtcccggagagccagaggccctcccagatagtttacagctggataagggcggcaacgccaaagatttttctcctgggttgttcgaggacccatcggtcgcctttgccactcccgaccctaaaaaaactacaggccccttgtcttttgggaccaagcccactctcggtgtacccgccccagatccgaccaccgctgccttcgactgttttccggacaccacggcagcttcatccgcagacagcgcaaatccatttgcgtggcctgaggaaaatctgggtgacgcgtgtccaagatggggtctacatcccggagagctcaccaaggggttggaacaggggggcaaggcatcagacggcatttctaagggagacacccatgaggcttctgcttgcctcgggtttcaagaagaggatccgccaggagagaaggtggccagccttccaggggatttcaaacaggaagaggtcgggggggttaaagaggaagctggcggactgctccaatgccctgaagtcgctaaagccgacagatggttagaggacagcagacactgctgctctactgcagattttggagacctgcctttactccctccaacctctcggaaagaagacctcgaagcagaagaggagtactcaagtttgtgcgaactgctgggctccccagagcagaggccaggaatgcaggatcccttaagccccaaggcgccactcatatgcaccaaggaggaagtggaagaggtgctcgactccaaggcaggttgggggagtccttgtcacttgagtggcgagtccgtgattctcctgggtccaacagttgggacggagagcaaggttcagtcttggtttgaatcatcgctgtcacatatgaagcccggtgaggaggggcctgacggagaaagagcccctggcgattctaccacgagcgacgcgagcttggcgcagaaacccaataaacccgcggttccggaggccccaattgctaagaaagaaccagtaccaaggggaaagtctctgaggagcaggcgcgtgcatagaggcctgccggaggctgaggacagtccatgccgggctccggttcttcccaaagacctgcttctcccagagtcttgtacgggtcctccccagggccagatggagggagccggcgcacccggacggggcgcctccgagggcctaccccggatgtgtacccgatccctgaccgcgctgagcgagccccgtacgcccggtccccctggtctaaccaccacgccggccccaccagataagctgggcggtaaacagagggcggcattcaagtccggaaaaagagttggaaagccctcccctaaggcggcctccagtccatccaatcctgctgctctccctgtggcatctgacagttcacctatgggcagcaagaccaaagagaccgactccccctcgacccccggaaaggaccaacggagcatgattcttcggtcacgaaccaagacacaggaaatcttccattcaaagagaaggcgcccctcagaggggaggcttcctaactgcagagcaactaagaaactcttggacaactctcatcttcccgccacttttaaagtttcctcttcgccccagaaagaaggacgggtgtctcagagggcacgggtgccgaagcccggggccggttccaaacttagcgataggcccctacatgccctaaaacgaaaatccgcatttatggcccccgttcctaccaaaaagagaaatctggtgctgaggtccaggagctccagtagctccaacgcctcagggaacggtggggatgggaaagaggaaaggcccgagggctctcccaccctgttcaagcgcatgtcttcccctaagaaggcgaaacctactaaaggcaacggcgaacctgccaccaaactcccgccgccggagacccctgacgcctgcttgaaactggcctctcgggcagcctttcaaggtgcaatgaagaccaaagtcctgccgcctaggaagggacggggccttaagctggaggcgattgttcagaagatcacctccccaagcctgaagaaattcgcttgcaaggcccccggggcaagcccggggaaccctcttagcccctccctgagtgacaaagatcgaggtcttaaaggtgccggaggatcccctgtaggggtggaagaaggcctggtgaatgtgggaacgggacagaagttgcctactagtggtgccgatccattgtgcaggaatcccacgaaccgctctctcaagggaaaactcatgaattccaagaagctctccagcacggactgtttcaagacagaagccttcacttcacctgaagcgttacaacctggggggaccgccctcgctcctaaaaagagatccagaaaaggtcgagccggggctcacggtcttagtaagggtccattggaaaaacgtccatacctcggccccgccctacttttaactcctcgggatagggcaagtggaactcagggcgcaagcgaagataatagcggtgggggagggaaaaaaccaaaaatggaggaactaggactggcttcccaaccgcctgaggggaggccctgtcaaccgcaaacgcgggcccagaaacagcccggacataccaactatagcagttacagcaagcggaagcgcctcaccaggggacgagctaagaacactacttccagcccttgcaagggtcgggctaaacggcgacgacagcagcaggtgcttccgctggaccctgctgagcctgagataagactcaaatacatttcaagctgcaagcggctgcgatctgactccaggacccccgcgtttagcccattcgtgcgcgtcgagaagcgtgatgctttcaccactatttgcacggttgtgaactccccaggcgacgcaccaaaaccccaccgaaagccctcatctagcgcatcgtcatcgtcctcaagtagcagcttctccctggatgcagccggcgcctcgctcgccaccctaccaggtggatccatcctgcaaccgcggccctcactgcctctgagctctacaatgcacctcggtcccgtggtgagtaaagccctcagcacctcatgtcttgtttgctgtctgtgtcaaaaccccgccaatttcaaagaccttggtgacctgtgcggtccttattatccggagcattgtctgcccaaaaagaaacccaaactgaaggaaaaggtcagaccggaggggacttgcgaagaagcatccctgcctctagagcgaacactgaaggggcccgagtgcgctgccgcagcaacagccggaaaacctccacgccccgacggcccagccgatcccgcgaaacagggacccttacgcacatctgcacgcggtctttctcggcggcttcagtcctgttactgttgcgatggcagggaagatggaggcgaggaagcggccccggccgacaaagggaggaagcatgagtgtagtaaggaagctcccgctgaacctggcggagaagcccaggaacactgggtacacgaagcctgtgcagtgtggaccggtggagtttacctggttgccgggaaactgtttggactgcaagaggcgatgaaggtcgctgtggatatgatgtgttctagttgtcaagaagccggagctacaatcgggtgctgccacaaaggttgtctgcatacctaccattatccctgcgccagcgacgctgggtgtatttttatcgaggagaacttctccttaaaatgccccaagcacaaacggttgccctag

SEQ ID NO: 203083 - DNA, 2901 bp, synthetic construct
  misc_feature 1..2901: note = Description of Artificial Sequence: Synthetic coding sequence
  source 1..2901: mol_type = other DNA
atgcagagcttccgggagcggtgcggcttccacggcaagcagcagaactaccagcagaccagccaggaaaccagtagactcgaaaactatagacaacctagccaagcaggactcagttgcgaccgccagagattgctcgctaaggattattataacccgcagccgtaccccagctatgaggggggcgccggaacgccaagtggcaccgcagctgcagtagccgcagataaataccacagaggcagtaaggcattacctacccaacaggggctccagggccgccctgcatttcctgggtacggagtccaggatagctccccctatccagggagatacgcaggggaagaaagcctccaggcatggggggcacctcagccccctcctccccagccccagcccttgccagccggcgtagcgaagtacgatgaaaaccttatgaaaaagacggcagttcccccatctcggcagtacgccgagcagggcgctcaagtgccattccggacgcattctctccacgtgcagcagcccccccccccgcaacaaccactggcatatcccaaactccaaagacagaagctccaaaatgacatcgcaagcccactgcccttccctcaggggactcacttcccccaacactcccagagctttcctactagctccacttattccagttctgtccagggtgggggacagggcgcccacagttataagtcgtgcactgctcctactgctcagcctcacgaccgccctctgactgccagttcctctttggcacccggtcagcgtgtacagaacttacacgcctaccagagcggcaggttgtcctatgatcagcagcagcagcagcagcagcagcagcagcagcaacagcaggctctacaaagccgtcaccatgcccaggagaccctgcactaccagaacctggctaagtaccaacattacggccaacagggacagggatactgtcaaccggatgcagccgtgaggaccccggagcagtattatcagaccttcagcccatcatcctcacattcccctgctaggtctgtgggccggtcaccatcatattcttctacaccttccccattgatgcccaatttagagaactttccctactcccagcagccactctctaccggggctttcccggccggaatcacagatcattcacattttatgccactcctaaatccatccccgactgacgcaacatctagtgtcgatacccaggccggaaattgcaaaccccttcagaaagacaagcttccagaaaatctgcttagtgatctgtctcttcagagccttaccgcactgacaagccaggttgagaatatatcaaacaccgtccaacagcttctcctctcaaaggcagccgtccctcagaagaaaggggtgaaaaatctggtgtctagaacacccgagcagcataagtctcagcactgtagtcctgaagggagtggctactcagcagaacctgcagggacaccgctaagcgaaccgccttcaagcacccctcaaagtacacacgccgagccccaagaggccgactacttaagcggctctgaggatccattggagaggtctttcctgtactgcaatcaagctagggggtcccctgcacgtgtcaattctaattcgaaggccaaacctgaaagcgtgtcgacatgttccgtcacttcccccgacgatatgtctaccaagtctgacgactcttttcaaagcctacatggctcccttccccttgattcttttagcaaattcgtcgctggggagcgtgattgcccacggcttttgctgtcagctctcgctcaagaagatcttgccagcgagatcctgggactacaggaggctataggggagaaggccgataaggcctgggcagaagcaccatcccttgtcaaagactcttccaagccgccctttagcctcgagaaccactctgcttgtctagacagcgttgctaagtctgcctggcctcggccaggcgagcccgaggctctgccggactccctccaactggacaaaggggggaatgccaaggatttcagccctggtctgtttgaggatccctccgttgccttcgcaacacccgaccccaagaagactaccggccccttgagcttcggtacaaagcctaccctgggcgtccccgccccagatccaaccaccgccgcttttgactgctttccagacacgaccgccgctagttctgccgactccgccaatccgttcgcttggcctgaggaaaatcttggtgacgcttgccctcggtggggcctgcatcccggggaactgacgaagggcctagaacaggggggtaaagctagtgacggaattagcaagggggacactcacgaggccagtgcatgtctcggattccaggaggaggatccgcccggggaaaaggtggcctctctcccaggggactttaaacaggaggaagtaggtggtgtgaaagaagaggctggcggactgcttcagtgtcccgaggtggctaaggcggacaggtggctggaagacagtcgccactgctgctctactgccgatttcggcgatctcccactgctaccccctacttctcggaaggaagacctggaggccgaagaagaatattctagtctttgtgagcttcttggctctcctgagcagcgccccggaatgcaggaccccctctcaccaaaggcccccctcatctgcacaaaagaggaggtcgaggaggtgctggactcaaaagcaggatgggggtctccttgtcacctctccggcgagtctgtgatcctcctcggtcccacagtgggtacagaatctaaggttcaatcgtggtttgaagccagtctatacagcgtttatatttgcatccacatccatatctataatatttatgaggattgcaagtgttag

SEQ ID NO: 203084 - DNA, 2829 bp, synthetic construct
  misc_feature 1..2829: note = Description of Artificial Sequence: Synthetic coding sequence
  source 1..2829: mol_type = other DNA
atgcagagcttccgggagcggtgcggcttccacggcaagcagcagaactaccaacagacctcacaggagacatctcgattggagaattaccggcagcccagtcaggccggcctgagctgcgaccgacagcgccttttggccaaagattattacaatccccagccatacccctcttacgagggtggtgccggcactccctccgggaccgctgcggccgtggccgccgacaagtaccatagaggctctaaggccctccccactcagcagggtctccaaggccgacccgcattccctggttacggcgtgcaagatagctcgccttaccctggccgctacgccggagaagagagtttgcaggcgtggggtgccccgcaaccacctccccctcaacctcaaccactccccgcgggcgtggccaaatacgacgagaatctgatgaaaaagactgccgtgcctccctcacggcagtatgcagaacaaggcgcacaggtaccgttccgaactcattcgttgcacgtccaacagcctccacctccacagcagcctctagcttaccccaaactccagaggcaaaagcttcaaaacgacatcgcctctcccctcccctttcctcagggcacccactttccacaacattcgcaaagcttcccaacaagctccacctatagctcgtcagtccagggcgggggccagggagcccactcctataaatcctgtaccgcgccaaccgcccagccccatgacaggccgttgaccgcatctagttccttagcaccaggtcagagggtccagaatctgcatgcctatcagagtggcaggttgtcatacgaccaacagcagcagcaacagcaacagcaacagcagcagcagcaggcccttcagagcaggcaccacgctcaggagactctgcattaccagaatctcgctaagtatcaacactacgggcagcaaggccagggttactgccagccggacgctgccgtgaggacacccgaacagtactaccaaactttctccccatcttcatcccactcacccgccagatccgtgggcagaagcccctcatacagttcgaccccttcccccttgatgccaaacctggagaatttcccctactctcagcaaccattaagcacgggggcattccctgccggtatcaccgaccactcacatttcatgccactcctcaatcccagccctactgacgctactagttctgtcgacacccaggccggtaactgtaagcccctccaaaaggataagctacccgaaaacctgttatccgacctaagcctacagtcactgacagcactaacttctcaggtggaaaatatttccaacacagtccagcagctgctgttgagcaaagcggccgtccctcagaaaaagggagtgaagaacctggtttcaaggaccccggaacagcacaagtcccagcactgttcccctgagggcagtggttactccgccgaaccagctggcaccccgctcagcgaacctccaagcagcaccccacagtctactcacgcagaaccgcaagaagcagactacctgtctggtagtgaggatcccttggaaagatctttcctgtattgcaatcaggctcgtgggtcccctgctcgagtgaacagtaactccaaggccaaacccgagtctgtttcaacatgctccgtgacttcgccagacgacatgtcaaccaagagtgatgatagttttcagtcacttcatggctctttgccattagactcattttccaaatttgtggcaggggaaagagactgcccccgtctgctgctttccgctctagcccaggaagacttggcttctgaaatcctgggattgcaggaagccatcggggagaaagctgataaggcatgggcggaggctccaagtctcgtcaaagacagctcaaaacctcctttctctctggagaaccacagcgcctgcttggactctgtcgcgaagtccgcttggcctcgcccaggagaacccgaagcactacccgatagcctgcaactcgacaaaggcggcaatgccaaagatttctctcctggcctgtttgaagaccctagcgtggccttcgcaacgcccgatcctaagaagacaactggtccgctttcttttgggaccaagccgacactcggtgtgccagcccccgatcccacaactgccgccttcgattgcttccccgacacaacagccgcctcctcagccgatagtgcaaatccattcgcttggcctgaggagaacctgggcgacgcatgtccacgctggggcctgcatcctggcgagttaacaaaaggccttgagcaagggggtaaggcaagtgacgggatcagtaaaggcgacactcatgaagctagcgcttgtctggggttccaagaagaggatccaccgggcgagaaggtcgccagtcttccaggggatttcaaacaggaagaggttggaggcgtcaaggaagaagccggaggactgctccagtgtcccgaagtggccaaggctgatcggtggctcgaagacagtcgtcactgctgttctacagcagattttggcgatttaccccttttgcccccgaccagccgcaaggaggatctagaagccgaggaagaatacagcagtctgtgcgagttacttggtagccccgagcagcgcccagggatgcaagatccccttagccccaaggcccccctcatatgtacaaaagaggaagttgaagaggttctggacagcaaagcaggatgggggagcccttgtcacctctccggggagtcagttatactgcttggtcccacagtgggtactgaaagcaaggtgcagagttggttttag

SEQ ID NO: 203085 - DNA, 5982 bp, synthetic construct
  misc_feature 1..5982: note = Description of Artificial Sequence: Synthetic coding sequence
  source 1..5982: mol_type = other DNA
atgcagagcttccgggagcggtgcggcttccacggcaagcagcagaactatcagcagacctctcaagagacttcaaggcttgagaattatcgacagccctcccaggctgggctgagctgtgaccgccagcggttgctcgccaaggattattacaatcctcaaccctatccctcgtatgaagggggcgctggtacaccctctggaactgccgcggccgtggcagcagacaaataccaccggggttcaaaagccctgcccacccagcaggggttgcagggccgccctgcattccccggatacggcgtgcaggattcctcaccatatcccggacggtacgcaggcgaggagagtcttcaagcttggggagcaccccagccgccacctcctcagccgcagcccctcccagccggcgtggctaaatacgacgaaaatctcatgaagaagaccgctgttccgccctcacggcagtatgcggaacaaggcgcccaggtgccattcagaactcactccctccacgttcagcagcctcctcctcctcagcaacctctggcatatccgaagctacagaggcaaaagctgcagaacgacatcgccagcccactaccattccctcagggcacccattttcctcagcattcacaaagttttcccacgtccagcacgtatagttcctccgtccagggaggtggccagggggcacacagttacaaaagttgtaccgcaccaaccgcacagccccacgatcggcctctgactgcaagctccagtcttgctcctgggcaaagagtccagaacctacacgcttaccagagcggcagactgtcatacgatcagcagcaacagcagcaacagcagcagcagcagcagcagcaagccctgcaaagcaggcatcatgcccaggaaacccttcattatcaaaacctcgccaagtaccagcattacggccagcaaggacagggctactgtcagcctgatgccgccgtgcgcactcccgagcagtattaccagactttctccccctccagctcacacagtcctgctagatctgttggaagatccccttcttattctagcactcctagccccttgatgccgaacttagagaatttcccctatagccagcagccactcagcaccggggcgttcccagccgggatcaccgatcactcccattttatgcccttgctgaacccaagcccaactgatgcaacaagttctgtggatacgcaggctggcaattgtaaacctctccagaaagataaattgccagagaacctgctcagtgacctcagcctgcaaagcctcaccgctttgacatctcaggttgagaacatctccaacacagtgcagcagctgctgctgagtaaggccgccgtgcctcaaaagaagggggtgaagaacctcgtgtcccgaacccccgagcagcacaagagccaacattgcagtccagaaggctccggctatagcgcagagcctgcgggcacgcctttgtcagagccaccctcttcgacacctcagtcaacgcacgccgaaccccaggaggcagattatctgtccggctctgaagacccattggaacgatcattcttgtattgcaatcaggctaggggctcccccgcccgggtgaattcgaacagtaaggccaaacccgaatctgtctccacatgtagcgtgacttcaccggacgacatgtctactaaatctgatgacagcttccaatccctccatggctcgctgcctctcgactctttctcaaagtttgtggccggggaaagagactgtcctcgtctcctgctatccgctctggcacaggaagacctggcctctgaaatcctcggattgcaggaagccattggtgagaaagctgataaggcctgggcggaagctccctcactagtgaaggattcttcaaagccccctttttctctggaaaaccattccgcctgtctggactccgttgctaaatctgcctggcccaggcccggcgagcctgaggctcttccagacagcctccagttggacaaagggggcaacgctaaggacttctcacccgggctcttcgaagacccttccgtggccttcgcgactcccgatccgaagaagacaactggccctcttagtttcggaactaagccaactttaggcgttcctgcaccagatccaaccactgctgctttcgattgttttccagacactaccgctgctagttccgccgattcagccaatccttttgcctggcctgaggagaatttaggcgacgcatgccctcgatggggtctgcaccctggtgaactgactaagggactggagcagggtgggaaggcgtctgacggtatctctaaaggagacactcacgaggccagcgcatgcctcggttttcaagaagaggaccctcccggtgagaaagttgcctctctaccaggtgactttaaacaggaagaagtcgggggggttaaagaggaggctggcggtctgctgcagtgcccagaagtcgccaaagccgatcgctggcttgaggattctcgtcattgctgttccaccgcggatttcggcgacctacctttgttgccacctacgagtaggaaggaagacctcgaagcagaggaggaatatagtagcctctgcgagctgcttggatctcccgaacagcggcccggtatgcaggatcccctgagccctaaagcccccctgatctgcactaaggaggaggttgaggaagtactcgatagcaaggctggctggggaagcccatgccatctctcgggtgagagtgtcatactgcttggaccaacagtcggaacggaaagcaaagtgcagtcctggtttgaaagcagcttgagccatatgaaacccggcgaggagggacccgacggcgaaagagcacctggggatagcactacttccgatgcaagcttggctcagaaaccaaataaacccgccgtccccgaggctcccatcgctaaaaaagagccggtccctaggggcaaatccctgcgtagtcgccgcgtccatagggggttacccgaggccgaggactccccctgccgcgcacctgtactcccaaaagacctcttactgccggagtcttgtacagggcccccccaaggccagatggagggggcaggcgctcctggccggggggcaagtgagggactgcctaggatgtgcacgaggtccttgacagccctgtcagaaccccggacgccaggaccacctggccttacaaccactcccgcccccccggacaagctgggggggaagcagcgagcagcttttaaatcaggcaagcgcgttggcaagccatccccaaaagccgcctcaagcccgtcgaacccagctgccttaccagtggcctcagattccagccctatggggtctaagaccaaggaaaccgactctccctccaccccaggtaaggatcagcgctctatgatcctgcggagtcgcaccaaaacgcaggagatttttcatagcaaacggaggaggccaagcgaggggaggctgcccaactgtcgggccacaaaaaaactactggataacagtcacctccccgccaccttcaaggtctcttcctctccacaaaaagagggaagagtctctcagcgcgctcgtgtacctaaaccgggcgcagggagtaaactctccgacagacctctccacgccctaaaaagaaaatcagcattcatggcgcccgtgcccactaagaaaaggaacctggtgctgcggagccgcagctcgtccagcagtaacgcatccgggaatggcggggacggcaaagaagaaagacctgaaggctcaccaaccctgttcaagcggatgtcctcaccaaagaaagctaagccaacaaagggaaatggtgagcctgctaccaagctgcctccccctgagaccccggacgcatgcctgaaattggccagcagggctgctttccagggcgctatgaaaacaaaagtcttaccacctcgtaagggccgaggcttaaaactcgaggctatcgtgcagaaaattaccagcccatctttgaagaaatttgcctgtaaggcgccgggcgccagtcccggtaaccccctcagtccgtcactctctgacaaagataggggcctcaagggagcagggggctcgcccgtgggtgttgaagagggccttgttaatgtcggcaccggccagaagctgccaacctcaggggcagatcctctgtgtcgtaatcctaccaataggagcctgaaaggcaaacttatgaactcgaaaaaattgtcaagtacggactgttttaaaaccgaagcgtttaccagtcctgaggctttgcagccagggggcactgccctagctccaaagaagcgtagccgcaaagggagagctggagcccatgggctatccaagggccctctcgagaaaaggccatatctcggcccagctctcctcctaaccccccgggaccgtgctagcggtacgcagggggcgtcagaagacaattcgggcggcggtggtaagaagcctaagatggaagaactgggactggcaagccagcccccggagggccggccctgtcaaccacagacgagagcccagaaacagcctggtcacaccaactacagctcctatagtaagagaaagaggctcacccggggacgggcaaagaacaccacatcctccccctgcaagggcagagccaagaggcggaggcaacagcaagttttgcccttagaccctgccgagcctgaaatcagactcaaatatatctcctcctgtaaacgccttcgaagcgactccaggacccccgctttctctcctttcgtaagggtcgaaaagagagatgccttcacaaccatctgcacagtggttaatagtcctggggatgctccaaagcctcaccgaaagcctagcagttctgctagctctagttccagcagcagcagcttttccctagatgctgccggagcttcactggcaacactccctggcgggagcattctgcagcctaggccttccctgccactgagctcaacgatgcatctgggccctgtggtctctaaggccctgtcgacgagctgtctcgtgtgttgcctgtgtcagaaccctgctaacttcaaagatctcggtgacctttgtgggccatattaccctgagcactgtctgccaaagaaaaagcctaagctgaaagagaaagtacgccctgagggaacgtgcgaagaggcctcgctgccattggagcgcactctgaaggggcctgagtgtgccgccgctgccaccgccgggaagccccctcgacccgatggaccagcagaccccgctaaacagggcccccttcggacctccgctaggggactatcgcgtcgcctgcaatcatgctactgctgcgatggaagggaagatggaggcgaagaagccgcccctgcagataaaggaagaaagcatgagtgtagtaaagaagcgcccgccgaaccggggggagaagcccaggagcattgggtacatgaggcctgtgccgtatggaccggaggtgtatatctcgttgccggcaaactctttggacttcaggaggccatgaaggttgcagtggacatgcatggtggcaccgtcgccctggctcctggggatttttcgctcccagggctgcggttcgctagcctcttccagggcccctcttggtgcgattgcccagtgctggccacttctactcccagctcatggtcaagatgcgtaccagccgccaaaaaacccggtccccccctgggagccgctacaaaagacgcgtcaactccaaccacaacacgggttccggctatgcaggttcgcgcccggcctgggaccggaggccactggtctccgtccaaacagagtcgcggaacattgccaggacactcttcccccaatcccggtcctatatccctgtttagcttccccccccttttgccccaacaattcttttacccgagtgtgtgtcttgacctttgttgggctatgccaggaacgtggaagtag

SEQ ID NO: 203086 - DNA, 2943 bp, synthetic construct
  misc_feature 1..2943: note = Description of Artificial Sequence: Synthetic coding sequence
  source 1..2943: mol_type = other DNA
atgaagagcctgaaggccaagttccggaagagcgacaccaacgagtggaataagaacgacgacaggcttctgcaggccgtcgaaaatggtgatgcggaaaaagtcgcctccttgctgggcaaaaagggagcgagtgccacaaaacatgattcagagggcaaaacagccttccatttagctgctgctaagggtcatgttgaatgcttgagagtgatgattacacatggtgtcgatgtgacagcgcaggacactacgggacactctgccttgcatttggcagctaagaatagtcaccacgagtgcatcaggaaactcctgcagtccaagtgccccgcagaaagcgtggactctagcggcaaaacggcactccactacgcggccgctcaagggtgcctccaagccgtgcaaatcttatgcgaacacaaaagtccaattaacctaaaggacctagatggcaatataccactgcttctggctgtgcagaatggccactctgagatatgtcactttttattggatcacggcgccgacgtcaactccagaaacaagagcggtaggactgccctcatgctggcctgtgagatcggctcatctaacgccgttgaagccttgatcaaaaagggagccgacttgaacctagttgactccctgggatacaacgctttgcattactcgaagcttagtgagaatgccggaattcagagcctgctacttagcaaaatcagtcaggacgcagatctgaaaacccctactaaaccaaaacagcacgatcaggtgtctaagatcagctccgagcgcagcggcacaccaaagaaacggaaagcacccccccctcccatctcacctactcagctgtccgacgtgtccagtcccagatctattaccagtacaccactaagtggcaaggagagtgttttcttcgccgagcctcccttcaaagctgaaatttcttctatcagggaaaataaggaccgcctaagcgacagtactacaggcgccgattctctcctcgacatatcatcagaggcagatcagcaggacctgctgagcctgctccaggccaaggtggcctcactgacgctccacaataaggaacttcaggacaagctgcaggcaaaatcccccaaggaggccgaagctgatttatcttttgacagttatcattccacacaaactgatctggggccatcactcggcaaacctggcgagacatcacccccagactcgaagtcatctcccagtgtactcatccattctctgggcaaatctacgaccgataatgatgtgcgtattcagcagctccaagagattctgcaggatctgcagaaacggttagagagtagtgaggccgaaaggaagcagctgcaagtggagctgcagtcccggagagcggaactggtctgcctaaacaatacagagatttctgaaaactcatcagacctctcccagaagctaaaagagacccagtccaagtatgaagaggccatgaaggaggtactgagcgtacagaagcagatgaaactcgggctggtgtcgcccgaatcaatggacaattatagccactttcatgagctaagggtgaccgaggaagagatcaatgtactcaagcaagatctacagaacgctctcgaggaatctgaaaggaacaaagaaaaggtgcgagagctggaggaaaagcttgtcgagcgtgaaaagggcacggtgatcaaaccccccgtggaggaatatgaagaaatgaaatctagctactgcagcgtcatcgagaatatgaataaggagaaggcattcctcttcgaaaaataccaggaagctcaagaggagattatgaagctcaaggacacactcaagagccagatgacccaggaggcgtctgatgaggcagaagatatgaaagaggcgatgaacagaatgatcgatgaattgaataagcaggtgtccgaattatctcagctgtataaggaggcccaggcggagctagaggattaccgaaagaggaaaagtctggaagatgttaccgccgagtatattcacaaggctgagcacgagaagctcatgcaactcaccaacgtgagcagggccaaagccgaagacgccctcagcgagatgaagtcccaatatagcaaggttctcaatgaactaacgcaattgaaacaacttgtggatgctcagaaagaaaattccgtctcgatcacagagcatttgcaagtcatcacaaccctgcgcaccgcggctaaagaaatggaagagaaaatttcaaatctcaaggaacatctggcctcaaaggaagtggaggtagcaaagctggaaaagcagctgctggaggagaaagctgctatgacagacgcaatggtgccccgaagcagctatgaaaaactccagagctctctggagtccgaggttagcgtgctggcaagtaagcttaaggagtccgtcaaggagaaggagaaagtacattcagaggtcgtgcagattagatcagaagtcagccaagtgaagagagagaaagaaaacatccagacactcctaaaatctaaagaacaggaggtgaacgagctgctgcagaagtttcagcaggctcaggaggagctagctgagatgaagcgctacgcggagtcctcttctaagctcgaggaagacaaggacaaaaagataaatgaaatgagcaaggaggtgaccaaattgaaagaagcactcaattctctctctcagctgtcatacagcaccagttcttcgaaacgtcagtcccagcagctggaggctcttcaacagcaggtcaagcagcttcagaaccagttggccgaatgcaaaaaacagcaccaagaagttatcagcgtgtacaggatgcatttgctgtacgcagtccagggacagatggatgaggatgtccagaaagtgctgaaacagatcctcacgatgtgcaaaaatcagagtcagaaaaagtag

SEQ ID NO: 203087 - DNA, 2922 bp, synthetic construct
  misc_feature 1..2922: note = Description of Artificial Sequence: Synthetic coding sequence
  source 1..2922: mol_type = other DNA
atggtgaagggcaagaccaacgagtggaacaagaacgacgaccggctgctgcaggctgtggagaatggcgatgccgagaaggtggcctccctgctcggtaagaaaggggcaagtgccacgaaacatgatagcgagggaaaaaccgccttccatctggcagccgcaaaaggccatgtggagtgcttgcgggtcatgattacacacggtgttgatgtgacagctcaggacaccactggacacagtgcactgcacttggctgcaaagaacagtcaccacgagtgcatccgcaaactcctacagagtaaatgtccagctgagtctgtcgactcttcgggaaagacggccctccactacgcggctgcccagggatgtctgcaggccgttcaaatcctgtgtgaacacaagagcccaatcaatctcaaagacctggatgggaacattcccttattgctcgctgtgcagaacgggcactccgagatttgtcactttctgctggatcatggtgccgacgtgaatagtcggaacaagtcaggcaggaccgcgctgatgttggcatgcgagatcgggagctccaatgcagttgaggcactcattaaaaagggcgctgacttaaacttagtagatagcctgggatacaacgctctgcactattctaagctttctgaaaatgctggcatacagtccctgctgctgagcaaaatctcacaggatgcagaccttaaaacccccaccaaacctaaacagcacgaccaggtatcgaagatatcctccgagcgttcaggtacccctaaaaagaggaaggcacctccgccaccaatcagccctacacagctctccgatgtttctagccccaggtctatcacatccactcctctctccggtaaagagtccgtcttctttgccgagcccccgttcaaagccgagatcagctctattagggagaataaggaccgcctgagcgactcaaccacaggtgcagatagcctcctggatatcagcagcgaagcagatcagcaagatctactgtcactgctgcaggctaaggttgcttccctcaccttgcacaacaaagaactgcaggacaagcttcaagcaaagtccccaaaagaggccgaagccgatctctccttcgacagctaccactctacacaaacggacctcggtccttccctggggaagccaggcgaaacttccccccctgatagcaaatcgtctcccagtgtgctgatacactctctggggaaatccaccaccgataatgacgtgcggattcagcagctgcaggaaatattacaggatctccagaagcgactagaaagcagcgaagccgagcgtaagcagctgcaagtcgagctgcagagcagaagagcagagcttgtctgtctgaacaacaccgaaattagtgagaactcatcagacctgagccaaaaactgaaagagacacaaagcaagtatgaggaggctatgaaggaggtgctctctgtccagaagcagatgaaactcgggcttgtatcgcctgagagcatggacaattactctcatttccatgaactccgggtaaccgaagaggaaatcaacgtgctcaaacaggatctccagaacgccttagaagagtcggaaagaaacaaggaaaaagtccgagagttggaggagaagctggtggaaagggagaagggcacagtgattaaaccccccgtcgaagaatacgaggaaatgaaatcctcttactgttctgtaatcgaaaacatgaataaagaaaaagcctttctgttcgagaaataccaagaagcccaagaggagatcatgaagctcaaggacactcttaagagccagatgactcaagaagctagcgatgaagctgaggatatgaaagaagctatgaacagaatgatcgacgaactgaataaacaggtgtccgagctgtcccagctctataaggaggcccaggcagaactggaggactataggaagaggaagtcactagaagatgtgacggctgagtatatccataaagccgaacacgagaaacttatgcaactgaccaatgtcagccgagctaaagcagaagacgccctgtctgaaatgaagagccaatactcaaaggttttgaacgaattgacccagctcaagcagctcgtcgacgcccagaaggagaattctgtgtctattaccgagcacttgcaggtgatcacaacactacgaaccgctgcaaaagaaatggaggagaaaatcagcaacctgaaagagcacttagcgtccaaagaggtggaagtggccaaactggaaaaacagctgctagaggagaaggcagctatgaccgacgccatggtacccagatcaagctatgaaaagctgcaatccagtttggaatctgaggtatccgtcttagcgtccaaactgaaagagagcgtgaaagagaaagaaaaagttcatagtgaggtggtccagatacgcagtgaagtctcccaggtgaagcgggaaaaggagaatatccagactctcctcaaaagcaaggagcaggaagtgaatgaactgctccagaagtttcaacaggcccaggaggaactggccgagatgaagagatatgccgaaagctcaagtaaacttgaggaagacaaggataagaagatcaatgaaatgagcaaggaggttacaaagcttaaggaagctctcaactcgctctcccaactgagctatagcacaagtagtagtaagcgacagtctcaacagttagaggcactgcagcagcaagtgaagcaactgcagaatcagctggccgagtgtaaaaagcagcaccaggaggtgatcagcgtttataggatgcatttgctctatgcggtgcagggccagatggacgaggatgtccagaaagtgcttaagcagattctgactatgtgcaagaatcagtcccagaagaagtag

SEQ ID NO: 203088 - DNA, 2943 bp, synthetic construct
  misc_feature 1..2943: note = Description of Artificial Sequence: Synthetic coding sequence
  source 1..2943: mol_type = other DNA
atgaagagcctgaaggccaagttccggaagagcgacaccaacgagtggaacaagaatgacgatagactgctgcaggctgtagagaacggcgacgcagagaaagtggcctccctgctaggaaagaagggcgcatcagccaccaagcacgattctgaaggcaagactgcctttcatctggcggcagcgaaaggacatgtggagtgcctgagagtcatgatcacgcacggagtggacgtgaccgcacaggataccacaggtcattcagctctccacttggcagctaaaaattcccaccacgagtgtattcgaaaattactgcagtctaagtgcccagctgaatctgtggactcctccggtaagacggccctacactacgccgctgcccaggggtgcctgcaggcagtacagattctgtgtgaacacaagagccctattaacctcaaagacttggatggcaacatcccactgctgttggcggtgcagaacgggcatagtgaaatttgccattttcttcttgaccacggagctgatgtcaattcaagaaataagtccggaagaactgcactcatgctagcttgtgaaataggcagttctaacgcagtggaagccctgataaagaaaggggcagatctgaatttagtcgattcactaggatataatgctcttcactactccaagttgagtgagaacgcaggtattcagagccttctcctaagcaaaatctcacaggatgccgacctgaaaactccaacaaagcccaaacagcacgatcaagtgtctaaaattagttctgagagaagcggaacccccaagaaaaggaaagcccccccaccccccatcagtcccacacagctttcagatgtttcctctccccggtctataaccagtactcccctatcaggcaaagagtccgtgttctttgcagagcctccattcaaagcagagatctcgagtattcgcgaaaataaagaccgtctgtcagatagcacaactggcgccgatagccttctggacatatcctccgaagcagatcagcaggatctcctttccctgctgcaagctaaagttgcctctctcactctccataacaaggagctgcaggataaattacaggcaaagtctccaaaggaagccgaggccgacctgagtttcgactcttaccatagtacccaaaccgatcttgggccgtctctagggaagcccggtgagacgagtccaccagattctaagagcagcccctcagtacttattcactcgcttggtaagagcacgactgataacgatgtccgaattcagcaactgcaggagattttgcaagatcttcagaaacggctggaaagtagcgaagccgagcgtaaacagctacaagttgagctgcagtcccgcagagccgaattggtgtgtttgaacaacacagaaattagcgagaatagttctgatttatcccagaaactaaaggaaacacaaagtaaatatgaggaggctatgaaggaggtactatcggtgcagaaacagatgaaacttggcctggtgtcccctgagtctatggataattacagtcattttcacgagctgcgtgtcactgaagaggagatcaacgtgctaaagcaggatcttcagaatgccctcgaggaatccgaaaggaacaaagaaaaagtgagggagctcgaggaaaaactggtggagagggaaaagggtactgtgatcaaaccgccagtggaggagtacgaagagatgaaaagctcgtattgctcagtgattgaaaatatgaataaagaaaaagcatttctgttcgagaaatatcaagaggcccaagaagagatcatgaagctgaaagacactttgaagtctcagatgactcaagaagctagcgatgaagcggaggacatgaaagaggccatgaaccgtatgattgacgaacttaataagcaagtgtcagaactgagtcagctgtataaagaggctcaggcggaattggaagactatcggaagcggaagtcattggaggatgtgaccgccgagtacattcacaaggcagagcacgaaaaactgatgcagctaacaaacgttagccgagccaaggctgaggatgccttatcagagatgaagtcccagtattccaaagtgctcaacgagttaacccagctgaaacaattagttgatgctcagaaagagaactccgtgagcatcacggaacatctacaggtaattacaacccttcggaccgcggctaaggaaatggaagagaaaatttccaatttgaaggaacatctcgcaagtaaagaagtggaggtggcgaaattagagaagcagcttttagaggagaaagctgccatgactgatgccatggtacctcgaagcagttacgagaagctccagagctccttagagagcgaggtttccgtgctggcctccaaactgaaggagtctgtcaaggagaaggagaaggtacacagtgaggtggtgcagatcaggagcgaggtcagtcaagtgaagcgagagaaggaaaacatccagaccctgctgaagtccaaagagcaggaagtaaacgaactgctgcagaaattccagcaggcacaggaggagttagccgagatgaaaagatatgcggagtccagctctaagcttgaggaggacaaagacaaaaaaataaacgagatgtctaaggaagtaacaaagctgaaagaggcattaaatagtcttagccagttgtcctactccacaagcagctctaaacgtcaatcccagcaactggaggcactgcaacagcaggtgaaacagctgcaaaaccagctcgccgagtgcaagaagcagcaccaagaggtaatctcagtgtatagaatgcatttactctacgcggtccaaggacagatggacgaggatgtgcagaaagtccttaagcagattttgaccatgtgtaaaaatcagagccagaagaaatag

SEQ ID NO: 203089 - DNA, 2943 bp, synthetic construct
  misc_feature 1..2943: note = Description of Artificial Sequence: Synthetic coding sequence
  source 1..2943: mol_type = other DNA
atgaagagcctgaaggccaagttccggaagagcgacaccaacgagtggaataaaaatgacgaccgtctgttgcaggccgtggaaaacggcgacgccgaaaaagtggctagcctcctggggaaaaagggcgccagcgctaccaagcacgatagcgagggaaaaaccgccttccacctcgctgcagctaagggacacgtggaatgtctacgagtgatgatcacccacggagtggacgtgactgctcaagacacgacaggacacagtgcacttcatctggctgccaaaaactcgcatcacgagtgcatacggaagctcttgcagtctaagtgccctgccgagagcgtcgattcaagtggaaaaactgcattgcactatgcggctgcacaaggttgcctacaggcagtgcaaatcctttgtgagcataagtcccctatcaacctgaaggatttggatggaaacatacctctccttctggctgttcaaaacgggcatagcgaaatctgccattttttgctggaccatggagcggacgtgaactctcgaaacaaaagtggacgcaccgccctgatgctggcttgtgaaatcggcagctccaatgcagtggaagccctgattaagaagggtgcggatctaaatctcgtggattcactaggatacaatgcactccactattctaagctgagcgagaacgcaggtattcagagcctgctgctctcaaaaatcagtcaggatgctgacttaaagaccccaaccaaaccaaagcagcatgaccaagtatcgaagatctcatcggaacgctccggaacacccaagaaacgcaaagctcctccaccccctatttcccctacacagcttagcgatgtgtcatctccacggagtattacaagcaccccactgtccggtaaagagtcagtcttctttgccgagccacccttcaaggccgagatcagtagtattagagagaacaaagaccgtctttcagactctactacaggcgcagattcactgctggacatctccagcgaggcggaccaacaggatcttctgagtctgctccaagcaaaggtcgctagccttaccttacataataaggagctgcaggacaaactgcaagcaaaaagtcctaaagaagcggaggctgatcttagcttcgactcatatcactcgactcagaccgacctcgggccctccctcggcaaaccgggagaaacctcgcctcccgatagcaaatctagcccttcagtactcatccactccctgggcaaatccacaacggacaacgacgtgaggatccagcagctgcaggagatactgcaggacctgcagaagcgcctagagtcatcagaagcagagcggaaacagcttcaggtggagctgcagtcacgccgtgccgaattggtgtgcctcaacaataccgagataagtgaaaactcttctgacctgagccagaagctgaaagagacgcagtcaaagtatgaggaggcaatgaaagaggtgctgtccgttcagaaacagatgaagctcgggttagtcagtcccgagtctatggataattacagccacttccacgaactccgtgtaaccgaggaggagatcaatgttctcaaacaggatctgcagaatgctctggaagagtctgaacggaataaggagaaagtgagggagttggaggagaagctggtggaacgagaaaaggggacggtcatcaagcctcccgtggaggaatatgaggaaatgaaatcatcctactgttccgtgatagaaaacatgaataaagaaaaagcattcctgttcgagaagtaccaggaggctcaggaggagataatgaagttgaaagatacattgaagtcacagatgacacaggaggcctcagatgaagcagaggatatgaaggaggccatgaatagaatgatcgacgagctgaacaagcaggttagcgaactgtcccagctttataaagaagcccaggcagaattggaggattaccgcaaaaggaagagcctggaagacgtcaccgccgagtatattcacaaagctgagcacgagaaactgatgcagctcacaaatgtgagcagagccaaagcagaggatgcactttctgaaatgaagagccaatactctaaagttctgaacgaattgactcagttaaaacagctagtggatgctcaaaaggagaatagcgtctcaattaccgagcatcttcaggtaattaccacactgagaacagcagccaaagagatggaagagaagataagtaacctcaaggaacatcttgcatctaaggaagtcgaggtcgctaaactggagaaacagttgctagaagagaaggccgccatgacagatgccatggttcctaggagttcatacgaaaagctgcaatctagcttggagagcgaggtcagtgtcctggcctcgaaactgaaggaatcagtcaaggaaaaagagaaagttcacagcgaagtggtgcagattagaagtgaagtctcccaggtaaagcgggagaaggaaaacattcagacattgctgaagtcaaaagagcaggaagttaacgaactcttgcagaaatttcagcaagctcaggaagaattagctgaaatgaaacggtatgctgaaagcagctctaagctcgaggaggacaaagataaaaaaatcaatgaaatgtccaaagaggtgaccaagttaaaagaagcactgaatagcctgtcacagctttcctacagcaccagcagttccaaacgacaatcccagcagttggaagcgctgcagcagcaggtgaaacagctccaaaatcagttagcagaatgtaagaagcagcatcaggaggtcatttccgtttatcgcatgcatcttctgtatgccgttcagggacagatggacgaagacgtacagaaggtgctaaagcagatcttaaccatgtgtaagaatcagagtcagaaaaagtag

SEQ ID NO: 203090 - DNA, 345 bp, synthetic construct
  misc_feature 1..345: note = Description of Artificial Sequence: Synthetic coding sequence
  source 1..345: mol_type = other DNA
atgaagagcctgaaggccaagttccggaagagcgacaccaacgagtggaacaaaaacgatgaccgtttactccaagccgttgaaaatggagatgctgagaaggtggcatcgttgctcggaaagaagggtgccagcgcaacaaagcacgattccgaaggcaagacagcattccatttggctgcagcaaagggccacgtcgagtgtttgcgcgtcatgatcactcacggtgttgatgtcactgcccaagacacaacagggcactcagcactccatctggccgcaaagaattctcatcacgaatgcatacgcaagctgttgcagagcaaatgtcctgcagagtcctag

SEQ ID NO: 203091 - DNA, 2919 bp, synthetic construct
  misc_feature 1..2919: note = Description of Artificial Sequence: Synthetic coding sequence
  source 1..2919: mol_type = other DNA
atggaggccaagaccaacgagtggaacaagaacgacgaccggctgcttcaggccgtcgaaaacggggacgcagagaaggtggcttcgctcctcgggaagaaaggtgccagcgctactaaacacgatagcgagggaaagaccgcttttcatctggccgccgctaaggggcatgttgagtgcctcagggtgatgattacacacggagttgatgtcaccgcgcaggataccacaggtcattccgccttgcatttggctgccaagaattcgcaccacgagtgcatccgaaaattgcttcagagcaagtgccccgccgagtctgttgacagctcgggcaaaaccgcattgcattatgcagccgctcagggttgtctgcaggcagtgcagatcctctgcgaacacaaatctccgatcaacttaaaagatctggacggcaacataccgctgctgctggccgtgcagaacggccattcagagatctgtcatttcctcttggaccatggcgctgacgttaacagtcggaataaatctggtaggacagcattgatgctggcctgcgagatcgggtctagcaacgccgtggaagccttgattaagaaaggggcagacctgaacctcgttgatagtttaggatataatgccctgcactattctaagctgagtgagaatgcgggcatccagagcctgctcctcagcaagatctcacaggacgccgacctgaagacgccaaccaaacccaaacaacacgatcaagtgtcaaagatctcttctgagagaagcggcactccgaagaagagaaaagcgcctccacctcctatctcacctacccagttgtccgacgttagttctcctagatctattacatccaccccattgtccggaaaggagtccgtgttcttcgccgaacctccctttaaagccgaaatatcatctatcagggaaaacaaggatagactctccgacagcaccaccggtgctgactccctgctcgatatttcgagcgaggccgatcagcaggacctcctgtctctcctccaggcaaaggttgccagcctgactctccacaacaaagaactccaggataagctgcaggcgaagagccctaaggaagctgaggccgacctgtcgttcgactcatatcattccacacagacagaccttggcccttctctggggaagccgggggagacatcgccccctgacagcaagagtagtccatcagttttaatccattctctgggaaaaagtacaaccgataacgatgtgagaatccagcagctgcaagaaatccttcaggatttacagaagcggctggagagcagcgaggcagagcgcaaacagttgcaggtggagctgcaatcaaggcgagctgagcttgtgtgtctcaacaatacagagatctctgaaaacagcagtgacttaagccagaaactgaaagaaactcagtctaagtatgaggaagccatgaaagaggtgttgtcagtccagaagcaaatgaagcttggccttgtatccccggagtcaatggacaactactctcatttccacgagctgagagtcacagaggaagagattaacgttttaaagcaggacttgcagaacgcccttgaagaatctgaaagaaacaaggaaaaggtgcgggagttggaggagaaactggttgaacgtgaaaagggtactgtaatcaagcctccagtggaggagtacgaggagatgaaatcttcctactgcagtgtgattgagaatatgaataaagaaaaggcctttctgttcgaaaaataccaagaggcccaagaggagatcatgaagctgaaagatactcttaagtcacaaatgacacaggaagctagcgatgaggctgaagacatgaaagaggctatgaatagaatgatagacgagctcaataagcaggttagcgaattgtctcagctgtacaaggaggcccaggccgaactcgaggattataggaaaaggaagtcactggaggatgtgaccgccgagtacatccacaaagctgagcacgagaaactgatgcagttaacaaacgtctcccgggccaaagccgaagacgcactctcagagatgaagtcacagtattctaaggttctcaacgagttaacacaactcaagcagctggtcgatgctcaaaaggagaactcagtgtccatcacagaacatcttcaggttatcaccacattgcggacagccgcaaaagaaatggaagagaagataagcaatctaaaggaacatctggcgagcaaagaagtagaagttgccaaacttgaaaagcagttgctggaggaaaaagccgctatgactgacgcgatggtgccccgctcttcctacgagaaacttcagtcaagtctcgaaagcgaggtatcagtgctcgcgagtaagttgaaagagtctgtgaaggaaaaagaaaaggttcacagcgaagtggttcagatcagatccgaggtatcgcaggtcaaacgcgaaaaggagaacattcagactctgctaaagtctaaagaacaggaggtgaacgaactgcttcagaagtttcaacaggcacaggaggaacttgcggagatgaagcggtatgctgaatctagttccaaattggaagaggacaaggataaaaagatcaacgagatgagtaaagaagtgacgaaactgaaggaggcccttaattcgctgagccagctgtcatacagcactagcagcagcaagcgacagtcccagcaactggaagcactacagcaacaggtgaaacaattgcagaaccaacttgctgaatgcaaaaaacagcaccaggaggtcatctctgtatatcgaatgcacctgttgtatgctgtccagggccagatggacgaagatgttcagaaggttctgaaacaaatcctcacgatgtgcaaaaaccaatctcagaaaaagtag

SEQ ID NO: 203092 - DNA, 378 bp, synthetic construct
  misc_feature 1..378: note = Description of Artificial Sequence: Synthetic coding sequence
  source 1..378: mol_type = other DNA
atgaagagcctgaaggccaagttccggaagagcgacaccaacgagtggaacaaaaatgacgacagacttcttcaggccgtggagaatggagacgctgagaaggtggcatccctgttaggaaaaaagggcgcttccgcaactaaacatgactccgagggtaagaccgcttttcatctggccgctgccaagggacacgttgaatgcctgcgcgttatgatcacacacggagtggacgtcaccgcccaggacacaaccggacatagcgccttacatctggcggctaaaaacagtcaccacgaatgtattcggaagctgctgcaaagcaagtgcccggctgaaagcgtggactcaagcggcaaaacagctctgcactactag

SEQ ID NO: 203093 - DNA, 324 bp, synthetic construct
  misc_feature 1..324: note = Description of Artificial Sequence: Synthetic coding sequence
  source 1..324: mol_type = other DNA
atgaagagcctgaaggccaagttccggaagagcgacaccaacgagtggaacaagaatgacgacaggctcctccaagccgtcgagaatggagatgcagaaaaggtcgcgagtctgctaggcaagaagggggcaagcgcaacaaaacacgattccgaagggaagacagctttccatcttgccgccgctaagggtcatgtagaatgtctcagagtaatgatcactcatggagtggacgtgactgcacaagacaccacaggccattcagccctgcatctggccgcgaagaacagccaccacgagtgcatcagaaaactgctacagtag

SEQ ID NO: 203094 - DNA, 453 bp, synthetic construct
  misc_feature 1..453: note = Description of Artificial Sequence: Synthetic coding sequence
  source 1..453: mol_type = other DNA
atgaagagcctgaaggccaagttccggaagagcgacaccaacgagtggaacaagaatgatgatcggctgctccaagccgtggaaaacggggacgcggagaaggtggccagcctgcttggtaagaagggggcctccgctactaaacacgattctgagggcaagaccgccttccacctcgccgcggctaaggggcacgtggaatgcctccgtgtgatgattacacatggagtggacgtgacagcacaggatacaaccggacatagtgcattgcacttggctgctaagaactcccatcatgagtgcattcgaaagttacttcagagcaaatgccccgccgagtcggtggacagcagcggaaagacggcactgcactacgccgccgcacagggatgcctgcaggccgttcaaatcctgtgtgagcacaagagtccaatcaatttgaaggacctctag

SEQ ID NO: 203095 - DNA, 381 bp, synthetic construct
  misc_feature 1..381: note = Description of Artificial Sequence: Synthetic coding sequence
  source 1..381: mol_type = other DNA
atgaagagcctgaaggccaagttccggaagagcgacaccaacgagtggaacaaaaacgatgacaggctccttcaggctgtggagaacggcgatgccgaaaaagtagcaagtcttctgggaaagaaaggtgcctcggccaccaaacacgactcagagggaaaaacagccttccacctggccgccgccaagggtcatgtggaatgcttgcgcgttatgatcactcatggggtcgacgtaacggcccaggatacaacagggcattccgctctccatcttgccgctaagaacagccaccacgagtgcatcaggaagctcctgcagtctaagtgcccggcagagtctgtggatagttcaggtaagaccgcactccattacgcatag

SEQ ID NO: 203096 - DNA, 315 bp, synthetic construct
  misc_feature 1..315: note = Description of Artificial Sequence: Synthetic coding sequence
  source 1..315: mol_type = other DNA
atgaagagcctgaaggccaagttccggaagagcgacaccaacgagtggaataaaaacgatgatagactcctgcaagccgttgagaatggcgacgctgaaaaggtggcctcactgctggggaaaaagggtgcatcagcgacaaaacacgattccgaaggcaaaaccgctttccatcttgccgctgccaagggacacgtggaatgtctccgggtgatgattactcatggagtagatgttaccgcacaagacacaacaggccattccgccctccacctggccgcaaagaactctcatcacgagtgcattcgaaagtag

SEQ ID NO: 203097 - DNA, 420 bp, synthetic construct
  misc_feature 1..420: note = Description of Artificial Sequence: Synthetic coding sequence
  source 1..420: mol_type = other DNA
atgaagagcctgaaggccaagttccggaagagcgacaccaacgagtggaacaaaaatgacgacaggctgttgcaggctgtggaaaatggagatgcggaaaaagtggccagtctactgggaaagaagggtgcatctgctacaaagcacgattccgaggggaagacggcattccatcttgctgccgctaagggacatgttgagtgcttgcgcgtgatgattacacatggggtggacgtgaccgctcaggatacaaccggtcacagcgcacttcaccttgccgctaaaaactcacatcacgaatgcatccgcaagttactgcagagtaagtgtccagcagaaagcgtcgacagtagcggcaagactgcattacactatgctgcagcccaggggtgcctgcaagctgttcagatcctgtgttag

SEQ ID NO: 203098 - DNA, 381 bp, synthetic construct
  misc_feature 1..381: note = Description of Artificial Sequence: Synthetic coding sequence
  source 1..381: mol_type = other DNA
atgaagagcctgaaggccaagttccggaagagcgacaccaacgagtggaacaaaaatgacgatcgcctgttacaggccgtggagaacggagacgccgaaaaagtggcaagtttactcggaaagaaaggcgcaagcgctaccaagcacgatagcgaggggaagaccgctttccacctagcagccgcaaaaggccacgtggagtgtttgcgcgtaatgattacccacggggtcgacgtgaccgcgcaggacaccaccggtcatagcgctctgcatctggccgccaaaaattcacatcatgagtgcattcgaaagctgcttcagtctaagtgcccagcagaatccgtcgactcatccggtaagactgcgctccattatgcctag

SEQ ID NO: 203099 - DNA, 2952 bp, synthetic construct
  misc_feature 1..2952: note = Description of Artificial Sequence: Synthetic coding sequence
  source 1..2952: mol_type = other DNA
atgcagcccacctacctgccctggctgagcgccaaggagaagaagactaatgaatggaataaaaatgacgatagattactgcaagccgtggaaaatggcgatgccgagaaggtcgcctcactcctcggcaagaaaggagctagcgccactaagcatgactctgaaggtaaaactgcatttcacttggcggccgctaagggtcatgtggagtgcttacgagtcatgatcacacacggagtggacgtcactgcccaggacaccactggacatagcgccttgcacctggctgccaagaactcccaccatgagtgcattcggaaactgcttcaatccaagtgccctgcagaaagcgtggattcctcgggaaagacagccctgcattacgctgcggcacagggatgcttgcaggccgtgcaaatactgtgcgagcataaatccccaattaatctgaaagatctggacggtaatattcccttgctgcttgcagtccaaaacggtcacagtgagatttgtcattttctgctggaccacggcgccgatgtgaacagccgcaacaaatccggcaggacggctctcatgttggcttgtgagatcgggtcttccaatgcagttgaagcccttatcaaaaaaggagccgatcttaatctggttgattctctcggctataatgcactccattactcgaagttgagcgagaacgctggaattcagtccctcctgctcagcaaaatcagtcaagacgctgatctaaagactcctaccaagccaaagcaacacgaccaggtgagcaaaatttccagtgagcggagtggcactccgaagaaacgcaaggcccctcccccaccaatttcgcctactcagcttagcgatgttagtagtccaagatcaatcacaagcacccctctgtccggcaaggagtctgtgttcttcgctgagccccccttcaaggccgaaattagctctatcagggagaataaagacaggctgtctgattcaaccacgggggccgactcactgctggatatctcatctgaagccgatcagcaggacctgcttagcctgctgcaggctaaggtggcgagtctcacgttgcataacaaagagttgcaagacaagctgcaggctaaatctccaaaagaggccgaggctgaccttagtttcgacagttaccacagtacacagactgacctgggccctagtctggggaagcctggagagacttctccaccagattcaaagagtagtccctccgttctgatccacagtctgggcaaatctactactgataatgatgtgaggatacagcagttgcaggaaatcttacaggatctccagaaaagattggaatccagcgaagcagagaggaaacaattgcaggttgaactacaatctaggagagccgagcttgtgtgtctgaataacacagagatcagtgaaaattcttcggatttgagtcagaaactcaaggagacacaatctaaatacgaggaggctatgaaagaggtgctcagcgtgcaaaagcagatgaagttggggctggtgtcccccgagtccatggacaactactcacactttcatgagctgagagtgacagaagaagagataaatgtgttaaagcaagacttgcagaacgccctggaggagagcgaaagaaataaggagaaggtgcgggaactggaagagaagttagtggaacgagagaagggtaccgtgatcaagccgcccgtagaggagtacgaagaaatgaaaagctcttactgctctgtgatagaaaatatgaacaaggagaaagcttttctgttcgaaaaataccaggaagcccaagaggagatcatgaagttaaaagataccctgaaatctcaaatgacacaggaggcatctgacgaagctgaggacatgaaggaagctatgaacaggatgattgacgaactcaataagcaggtatctgagctgtctcagctatataaggaagcccaggccgaattggaggattatcgaaagagaaagtctttggaagacgtcactgcggagtacatccacaaagctgagcacgagaaactcatgcagctgactaacgtcagtagagcaaaggctgaggacgctctgtcggagatgaaatctcaatactcaaaagtgctgaatgagctcacacagctgaagcaattggttgacgcacaaaaagaaaattctgtatcgatcactgagcatctccaggtgataaccacccttcggacagctgccaaggaaatggaagagaaaattagcaatcttaaggagcacctggcgagcaaagaggtagaagtggccaaattggagaaacagctcctggaggaaaaagcagccatgactgacgcgatggtaccacgctcctcctacgagaagctgcagtccagccttgagagcgaagtttcggtcctcgcctccaagcttaaggaatccgtaaaggaaaaagaaaaggtccactccgaggtggtgcaaattcgcagtgaagtcagtcaggtgaaacgagagaaggaaaatatccaaactttgctaaagtctaaggagcaggaagttaatgagctgctacagaagttccagcaagcccaggaagagttggccgagatgaagcgctacgcagagtcgtccagtaagctggaggaagacaaagataagaagattaatgaaatgagtaaggaggttactaagttgaaggaggctctaaattctctgtcccagttaagctatagtacgagttccagcaagagacagagccagcagcttgaggccctccagcaacaggtcaaacagctgcagaaccagctcgctgaatgtaaaaaacagcaccaggaggttattagcgtgtatagaatgcatctactctatgccgtgcaggggcagatggatgaggatgttcaaaaagttttgaagcagattttgaccatgtgtaagaatcagtcacagaagaaatag

SEQ ID NO: 203100 - DNA, 2856 bp, synthetic construct
  misc_feature 1..2856: note = Description of Artificial Sequence: Synthetic coding sequence
  source 1..2856: mol_type = other DNA
atgaagagcctgaaggccaagttccggaagagcgacaccaacgagtggaataagaatgacgaccgtctgctccaggctgtggaaaacggcgacgcagaaaaggtcgcttccttgctcggtaaaaaaggcgcttccgccactaaacacgacagtgaaggcaaaactgcttttcatctggctgcagccaagggacatgtggagtgtttacgggtgatgattactcatggggtagacgtgaccgcgcaagataccactggccattctgcactccacctggcggctaaaaattctcaccacgagtgtatccgaaaactgcttcaatctaagtgtccagcggaatcggtagatagctccggcaaaaccgctttacactatgccgcagcacagggctgtctgcaggcagttcagatcctgtgtgaacacaagtctcccattaaccttaaggacctggatggaaacatcccccttctgctcgctgtgcagaatggtcatagcgagatttgtcacttccttctcgatcatggtgctgacgtcaactctagaaacaaaagtggccgaacagccctgatgctggcctgtgaaatcggttctagtaatgctgtggaggcactgatcaagaaaggcgccgatttaaatctggttgactctctgggatataatgcactgcactattcaaagctgtccgagaatgcaggaatacagtcacttctcctcagcaaaatctcacaagacgccgatctcaagaccccaactaaaccaaaacagcttagcgatgtttccagtccccgctccattacgtccacgcctctcagcgggaaggagtcagttttcttcgcagagcccccgttcaaagcagaaatcagctcgattcgcgagaataaggaccggttgtcagattcgactaccggtgcagatagtctcctggacatttcctctgaggctgatcagcaggatttgctgagcctgctgcaggccaaggtcgcatcgttgaccctacacaacaaagagctgcaggataaactccaggccaagtctcccaaagaggccgaggccgaccttagctttgactcataccacagtacccagacagatctaggaccctccctggggaagcctggcgaaacatccccacccgactccaagtcctctcccagtgtcctcatacactccctcggcaaaagcactaccgacaatgatgtccgaatacagcagctgcaggaaattctccaggacctccagaagaggctcgagtccagtgaagccgagcggaagcagctacaagtagagctccagagccggagagcagagcttgtgtgtttgaacaacacggagatttcggagaattcttccgacctgtcccagaagctcaaggaaactcaaagcaaatatgaagaggccatgaaggaagtgctctctgtgcaaaagcaaatgaagctcgggctggtctcaccagagtctatggacaactattcccactttcacgaattacgggtgactgaggaggaaataaacgtgctcaagcaggacctgcagaatgccctggaggagagtgagaggaataaagaaaaggtgcgggagctagaagaaaaacttgtcgagcgagagaagggtacagttataaagccacccgtggaagagtacgaagaaatgaaatccagttactgttccgtgatcgagaatatgaataaagaaaaggcctttctattcgaaaagtaccaggaagctcaggaggaaattatgaagctgaaagacacactgaaatcacagatgacccaagaggcctctgacgaggctgaggatatgaaggaggccatgaaccgcatgattgatgagctgaacaagcaggtcagtgagctgagccagctttacaaagaggcacaggccgaactggaagattacaggaaacgtaagagcctggaggatgtcacagctgaatacattcacaaggcagagcacgaaaagttgatgcagcttacaaacgtctctcgagctaaagcagaggatgctctatctgaaatgaaaagtcaatacagcaaagtgctgaatgaactcacccaacttaagcagctcgtggatgcccagaaggaaaactccgtctcaataacggagcatctgcaggtaatcacaacactcaggaccgctgccaaagagatggaggagaagattagcaaccttaaggagcatttggcatctaaagaagtagaggtagctaagctggaaaaacagttattagaagagaaggccgccatgacggatgcgatggtgccccgctctagttacgaaaagctgcaatcgagtctggaatctgaggtttcagtgctggcaagcaaactaaaggaatcagttaaggaaaaagaaaaagtccacagcgaggttgttcagattagatcagaggtgtctcaggtaaaacgtgagaaggagaacatccagaccctattaaagagtaaagagcaggaagtgaatgagctgctgcagaaattccagcaggcccaggaggaactcgccgagatgaaaaggtacgcagagagcagtagcaaattagaagaggataaggacaaaaaaattaatgagatgagcaaggaggtcaccaagttgaaggaggcacttaactcactgagtcagctgagttacagtaccagttcttccaagcgtcagagccagcagctggaagcgctgcaacagcaggtgaaacagctccagaaccaactggctgagtgtaagaaacaacaccaggaagtcatttctgtatatcgcatgcacctcctgtatgcagttcagggccaaatggacgaagacgtgcagaaagtgttgaagcagatcctgacaatgtgtaagaaccagtctcagaagaaatag

SEQ ID NO: 203101 - DNA, 1593 bp, synthetic construct
  misc_feature 1..1593: note = Description of Artificial Sequence: Synthetic coding sequence
  source 1..1593: mol_type = other DNA
atggacgacctgcagagccagaacctgagcatggacatgaccgacagtcccccagccctggctaataatcggctggagaatggaatggcccaactgattactaccgaggcctggaatattaacagcacggacctggtgaagaaggccctggtgacggtgcctgctccaagcatcctgaaccccccagctgagagtcagtcaggaatggccctgaaggtggctgctaccgtcctgcagccactctgtctaggtgagtctcccgtcgtgatgcccatccacatgcaggtggagggttcctccgcccccgagctaaacccaaacggaaatgcaacttatgtgatgactacccagggccccgtccaacttcccgtcgtgctggagcagcacgtctttcagcatctcaactcccccctggttcttccccaagaagctccctgttcttcttccactatccataataatctgtttcagggcgcagaagaccctgaagcccagccccaactcctggacctcaggatccccagccaaccacaagaacctactttgccatttgaggctgtgttgcagaaccttttccccagtcagggaaccctcgggcctccaccgtgtcagccacccccgggatacgcgccagtacctccacaaccgttcagcagtccactttctccattggtgcctcccgccacactattagtaccataccctgttattgtgccgctgccggtccccgtccccatcccaatccccatccctatgccacagagctctgagagcaagttctcatcatcatttccgaagcccccaagttccttcggcctccatccctttaaaggcacacagactcccctggaaaaagacgagctgaaacctttcgacatactgcagcctaaggagtatttccagctgtctaggcacacagtgatcaaaatgggttcggagaatgaagcactggatcttagcatgaagagtgtgccctggctgaaggctggggaggtctctccgcccattttccaggaggacgcagcactagatctttctgtcgccgcccacagaaaaagcgagcctccaccagaaactctgtatgattccggagcgagcgtcgactcgtccggtcatacggtcatggagaaactgccctcaggaatggagataagcttcgctccagccacatcccacgaggcaccagctatgatggatagccatatttcatcctccgatgcggccactgaaatgctgtcacagcccaaccacccatcaggagaggtgaaggcggagaataatatcgagatggttggagagtctcaggccgccaaagtgatcgtgtccgtagaggatgctgtgccgactatattttgcggcaagattaaaggtctctctggagtgagcactaagaacttttcattcaaacgcgaagacagtgtgctgcagggctacgacattaattcccagggagaggagtcaatgggcaatgcagagcctctgcggaagcccatcaaaaatcgctcaatcaagctgaagaaggtgaactcgcaagaaatccatatgctgcctattaagaaacagaggcttgccacgttcttcccgcggaagtag

SEQ ID NO: 203102 - DNA, 1593 bp, synthetic construct
  misc_feature 1..1593: note = Description of Artificial Sequence: Synthetic coding sequence
  source 1..1593: mol_type = other DNA
atggacgacctgcagagccagaacctgagcatggacatgaccgactcaccacccgcgttggctaataacaggttagagaatggcatggcacaactcatcacgaccgaagcctggaatataaatagtacagacctggtgaagaaggctctggtgacggtccccgcaccttccattctgaatccccctgccgagagtcagagcggcatggccctgaaggttgcagctacggtgctacagcccttgtgcttaggagagtctcctgtggtgatgcctatccacatgcaggtggagggtagctccgcccccgaattgaatcccaacggcaacgctacgtacgttatgactacacaaggaccggtccagctaccagtcgtcctggagcaacacgtgttccagcacctgaacagccccttagtgctgccgcaggaggccccctgcagcagttcaacaatccacaacaatctctttcagggtgctgaggatcctgaagcccagcctcaactgctggatttacgcatcccctcccagcctcaagaacccacactgcctttcgaggcagtcctgcaaaacctctttccttcacagggtaccctgggtccaccgccatgtcaaccccctcctggttacgcgcctgtgcctccccaaccatttagtagcccactgtcacccttagtccctccggctactctcttagttccctaccctgtcatcgttccactgcctgtgcctgtccccatccctattccaatcccgatgccacagtctagcgaaagtaagttcagctccagcttcccaaaaccgccttcctctttcgggctccacccctttaagggcacccagacgccactagagaaagatgagctgaagccctttgatattcttcagccaaaggagtacttccaactgagccggcacacagtgatcaagatgggaagcgagaatgaagcactagatctgtcaatgaagtccgtcccttggctaaaggcaggggaagtgagcccacctattttccaggaagacgccgcgctagacctgagtgttgccgcccaccggaagagtgaaccaccacccgagactctctacgatagtggcgcttccgttgattcctcgggccatacagtaatggaaaaactcccgtctggcatggaaatctcattcgcaccagccacctcacacgaagccccagctatgatggacagtcacatttcttcctctgacgcagctacagagatgctatcccagccaaatcacccatctggggaggtgaaagccgagaataacattgagatggtgggcgagtcccaggctgccaaagtgatagtttccgtggaggatgcggtaccaactatattctgcggtaaaataaagggcttgtccggcgtgagcaccaagaatttctcctttaagcgagaagatagcgtcctgcagggatatgacatcaactcccaaggcgaagagagcatggggaacgcagaaccactgcgaaagcccatcaagaatagaagtatcaaactcaaaaaggttaactctcaggaaatacacatgctccccattaaaaagcagaggctcgccaccttcttcccccggaagtag
